United States Patent Application Publication US 2005/0228172 A9 - sequence listing, part 178

SEQ ID NO: 797870 - DNA, 485 bp, Homo sapiens
ccggctttccctggcccctttctaccttgtccaggagcctcttaccccctgaggcagcgttgaggctgctcccccacgtccacagtacatgtgcatttgtagcctggagctgacaaggcccaatatgatctggtcctgttctaacgtcatcttgtctgcccgtctcagccttcatctccactgtgcatgttgggagaacctccagtctctcataaaagcccactctctcactatttcaatattcttctgttttagcccattcagctgccatgtggtacctggcagtttcytccagtccagttcccagtggagtgtctgtgctaaagtttctgaggcccgccaagcccatgaaggcccgccacagctgccatctccctcagagttcacctacatcgtgtgatgtcaccttcactgagccacagtgggcaccaagggctcaatgacatcggtgggcccctcttccctgttccgtgtggccagaatgt

SEQ ID NO: 797871 - DNA, 540 bp, Homo sapiens
atggttatgcagtatatatttatatcaagtaacaggttagaatggattgtatatattatttctacacacacacatgatttcatagtttagtgaattatttggcaacacttgagctactacttcagttcaaattctgaagagtgttttatggtgattcctttaaataattgccaaacatttgctttttttctaaagaaactacaataaagataaataagtctaagtgcaattatatcaatttatgagaattaaaaagttaaagtcctattgtttaacagtcaaactgtggagtgatgagagcttcatggtaayattatcattcattttataaattcaaacatattctggttagattataatgacctcctctttaacctctagatactgcatgcatataaagtagaaaactcagctgttacacagtaagcctctaagagcagtttattagaattcaaatattaaggctgaggactgacaattatgtggaagaacagcctaaagatgatgtgtaagagcataataaacataaatttaaagttg

SEQ ID NO: 797872 - DNA, 540 bp, Homo sapiens
atggttatgcagtatatatttatatcaagtaacaggttagaatggattgtatatattatttctacacacacacatgatttcatagtttagtgaattatttggcaacacttgagctactacttcagttcaaattctgaagagtgttttatggtgattcctttaaataattgccaaacatttgctttttttctaaagaaactacaataaagataaataagtctaagtgcaattatatcaatttatgagaattaaaaagttaaagtcctattgtttaacagtcaaactgtggagtgatgagagcttcatggtaatattatcattcattttataaattcaaacatattctggttagattataatgacctcctctttaacctctaratactgcatgcatataaagtagaaaactcagctgttacacagtaagcctctaagagcagtttattagaattcaaatattaaggctgaggactgacaattatgtggaagaacagcctaaagatgatgtgtaagagcataataaacataaatttaaagttg

SEQ ID NO: 797873 - DNA, 630 bp, Homo sapiens
tctactcactaaatacagcagtttgattttgcatcataacctaggctttattttataagttctaatttataagtagcatattacttgggattttaattgagtaataaacacattattttaaatgtgctcagatgcagccagcatttcacactcatctgagtttgcaggtgttttactaaactcaaatggcctttcttaaattcaatagaaacatgctcagaattataatacaacaataatttaatagttaaatataaattcatcagtaacagcacaaataaataggtttcctccttagaagaaaattaatttttatgaaagtcagaagcttggttttacttttctttttaatgtggaataaactgaaatgtgtcaaaatctcaccttcatttttttctcaataaattaaacaccratcaaaatcagagtttacagcatatttgtttacattgctttaataatttttaaatgccagtactatcttccaatgtttaggccagtcagtcaatatgaagtaataatatagctgtgattactggtaggtacattccaacagaaaaaaacctatgtttttgttttataggtttatatgaaagaaatatttgcaatgctgtcaccttgcagttagga

SEQ ID NO: 797874 - DNA, 642 bp, Homo sapiens
tttcataatgtgcttttattgtcaggaagattaatggacatcaggtgtttataacactcttttctcttagttgtgcttaaaattttctttataaaagatattaaaagaaagctaacaaaatattatttatatagagagagcatattaaattgttcttagcaccatctacactaacgagtctttggacagataactatcagcctgatttgaagttgaaatgtattgattattaatattgtggaaaagtctgtgttttcatagcttcaaaccattttagcacaagttggaaggatttacaacattgtctccatctcttaccatctcatctgatcaaactttgttcactyctttctcacccagatatctcatcctgttactttaatgctcaaatttcagaaagagcagagcaaacctctcaaagtttgaacccataactattctaactcacagctctattgacggctgggttaactctggaaaaatttgtcactcatcttctttaatcttgtcatccatctacaaccaacactagcaacgttctcccattttaatggtctctcatacatttccagaactgataatatttctaggaaatgtgcagcaatgcctctcctaataaagcccccagctttcatttttata

SEQ ID NO: 797875 - DNA, 636 bp, Homo sapiens
ggagatatggtctttacagaggtaattaagatagaatgaggttattatggtgttctaatccaatatgactactgtccttataaaaaaaggaaatttgaatacagatatgtatagagggaagacaatgtgaaggcaggaagaagacagacaatgacaagtcaaaaagaaaggcctggaactggtccttccctcataaccctcagaaggaaccaaccctgccaaaaccttgatctcaaagttctagcctcccattctgtgaaagaatacatttcagttttttaatccacccacagtctatggtacactttgttatggcagcccttgcaaatgaatatgccayacaagtcatccgtttaaagtgtctaattcagtagttttaggatattcacaaataggtgcaaccatcaccattagtcaattttagaacgttttcatcactcaagagaaaactctgtgcctttagctatcaacatcctatcaccccatcctccccagcactaatctagtttattttctttctagatttgcctattctggatgtttcatataaatggaatcatataacgtgtggtgtattcttggctttcttcattagcgtgattttaagattcctcattgttgtcctatgtattgttc

SEQ ID NO: 797876 - DNA, 636 bp, Homo sapiens
ggagatatggtctttacagaggtaattaagatagaatgaggttattatggtgttctaatccaatatgactactgtccttataaaaaaaggaaatttgaatacagatatgtatagagggaagacaatgtgaaggcaggaagaagacagacaatgacaagtcaaaaagaaaggcctggaactggtccttccctcataaccctcagaaggaaccaaccctgccaaaaccttgatctcaaagttctagcctcccattctgtgaaagaatacatttcagttttttaatccacccacagtctatggtacactttgttatggcagcccttgcaaatgaatatgccatacaagtcatccgtttaaagtgtctaattcagtagttttaggatattcacaaataggtgcaaccatcaccattagtcaattttagaacgttttcatcactcaagagaaaactctgtgmctttagctatcaacatcctatcaccccatcctccccagcactaatctagtttattttctttctagatttgcctattctggatgtttcatataaatggaatcatataacgtgtggtgtattcttggctttcttcattagcgtgattttaagattcctcattgttgtcctatgtattgttc

SEQ ID NO: 797877 - DNA, 623 bp, Homo sapiens
gggtttgtgaggaaaacagagagtgagctcaccatggccaggacacagcgaatcttctgtttgtttcatcactttaattatatgccacaggcaggaaatcattccacgttttaaaaatggttgtaattttttaaatcttctaatgggaaatttaaaaagtttgtcagctagatgataaattcatcttctgtttaaaaataaattcaactcatctattccaaattttaagagataaaaaccaaaactgtggttgacattaagggggaatactttaaaaaccattatgtagagttttctctatctgtaaacactctctggtttacaaaaaattttgcctgtgagtggtctaacccagtaaccactagctacacgtagctactgagaacttgaaatatgactgstgtgactgaggagttaaattttcaattgtatttaatgttaattttaaaactgaagcagtgtaattttctgttaaacccaactccattgttttggtaggactacattccactctgaccgttccattgtttaagatactgttgtattaatgccaatgtctatgttgtttctggtatcacattagtaatttttaaaagtctttcatgttgaaatgacaacatttg

SEQ ID NO: 797878 - DNA, 579 bp, Homo sapiens
actggccagacccagagcttatatgccacagggaaagggtgtacgtgctctacagaggcaattaaaggcatcctccagaacaggtgggaatgctatgtgcgtcactgcctataatttgtgtggtaagatcaaggctgctttgttcttacactaaaaacagtaaataaaatcagaatcaggaggcattcacgagactggggctaatgagaaatcaacatggctttgctgggagtggtggctcaggcctataatcccagcactttgggaagcagaggcgggatgatcactggagtccaggagttctgggcaacatagtgtgccctcatctctacaaaaaatcaacaaaattaaytgcatgtggtggcacaggcctgcagtcccacctactcagaaggcagaggcaggaggatcagttgagtctgggaggttgaggctgcagtgagccatactgcaccactgcactctagcctgggcaacagagcaagaccctatcattaaaaaaaaagtaaaataaaaaataaattacattaaaacaacaaggtttgccttcaagaaaaaaaaaacaacatggtgcattag

SEQ ID NO: 797879 - DNA, 610 bp, Homo sapiens
tttctcttgttaacctgtcttttgttataggagtgtctgccatggacacccttatgatggggaggagtgggatcacacccttttgcccctacaatataaagcaagcaagaagaaagcaacattctcctctgcactagtaaaggtttctcagtgtgaggtcaaactgagtttagagaggagaggttttaccagtttttatattacaatgaactagactttgaaacacaccctcctctcccaaatacagtatggcttgtttattacctggtagcaacattacagaytgttagaatggtatgtggttttatatatgggaaggaaagaagttgaaataaagggtttaaaaaaaaaaacagctctaagaaacttgcttctacttggactgaaaaaagtgccacttgtgcagtgaactggttacagagtaataccaatataggaaggacacatcctagaagtattcggaatgctttttcttcagttactatctagataagtcctgctccacaatgagataccacttcacccccaataggatggctattattaaaaaacaaaacaaaacagaaaataacaagtgttaacaaagatggcacgaaactgaaattattgt

SEQ ID NO: 797880 - DNA, 587 bp, Homo sapiens
gttagatttctcttcactgttacatgtgcagctccaccataaacaataaaggtcattctaggcagctgtccaaagtaatgcagcaggcaaacaagaaagtcacagaactggcagcatcttgccacatacagctcccttcagtagccctttctgaggttagtaacaacataggtaatactgactataaaagctcccttcttttgcatttaatatttataacttattcatacccaggtttaaaaaaaaaaaaagtttttgttttgcctaaaaatggatacaacataagttttacagaacwgaaaaaggaaaagaaaatgcttttctagccaagaagtgacttctgctattggcaggtagataaatttgtttataaaacaaggcttttgtaacaaaagaaccagaaggaaaatctcccatttttatctcattgtccttctgagatttgtcctctgctctttcgccatgttctatcactgtaaaaacttccctaataagcagctttggggagaaagcgagagatcctagataaggaacagtgtcagaatggctggatttcatcatttcctcaattactaatgatcctcatt

SEQ ID NO: 797881 - DNA, 603 bp, Homo sapiens
acgcagtctccctggaagaagacccgtggggtggggggatccaagccagagttgggggagaaagagccatgtgtgagaaacaagatgaaaaaccaggctggacactggacaagggatcaggaaacagcaatgagcccttggtttgaggagagcagggaggaaggagagggtggtgagatgggaagcagtgtcgtgaagtcaatgcaggagaattttgaacagagatgaggtagcaaatggagacagwtgctcccaaaatatagaataagaaatgagagaaattcctaagaggcaggtgatcaatgcacatttcataccaccatattccaaagaaaagaaacttcgaatgccaaaaaggtcaagtgaccccctctatatccattagacaggtgttaggcctaagatacattatgtgaaaaaactaagctccaagacgatatagagaaaatcaagtaaaatacatcaaactatttaaatgtttatcactaggggagattttcatattctgcatcataacgtttggatgaaacatatgatctaaaacgtttgattttttttctttacaataagcagttgttacttttaagcagaaaaagagaagga

SEQ ID NO: 797882 - DNA, 560 bp, Homo sapiens
tcttcaaccacattcaacttttattatatccaattttctttccaaaaaaaaaaaatgtgcttaactagaggcagttactacatttttattactctttgggcttcttttcatgagcaattgtacaaatctttcccaaagtacttcgcccctctaagaggagtccttatattctaggcagacacgcttagcgaaggaagcatgtggaaagaaaggccaagcgctaaggttaagacrtggtgcaggagggcagagaaggagagcttatagagcaggttcaggatgcagcttcacctgttcttcattattgctaaaaactgtgtattcattgtaaaaataagtataggcccttctaagatgttcttctaaaagtgcaaacatttaatcttgtgccacctcctgtaatgtccttagtagggaacaacatcatctcttgtggtattcctgccaaaaatgaataacctaaattgaatcaagaggagacatcagacaaacccaaactggcgttcatcctacaaaacagccagttagtactcttcaaaagcatcagtcttaaaaaaaca

SEQ ID NO: 797883 - DNA, 560 bp, Homo sapiens
tcttcaaccacattcaacttttattatatccaattttctttccaaaaaaaaaaaatgtgcttaactagaggcagttactacatttttattactctttgggcttcttttcatgagcaattgtacaaatctttcccaaagtacttcgcccctctaagaggagtccttatattctaggcagacacgcttagcgaaggaagcatgtggaaagaaaggccaagcgctaaggttaagacgtggtgcaggagggcagagaaggagagcttatagagcaggttcaggatgcagcttcacctgttcttcattattgctaaaaactgtgtattcattgtaaaaataagtatakgcccttctaagatgttcttctaaaagtgcaaacatttaatcttgtgccacctcctgtaatgtccttagtagggaacaacatcatctcttgtggtattcctgccaaaaatgaataacctaaattgaatcaagaggagacatcagacaaacccaaactggcgttcatcctacaaaacagccagttagtactcttcaaaagcatcagtcttaaaaaaaca

SEQ ID NO: 797884 - DNA, 601 bp, Homo sapiens
gattcctggaccctccctctgatctactgaatcctaactcaggatgctggagcctagaataactctgctaacaatccatctcagtaaacctcatacaagctacatggagaaccccttccccagatgatggcccaagccctgggccaaacattcattgaataaacattgactatacacycccatgtgctagaaccagtgctgggaaatgaataagacaaaccacccccattaccatgggcaataagagaatcatgaatacatctatttctggaatatcttatatttccaaggtcaccaaagtatctaagaacaactattctgctaattatagcttaattgagaaaaggaggaactgggagcttcacaggctcatgtttgaacattgaagaggtctgggtaaatggttctggagggctattctgagcttccttaaaaagatgcccctactgcaaagagttctgtctctttttgtcttctgtaaaagaaacaaaacaaagaaatatcaaagaaatacaattgggaaaataagactgttttaaaaagtcatttgcagaaattgacaaaaacaaaagaaattctgtgactgagtctgcccttgtat

SEQ ID NO: 797885 - DNA, 601 bp, Homo sapiens
gattcctggaccctccctctgatctactgaatcctaactcaggatgctggagcctagaataactctgctaacaatccatctcagtaaacctcatacaagctacatggagaaccccttccccagatgatggcccaagccctgggccaaacattcattgaataaacattgactatacactcccatgtgctagaaccagtgctgggaaatgaataagacaaaccacccccattaccatgggcaataagagaatcatgaatacatctatttctggaatatcttatatttccaaggtcaccaaagtatctaagaacaactattctgctaattatrgcttaattgagaaaaggaggaactgggagcttcacaggctcatgtttgaacattgaagaggtctgggtaaatggttctggagggctattctgagcttccttaaaaagatgcccctactgcaaagagttctgtctctttttgtcttctgtaaaagaaacaaaacaaagaaatatcaaagaaatacaattgggaaaataagactgttttaaaaagtcatttgcagaaattgacaaaaacaaaagaaattctgtgactgagtctgcccttgtat

SEQ ID NO: 797886 - DNA, 556 bp, Homo sapiens
agcctcatgagctgtttcttcttccagtagtggatcttggctttctccttcctcttctcctccagggtggctgtcactgcctggtacttccacctaacctcttgagcctgtcgccccagaagggcaaactttcttgtaggcttcagacgcacgaccttgagggcagcargaaccaccatccgctttttcttatcgtagggcggtgggatgccgtcaaacaccttgaggcagtccagggaggcatggcctcgcttggtcttgtggcgcacatgtatgcctcgcactgtcggccagaagatgcggctgggggcccggaagtggtaggcgcttcgaaaagggttggtgttcatccgcttgccgaggaaagccagattcttcaacttgtttctgtagaaattgccagagatgttgatgccctcgcagcgtacgactaccaccttccggcccagcagtaactacttagccacgatggccgccagcggcccaggagatggccttgaccatcgagcaccaggacctgcacctctgccatcttccgcagccgcctgggagaggc

SEQ ID NO: 797887 - DNA, 529 bp, Homo sapiens
aatatggcagaagtaatggaatgtcagttctaagcatatgttctccaaagactgtagcttccatctcatgtgctttctcaccctctctgaacgcttgccctgtgggaagccatgctataagacagacatatgtagaggctcatgccatgagaaactgaggcccaacaacaaccacatgcatgaacttggaagtggatctccyccccaaactgagtcaagccttcagatgagatctccacccctgccgatagcttgacagcaacctcatgagacatcttgagcctgaggctcccagctaagccatgcccagattcctgagccacagaaactgtgagagaagaaatgtttgttgtttaagtcactaagttttagagtaacttgttaagcaagaatacgtaacacacaccagttgatgctgaggctgctggtccaaggaccacactttgaaaaccttggctgtaatggaacagctgcttcttcagtcttctgacttgatggggcagggaaatactgagttttaatacttctg

SEQ ID NO: 797888 - DNA, 643 bp, Homo sapiens
cattgctgacaggggcagctcttcgccttctcagttccaggggattcccaccaagctggggtagttccaatcccattctaactccatgtggtctaggctgagagcctcagggtcagccccacacccaagctttctaggtgttcttttgtccagggatcacagagtccagtgaggtccagaatcactagatctgtgaccacaaaggagtaggcatggagatgaaatggtgtgttgcacttgaacgggcatctttgcaaagaggatcataaaatatggaaacgcgccaaaaaaaatcattgtgcattgggcttccacaatcacttctgtgtgtgtgcatgtgtgcataaatgtgactgagtgactgagatggccaaagtgacttgcagggacatgaaatkgagccaaagcccccagtctgttgaaacatagtcatctgtttgaagttaagtgtctacttacttaggaaataagaacacagaagaaaacagacaaagagtaaactctggcatattgaactctgggagcttctctgccattctctctttgaatattgcctcttcctcattctctctttctactcaaaatgtgatgtatggaccaggtgtggcttcaccacctggaagcttgttagaaatgcaaaata

SEQ ID NO: 797889 - DNA, 633 bp, Homo sapiens
aaaagagctagcttaacatttatatggtgaattaccatggaaataatcctgttaaaatcaagaaggaaagttgtccaccatctctactttcgtccagcaatattctggtggttaatgcaattagacaaaagaataaatacagtttttagcagctactaagctctctgccagcaccagtgatttctctgatagatccctctgtggaaccagcacaatgccaactaaactcttaaatgaccagggcttcctccagacccctaccctctgtccagccttgtcatagtcttacaatcagtatgaccatgaaatgaagaatgttcatactcactccctttccacactgcatcccatgcaaagttatttgataaaaattccgcaacagagaaaaaaggaccctgcccataaattcaagcccttttgtcgggtgacaccttttgtttgtggaagagagtactggcacagtgcaaagacaaaagcaggaggtagatttyaaaaaataaataaactagcgaagtttggtcacaaatgtgaatggagacttaattgatttgtacgtgaaaaacgccacagtgcctgaatcaaggctccatacaaagtcatcattattattattcaccactgtaaaagcatggc

SEQ ID NO: 797890 - DNA, 664 bp, Homo sapiens
aaacaacttcagcaaagtttaaggatgcaacatcaacgtaggaaatgagtagcattcctatacactaccaacatccaagccaagatctgaatcaggaccacaatcctgttcacaattgccacaaaaagaataaaatgcctaggaatacagctaccagggggaggggggtgaaagatctctacaatgataattacaaaccactgctcaaagaaatcagagatgacacaaacaaatggaaaaacattccatgctcatggataggaagaatcaatatcattaaaatgtccatattgcccagagcaatttacagattcaatgctattcctatcaaactaccaatgacattcttcacaggactagaaaaatttattttaaratttatatggaaacaaaaaagagcccaaatagccaagacaatcctcagccaaaagaacaaagctggaggcatcttgctacccaacttcaaactatactacagggctatagtaaccaaccaaaacaatatggtactggtagaagaacagacacatagaccaatggaaccgaatagggagcccagaaataatgctgcacacctacaaccatccgatcctcaacaaagctaacaaaaacaagcaataggaaaaggactccctattcaataaatggttctgagataactggc

SEQ ID NO: 797891 - DNA, 397 bp, Homo sapiens
ttgaagaggttctgggatccctctggaattgtgtaatattttagtaatatttatcatttatctcctgtagttaggaagatagaaagggtcagaaaagtacaacatataaattagtttctgtggcctttgataaaaaaaactgtttgcattacatcattttagtggctcttgaattgtgattgaggacattattgtctctccaagacygaccacatctccttagggagtaaagccattatatggaaaaccttgtatcccttgcccttcccttctaaatttaaatcccaccaagaggaaaaacatcagttttaccgtctatctgcaaatgcatgaccaataccataataatgacaatgaccaagtcctcattgcacaagattgctctagtaattcagag

SEQ ID NO: 797892 - DNA, 621 bp, Homo sapiens
tcaaacccaaatgaaagaagggtccagtggtcccactcctacctcacccagctggtgtccaatcatacacagtaaaagcttagtaatttcccaaatgcgcagcaacggaacacaaatttcctcccaaaataaatgcctctgagatagtaggtcctgatcattggaaactttggttgtcagtgtgggatatgcgtgtttgcggcctcttgtggattgagtgcatgaacagccctaattaatggcctccttaaattcaggcttttcaycctgtaactgtgcaggccccacccactctgactctgggccatgtgacctcctttgaccaatgggacagtagcaaatctgacacattaaaaagctcttcaaaatgtgtgagtcttcctgtttcctccattgtttctctgtgactgtcacgagaacccagggaagctagcctgccaaagggatgtgtgggcgtgagacatgggcatgtgacaggtccatggaggagatcaaagcaatcctagctgtggccctcaatgaagcagcctttgatatggacataaggcagggaaatactacgtagaaaagggtggggtccctggcaaacctggatcctcagccctaaatgagaacttcaca

SEQ ID NO: 797893 - DNA, 547 bp, Homo sapiens
taatatacaatttcgtttttgctcaagaattttattcttagggaagtttttgaggtgtcatgagaaaggagggggaaggaagtagagaatgatctctatgtggtagtggatgcaaataattagctacatctaaaatttttataactatgattgattcatgtacaacttaggtattaaaaaataaaaataaaaaatagaccaggcatggtggttcatgcctgtaaacccagcattttcgggagccgaggcaggagcatcacttgrgcccaggcacttgaaaccagcctgagcaacacagtgagaccccatctctccaaaaaaaaaaatagccaggcgtggtggcatacctgtggtcccagctattggggagcctgaggcaggagtatcgcttgaacccagaaggtcaaggctgcagtgaggtatgttcatgccactgcacttcagcctgggtgataagagcaagatgctgtctcaaaaataaaaattaaaaatatgtgtgtgtgtgtgtgtgtgtgtgtgtgtgtgtgtgtgtgtgtgtatatatact

SEQ ID NO: 797894 - DNA, 552 bp, Homo sapiens
acccctatcacacctcgcaccatttttaaaaatacatataaggactgaagtcaagagcactctaacacttactcacactttagcatacccaaggcaggggccagggccctgaggagtgccagcccttgggccaaccactaagtactttgaggcaagagcaggcccaggggggttgagacacatcctccattcaacactccagccccaggggtgtcatcctgctccaggccgccagcccttccracggaactgtctaaactgtctttgactaaggcctgggacagccttcgtcgtaggtaatctaataaagctattaagcaataatgatagagaccatgcttattagaagatgactgcacactcaggaggatgatattagcagcaaggcccacccagaggaccttcaatctcctaggaaggagattaattcatgataaatacactcactggggccttcattgctttcgaaatttaaaaaataatattctttattttggagaaagatgataagagagggagagggaagagggcttttgaacaataatatcagat

SEQ ID NO: 797895 - DNA, 552 bp, Homo sapiens
acccctatcacacctcgcaccatttttaaaaatacatataaggactgaagtcaagagcactctaacacttactcacactttagcatacccaaggcaggggccagggccctgaggagtgccagcccttgggccaaccactaagtactttgaggcaagagcaggcccaggggggttgagacacatcctccattcaacactccagccccaggggtgtcatcctgctccaggccgccagcccttccaayggaactgtctaaactgtctttgactaaggcctgggacagccttcgtcgtaggtaatctaataaagctattaagcaataatgatagagaccatgcttattagaagatgactgcacactcaggaggatgatattagcagcaaggcccacccagaggaccttcaatctcctaggaaggagattaattcatgataaatacactcactggggccttcattgctttcgaaatttaaaaaataatattctttattttggagaaagatgataagagagggagagggaagagggcttttgaacaataatatcagat

SEQ ID NO: 797896 - DNA, 552 bp, Homo sapiens
acccctatcacacctcgcaccatttttaaaaatacatataaggactgaagtcaagagcactctaacacttactcacactttagcatacccaaggcaggggccagggccctgaggagtgccagcccttgggccaaccactaagtactttgaggcaagagcaggcccaggggggttgagacacatcctccattcaacactccagccccaggggtgtcatcctgctccaggccgccagcccttccaacggaactgtctaaactgtctttgactaaggcctgggacagccttcgtcgtaggtaatctaataaagctattaagcaataatgatagagaccatgcttattagaagatractgcacactcaggaggatgatattagcagcaaggcccacccagaggaccttcaatctcctaggaaggagattaattcatgataaatacactcactggggccttcattgctttcgaaatttaaaaaataatattctttattttggagaaagatgataagagagggagagggaagagggcttttgaacaataatatcagat

SEQ ID NO: 797897 - DNA, 590 bp, Homo sapiens; identical to SEQ ID NO: 743580

SEQ ID NO: 797898 - DNA, 560 bp, Homo sapiens
caatgcaatagttaattttagatgtgaatttgatcataagtgtgaatttagttgaggaaatataaagtgatgtactagtataatccatcaaaaaatctcagctgcattcttacaccagcacagcagtatcctggcaaagataatcatgtttctgaagaaccctattgactcttgggaaagcctggtttaattacaagccatagtgtattcatacacatttattattgatatagcacttasccttctggcttctccacactttccctgacagaaacccattacctcccctgctatgtttacttttctgatggaagttaactttacaggatgtcatgagaaggcaatggcacattgaaaatcctgcccatggcttggaactttatgtcgactatttctctgagaaatgagaacccatatatgattaatgaacaaaggtatgcgtctttctgtctgtgctaaaacgccttaatatatttgtgtgcctcttatggaattttcatctctaaattatagatatttctgtatttgacttttctagtagaatgtaccctcctgtattt

SEQ ID NO: 797899 - DNA, 581 bp, Homo sapiens
acgatgttgaggtttgggatatggatcccgttaccaagttagtgagcatagcaccagatagtttttcaatccatttccaccctctatgactaggccttaatctgttagtaagcctgtggccctgcattatgaaccttaccagtgcttctcagtcccccacacacatcccytcctcacctttagctgtgacaggatggctagaaggggctggagttagggacttctcttcccctatgtggaagtctggagctggatgtggttggatgtttttctttccccagcaagattaggctcagcagttgaggatctggtataatagtttatcctaaaggcaggccttgttaagaagaacagaatgctctggcacatcccaaaatggttgctttccctctgcctttgccagaagcatgagaggatttttctctgatacttactgtgagaacctgatcgagctcctggaggcaaaactcacaacagtgtaggggcctttctatgactcggtctccctggagtttttaactctcagacttggccaccctgaacctccagcaattcatgaattacagttcagttttcctacc

SEQ ID NO: 797900 - DNA, 566 bp, Homo sapiens
atcagaaaaccaacttcaggcagagctccggcaagtacctccctagaggggaagggcttactaaaggagatttaatcttgaaaaggccaaaatgagaagctctaaccttaagcttgctaggttttctgggactcgagctggctatatattatggaccattctagccacacacatacacacacacacacacacacaaacagacacacttttttgagacagagtcttgctctgttgcccacgctggagtgcagtggtgtgatcttggctcactgcaacctccacttcccaggttcgagcaattctcctgtctcagcctcctgagtagctgcgattacaggtgtgcgccaccatacccrgctaatttttgtggttttagtagagatgaggtttcaccatgttggccaggctggtctcaaactcctgatctcaagtgatccacctgccttggcctcccaaactgctgggattacaggtatgagccactgtgcccagcctatacatacatatatatacttttttttctttttctttttgacgtagtgtcttgctctgttgcccaggatgga

SEQ ID NO: 797901 - DNA, 631 bp, Homo sapiens
ctgatgtgttgccgtcagtcatgattctggcttttatcttaaaatgctacatataatagaaataactaaattttctctccagttgagaacttccattggattttaaccaaaggatattctaagtttttttcatccacggtgattgtttaaagttcttctctaaaaccctttacaggccaggcatgctgctggaggctgtgcagggcacggtgctgggcatggtgcagggcatggtggctcatgcgtgtaaaaatcccagcactttgcaaggccgaggtgggtgaattgcttgaactcagaagttgaaagcatcctgggcaacatggtaaaaccctgtctctacaaaaatacaaaaattagccagcatgatgrtgcatgcctatggtcccagctactttggaggctgaggtaggaggatggcttgagtttaccagggagagattgcggtgagccaagatcatgccactgcactctatcctgagtgacagagccagacaatgtctcaaaaaaaaaaaaagcctttacaatcagctatcatctaaattacttttaatggaaaggactctgacaagttctcttaaatatggtctcagataactttggggatcattctgttggactaggaaaatct

SEQ ID NO: 797902 - DNA, 498 bp, Homo sapiens
cccaaaatgctggaattacaggtgagagccaccgcgcctgacctgtgtgccttcttttgagaaatgtctgttcagattttttgcccatttaaataattggattattagtttttttttcttatagagttgtttgaactccttatatattctggttattaatcccttgtcagatatatagtttgcaaatattttcttccattctgtggattgtcttttcactttgtccattgttttctwtactatgcagaaacttttgaacttcatgtgataccatttgttcatttctgctttggttgactgggcttttggggtattactcaagaaatctttgcccagaccaattttctggagagtttccctaatgttttctttcactagtttcttgtccttgatttaagtctttaacccatttggatttgatttttgtatatagcgcaagagagggttctagtttaattattctgccaatgactttgggaggctgaggtgggcagatca

SEQ ID NO: 797903 - DNA, 550 bp, Homo sapiens
caggtaaggcagggtagggcacatctgggtaaccttcattagctatttccacctgcagactcttgctgctttccccttgcccctccctccctgtctctctgcatgcattgagcacctactaagtgccaggttgccatgctggtgaggctgctgagatgggtgtgtcacgttcctgccttgcgggctctgtgggaggcagcaggcctagggacaaaggagagcagaaaagcrttacaggtgtggaggcagagccagcacagggcatgaacgggggcagggggcgtgaggagggaatggggtaggggtgagggtgggaggttgggaaggaggagtggagcatttcaggctcagagaagagtgtgaataaatatagtcacggagggtgggagcagcatgcttatcttgagatgactaaagcatggggtctggggagggttcacccccaggcaagctggcagggatcaagaagtcccttttgtacatgggagcatggggtgagggtgggcatatgtaatagctaaaagcaaggacagaccagacggcctgggtt

SEQ ID NO: 797904 - DNA, 550 bp, Homo sapiens
caggtaaggcagggtagggcacatctgggtaaccttcattagctatttccacctgcagactcttgctgctttccccttgcccctccctccctgtctctctgcatgcattgagcacctactaagtgccaggttgccatgctggtgaggctgctgagatgggtgtgtcacgttcctgccttgcgggctctgtgggaggcagcaggcctagggacaaaggagagcagaaaagcgttacaggtgtggaggcagagccagcacagggcatgaacgggggcagggggcgtgaggagggaatggggtaggggtgagggtgggaggttgggaaggaggagtggagcatttcaggctcagagaagagtgtgaataaakatagtcacggagggtgggagcagcatgcttatcttgagatgactaaagcatggggtctggggagggttcacccccaggcaagctggcagggatcaagaagtcccttttgtacatgggagcatggggtgagggtgggcatatgtaatagctaaaagcaaggacagaccagacggcctgggtt

SEQ ID NO: 797905 - DNA, 550 bp, Homo sapiens
caggtaaggcagggtagggcacatctgggtaaccttcattagctatttccacctgcagactcttgctgctttccccttgcccctccctccctgtctctctgcatgcattgagcacctactaagtgccaggttgccatgctggtgaggctgctgagatgggtgtgtcacgttcctgccttgcgggctctgtgggaggcagcaggcctagggacaaaggagagcagaaaagcgttacaggtgtggaggcagagccagcacagggcatgaacgggggcagggggcgtgaggagggaatggggtaggggtgagggtgggaggttgggaaggaggagtggagcatttcaggctcagagaagagtgtgaataaatatagtcayggagggtgggagcagcatgcttatcttgagatgactaaagcatggggtctggggagggttcacccccaggcaagctggcagggatcaagaagtcccttttgtacatgggagcatggggtgagggtgggcatatgtaatagctaaaagcaaggacagaccagacggcctgggtt

SEQ ID NO: 797906 - DNA, 622 bp, Homo sapiens
aaaagcaataatgttaactagatttagtaggaacaaaaaatctgagtattaagagatcaagaatgtataaatcctgtaatccacagaaatcttggggaagaatattagatttaatgtggagtgggagtgggggcagcatctcagcaattttgtcagaactttaaagaacagaagcgatgccaactgacatttgagttgcatatggaatttgcagtgaccatttgcagaagcactaggaaaagtagatgtggccttctggggaaagcaccaagcaagcacctgagttagagccttwtccactttatctacattttaaaaatgttatccatccacccattcaaccatctctctgttcacccatccattcatccacctacccacccaccctttcatcacttctatctctttctctcattgttctttagagcccaaactgataaagtgaaaaagtacaggaaatcctctcctattccttagactttccactgaaaaatgtgaaactttagacctttttggactcttcttattttattggagtttcttgctagttacctgcactgccaacaggatcatcctaaccaaatgtgtatagcttcttacttcacagtttgtgacctagata

SEQ ID NO: 797907 - DNA, 633 bp, Homo sapiens
ctcccctttataagaccatcaaatctcataagacttattcactatcacaagaaaagcatggaaaagacctgcccttatgattcagctacatcctactgggtccctctgatgacacgtgggaattgtgggagctataattcaagatgaaatttgggtggtgacacagccaaacaatattagtaaaagcctgggctggaatgcaggtctgcctggctccaaaactgaaattttaaaactattttatgatgcctccattgtatgtcaggtaccttttckgtgtgtcagagtatcatgatgtgccctttgtgcatcagatatttcagggtctggtttccccaagattgtacacctaattaggggaagagccaagtttcaacaaaaccttgctgtctctcaaattagagtattgtatgctggctccatcctcagggcacaccttgggtatacactctttgtggtctaaggttctccagggcacacactagcagagccctgggtagcatgggttaaaaaagaagccattaccacatccattcaccatgaatcctgttttttttgttttttttttttttttaccctgagtaactgagaacaaagctcacttcaccaaaatgttctgatgccaggggtccc

SEQ ID NO: 797908 - DNA, 614 bp, Homo sapiens
gagtccacttgcttaatcttagaccaaatttgtctgaagttaattcattattttagcactagaatgtaatgttattcagaacttcacagaagtaggatcatcccttcgtaggatggtattcaaggggcacaagtctgtttgctaagataatagaggcagaaaaaatgtatattktgtcaaaagcaagaataggacacaagtcttgtggtgcctggtccctgttccagaagcattgtccatgtttctgttctgaagcagaaaagctagtctcatcaccaacaaaagaaattcattagacagatgagagagtctgatgcaaagaatgcacctaggcatattaaaatgcaccttttcatcagaaggtgcatgcacgggtcagggaaacccagtgtgtctaagttcttgccaaatattgagaacttttttttctgttagtaatttaatctttatttagcaaatatttcacttacagttttaaatggagcattccattaaagaaaaaaaaaaaaagaggccatccttccaaagaaaagttccaggttttggctctctgtctcccttttttataataagcagaaatgccaacatataacagtattggtgttgaatacttt

SEQ ID NO: 797909 - DNA, 614 bp, Homo sapiens
gagtccacttgcttaatcttagaccaaatttgtctgaagttaattcattattttagcactagaatgtaatgttattcagaacttcacagaagtaggatcatcccttcgtaggatggtattcaaggggcacaagtctgtttgctaagataatagaggcagaaaaaatgtatattgtgtcaaaagcaagaataggacacaagtcttgtggtgcctggtccctgttccagaagcattgtccatgtttctgttctgaagcagaaaagctagtctcatcaccaacaaaagaaattcattagayagatgagagagtctgatgcaaagaatgcacctaggcatattaaaatgcaccttttcatcagaaggtgcatgcacgggtcagggaaacccagtgtgtctaagttcttgccaaatattgagaacttttttttctgttagtaatttaatctttatttagcaaatatttcacttacagttttaaatggagcattccattaaagaaaaaaaaaaaaagaggccatccttccaaagaaaagttccaggttttggctctctgtctcccttttttataataagcagaaatgccaacatataacagtattggtgttgaatacttt

SEQ ID NO: 797910 - DNA, 522 bp, Homo sapiens
aaattaaaaaagtgggatccaaatagaagaggctactattgctaagcctaaaaacacaggctgcaaatagacacattctaccaaaatcctcatggccttttctttttctttttttttttttttagatagagtctagctctatctccctgactggagcgtagtggcgcgatctctgctcactgcaagctccacctcccaagttcacaccgttctcctgcctcagcttcctgagtagctggaactacaggcaccygccaccacgcccagctaatttattgtatttttagtagagacggggtttcaccatgttagtcaggatggtctcgatctcctgacctcgtgatctgcccgccttggcctcccaaagtgctgggattataggcatgagccaccgtgcccagccctcatggccatttctttatcttctcttcaccatgggccatatgggggaaaggagaagtagttcaacacacctagtcaacaatgacttcaagtattgatcattgaagggatgtgcatgtg

SEQ ID NO: 797911 - DNA, 607 bp, Homo sapiens
ttgttaatttccttctcattcttctatcagtctactccatctcagtaaatggcagtaccactaatacctcaggctaaacaaaaccttttgattcctcttattctgacactcaatgtacagttcatcaagtcctgtaagctctacatccaaacatatcctcaacctatcaacttctcttccccagtctccactgayatcatgctaattgaagccccgaccacttctaccttgactactacaatattatcctaatttattgtcttgcttttaatcttgccccctaattaattccacaaaaagcagccaaacttttttttaaaaaaagataaaccatatcattacacccccttgcgccaaactcgtcaatggcttcccgctgagaaagatataaaaattattcatgatcctgcatgaaagatctcctgcctctcatatcactctctcctttgctttctacatttcagcctttttgtttatcaaatcaatctttacacgcatcccctctgccatattctgaagtgtctcttagttaaggtgtttacttaattaagtgtaacctcctcagggatgcctttcttgacttcaatgctatgtaaaatggcttccc

SEQ ID NO: 797912 - DNA, 598 bp, Homo sapiens
agcaatttggaaataagcacatttaacaattgtatcttttattttttgttttgttatttttgtttttattttttaattttagagacagggtcacactttgtcactcaggctagagggcagtagtgctgtcatagctcactgtagccatgagctcttgcgctcaaaggattctcccacctcagcctcctgagtagctgagaccacaggtgcgcaccactatgcccagctaatttttttggcagaggggatagagatggggtcttgctatattgcccaggctggttttgaactcctggcctcaagtgatcctcccacctctgcctcccaaagtgctgaatttcaggtgtaacccaccgcacctggcctaaatcatattttttaaaatgtggtagcccatctcattacktgtgtgtgtgtgtgtgtgtgtgtgtgtgtgtgtgtgtgtgtgtctttactgctaaattctgagacttttcaaagcactctcttagtatttttttaaatcactgacataaatcatttcatttaatgattagttttttatttaaaatgttatttacaggtaacttttgccatgacaatattgcttacaaaagga

SEQ ID NO: 797913 - DNA, 629 bp, Homo sapiens
acctcccattgatggtgaaaggagccacgaagaagagactagaagtaatgaataaaatacaaatggggatgtgggcatctagtgtactcaattattagggggggtcagggtaaggttaaaaaacatctttcctgacaagctttgcttccaaatgttgttttatcctttttaatgaaataggaatattaaattctttatagtggtcagcccttgtggctacagtcacatccaatacttttaaattgaaagtaggacccttatcctctgacttatgataaaagaatgttaaacatatgagtctctatggatatgatttgcccagaaagataatgactgtattatgtagcccttccataaaactttgttgggccgggcacagtagctyacgcctgtaatcccagcactttgggaggccaaggcgggcagatcacaaggtcgggagatcgagacgagcctgaccaacatggagaaaccccatctctactaaaaatacaaaaattagccaggtgtggtagcacgtgcctataatcccagctactcaggaggctgaggcaggagaatcgcctgaacctgggaggcagaggttgcagtgagccgagatcatgccactgcactccagcctgggcgaa

SEQ ID NO: 797914 - DNA, 658 bp, Homo sapiens
tactggtacaaaaacagacacatagaccaatggaacagagtaggaaactgagaaataagccttcacacctataatcatcagatctttgacaaagctgacagaaacaagcaaaggggaaagaactccctattcaataaatggtgctgggatatctggctagtcatatgcagaagaacgaaattagacccttacttttcagcatatataaaaattaaccaagatatatkaaagatttaaatgtaagaccttaaactatacaaatcctagaagacaacctaggaaatagcctttttgacatcagccttggcaaatgatttttggctgagtcccaaaagcaattgcaatgaaaacaaaaattgataagtggaacctaattaaactaaagagctcctgcacagcaagagaaactattaataaagtaaacagacaacccacagaatgaaagaaaatactcacaaactatgaatctgacaaaggtctaatatccagaatctgtaagaaacttaatcaaagaataactttacctgtactattacatcatgagtgggagatcagcaggtatcagaataaagatgcagctcctgctgattttcattttacccagctgaaaagattgggtcctgttgctcatatgaaccagggcagctggagctttctt

SEQ ID NO: 797915 - DNA, 626 bp, Homo sapiens
taccattatgcccggttaagttttaaaatattctgtagagacagggtcttcctatgtcccccacgttggagtttgcattttcaataatctcttcagatcattctgatgcaaagccagggtgagaattgatgtctgaaggagtaataacaaatatattatttttgcttccttgcaaaattgttttatttgtgtctctttggattttagtctcctttctgaaatatatttgttaatttattgagtgattgattcatttattaattaatctaaaatttatttagcctactatgccccaggaattgtactaagtgagggtaaggaggaggaacgataagggagataaataagaaacaaatttcagcataaagtgaaaatgataatacagttagtctcagcaatgargaagggcacttaatctaagacataatcacacagcatgactaaaatatacatgaggtggagaaggcaggaaagtaagcgggcccgtgtgcccctgtccttggtgctgaaccatcccttcaccttctgtggtaaggaagtctttcccaatacctggctgctggtgatttctatattaccaccactaattctgaaccagacgaggaaagggccagaggaaatggagg

SEQ ID NO: 797916 - DNA, 559 bp, Homo sapiens
attcctttcccagggtattaatattaatattccttgctaggaaaagaatttagcgatatctctcctacttgcacgtccatttataggctctctgcaagaagaaaaatatggctctttttgcccgaccctgcaggcagtcagaccttatggttgtcttcccttgttccctaaaaatcactgttctttttcaaggtgcgctgattttatagtgttcaaacacaggttttacaatcaatttgtacagktaacacctcagtggtcctgaggtgacgtacatcctcagcttagaaagataacaggattaagagattaaagtaaagacaggcataagaaattataaaagtattatttgggaactgataaatgtccatgaaatcttcacaatctatgttcctctgctgcagctccagccagtccctccatttggggtccctgacttcccgcaacaacctataaatgaagggggcctgagagacattccaaggagagaaaatcttattaataataaagtgcttgttcaaggatctatacgtagttcaatatggcaagaacatagagt

SEQ ID NO: 797917 - DNA, 585 bp, Homo sapiens
aaactaaatggagtctaaaattttggctgttcagcagtaaatgtgggtagaggaggagaacgagtttctgttatgcatgttgatttctgcctaaaagtatctacacatatatgcacatatatatgagatacatacgaatacacagatatagacagatttaagagccaaatggttgctagccacagctactcccagtcacacatagaaggtgagctagcattgtgagtgagaaacaatgttgcttagtcctcactttaataatattgggtttgattatgagtgtttcttctcacagagttaatgtttagcaaacccaaacatcttctagggatcctctaggtgttgaaatatcaaactaattctgtactgattcattaagagctgttacacagagcttccaagtgactcctgctggcattttggcacttccttgcccaacccagggcttcttcctkgtcagtgaataaatgggtcctgcccagccaatgaggaacctccagaaccaggtctggcacatgtccttctagttggttgattattgagccattgctgatgtgtttgaacatcacccctgcctactcatgc

SEQ ID NO: 797918 - DNA, 643 bp, Homo sapiens
ctggccgcgtcagctcatgtgggccttgagtccagcatcgcggccacctgaaggaggagtggcagtgagccctgggcagcacagaccaccacgtgcccagaaaccagggatgttcctgtctccaaacacccactcgcgaatccctttagctcttggttcagccaagaaagctaccaagccgcgtggctcrgaagcagcgcctcgtgggtcactttctgcaggctctgcctgggaaaccgagttcttggagcctggagatgtttctctaggctgacacacccctctcaggggcgccgtctggggacgccaccctccccatgtctccttcctgtctgttcatccacagtctgagaacttctctagttcctctagtgtcccgccagcccagctgaggctctccagggaaggtagtggtgtctgcaggggtgcgagatcctcctctgcagccctgactactcagcctagaggggcttactgaggggtagaaatccgaatttgcatgcaaggcagccgcggccgtgtgagcaacctcctctgaaagcttctggaagaatgtctgacttgtgtaacattcctgagacttcctttttttctttcattctttttttagagatggggtctggctgtgctgcccaggctggtc

SEQ ID NO: 797919 - DNA, 643 bp, Homo sapiens
ctggccgcgtcagctcatgtgggccttgagtccagcatcgcggccacctgaaggaggagtggcagtgagccctgggcagcacagaccaccacgtgcccagaaaccagggatgttcctgtctccaaacacccactcgcgaatccctttagctcttggttcagccaagaaagctaccaagccgcgtggctcagaagcagcgcctcgtgggtcactttctgcaggctctgcctgggaaaccgagttcttggagcctggagatgtttctctaggctgacacacccctctcaggggcgccgtctggggacgccaccctccccatgtctccttcctgtctgttcatccacagtctgagaacttctctagttcctctagtgkcccgccagcccagctgaggctctccagggaaggtagtggtgtctgcaggggtgcgagatcctcctctgcagccctgactactcagcctagaggggcttactgaggggtagaaatccgaatttgcatgcaaggcagccgcggccgtgtgagcaacctcctctgaaagcttctggaagaatgtctgacttgtgtaacattcctgagacttcctttttttctttcattctttttttagagatggggtctggctgtgctgcccaggctggtc

SEQ ID NO: 797920 - DNA, 588 bp, Homo sapiens
acttttatcaaatgcctcttctatacctgtcaatgtgattatatatttttatcttttgacctatatatacggtgagttacattaataaatatcctaatattaaacctttcttaaagtctcagaataaacccttttggctttgtgtactcttttagtttattgttggattctatttgccttgtcatttaggatttttgcatagatattcacatgtgagagaagtctataattttcttttcrtgctatttttatcaaaatgtatatgctggttttataaaagtcttttcatgctctgtgctctggtgcagttataaaagcatcataattatcttaatttcttgaacatttgaaagaattcactcaggaaaacatcagagctcagcacttcttaaaggcatagctttcagaaaacctgaagggatcaaatacataaataaagaaagctgataccatgttgacacatatctgtgttggctcagatctccacagtttgggaagagattgacctaggtaagtgaaaaaggttattcatagaaaggacacagagtaaagtcatgacatatggcagagatcggcaatatcatccag

SEQ ID NO: 797921 - DNA, 588 bp, Homo sapiens
acttttatcaaatgcctcttctatacctgtcaatgtgattatatatttttatcttttgacctatatatacggtgagttacattaataaatatcctaatattaaacctttcttaaagtctcagaataaacccttttggctttgtgtactcttttagtttattgttggattctatttgccttgtcatttaggatttttgcatagatattcacatgtgagagaagtctataattttcttttcgtgctatttttatcaaaatgtatatgctggttttataaaagtcttttcatgctctgtgctctggtgcagttataaaagcatcataattatcttaatttcttgaacatttgaaagaattcactcaggaaaacatcagagctcagcacttyttaaaggcatagctttcagaaaacctgaagggatcaaatacataaataaagaaagctgataccatgttgacacatatctgtgttggctcagatctccacagtttgggaagagattgacctaggtaagtgaaaaaggttattcatagaaaggacacagagtaaagtcatgacatatggcagagatcggcaatatcatccag

SEQ ID NO: 797922 - DNA, 599 bp, Homo sapiens
gagctctgttatgtgtaaaagtttcttttaaaaggatgggggctggaagatcttctggggatataagacctatctttaggatgatggaaaatggaaacatgagagagattttcaagtagttggtgaacacatctgagttgagagctttgagaaagtgtcttgtgcccttcagcaaggtggttttaggggaaggtcttgtgatgaggaatttctcctgtctttctatctctacttttctgattcacagaatccctctcccagacatccacctgtctttaggtgggagtgcatgagcttgaaagcaatgagcatcaatcctctctttctggaagaccttagctaataacaagtctctaatatatagaagataaaactatttggtatgatgaagcagaaaatacctctacatatggacaaaaaaaaatggccaatctcwccataaccaatgttgaaaattggagaaataataaacatttcttaccattctgcatttttatgagctctctctgagacagacctatccaggagaaatattcctcagagaatttatgagatgaaaggtcataaaaaatcctctatggtttctctttatcttgcta

SEQ ID NO: 797923 - DNA, 565 bp, Homo sapiens
gaaactgttattaagaaaatcatgaggagaaaatatattttctatttatttatcgtttatttaccctaattaatacagcaaccccatccccatgcccatcactctctatccctcaccttttaacttccttcaaaactagttacattccttgacatgttaaatattaatttgkttattgtctgctttctaccaactagaatgcaccatgcatgagagcagaaattgtttcctctaactattttcattgttcttagaagtgttggtgcttacgaatagtttctcattaaataaatgacagaactatttgaaattgcctaattaacacatgcacctaatttctgtctttatgtcttcaccaccttccctgacatataagcctttgaagacacagctgtagaggagaaggggagggttattcaaccgcatttacaaatcataactgattttaacttctgtattttcagacctccccagcgactttctctcaggaaactccactcccaactgacaggtgctatttccagccagtcctatgctgttgcaaatagtgagtccatgaatgccc

SEQ ID NO: 797924 - DNA, 631 bp, Homo sapiens
cacaagagcaaaggcatggaatcaacataaatgccatcagtgacagattggataaagaaaatgtggtacatgtacaccatgaaatactatacagccataaaaaggaatgagattatgccttttacgggaacatggatggagctggaggccattatccttagcaagctaatgcaggaacagaaaatcaaataccacatattctcacgcataagtgggagctaaatgatgagaactcatggtcccaaagaggagaacaaaagacactggggcctacttgagggtggaagttgtgaggagatagaggggtagaaaaagtaactattgagtactaggctgagtacctgggtgacaaaataatctgtacaacaaactcctgtaacatgagtttacctatattacaaacctgtacaggtatccctgaacttaaaataaaagttaaaattwaaaaattataaacaggccaaaaaaacatagaaaaaagctcaacattgctgatcattagagaaatgtgaatcaaaaccacaatgagataccatctcacaccagtcagaatggtgcttattaaaaagtcaggatcaacaaatgctggtgaggctgtggagaaataggaacacttttacactgttggtgg

SEQ ID NO: 797925 - DNA, 584 bp, Homo sapiens
ttagagaaatgtgaatcaaaaccacaatgagataccatctcacaccagtcagaatggtgcttattaaaaagtcaggatcaacaaatgctggtgaggctgtggagaaataggaacacttttacactgttggtgggaatgttcaaccattgtggaagacagtgtggcaattcctcaagaatctaaccagaaataccatttgacccagcaatcccattactgggtatatactgaaaggaatataaatcattctactataaagacacatgtgcatgtatgtttattgcagcactatttacaatagcaaagacatggaaccaacccaaatggcccatcagtgatagactggataaagaaaatgtggtgtatatacaccatggaatactatgcagycataaaaaggaatgagatcatgtgctttgtggggacttggatgaagctggaagccatcatgctcaacaaactagcaggaacaaaaaaccaaacactgcatgttctcactcataagtggtagttgaacaatgagaacacatggacaaagggaggggaacagcacacactggggcccgtgacggtgggaggagggg

SEQ ID NO: 797926 - DNA, 577 bp, Homo sapiens
cacttgagtagggtggtattagagtggttgcaggcattttagggacctggcaaagagagtgaaattggcaatacatatagttggaattcactggcatatatttaggtgattcttaagtatactgtattcttgctagcctcctgtgagtgaaggactttcaggaataattttactacccacttcactttcttagctggtataataacctgagtgtatgttgccagagattacctagcaatggaagtatatgggtagtggaaataagatttgaaatgtgcagaatcataagatattccatgagatatcatctctaccagaagattttctcttccagttgtacttgatrgtgcagtatatatacttattaatgtcatacataaagttagatctataagaatcatacatatagaatttaccagaaccccttcatttgtaggtgacaaacctttagaactataatgaacggtgaatttttcttcatgtgaaatcatattttgtgatcacaattatcaataaaaaatatcaaaattcaagagggaaacacaagttacctatttcctccgcagtaattatattt

SEQ ID NO: 797927 - DNA, 576 bp, Homo sapiens
tgtgaagtcactggaaatctgtagcacaatgggattctgcataataaaaatgttagaatttacaaaatgtcatcaaatgctcgtggcccacttctataaaaaacatgaataattcacaatgctatatatggaattacattttgctgccccaattccatttaaataaatgtgtttatgagtcaccaatttcattttcctctacttctaagtggtgacctttcacttatgagctgaaaagcaatcaactctgggtatagaataagagaaaagaaaataaatttaaatatttatagtaaacatttatggtggtgtgtgcactaatgattctaaacgcatttttgtttagagaaaaaagatgtataaaatccmttcactccacaaatatttattgagaagttaccacatgcctattcaagcatgttatgtggtttcaatgaaaattagacaatacaatatgggacaaaatatagaaaataaaataatatccaaggcactttatcttctcatatttttaaagcatgaatttacacagagaatgataactgaaaatatgtagtgattcttccaaatttctac

SEQ ID NO: 797928 - DNA, 465 bp, Homo sapiens
caccttcatagtaaggtactcactgtccacgtcaagagccaagccaaggtactgttcctccaatgagtaaacagcacttctgtagggctggcctaagtcaggcagttcaagataacctgaaggagtcgaataacatctatccagtgagtcctgcaagacttcaggctctttctcatccagcagctccctgctgagcctggaaaagtaggaaaaagtaaagaataagccagggggaatcagaaaccacacagccccagctasatttcatggctaacataaggaactgtttaaacagaaaaaggacagatccattaatgaggtaatgaattattgcctttatgttgggatagaccagggccaggtagaaaagaatgaaagagaaagacagggagagggagagggagagagagacagaggagaaagtgagctcagcgaattggccgggtgacacactgatgaaggggt

SEQ ID NO: 797929 - DNA, 621 bp, Homo sapiens
tgatttcccttgctagaccttttcccagggtcctggctctgtatgaccagggacctgtctccctctctaccaggaccctaacactgccgcagcctcctccctccaccggctgcccaagcacccacccccagctgcccaagcacccccacttctgggctggcttcagcgcagagccctcggccacctccttgggggtcctgacaccctcagacactatttctcagggctctggctgcaccccagggcgctcaractcctcccccagacacgcccccacccccacctggagggcgcgagcccctccccctgggcctctggctgcgcccagaaaactcaagccccttcctacctggaccttcagctggcaaaagtgcagggcggagagaatcagggcaagcgagcgtggagtcgtctgagcaggccggggaggggcctctgcggggcgaacggcctcggcccggcgaggagcgccgcggtggagacggggtccgctggcccgagagcccccgcaggctgcggtcggacgctgttggacgcaggctgccgctctcagcgtcagacaggacggcctgagggtaagggagggaagcaggaggccgcagagttaggaacttcggggtt

SEQ ID NO: 797930 - DNA, 497 bp, Homo sapiens
tactaagtacatgatggtacatcctttaagtggagaactgtggccaagaaaaaccagtggagaagttcttcctggcctgatccagagccacctcccagttataactagtaggtgaagaaagcatcttcaagaactgtgaagatgaaattttaccaggggtatatacaaaaaagtgtgtgtgtgtgtgtgtgtgtgtgtgtgtgcgtgtgtgatctgatttgctcatataaaataaccctggaaggtcacttaagaaactgataggccaggcacggtggctcatgcctgtaatcccagcactgtgggaggccgaggcgggagggtcacctgaggtcaggarttcaagaccagcctggccaatatggcgaaatcccgcctctattaaaaatacaaaaattagccgggtgtggtggctcattcctgtaatcccagctacttgggaggcggaggtgggagaatcgcttgaacccgggaggcagaggttgcagtgagccaag

SEQ ID NO: 797931 - DNA, 557 bp, Homo sapiens
tgcgggcacctgcccactcgggtctctggcaatcctgaccaggcttcatgatgggtgaggtgagctaggaatgggaaagtggatgacctcagatccagagactgcagttgtcacctggggacctggcatgtgcgtggaggagtctcccactgatttggccctggatcaatgcccaaacatgcacaaggacaggwctgttggcctcaatgttttaggagccaccagtcttctaaagagggtttgtggtggggaagaatgttcaacaaaacagaagagttatgggtactctagcttggcaacagagaatacttccttgtgctactaaatgacaatatttgacaattatggatgacacaattgagcaacagctttcactgtttaacaagcagggtctctggaacactaggttagtgctgtcggaagttgactgaaaagtcggtggtttgagcccatccagtcgcattaatgtttctagctgatgtgaccttccctctgaagagtctcttccttggaccaaatatatcttcaagcttctcctcttcttgtctcttgtctat

SEQ ID NO: 797932 - DNA, 583 bp, Homo sapiens
aaagtacaggtttgtattttagaaggagatttgggaataaatatagctctggtggatatagatcatatgttaaggtttgttggccagagctggtgtgtgtcttgggtgttgggcaaagaacagagaacagccaaaactctgcgaggtcaatgtgaagggtgatttccttggtgggctcaagtttatgacgcagcctggacctagcttggcttctcagctagagaagaagcatgattccatgtcacagctcctgtctttgaaaaagtcataatgactcccagacccaacatrtggagaaaactctggatttgtctcttcagttgaatgtttccagagaaaattgaggaaagaaatctctctactatttgaacttcatcaaaagactaatatgctaatatttgaccgtcaatatttccttaaactagtctactccttacatagctaatacatcaaagcatattaacttaggaaatgggattctcccaaacaaggaaacattgacagcgagcgttcttcatcttttcatatcacatttccttcaaatgctttatacatcttcaagcagacaaataatagtattata

SEQ ID NO: 797933 - DNA, 583 bp, Homo sapiens
aaagtacaggtttgtattttagaaggagatttgggaataaatatagctctggtggatatagatcatatgttaaggtttgttggccagagctggtgtgtgtcttgggtgttgggcaaagaacagagaacagccaaaactctgcgaggtcaatgtgaagggtgatttccttggtgggctcaagtttatgacgcagcctggacctagcttggcttctcagctagagaagaagcatgattccatgtcacagctcctgtctttgaaaaagtcataatgactcccagacccaacatatggrgaaaactctggatttgtctcttcagttgaatgtttccagagaaaattgaggaaagaaatctctctactatttgaacttcatcaaaagactaatatgctaatatttgaccgtcaatatttccttaaactagtctactccttacatagctaatacatcaaagcatattaacttaggaaatgggattctcccaaacaaggaaacattgacagcgagcgttcttcatcttttcatatcacatttccttcaaatgctttatacatcttcaagcagacaaataatagtattata

SEQ ID NO: 797934 - DNA, 556 bp, Homo sapiens
ccgacaaatgagctattttgatatttataacgttgtctagtaaaagtttcctgtaaaaacacatttggtttggatgtctttgttagcttttagtcgacacttgaaaaaaccgcttggaacggtttctaagtctttgtggatactgttttctgttatcctgcaggtggttgttacgcagaggcattggtggttcagtggtagarttctcgcctcccacgcgggagacccgggttcaattcccggccaatgcaagagggtctttttcaccccgctgttgctctttatctgtcttttacgctgaaaatcatactgcataacctaatagtgcatttaggggcttggccaccacaaggtaaagtgacgacaacactcacgaaagtagcggcaggagacattcaggagactaactcaggaccccatgcagttgttggactcaaacagcttagcaagctgacaagcatgaagtgtttccggtgagtcactgcagttttcatactggtacctgtgactttcatctattcactggaaggatccctgcaaacccgaagaaccatca

SEQ ID NO: 797935 - DNA, 620 bp, Homo sapiens
aattttgatacattcaataaaaaatcagctatcatgtcaaatgagtgattttttcctcctcaaatttttgtgatgtgttcaaaatacttttatgcataatttgataattcttacagcatgactctttttttttttttaagagatgaggtcatgctttgtcacccaggctagagtgcagtggcgcaaccatagctcactgcagactccaactcctgggctcaagcaatcctcccacctcagcctcccmtgtaactggaactacaccacacccagctaatttttttttatttttcatagaaactgagtctcactatgttacccaggctggtcttgaactcctggcctcaggtcatcctccagttttggtctcccaaagtgctgggattataggcatgagccaccacatctggccatgaatctatacattatcatacattcaaacaaaatacttctaaggtgaaagctgatttgtaattagccacaattattaagtaaaggattataatttcttttttacctcactcagtttttttagactgttacacaggttcttgatgttctctttgtagagactggtggatttgttccaatttcttcttaacaaaattcaatatataaat

SEQ ID NO: 797936 - DNA, 620 bp, Homo sapiens
aattttgatacattcaataaaaaatcagctatcatgtcaaatgagtgattttttcctcctcaaatttttgtgatgtgttcaaaatacttttatgcataatttgataattcttacagcatgactctttttttttttttaagagatgaggtcatgctttgtcacccaggctagagtgcagtggcgcaaccatagctcactgcagactccaactcctgggctcaagcaatcctcccacctcagcctcccctgtaactggaactacaccacacccagctaatttttttttatttttcatagaaactgagtctcactatgttacccaggctggtcttgaactcctggcctcaggtcatcctccagttttggtctcccaaagtgctgggattataggcatgagccaccacatctggccatgaatctatacattatcatacattcaaacaaaatacttctaaggtraaagctgatttgtaattagccacaattattaagtaaaggattataatttcttttttacctcactcagtttttttagactgttacacaggttcttgatgttctctttgtagagactggtggatttgttccaatttcttcttaacaaaattcaatatataaat

SEQ ID NO: 797937 - DNA, 608 bp, Homo sapiens
acctaatacaaagtaaatgctatgtaaatagttgttctactatatcatttttgtcttttttgtttacattttttctttttttgtttataagcccacaagtaacatcatgtattgttttgttttgttttgtttttttgagacggagtcttgctctgtcgcccaggctggagtgcagtggcgggatctcggctcactgcaagctccgcctcccaggttcacgccattctcctgcctcagcctcccaagtagctgggactacaggcgcccgccactacgcccggctaattttttgtatttttagtagagacggggtttcaccgttttagccgggatggtctcgatctcctgaccttgtgatccgcccgcctcggcctcccaaagtgctgggattacaggcgtgagccaccgcrcccggccgtattgtttttatttgtatcatttttaatcattgtattatttttaaaaatatttttgacccatggttgcttgaatgggcagatgcagaacctacaaatatggagggtgtagggactgtatcggcctgtgatgctggagcacaaattgtgaaagacagaatggcagaaaatgaggctatggtggtaggcagg

SEQ ID NO: 797938 - DNA, 622 bp, Homo sapiens
agcccattattttaaactcaggttaaagtaaggattttagatttatgtaagcctggtgcagtttcattaagaaccaaaggcattttaatttttctccctctacccaagggactttacacttcttaatgtgacattaatcagtgttttaatatttcttcaaaatgtatctattctctgcatgctatttaccgtctttgtcaaagtcagtgaacaggaataaaaagtaactacatgatatagaaactatggtcttcttggcccttgtgtaatagccaagtggatgctgttaaaagtgaatctatccatggtgcctttcctatttctgtacaggrttttgatttcattttaaatgaatgtcataaaccccaggtctgaaaactaatagaatttttgcatttacctactgatccataacctttaagttagactgtgtgtccatttgcagtcagttcgttggatgatgcaatgctttaacactgaatgaaaagatttctgctatattccagacaccagatatgaaggccagtttgggtggattattcttagaatgactttatattagtcctgatgggtagtacagaataagctgtaggagctagctacagtcccttaaatgagagga

SEQ ID NO: 797939 - DNA, 547 bp, Homo sapiens
cttataatggataaaaagcttttgcctgttttttgttttgttttgttttttgagacggagttttgctcttgtcacccaggctggaatgcaatggagcgatctcagttcggttcactgcaacctctgcctcccgggttcaagcgattttcctgycacagcctcccgagtagctgggattacagcacctgccaccacacccagctaatttaatttttgtagttttagtaaagacagggtttcaccacgtttgccagtctggtcttgaactcctgatctcaggtgatctgcacccccgccctgcctgcaccggcttgccaaagtgctaggattacaggtgtgagccactgtgcctggccttgcctggtattttaataaaccttaaaagttagcagttttagtcatagtgtgagtatcagcattattattactaattgtgatatctgataggtcaggtcacttctaccctttcttcttctccaaaatggtcttaaacattgttgaccttttgctctttcacatgaatttcaagatcagcttatagtgcttc

SEQ ID NO: 797940 - DNA, 492 bp, Homo sapiens
caggcctggttcttgatgtgttaattgaggctaacaggttttagatgattcgtttcatttctaacagaaccagttgttcaaaactattgtcttgtttccagtgccaaagctgtggatattcaatgatgtttatcactctccccctgccgctgcagtcctaccctgcactgctaatcctccctcagcaaacagatgcccctggaacaatgtakgggtgagcacaaagaaattcaggagaagaaagtacattcatgtaattcaaaattgttatctctatcataagattagtaaaaagcctttgttcagattttttattgtgagcagtgttgtattttttgttattgtttcaagggataggttgatattttgatatcacttagaaccgagtcggtaaactacatatttatctttgatcaactaagattctgtttttaaagaaaagaggacatctttggctagtaatgattaggtaacagtgaatggcaggtgcca

SEQ ID NO: 797941 - DNA, 492 bp, Homo sapiens
caggcctggttcttgatgtgttaattgaggctaacaggttttagatgattcgtttcatttctaacagaaccagttgttcaaaactattgtcttgtttccagtgccaaagctgtggatattcaatgatgtttatcactctccccctgccgctgcagtcctaccctgcactgctaatcctccctcagcaaacagatgcccctggaacaatgtaggggtgagcacaaagaaattcaggagaagaaagtacaytcatgtaattcaaaattgttatctctatcataagattagtaaaaagcctttgttcagattttttattgtgagcagtgttgtattttttgttattgtttcaagggataggttgatattttgatatcacttagaaccgagtcggtaaactacatatttatctttgatcaactaagattctgtttttaaagaaaagaggacatctttggctagtaatgattaggtaacagtgaatggcaggtgcca

SEQ ID NO: 797942 - DNA, 613 bp, Homo sapiens; identical to SEQ ID NO: 754901

SEQ ID NO: 797943 - DNA, 562 bp, Homo sapiens
tttaattatttgtctcccataagcaagcagccatggccttcttaattcattttgatagaatattggaatgctggaactataagtgatattagtgattgtaacagccagggttctccagaaaaacagaacataataggacacacgcacacatacacacacgtgyacacaccagcctattcaaagtgaagcgtgaagatgacaaggctaaatatgacttacatccacctaatgaatagcaaatatattttctctttctgatgattttcttaacaacatgttattttctctggcttactttattgtaagaatacagtataatacatgtaacctacaaaaatatgtattaattgcctatttatgttatccataaggctgcttccagttaacagtaggctattagtaattaagttttgaggaagtcaagagttacacatagcttttcaactgtatggagaggttggtccctctaactctcacattgttcaatggtctgctatatatacatatatagtctcttcactttaaggattttttctcttttttttgagatgaagtcttgctc

SEQ ID NO: 797944 - DNA, 621 bp, Homo sapiens
ggtttaaaacaataactgaacaccaaaactatacaaaaataacattgattcattaaccaatttgttagttgagggggttgagacttcagtggaatagaacacaaaacacacagtaagatttaatggtgggaatgtaacagggatatgtcacataaaaggtctggagacttagagatgttttgatttctctatttctctcacactctatgtctaactcatcagaaaatattgttggtctaccttcaaaatacatccataatctggccacttttcaccgcatccatagcraccaccctggtccttgccaccaccatctgtaatagcctctcaactggtatttctgctttcctccttttttccctatagtctattttcaactaagactccagagtgatcttttaaaaatgaaaatcagaccacatcagtcttttgctcaaatccctgtgaaacatgttcatttcgaccaatgttaaagccaacatgcttacaatagccaattagctccttatatgatttagtccctgtgatttctttgacctctttttatcctattctcccactcattccctcagctccagtcacactggcttcttttcaatccttcacacatgagcatgctat

SEQ ID NO: 797945 - DNA, 605 bp, Homo sapiens; identical to SEQ ID NO: 754900

SEQ ID NO: 797946 - DNA, 630 bp, Homo sapiens
taatgcaaagctagccaagtggaaggacaggagtttattatacacaccagctgctgagaactcagaggctagggtttttatggtaagttggcaggcaggggacctagggagtggatgctgctgattagttggggttgaaatcataagggtgtggaagacagttctcatgcgcagagtcagcctctgggtgggggtcacaggaccagtcatgggtttagggggcaagctggtcagtcgccagaattcaaagatcagaaaaacatctcagaagaccaatcttaggttctataatagtgatgttctccataggagcggttggggaagtcacaaatcttgtgactttgggtacagtaaactattatagaaaggcaagctgtgcctacrttttagcagaattcaggtccctcccataatcctaatcttgtggcctttctttagtcttacaaaggtggtttcagttcccaacaaggaagggggtcaattttggggagggactatttacatcaaagttgaactatgaatttctcccagagttagattggcctctgctcaggaatgagcaaggatggccagcctgtgaggctagaagcatgatggagtcagacatggtagacgtttctcactgtcgta

SEQ ID NO: 797947 - DNA, 630 bp, Homo sapiens
atccaaagcaaactcctgttttcccaaggagaagatcacttccaaaatttgttggccagtttgactatataaacatccggtgatgaagatgaagtagccctgttttatttatttagttacatgcatgtatgtatgtacatatgcatttatagaataatctagatttagaaatatttttgtaatcatatttcatgaaatgtatgccagattatttatactcactttgatgtcaatgtctttgttattatcagacctagtttttcagttatcatccaaggccaggggcatagtatttgtactttcatctaatgtgttggaaatcagtactgtttgagtycaaggaggatgctgtcacagaaaatttattaaagaacatatttgcttaacattaagagatctaccctgtcctccttccatcatcctgtaggcatatttgtgatgactgcaatgtaattccttatggtactgctttataaagtggtactcaaaagatgtatttactgcacttgaaattgtgggtatagactcctagttaatagggtgttaaactttatttttcctgattccattaagttacctttgtaagcctccagcactacagtgatgaagatcatttctgatgaatgtctt

SEQ ID NO: 797948 - DNA, 604 bp, Homo sapiens
tctccagtgattctaccctctaagtgttgtaaacattatccacaactgggtttatgccattccagaatgctccatgcccttgcatccatcccactacctagaatgacctttccaccaattctctgccaggcaaatacctacctatttttcaatacccaatattaaatgttatctctaatgtgaaacaaaggccataagcattttgtttatcctacttatgtagtacatattacaatatattgtaaaatatccatttatatgtccatctctttcactcatttattgaaaaatatatatttatagagcatcaactatgtaccagacaatatgagagagactgtgattggctataaaacacaatccttgaactcaataactttgcagctaktgaggaagacactcaagtatgtaacacatattctattttagggacagatacagagttcattcaaataagtcctggggctggtgagggagggttactggaagaggaatgcaagagaagaaaagaaagggaaggtgatgacagaaaacattaccaacattcaatgagtaaagaaaagaggaaaagtaagggaaactataaaagctcccagactgtaaa

SEQ ID NO: 797949 - DNA, 604 bp, Homo sapiens
tctccagtgattctaccctctaagtgttgtaaacattatccacaactgggtttatgccattccagaatgctccatgcccttgcatccatcccactacctagaatgacctttccaccaattctctgccaggcaaatacctacctatttttcaatacccaatattaaatgttatctctaatgtgaaacaaaggccataagcattttgtttatcctacttatgtagtacatattacaatatattgtaaaatatccatttatatgtccatctctttcactcatttattgaaaaatatatatttatagagcatcaactatgtaccagacaatatgagagagactgtgattggctataaaacacaatccttgaactcaataactttgcagctagtgaggaagacactcaagtatgtaacacatattctattttagggacagatacagagttsattcaaataagtcctggggctggtgagggagggttactggaagaggaatgcaagagaagaaaagaaagggaaggtgatgacagaaaacattaccaacattcaatgagtaaagaaaagaggaaaagtaagggaaactataaaagctcccagactgtaaa

SEQ ID NO: 797950 - DNA, 598 bp, Homo sapiens
agcattttttcatatgtttgttagctgtttgtatatctttttttgagaactgtctattcatatcctttacccactttttgatgcaaacttctctttaaaagacatgtgaataaaagaaaaatgcaccacatatatttacccatgtaattaccatttctagttcttttcatgacttagtgtagattcatctttccacttggcatgattttccttgtgcctgcagaacttcctctagcatttcttctagctgacatcgaccagtgatgattctcttttgtaagcctgaaaaaagtcttaatttcacatttgtttttgaaaagtattttgctgagtttagacttctaggtttacattttttcttcaatcctttaaagatgttgttctactgtctttgaaataagagaaatctgctatcatccttattttygttcctctgtatacagtatacggttttttctctagatgctttttaagattgtctccctattaacggttttgagcaatttaattttgacatgcctcagtgtagtgtcttcagatttctttgtttatagttcaagtttattgagcgtcttgtgcttgtggatatacaatgttc

SEQ ID NO: 797951 - DNA, 670 bp, Homo sapiens
ctgaatagaacttcataccctaagaactggattgcccctcatcactctgtggccttggtatacatatgaattgcattatttttaaaggaatatgatccttgaaaacagttttaaaagacaaatgatgcactactaatagacttatgtaggaatcycctgtcccatcctcctatcttcagtgtggttaccctgaagcaagaaccttcaacttctctaccctgaatcaactgcagtgccattctccccaatggcatttacctccatgtttctaagtatgtgtttgtgctgcttgtagttgatttatggtagagaagactttagctctctcatattaccattccatttcctctatacccctgcttcctaatttggtgatattaccagttttctatttgcttggttgtctatgtacatatggtttgttttccccttaatccagtgcttctacttgtcaaatttatcatgtcagatctggtaggtccattttctgttctcttgaagatctgccttctaaagcctcacattgttatatagcagtcgagagtagttgttctgcaacatagaacttgcctttgaaattccccttaacttcattatttgttcttattttcatttttcttctgagatttatctgaattcctggatcccatgtcttccctgtcttgatttt

SEQ ID NO: 797952 - DNA, 478 bp, Homo sapiens
ccttgtctgagtcttgagttgaagaaaccaaccataaaaaaaatttgtgacaatattaggaaatatgaacggtgggttaagtattagcctacattaaggaattattgctaagtcttgttacaaatattttatcataygtaaaatattattatatttgataatggtatggtggttataaaaagagaaaattttatcagtcaccaatacaaaaggagttatttctgaaatgacttggtttctcagatttgctttaaaatgaaacagaattggctaaatattgataattgttgatgtgtagttacagggattcacattataactgtaatatactttggggtaaattttttaaagtccacaataaaaagttaaacaagaacctattaatgcattgtctgtgatctctgtctttcaaggatggcacacaattaattatgtataaaagggaagcaatgaaattgacaaataattatgtgttata

SEQ ID NO: 797953 - DNA, 430 bp, Homo sapiens
attcataatccatattagtacgttttattgtttacagggaaatgttaaaatattggtatttcatgaaatacagagtcatgcgagataatttttcaaatttctaaagacttcagaaaaactgtgtcaaaagccaggttttaaacaaatgatgaaatcactcctcataagaaaaaattgacagtaatttaaacaatgctaaatctacaaccagtttgcttagaaaaagtatttaccaacttgtttcatcatctttatttgcggctttcaattgcttgwtctaaatactagtttatttcacaaactgaaatatatagctatatatatatggtagctgaatgatagtgtgttattccttgacattcgttcgaattatctgttagtaaattatattaaggaaatatttaaacatttatttataatgttttgaagt

SEQ ID NO: 797954 - DNA, 526 bp, Homo sapiens
gtagttgcaacaggggtgcttgtgttacccctcccccagttccaggcagatcagtgtgaaaagagagactacatttgtttggaggaaagtaagggaagagaacatgagtctgcctggtaattcaaggaattctcctggatcttatccaggaccaccaaggagatacytttacaagtctgtaagaatcacggcattactgggcttggggtgccccctaatgcagacacagctgcaatgaccaaagatttagataacaacactcaattccctttgaatgcttggaaatcccttctaagaaggacagatacaaataagcctggacagtgaagacaacaataaatacctaactctttaatgcttagacatcagtgaatatccacaagcatcaaggccatccaggaaaacatgacctcaccaaacaaactgaataaggcaccagggaccaatcctggagtgacagagttatgtgacctgtcaaagataatttaaaatacctgttttggggaagatcagtgaaattcaggat

SEQ ID NO: 797955 - DNA, 552 bp, Homo sapiens
cataggcagctccctctcatccacacatcggaaacattcccggctgatgtgggaagtttacaacagctcagagacttcctgtctcacccataaagcagaattcacaacggagcctccaagacatggcatatggacgcccaggcaaaagctccagactcctgtgctcatgctatgacacacacagcttctctctcgtggttgccagttaactcagcctctaggaytggtcttctgccttacacttgatgatttttagctctcatttttcatagtgcccaatagaactgactctctctaggatgactgaccagacatgtacaccagcccacactcctgtacagtggtgccggggcctcaccctgctctgcacactggacctcccttctacttttcccacaaagttagcctctggaacactttgatccccagctctgcctcattctgcccttcagtctcattccccaatccatttaactcctcttccccttctgctccaaactacttcagaaaaccacactgtgatatgaaagggaaggattaatagagagactt

SEQ ID NO: 797956 - DNA, 602 bp, Homo sapiens
ctttcattgatggtaatttggttggttttgtactgaccaggtgctgaccaaagtatttatgtatgcagacatatttctgctgtgcaagaaaaggtagggttagccaatagtgaaactgttgtaattgacagcggaccagactttgaagtttctttaggaacctctttgaatctaggtgaaacatttcatatgagtcatcagattgatcttctctgcgatgtactttaaaaattacaattcatttatcatcagtaaccgaaaatggcatttaaccattctacctttttcrattgcttttcttatagaacacattacttatatttctgcacttaaatgtgcatcaaagaggatagcaacatggaaggcctgattaactaactcaattatacacccacacctagatgctgtctttttgactgtgagactgcaatgttgtgttgcagaagaaaataaaacaatctgttcccctttttttatccattatgttattctggtctgagaattattgattgtactttttctttagaaaaagagaataaaaatgagctaattttggtgcaccttgtatttattgaaatagttttaaagcagtgttttgaatt

SEQ ID NO: 797957 - DNA, 616 bp, Homo sapiens
tcttcaaatatgccatctagggaagtcacttaactgaattttgttttctcataagcaataaagaaatatctgttttactcacgtgatatatttttgaaagtatcaagtgagatactctaaatggaactgctttgtagattctcaaacattatacagggtacaggaatcgttatgatgatgattctatgatgatgatgatgatgatgatgatgatgaattstttttcagttaatagggaaatgaaaaagctcaacagaaaacattaaactctctcaacagtttggcttgttgacattcatggtgacagttattgtcccatggatgtccaaagggttgagggctctccttttattaaaacaagggcaaggcctggtagaagcataagaaactaattcgaaaaccaaggtgcctgcatttgcaaaaagcaaagccacagttcattttcaattaaattatttttagtcttatgcaataaccaaatgcagttaggtcatacgttatggagaaaagaaaaatgcagcatcacttgtgttatttttagtgccagtggagcaactgaatacaaagcaccattttacttttttcctagtttttttcctgtgagttgattttcaca

SEQ ID NO: 797958 - DNA, 604 bp, Homo sapiens
gagaagtcttcaaatagagaacatactttagaaaagccagtctcagcaattgaaaatctgagactgacaataggaagtcttcaatcccgatccatagtatctgacactttgctcaacctggctttcactctgtttttagaatccatctcattttccctcatcttccctwgctggcttgggtatcgcatcacttggactgcgagagtgtgataaacttgttactactcagaaagaaactgcccttaagaccttaatttgtaaaattctgttggaaaagtattacaaacaatgacgattcaaatgtgaagcttttctgtctttatattaaccatatcagatgactatacgaatatcatgaagacatcattagatgacagatagattgatatataatacagtatagaaatgggcacacagacatatatatatataattgaaataatttttgttgacagatgagtaataggcttaaaataaaatcataattcattaggtaattttggtaagattctctgctgactgccaaattgttcataaaatttctactgggatgaattacttaatacactactttacatcaactacacaatttctattcttttcc

SEQ ID NO: 797959 - DNA, 728 bp, Homo sapiens
gaactcttattaactggcccatggtcactgagttggtaaaagaaagatgcaggattcaatcctaggtcacctggctttgcagctcccactgttgatgtagcccaccagagatacctactcatttctttgtatattcaaagctcttggttgctttcttaaagcgctgatactaatccttatctgtttgtccttgcttaatctcctcagcaagtccccggaccctgggcagggctgggtgtagattgagtgcccagtgagcattggctgggaaagggagtgtatctgaagactatttgcacaggaaagatatttagtccgatctcaccatcaacatgacagagaggaagccaggctaaaccagaggttacatttcttgtcccagttgcttaacacggtggtggatgaacagagaattgctcccagagtccttgacccatggctgayctgctttccctgtcacagagcccgtttggccaggtggtctccgcgctgacctgtcggctgactccacaaaaggaaatttcacggtggcgtgtgtgcatgtagacaggtcaaggcgtgctttcgtgcaaggcagcctggaatcagcaggaagctctcctgaactcatccctgtgccttgccagatgggcactctgctgggcaggtcactgcacccacactgttcaacttcttcacaagaccgctggccaaaaggaaggatccaagaacaagcctggtgacatcca

SEQ ID NO: 797960 - DNA, 632 bp, Homo sapiens
ttctagattgaagaattgagtggctggaaatgctattcattgatctctctttcccttgctccagcgtttttgaggactctccatggactactctgattttcaagactgagagaggatatatgctggaatattcctaacaagcggcactttgtttccttgctttgattttttttttagtcgtgatatttaattcagytaaaaatcaatttaaaagtgggcctgagaccttgattttagtaagaagagagcattgggccataggaagaagccaaatgccttggggcagtgttcaaacccatccatgggcttcctcagcctgcacctcacatgccctcctcacagctacctgttataaatcctgcacaccaagcccagaagctgaggtcttccacctccattccattgctcagattttcctggaatgccctctcccctttccctataacttcccttctctccaaagctcagccacctgatgaagtattaccaatctccaaaggaccagtacaaatgcagatttctcaaaaaagcttccttggatcacccaccccccacccccacatggattaatctctttcagccccacgtttccaaagcactgtttgcttaattatagcacaccttcctaactg

SEQ ID NO: 797961 - DNA, 594 bp, Homo sapiens
tatcttttgggtaactgcgtattttatgatgactaataggcaattactatggtaatattgcaattcagcatgtgtgaggtttgggaaatgagaaattatgggtaactactttggactcatttctatggtaacaaaaagtaattgtcattaaataccagttattctgaggctgtacctggtaattatagatttttatgcccagaaacataaataaaaccaataaatttattcaaaggtctatgactgtttacttatacgtggctctatggaatacacaatgacaagcacctaattaagaaatgcaaacccaacacagggtttcatattgtygtacggagatggaaagtctgtttttcaaatgcaggcaacttctgcattacctatgctcagaaagcgccgtggggtataggtgggcgtgggggctttcttctctgcaaaagaagtgacgaggaaggagctggcagagagagtgtgcaagtgctgcagtgtgtgttgtgggcatgctttctgtaagacattgagaattaccaaccgattctacactggttcagcccatcatcccccaactccagttgccttccaactaggagttgc

SEQ ID NO: 797962 - DNA, 637 bp, Homo sapiens
tcaaccataaaaaataaagtattgcacttattaatgttctcttccctcatttgtcatctgatattgctcttagtcactcactatcaaaatttctttgtttaatcttacttctattaatttccttaaagtttcatgcaaagcaaatttatgtcaggttgtaagcacctttctctcaaagcaaccaccactgtatttgtgacaactcatgccagaaccctgaatmtgccttgggaagaaacattgccagttggtggcagcattcacaagagagggtcacatttcctctgttatctttaggttgaatttcaaaacaactctagaaaacagactcagagggctagccttggaaacagcatgcaaacaactgcagaaaagcggaaggtttctgactataatacagttctaccaaacagcagagcatgtggcaaaaaagccaggctggctcccttcctcctgtttacctcctgagcagtgtatgaaacagggtgagcttgctcctggaatcaataggtgaatcaatgaacacaggctggtcttccccacttcataacatctgtactctgtacaaggacactccgggccaccctcgctgagcatcctcccgccctctcccagaaaatatagctgtgtcatctta

SEQ ID NO: 797963 - DNA, 632 bp, Homo sapiens
aaacgctgtgacaggtgattggttttcatgtcagcacgctgtcccggtgcctgcttgacctggctgtgtgtgtgatcagcccctgcctcgcccaacaattccaacgcagcraaacagatcaccaacgacattgccgcgctcctgatcatcttgctgttgtggctccactgcgtgaacgttctaggtgtggctgtgtctgtcttagcacccactctacggaaaagatgtagcatttgagctgatgaatttagaactgagaagaacccttggtgtgaacctaacgagtctcccttccaccggtgaggagctgccctgccctccggctgtgtggcatgttgatggcagagctgacctgcaatttaaggcatctcatcctctatccaaacgccaggggggatgcagtgtactgcgtttccattatactaaagcatgatgaatggagtgaatggcattaacaccagaaggaagcagacctgggttataggtttgattctacaacttcttcttctgtgggattttgaacacatctctagtgcttctaacacatggttgccttgttgggcaagtgaatccaagaaactcctacctgcctatccaggcaggactggatccggtgatgtattgaggtcact

SEQ ID NO: 797964 - DNA, 518 bp, Homo sapiens
tgttttatttctgtgcaggggaaataattgatatttaaaattatcttattcaagtcaactcaaaactgtgtgaaaaaccacattagcttcctaatcagtaaattagagcacttccagattattaaggatttagtcatcttctaaagcatatgcattagtgattattattttcctgtatctcatgagtgaacattttgggatggctaatgacatatgtatagtgcaagcagtttctgtttcaaattgaccagcaagaactaktacctaattttatgctttgtcagtgatactttgtttatatataagaaatatttataattgataatagcaatggtaataagaaaaacaacatgaattgtactgagattaaaaactcagaaaaactcacctgggctatgggacatgatgtatgcaggaagataaaattcaagtatattattagtaaggcatgctgcttcgtcttaaagaggattttaaaaaatataattagaaaaaagtattagtaacaactgacttta

SEQ ID NO: 797965 - DNA, 646 bp, Homo sapiens
aattaggtgaagaggagaggagaatgttccaagcagaggaaaccacacgttccaagttcctgtggtggaagagaacatgatatgtataccaggcactgaaataggatggactatgccacaccataaaagccatgttagggggctttgactttattccaagggcaatgagaagccattgtgggatgttaagtagggagtgacatattgatctgtgtgtcaaaaagattactctgcactctggagaacaaattggaagttacaagaaatgaaatcagaaagatcaggtacttggctgctccaatggtccagggcagagkttaaatggtagctttgactaaattggtggcagtggaagtggagagatgaggacagagtcaagagctatttagaaggtacataggccaggatgtgatgataatcagatatgggaagtgagacagcagtggatctagggtgacacctaaggttctgacttgcataactggatgaagggtgattccaatcactaggatggggaaactggaagagggctagcttggagagaagaacccaagttttagtattagctccatctaatttgagatggcttgagacatccaaaaaacaatgtcaactaagtgagaacctcagcttaaatgagtttacc

SEQ ID NO: 797966 - DNA, 609 bp, Homo sapiens
actggacattttgaaaaatacaaattgtcaggtttggaaatcagattctcctccaatgtttgttgctattgtgtttaggtcctttcctgaatttattctattaagtctatattctttgtcacctgtggccattatactctgtgcttggctagcttagtggtcaactaattattgaacagactttttcttaaattcctggaaccagtaaaaawgatataaagtaatcataacaagttattaattcaaaaggaatagaaaattaaagagatgagacaaacagaaggcgaattacaatatgggagacttaaaccaacataacaacaatcccattcagtctaaatcaactggatttaaaaaatcagactcaactgcatgatatatacaagaaattcactttaaatataaaagtataggctacaaaatggaaaacatatattatgaaaaaagtgatcataataaagtgggagaggctatattaatatcagacaaaggaaacatcaaaacagaatattaccagagatttaaaaagacattttatagtgataaaggagtcaatttatcaggaagacagaacaccagtaaaaaatgtgtacacaactaacagcagcg

SEQ ID NO: 797967 - DNA, 552 bp, Homo sapiens
tccttctaggacttccattatgcatatgtcagtgtgattgatggtaccacatagtctttttgaggctttgttcccttttatttatctttttttatttctgtttctcaaaccataaaatctcaatttagctatcataaattcactgtttttttccttctgcctgcttaaatctgtttttgaacccctctagtgaacttatttcaattattgcccatttcaatgacacattttatttatttattttaaaaataatttctatataattattaatattctctgtttaaggtattattctcatattttatttaattatttagatatgaagtcctgtagtttgttcaacatattatgatacgttaaagtatgtttaactracttaaagtttttttttattaacatcaatatatgtatgggcatccttggagagactttaacttactgctgtgctttccttttccccttcctgcccccacatgggtttacttttatgtttctttgtgtatcccataatttttattgaaagctgaacaatttaagtaacgtaatgtgaca

SEQ ID NO: 797968 - DNA, 618 bp, Homo sapiens
ttggcagtggggtttctggcccttaatttagagtggaaacaccttatggttttctcttatcacattttatgacttagatatctcttatgtttatatcatctgctccctacatagtctgggcccggaaatgattatactcagagcatctctagcaagacagctagataagcagataaatgcagccctcaactttttattaatcaattgaaactacttttccatttaaatcaaagccctttaaaacttccgaattatattattaatgtccaggagaagatatgccatcagttaagtatcctctgctgcctattggctgctgtctacttattgtaaaaaaactagctatttctaagtgttgatgatttcagatttgagttcatcttgttaagtggttcagaacatcaactcttagcatacattccctactgctaaataaaaggtgacccttcttttaatcgtttttgtggtttctcrttagagaataggtaaataatgaaataactagagtcttcccttgctttcattcagttttgtgttgttctttccttccagttctttgcaactacacgatcaaaaacattttttttggtgcacattaaaaagactagagaaatgctt

SEQ ID NO: 797969 - DNA, 571 bp, Homo sapiens
gcaaatgaaagttttttcctacaaaaaacaatctataaaattaaaagtagttactgttcctctagatgcacagatatcaacacagggacacaagaaacatgaaaaagcaagggaacatgacaccaccaaagaaacacaacagttcctcagtagctaaccccatataaatgaaaattacaaattgcctgaagatgaatacataatcatataaagggaattcatgatatacaagagratacagatagacaattcagtaagatcaagaaaataattcataatctgattgtgaaatttaagaaagagatagatataagaaaggaccaaacagaaatacgcgagttgaagaaggtggtgaatgaaataagaagtacatgtaagagtcaacagcagactagatcaagcagcaaaaagtctgtctgaacttgaaaacagatcttttaaaataacccggagagaaaaaaaatgaaaaagagtgaagaaaaagaaagtctatgggacttattaaacaccattaagtgaataaatattcagattatgagagtttcagagggtaaagagatggaaaaaggca

SEQ ID NO: 797970 - DNA, 595 bp, Homo sapiens
tctcccccatttgtctactcaattaaatgttcccatcagtgcctttaatatttttcagccaatagtaggctgggttcattgtcacatctaccccccatgatttctctttattgttctgatttatgatatgatcaaaattgagaaattagccaatcatagaatttgacgtttaagggacaaccattgggagattccttcacttgtctctacttgctcagaatcagtagagtaattgactaacatgtccagactagaaaggttgtattagtctgttttcaccctgctgataaagacatacccaagactgggaaatttacaaaagaaagaggtttaatggacttacagttccacatggctgaggagatctcacaatcatggcagaaggcaaggaggaacaagtcgcatcttacatggatggtagcaggtaaaaagaragcttgtgcagggcaactcccatttttaaaccatcggatcttgtgagacccatttagtatcatgagaacagcataggaaagaccagaccccacgattcaattacctcccattggctccctcccatgacatgtgggaattgcaggagttacaattcaagatg

SEQ ID NO: 797971 - DNA, 581 bp, Homo sapiens
aaatgtggcttttctgaacttagagttatatgaattagatagacacgttgtcttctgcatacatgtcctgtgaaaacagggacaagataaacacaacaaacacactcatcagaaaagggaagaagggaaggcacatagcactgacttgtagcagttttgaaatctcacttagaaagtgttgccagggcttcctgctctcagtcaggaatgttccctgatgagacygagctctgcttccttcctcttcctttggtagtcatggctcttggttccccattctaggatgccttttcatttccatcatctttcttgaccattttggaagagagcattagaaacgtcctgttttggtggctgagctgttttttaagactaccatcttttccagagaaggtgagagactttaatttggataagtcttggtccctttttaatcctttagctctttcctttagatctttattcatatatagctaaatgtaaccatttcataattttaacacttcaaaaaattaccttgcccaagtccataaattcattaagtaccctgtgtatcttccaagttatcataggttttacca

SEQ ID NO: 797972 - DNA, 581 bp, Homo sapiens
aaatgtggcttttctgaacttagagttatatgaattagatagacacgttgtcttctgcatacatgtcctgtgaaaacagggacaagataaacacaacaaacacactcatcagaaaagggaagaagggaaggcacatagcactgacttgtagcagttttgaaatctcacttagaaagtgttgccagggcttcctgctctcagtcaggaatgttccctgatgagactragctctgcttccttcctcttcctttggtagtcatggctcttggttccccattctaggatgccttttcatttccatcatctttcttgaccattttggaagagagcattagaaacgtcctgttttggtggctgagctgttttttaagactaccatcttttccagagaaggtgagagactttaatttggataagtcttggtccctttttaatcctttagctctttcctttagatctttattcatatatagctaaatgtaaccatttcataattttaacacttcaaaaaattaccttgcccaagtccataaattcattaagtaccctgtgtatcttccaagttatcataggttttacca

SEQ ID NO: 797973 - DNA, 569 bp, Homo sapiens
aggttctatgttcaattttctaaaagtgcccttagagaatccccaatttcctgcctcttctaagaagaagctgagtttgtgctgccttcataaagggagaactgaatcatcttggtgtaaaagcttcctgaaggttggaaggagaggcccctgggacattcaggagacttggaaccttctggggcctggcagtgtagataragcggttattatttattgcagacttaagaactgtacaccgatgtctatgtggctcctgtttctccatcccattttccatttgcaaggcttcagtctccttcctgggaatcttaaacaagctcctacaagtcctgttgagcccagcgcataaagcccatttagctctctatgatggggtccacactgcccaggggggtcacctgactcaatgcgttcttttggctatatcctcagttgtcacatttgattgaggacatcagctgtcttagatatggtagggatggatctgtgcattaaagcaggcagctgggatgccttttgctcaccaggaaggaaggacatgcaggctctgagtaggagcagctttg

SEQ ID NO: 797974 - DNA, 626 bp, Homo sapiens
aaggaaggacatgcaggctctgagtaggagcagctttgagtagacggtgcatgtgttcacactcagagccctgtagcctggtcttttattgagacatagagactgtgaagcatttttttgctaagctttaaagttttaattagcttattatcatgagctggaatgggctgtagacgtgttcagggcattgaaacaatgccttctgtgtggggcccttttggaagagagctctggggcttaaggcacaatggcttcctgtgtcccagggccctggtatgtcctgttcttccaccattgcctgggccactcccaggcagcatccaggrtgttgttgtggggtttcagccactgctatgaacattagtgcaatgcatttcctcctcatggcactaatgaaggccaggctacataggccggcattgtccaacatctgcctagatgcctagcttatggctgcaaacagcagcacagatgaccaacagatgcaagctctgcaaagagctctgtagctaaacaatgaagtccctgaatctccatacatgctgatagagttcaaattaatctatcacactgtggatctggcagattcttgtctttgtttctgtttcatcatccaagtgaataca

SEQ ID NO: 797975 - DNA, 625 bp, Homo sapiens
aggagaaaatccagctcatgagacagtagaaggctgagtaaaggacaaagggtgaagagtgatgaggtgaagtcaaagtcgcaaacaagaaaatgagaaggaagagagaaggcaatcaggaaagggagaaacaaccagtagaagcagggaaggtgacccactttaagaccaactgctctgaccccaggaattcactgtttgattttgcactgagaatgaagaatgcaggctccagtcccacacaggctgccggctgtgggctcttgggcaagttccttcacacatctgtacttcagttttcttgtgtggaagattgagataataatacttatcttccaggtgggtaataataaagattaaatgagacaatgcatgccaaactctagcacctaagtactcaatacatgasattattagccctcatgaattaccaccatatttcaatactgcataatacatttggaccaaagggataaggaagagaccagacgaagtaatgaaaagtctgatttattgattttttttaaagtacagttacccctttaatctacatagctgcatgtgccagaaaaagaagacactcaaatgtgataattaaacagtttttttaaataaaaggaggtta

SEQ ID NO: 797976 - DNA, 625 bp, Homo sapiens
aggagaaaatccagctcatgagacagtagaaggctgagtaaaggacaaagggtgaagagtgatgaggtgaagtcaaagtcgcaaacaagaaaatgagaaggaagagagaaggcaatcaggaaagggagaaacaaccagtagaagcagggaaggtgacccactttaagaccaactgctctgaccccaggaattcactgtttgattttgcactgagaatgaagaatgcaggctccagtcccacacaggctgccggctgtgggctcttgggcaagttccttcacacatctgtacttcagttttcttgtgtggaagattgagataataatacttatcttccaggtgggtaataataaagattaaatgagacaatgcatgccaaactctagcacctaagtactcaatacatgagattattagccctcatgaattaccaccatatttcaatactgcataatacatttggaccaaagggataaggaagagaccagamgaagtaatgaaaagtctgatttattgattttttttaaagtacagttacccctttaatctacatagctgcatgtgccagaaaaagaagacactcaaatgtgataattaaacagtttttttaaataaaaggaggtta

SEQ ID NO: 797977 - DNA, 626 bp, Homo sapiens
tggaatttaaccattgtattcattactggagtttcaaataactttgttctaggtttattaaatttccaaaatagtctcttaagttataccaaatgcaaactgtttttttcctgaaaccttctgattggttaccaatatcccaaattctcttgtgactgttcttaatttttttcccaagctctttgttataaagaatgattcactgactatatttttytcaaaagggatgttaagcttcagcattggattctaatcataattcatgagatatttgaacatgctattatttatcacacaattacaaaaagtttaagaatcccgccaatatataccaccggtctaagaatgtgttaggaggtgggcaaactgatttaatttaaatacttgcacagattcttccctctttcccaggcctttacccatgattgaaatgcaaatgtttgtttttaaagctttaaagcaatttggttggctttctttgactgtatttttttagccctttggaatttgcaatatcagatataacagtactaataccagaactgaaaagtccaacttgatgacattttctacctcactagaagccagatagaacaaacatcccttggtaaggaggacttaaataa

SEQ ID NO: 797978 - DNA, 630 bp, Homo sapiens
gagtgaggtgaagctataagtagttccagagactaacaggctggaggcaatatcaggtgcctataacacgtggtgggagtgaacagccagtaagaaattcccagcaacagaaatggccttggtgtttttaaaaacagcattgtctaacattcatttaaaaatcatttctctgtcaagtggaatgtgatcttgctattaccctcgaaccttcagaacttatatccrtatattcgagaaagccctgtattaacaggagttttatggaattaatgaataagggagctgggacatttagggtggggtgaggtggaaagcggtgacctgtagctagagacaagatctgatggatcaagaattaaatggaaacgggaaacttgaacaatggacaacttagaaacacacgttcaagaatccgtaggtgttggatccatggagttttaggtggactagagtacgttgcatttaaattacatgtaaccatcaaatatgcaaaacattatgtatcaacccaaaatatatatgtataatttttttaattttcaaaaactttaagattcaccctgaaagtttaaacgatttgaggcatcaagaatgctgatatttagaaaccactttagatctctttaagcc

SEQ ID NO: 797979 - DNA, 501 bp, Homo sapiens
aaatccaatcacatatataccacttcaatttgatgatggaatactgctgtacacgacctgctctatggctagatgggtcagaaagcacccagttcttgataggcagttcaggtcgcatggtgacttgatgactcatagtcaaacattcagtttccaccaaagccctgtaacaggccaagagctgtctctcaaaaggagagtagtcatctgcagaagatggcagggccttgttcctagaggcctctgctgtgattcacccatgggagcctgccaaaggctccaaacagcatccctgtctgcmactgacatctcaagcaccattggatctgctgggtcatgtggcccaagtggcacagtagctcgcacagcagcttggacctgttgcagagccttctcctgttctagaccccactaaaaactggcagccttttgggtcactcgataaatgggccagactaacacacccaaatgaggaatgtgttgcctccaaaatccaaatac

SEQ ID NO: 797980 - DNA, 562 bp, Homo sapiens
atacctctactcataagctctgctggcacttcatatttaaaatggccaaagctgattattttcccctcaaaacaaatctactgtttgttcctatattcccaatctcacttaacagtacctagtatgaaacacaagctaaaaatctgggagtcatcttaagaatctttccttttcctcacattctatattttgccaagattcctgttaactctacmtctataactatatctaatatctgtttcggaccctactccatcaggcagccattttctcttgcctagattacgagactgtttataatcaattcttccctttctgacccatctgtcacatggctcaacgtgaagtctgatcatgctgcatccatgaataaggcctcgaagttaaaaacgagttgatgtcctggactcaatcatattatacatatttttcaaattcctaaatgataatggtatagctttttcgtttttatacttgtttctcctaaaagcctatgaaatccttaaggcaagagatatcttcctatgatgttctggcacataacaaaaatgtaagattaaat

SEQ ID NO: 797981 - DNA, 562 bp, Homo sapiens
atacctctactcataagctctgctggcacttcatatttaaaatggccaaagctgattattttcccctcaaaacaaatctactgtttgttcctatattcccaatctcacttaacagtacctagtatgaaacacaagctaaaaatctgggagtcatcttaagaatctttccttttcctcacattctatattttgccaagattcctgttaactctacctctataactatatctaatatctgtttcggaccctactccatcaggcagccattttctcttgcctagattackagactgtttataatcaattcttccctttctgacccatctgtcacatggctcaacgtgaagtctgatcatgctgcatccatgaataaggcctcgaagttaaaaacgagttgatgtcctggactcaatcatattatacatatttttcaaattcctaaatgataatggtatagctttttcgtttttatacttgtttctcctaaaagcctatgaaatccttaaggcaagagatatcttcctatgatgttctggcacataacaaaaatgtaagattaaat

SEQ ID NO: 797982 - DNA, 562 bp, Homo sapiens
atacctctactcataagctctgctggcacttcatatttaaaatggccaaagctgattattttcccctcaaaacaaatctactgtttgttcctatattcccaatctcacttaacagtacctagtatgaaacacaagctaaaaatctgggagtcatcttaagaatctttccttttcctcacattctatattttgccaagattcctgttaactctacctctataactatatctaatatctgtttcggaccctactccatcaggcagccattttctcttgcctagattacgagactgtttataatcaattcttccctttctgacccatctgtcacatggctcaacgtgaagtctgatcatgctgcatmcatgaataaggcctcgaagttaaaaacgagttgatgtcctggactcaatcatattatacatatttttcaaattcctaaatgataatggtatagctttttcgtttttatacttgtttctcctaaaagcctatgaaatccttaaggcaagagatatcttcctatgatgttctggcacataacaaaaatgtaagattaaat

SEQ ID NO: 797983 - DNA, 505 bp, Homo sapiens
cataatgagcctcactgggatgtaatcaaatggtcaacagtgctgcattccttttgaagcggctatgttgtctggggtatatacctggggttcgtagtcttgcaccaggaaaacttaggacacagacacacatgaagagtttaggggtggaggcttaataggcagaagaaaagagaaagaaaaacagctctctctatagagaggggtcttytgagcagaaaagaccagctggcagtgaatgtgccagattttatagtcccgtttgaggaggtggtgtctgatttagtggggcttacagattggttcaatcaggtatgatgtttacatagcacaaggggaagactggttgccccaccgtaatcttatgcaaatgaactctccccttggccagtgccatcttgtctgctccttactgtacacgtaaggtagagaagggtagatggagccgccatcttgaacatggtactagtccctagttcctgccgtcattcacccagggacgctc

SEQ ID NO: 797984 - DNA, 581 bp, Homo sapiens
tgagagtgcatgctgtggaggaactgtggagcatctcagtaagcaagtattagaaaggatttacaggatttggtctcatgtcaggtaacaaggaagaggttctaggaggtggagatttgctctgggattttctgttgccagaaaacatagatcatcctatgtctggatatctttagaattcttttttttttttttttttttgagatggagtctcgctctgtcgcccaggctggagtgcagaggcacgatctcggctcactacaacctctgcttcccaggttcaagtgattttcctgcctcagcctcctgagtagctgggattacaggcacgtgccaccatgctcggctaatttttgcattttaatagagatgggggttgcaccatgttkgtcaggctggtctcgaactcctgacatcatgatctgcccacctcatcctcccaaagtgctgggattacaggcttgagccactgctcccggcccagaattcttagcttgaaggagagaagaacaagagcaagctacagctataattggtaaagaagtaattctcacttatattagcccagatagagagacgtt

SEQ ID NO: 797985 - DNA, 581 bp, Homo sapiens
tgagagtgcatgctgtggaggaactgtggagcatctcagtaagcaagtattagaaaggatttacaggatttggtctcatgtcaggtaacaaggaagaggttctaggaggtggagatttgctctgggattttctgttgccagaaaacatagatcatcctatgtctggatatctttagaattcttttttttttttttttttttgagatggagtctcgctctgtcgcccaggctggagtgcagaggcacgatctcggctcactacaacctctgcttcccaggttcaagtgattttcctgcctcagcctcctgagtagctgggattacaggcacgtgccaccatgctcggctaatttttgcattttaatagagatgggggttgcaccatgttggtcaggctggtctcgaactcctgacatcatgatctgcccacctcrtcctcccaaagtgctgggattacaggcttgagccactgctcccggcccagaattcttagcttgaaggagagaagaacaagagcaagctacagctataattggtaaagaagtaattctcacttatattagcccagatagagagacgtt

SEQ ID NO: 797986 - DNA, 609 bp, Homo sapiens
tgatatttagtaggggcagttatttgatacaattggtctgtcatatatttagttgaaagaattacttctaaacctgtcattggattatgctaggttacaaattcctaacatgactgtgcttgcaatgcacatctgtgtgttattcccttagtttttgacttactgaaaaatgattcagtcacattctgaatctcaacaatggaagaaagtgtatttgttcatggctttatgaaacaaacgctacaatttgaaggtaattttcttatrcctttaaaaatatatttctgattatcaatcttatcaaaccattgatcatgttagttactgacattgctaaaatgagcaatgatatcatcattttaaattgtttgaaacttccaaccaagatgtacatgcacaatccaatatgtgatgaaatatttaaaggcatgaacattaaaaaataattatatttaatatagaactgtaattttgaaacttgaacacgaggattactttacatcctccatgtctgtgtatatataaggatgaatcttggtctggatgtgaaccttggaagacagcaatttggggactgaattcaatacttggattatttcattttcccat

SEQ ID NO: 797987 - DNA, 593 bp, Homo sapiens
cgctatcacgagaacagcatgggggaaattgcccccatgattcaattaccaccacctggtctctctcttcacatgtagggattatggggcttatggggattacaattcaagataagatttgggtggggacacaaagcttagccrtatcacctggctaattaaacaaatatttgtagagatggtattttgccataatggccaggctggtctcaaactcctggcctcaagtaatccttccatcttggcctcccaaagtggtgggattacaggcatgagccaccacgcctggcccacaggattctttatatattctctatataagattttttcaataatgtgtcacaaatatcttcttttagcttggagtttatgtttttactctatggtaacttttaatgaccggacatctttctttttaatgtagctgaatttatcaatattttctttatagattcatgttgtgtcttgcttaagaaatactttctaccttaggtcataaggatgctttcttatattatcttttaaagactttatgtttttgcctttcatattgattgtcaatcaaccagtaactatttgtttctttttgatat

SEQ ID NO: 797988 - DNA, 593 bp, Homo sapiens
cgctatcacgagaacagcatgggggaaattgcccccatgattcaattaccaccacctggtctctctcttcacatgtagggattatggggcttatggggattacaattcaagataagatttgggtggggacacaaagcttagccatatcacctggctaattaaamaaatatttgtagagatggtattttgccataatggccaggctggtctcaaactcctggcctcaagtaatccttccatcttggcctcccaaagtggtgggattacaggcatgagccaccacgcctggcccacaggattctttatatattctctatataagattttttcaataatgtgtcacaaatatcttcttttagcttggagtttatgtttttactctatggtaacttttaatgaccggacatctttctttttaatgtagctgaatttatcaatattttctttatagattcatgttgtgtcttgcttaagaaatactttctaccttaggtcataaggatgctttcttatattatcttttaaagactttatgtttttgcctttcatattgattgtcaatcaaccagtaactatttgtttctttttgatat

SEQ ID NO: 797989 - DNA, 542 bp, Homo sapiens
catatttttctgtgattttaatcattttacagtatttgtgacttgttttatgacctagaatatggtgtatcttgatgaattttttatttatgcttagaaagaatgtgtattcagctttagggtggaatatcctattaatattaattaagtcaaatttattgacagtattgattaactttttaatayctttactgattttctttctgcttgtttatcaattattaagaaaagagtgtcaaaatctccaactgtagttgtgggtttttctatttctcttttcaggtctatcaattttgcttcatgtattatgaagctgtttttttaggtgcatacaaatttaagattgttctggtctctttactaattgacctctttactattaaaaaaacaaacaaacaaccctatttttccctggaattaatctttgttccaaaattttctttgtctgttattgatatcaagtattatttatataatgttttatggtatgtaatatttcccctccttttgttttatttattttatgttttatttatttgtat

SEQ ID NO: 797990 - DNA, 540 bp, Homo sapiens
ggaagcatttcccttgagatacagaacaagataagtatgaccactctcaccactcctattcaacatagtactggaagtgctagccaagacaaccagtaaagagaagaaaataaaaggcaaccaaacatgaagagaggatgtgaaactatatctcttcacaaatttaattctatacctaaaatccccatcgtctctgcccaaagtctccagatactggtaatcaacttcagtaaggtttcaggatacaaatcaatgcataaaaattattagcattcctatacaccaataacttccaagctgagatccaaatcaagaatgcaatcctattcacattattattttcctagccacaaaataagtaaaatacttaggaatacagccaaccaggaaagtgaaagatctctrcaataagaattacaaaacactgctgaaagcagttggagatgacacaatagaaaaacattccatgctcatgaacaggaagaatctgtattgctaaaatggccatactgcccaaagcaatttatagattcattgtta

SEQ ID NO: 797991 - DNA, 527 bp, Homo sapiens
gtatttttacggatccatatcttctttttccccttctatctaactaaaattttgtatcctttgactaacattttccaaccttcctgttcccctctccactagcccctcataaccatcattctactttctactgctatgagttcaactcttttagatttcacatataagtaaaatcatgcagagtttgtctttctgtgcctggyttatttaacttagcttaacatcctctagattcctccaggttgttgccaatgacaggatttccttctttttgaaggcttaatagtatttcattgcgtatagatctcacattttttaaaattcattcatctgttaatggaaacagattgactccatgccttggctattgtgaatagtacagcaataaatataaaagaacagatatctctttgacatagccatttcattttccttggatatatacacagcagtgggatttctggatccagtttctggttttccatttaagtctttaatccattttcagttgtttttgtgtatggtgt

SEQ ID NO: 797992 - DNA, 527 bp, Homo sapiens
gtatttttacggatccatatcttctttttccccttctatctaactaaaattttgtatcctttgactaacattttccaaccttcctgttcccctctccactagcccctcataaccatcattctactttctactgctatgagttcaactcttttagatttcacatataagtaaaatcatgcagagtttgtctttctgtgcctggcttatttaactwagcttaacatcctctagattcctccaggttgttgccaatgacaggatttccttctttttgaaggcttaatagtatttcattgcgtatagatctcacattttttaaaattcattcatctgttaatggaaacagattgactccatgccttggctattgtgaatagtacagcaataaatataaaagaacagatatctctttgacatagccatttcattttccttggatatatacacagcagtgggatttctggatccagtttctggttttccatttaagtctttaatccattttcagttgtttttgtgtatggtgt

SEQ ID NO: 797993 - DNA, 527 bp, Homo sapiens
gtatttttacggatccatatcttctttttccccttctatctaactaaaattttgtatcctttgactaacattttccaaccttcctgttcccctctccactagcccctcataaccatcattctactttctactgctatgagttcaactcttttagatttcacatataagtaaaatcatgcagagtttgtctttctgtgcctggcttatttaacttagcttaacatcctctagattcctccaggttgttgccaatgacaggatttccttctttttgaaggcttaatagtatttcattgygtatagatctcacattttttaaaattcattcatctgttaatggaaacagattgactccatgccttggctattgtgaatagtacagcaataaatataaaagaacagatatctctttgacatagccatttcattttccttggatatatacacagcagtgggatttctggatccagtttctggttttccatttaagtctttaatccattttcagttgtttttgtgtatggtgt

SEQ ID NO: 797994 - DNA, 581 bp, Homo sapiens
tcaaattaatttaacttattattgaccagctgtgttttggttttcctctgttcagtccacttacatttctaaaaattaagaaaaagtctagagaagattaaaatgacacatcttctaaccttttactcctacttctgaaatctatgtggttcactagtacttccatttgctactaaatcaacttaagtcttaccactaagacgatgctacacactattccttttccttactcttaactactcaaggtgagcctttttctacacatgcttatagcagtttattgtcagtacttgtcagctacaaaatggtaaaaaattttaaaaaacaaaaaataaaacaaaacttctataagagagactttgactattttgttaaccaaatctccgkttttttttttttttttttttgagacagagtctcgctctgtcacccaggctggagtgcagtggtgcgatctcagctcactgcaagctccgcctcccgggttcacgccattctcctgcctcagcctcctgagtagctgggactacaggcgcccaccaccaggctcagctaattttttgtatttttagtagagatgg

SEQ ID NO: 797995 - DNA, 630 bp, Homo sapiens
tacagtatagtataaacacagcttttttttttttttttttttttttaagaaatggggtctcatgctgtcatccaggctggagtgcaatcatgactcactgcagcctcaaactcctgagctcaagtgatcctcccaagtagctgggactacagrcctgtcacatcacacccggccaaaacgcataacttttatatgcaatgggaaacaaaaaaatgtgtgtgactcactctattgtgatattcagtttactgcagtgatatggaactaagcccacaatatccctgcggtatggctgtacagtataagaatcacctgaagggcttattaaaaacagcttgcttgaccccctcccttagagattctgattcagtagatctgggttggtcaagaatttgcatttctaacaagctcccagctgaggctgaggctgccattcaacatactaccaagtagcactggcatagagagatccctggaataaaatttacctacttgtgtgtgtgcgtgtgtgtgtgtgcgtgtgcatgtgcgtgtgtgtgtgtatacagtcttgctctgttgcctgggctggagtgcagtggtgtgatctcggctcaccgcaacctccgcctcccagctttcaagcgattc

SEQ ID NO: 797996 - DNA, 500 bp, Homo sapiens
aatatagtggtacctgttacactgtcaccaatagaaattattattatttgttatcacattgtggtcattgcattatacttaccaagttacttcatgttcctcactacttagaaatgatggtacttgtaaaactgcgaatcacacatgattacaataawatccatcggggtcctctacttttgcaaaaaatgggtgttgggagtgaccttctgttgctttcttttaatttgaaccactctaatatcaaaggggaatttctcaaattccctggcatatgcccaagatctgtccctattaccactcttgattcaggcataaacccaattcaatattctcttcatcattctaaataggaatcttggcagtgtgtgaatttattgagtatgaagtcaagattgacacaccagtgcttgtgaaacatatcatcttatccagaaacaataaaataatttttctagctcacacatttgatcaacactcttatgaacccatctagaatg

SEQ ID NO: 797997 - DNA, 500 bp, Homo sapiens
aatatagtggtacctgttacactgtcaccaatagaaattattattatttgttatcacattgtggtcattgcattatacttaccaagttacttcatgttcctcactacttagaaatgatggtacttgtaaaactgcgaatcacacatgattacaataaaatccatcggggtcctctacttttgcaaaaawtgggtgttgggagtgaccttctgttgctttcttttaatttgaaccactctaatatcaaaggggaatttctcaaattccctggcatatgcccaagatctgtccctattaccactcttgattcaggcataaacccaattcaatattctcttcatcattctaaataggaatcttggcagtgtgtgaatttattgagtatgaagtcaagattgacacaccagtgcttgtgaaacatatcatcttatccagaaacaataaaataatttttctagctcacacatttgatcaacactcttatgaacccatctagaatg

SEQ ID NO: 797998 - DNA, 523 bp, Homo sapiens
agatgtaaaaagaagaacaagtacaatgaatagaaaggagttataaacatggcaatattaatccaacaatatcagtaagtacattgtgaatggtctaaatatgccaattaaaagaactgctagagtggatgacaatacaagattaaccatatgctgtccacaagaaaccaactttaaatataaagacacagatagatttaaagtaaatggatgcagaaagatataccrtgttaacactaatcaaaagaaatctgaagtagctatattaatgtcagagaaagacgacttcagaataaggaaaatcttcagggataaagaggggcattactggctgggcatggtggctcacgcctgtaatcccagcactttgggaggctgaggcaggcggatcacgaggtcaggagattgagaccatcctggctaacatggtgaaacaccatctctgctaaaaatacaaaaaatgagctgggcatggtggcacgtgcctgtagtcccagctacttgggaggctgaggcaggagaa

SEQ ID NO: 797999 - DNA, 531 bp, Homo sapiens
atttacttcttttcccacttattctccacagttgtttgtttgccagccctacttgctctcacctctcacccatcctctttcctctggtctcactgctcctgccctcatcagctctctgcctcttggcctgattctcagcctagtttccagcctccttaatgtcctccctcactcaagctgatccacttccaaccctcagagcagaccactttcagacttcttctatagcatcctcttgctggaaaacatcacctgttctccagagcgaatataactaaatcaaggctgkaaatttagaatccttcatctgccccaaactaccacactaacagtacttcctcctgcctccttttaacctttctcatctctggcagttctggatcattcagtgtttcttatgtccatcttgtgcttttcttctttattacgtgtacttacacaatcactctgacttctgtctttaaccgctatagatgtttcaatttcttatggcactcgattctcctttgtactacacaagtttgactagac

SEQ ID NO: 798000 - DNA, 637 bp, Homo sapiens
acttctgcttaccctacatgtctcagattaaatattgccttcattgggaaaccttagctgcccttgccatgtgcatccattgtagtcactactttctctatcatagccctttctgaatgttacttaaatctctggtttaattgtccttctcctcattgtgactaggatctgtgatggcaagtgccaagtctgtcctgttcctcatggtacctatactgcctagcaggcgagcagctattgttcattgaatgaatgaataagtgggtgattaagtgagttaatctgaccatatttaacttctcaaaaactttctttctttgaagaggtactctaattgatgcaagtgcataccaaactaaagatgatatacattktgggatggtggtagtcttggggatactgtgagtacttcattcagcactgaagtcctaaatcctgttccttgttcatggatacatagtagtccccctctatccacggtttcactttccatggtttcagtcaatcacaatgtgaaaatattaaatgcaaaattccagaaataagcagttcataaattttaggatgcacactgttctgagtcacatgatgatatcttacaccatcccactctgtcccactcaggatgtgaatcatc

SEQ ID NO: 798001 - DNA, 648 bp, Homo sapiens
aattatgtctgagaaaaaggagtatattgggagataggtctttcaagaggaaacatactgttatgtataggttctgttggcttctcttagcttatagctaaaatttttcccatttaatttgaggtaatccgtgtatctggattcaagatagaaactagcatttgacatttctgtgcttacgaatattataatttaggttatctttaagaaatacatttttccttcattaatactcagatctatattctaggtactaacttggttaagaaagctatatatgccatggttgagggagactgtgatgaggtaagtctttaaaaatgtttartattttttatctgggcattattctttctgggtatttttaataaatattttataatttattgcagatttcattgcagtgttactatacaaatgcagcttgtggggaaaattatattccatttaaaaacacatgaatttttgacctagaacaaattttaaaatggagctaaaatttcttcaaaatgtgtggggggaatcttagacattttcagtacacaattttggtattcagaggctttatcatcagttatttaaggtagctcttattacagactctgttataatttgcttacatattggccttagtttctgacaatggga

SEQ ID NO: 798002 - DNA, 598 bp, Homo sapiens
ttacagttagttattcttagtttttttctttttcttttggacggagtttcactcttgttgcccaggctggagtgcaatggcaccatctcagctccctgcaacctccacctcccgggttcaagcgattctcctgcctcagcctcctgagtagctgggattacaggtgtgcaccaccacgcctggctaattttgtwtttttagtagagacaaggtttttccatgttggtcaggcctggtctcaaactccagacctcaggtgatctgcctgcctcggcttcccaaagtgctgggattacaggtgtgagccaccgcacccggccagttattcctagtattaagctaacttttagttcttgtcttaatatcaaaaattatcttcattaattcatttaaaattattttgtcttatacataggcaattcctgcacatgatacaaaactcaaaaggcacagaaggattttgtatgaaaacatagtctccctccaacttctcccctgacttcccagttttcctccttggagccaatcactattatcattttcttgtatattcctttggggaaattctgtgtgtaaacaaccatatatgtcatatatt

SEQ ID NO: 798003 - DNA, 566 bp, Homo sapiens
gataaaacttagaaacttaaaatcagcattaatctagtatctaatatgtggcaagcacagtgctaagaaaattcacagacattatttcattttctactctggtggtaggcagaataatggtcccccaaagatgttcatatcctagtcaccaaaaactgtcaatatgttaccttacatggccgatgttattaaggatttgatatgaaagattatcctcgattacctggttgggccagtgtaatcacaagagtcattctgaaaggaaggcacaagggtcagagtcagaaaagaagatataactgtgagagacatcagtgatatggccatgagccaaggaatgtaggcagcctctagaaactggaaagggcaaggaaatggcttctgcctctagagcckccagaaataatgcagctctgccaacccattttggacatctgacctccagaactgtgaataataattttgtgttgttttaagctacatttgtgttcatttgtattgcaaattacacaaagtgtacaaatgcaaattgtacaaatgcagtacaaattaccacaaacatggcc

SEQ ID NO: 798004 - DNA, 573 bp, Homo sapiens
tttgtgttcatttgtattgcaaattacacaaagtgtacaaatgcaaattgtacaaatgcagtacaaattaccacaaacatggccacccaattgactaagtaggatactgtcttaatccacttgggtggctgtaacaaactactgtasactgagtggcttacaaacagtacaaatttatttctcacagttctggaggctgggaagtccaagatcaagatgccagcagatttggcatctggtgagggctggctgcctggtccataggcagacatcttttcatgtaacatcatgtggcagaagggaacaggaactctctgggagtcccttttataagggcactaattccactcatgcaaaggtcccaactcccaacaccatcacactggaggttaggatttcaatgtacagactttgtggagagagataaacattcagtctatagcagacactaatgcagctcccaacaattttataaaacaaaactatcatctcaattttaaagacagagaaactgatatttcaagggtttcaagtggcttgattcagccttcaagagagaatttaggtacactc

SEQ ID NO: 798005 - DNA, 534 bp, Homo sapiens
ccaacacattggaaggctgaagtgggaggattgcttgagcccaggagtttgagaccagcctgggcaacatagagagaccttgtctctaccaaaaaaaaaaaaaaatttttttttttttaattagctgggcctggtagtacatacttatggtcccagctacttgggatgctaagacgggaggatggcttgagcccaggaggtcaagacttcagtaagccatgacagcaccatggcattccagccagggtgacaaagggagacccccttttctaacaaaataaaacaaaaactgaagaaaaactgcaatggtgttagtaatggtgatctttgtttctttgggggtgggcaatttttgatttggggctttttttttttttttkgcttttactggagggtgggtcacatcacaaaactgctcggcagatgcagacgacaaaaaccgtcgggccagaagactggcaataaaaaccactgcaaactgaagagtgcgggggaagtccctgtttttcaccttcccctttttcctctccctga

SEQ ID NO: 798006 - DNA, 352 bp, Homo sapiens
agctacagttaaatatgtacacaaggattcctgggcaagatggccgtataagaatagctcctatctgcagctcccagcaagaccaacacagaaagtgggtgatttctgcattttcaactgaggtacccggttcgtctcattggcactggttagacagtgggtgcagcccacggagggcgagccaaagcagggtggggcattgcctcacccaggaagctcaaggggtcggggaactccctctcctagccaagagaagctgtgagggactgtgcagtgagggacggtgctatctggcccagatactacggttttcctatgatcytcgcaacggacagaccagattgccacaggt

SEQ ID NO: 798007 - DNA, 599 bp, Homo sapiens
tgcagctcccagcaagaccaacacagaaagtgggtgatttctgcattttcaactgaggtacccggttcgtctcattggcactggttagacagtgggtgcagcccacggagggcgagccaaagcagggtggggcattgcctcacccaggaagctcaaggggtcggggaactccctctcctagccaagagaagctgtgagggactgtgcagtgagggacggtgctatctggcccagatactacggttttcctatgatcctcgcaacrgacagaccagattgccacaggtgcctacaccaccagggccctgggtttcaagcacaaaactgggtggccatttgggcagacaccaagctagctgcaggagttttttttcgtaccccagtggcacctggaacaccagcgagacagaaccattcactcccctggaaagagggccgaagccagggagccaagtaagtagtcttgctcaaaggatcccacccccacgaagcccagcaacctgagatccactggtttgaaatactggctgccagtacagcagtctgaagtctacctgggatagctcgcacttggtgcggggaggggcgtaagccattac

SEQ ID NO: 798008 - DNA, 516 bp, Homo sapiens
tctgtacccgctcatgattattttgaagaaaaagagtggcctgaccccccagatcttcttttccagaggacactgggcgaaaagtagttgccccagtgactatttgagcagcgcctcgagcgaccactctcagttctattcaggcaggaattcagcaagctagaagagagggtgatttagaggctcggcagttccctgttaggatacaccccccagatcaacagggaaatattatagctacayttgagccttttccttttaagttactcaaagaatttaaacaagcatggtcatgttaaaaaaagaatgtagaaaaatatcagcgagtcaggccaccagataggggaaaaaagaaaacttctgagcctgaaatatgtccaaaatgtaaaaaaggagaacattgggctaatcagtgtcactctaagtttcataaagatgggaacccgattttgggaaacaccatgaggggcccgtcccaggccccattccaaactgggcatttccggctcaggccat

SEQ ID NO: 798009 - DNA, 532 bp, Homo sapiens
caaggatttctgaaaaaaaaaaaaaaaaaatcatcactgtttaagccactaaaattgaagtaatttgttgcacagcagtagcaactggagtaactgcttatattatttttccttctagtagctctgtcactgtcttccccaaacaaggctgaagctgtgctgcataytcttacctagcctaggaagtcataaaacatcactctgcttcattctgttggatactgatgagtcaaaacttgccattttcaaaggaaaagaatgcagacacctcttaaaagagcaggtgagatgggaaatgcattgtggctatctttggaaaatacaatctgtcacctgaatcattaactagatcatggcacatccaaatgttggaatataagaaactgaggaaacctgcttaaaaagtacttaatgataagggttgtttctgttgcaattttaagtaacatgggatataaatataacggtgttttaaaggtggaattaaatggaataagagaagataaggatccagtactattcctcagtaaat

SEQ ID NO: 798010 - DNA, 560 bp, Homo sapiens
actatttagtttattaagagacatcaaatttttcttgctacttctactttctccttgtagattactgattccctttgctcaaggatttcatgaaggttagtgcaataatattaaaaaatgttcagagttccttgaaaaaagccttaaaacgaaagtaagttataatggttcttattttatgcaaagaggtatagagggtacatttcttatgttttatgctttttaaaaaatatggatagcttatttcttctggattaaaaacaggcaacagtatctaaaacaattcaattattcaagaaaggaaacatattttcctttcttctcttaaaatttaaaatcatcaccatgtaatgcaattaagcagatggaaatgtttctagtattgtaagaagacattctttcttttcatttctgttrcaaaattggaaacttttttgccaatatgttggtaattagtttctcagtatatgtgccagcaaaataaaaaaacaaaaatggaaacactttttgaacaatgagactataaaaacacattgctattttagatcactagttttctg

SEQ ID NO: 798011 - DNA, 627 bp, Homo sapiens; identical to SEQ ID NO: 793380

SEQ ID NO: 798012 - DNA, 635 bp, Homo sapiens
ttgttttctcaaaattcaatttctcttagtctttagtctcttaagcataaaaagatgaaatataatacatagaggtcacactaaaaaataaaatccagatttaagcttcttatggtggcttagacaggtcacttaatcctctgaacttcaattttcattatgtaaggtggtcaaaatartatctgaatctactccatgtaatttttaagtttactaaatgaaatatggttatgaaagtaattttaaaaatgtaagaatgtgcaacattattagatactatcaacaggaagcttacctattcttctatgtcttataagatgataaattgctgttgtcagaataaaagtagatgaagcataaatgaatcaggtaacctaggcttatattggtgaacaacacaagagtatagacacctctctatgataaatatgagtgaaacatcatgattaggggtaaattggtttactatttcatcaagacagcatgcccatacaatataacagaacagcttttaggggagacactctatataaaatgatgcttgctaatcactcatcatttttttattatgtaaactgccagacaactgatttgacaaaaatcttatgaattagtttaaatgcattcctgacgtg

SEQ ID NO: 798013 - DNA, 540 bp, Homo sapiens
cacctgctgtagtgaagcacaattagggccttggactcctcttagggatatcaaaggggctggagcaaggtggtacagaaaggaagattccttcagttcccctgagaggacaagaggtacactttaagttgacttaraaaatgcttcttctcgtagttcaagctaaaatgggcttatcttattccctgatcaaatgaacatacatcctaaaattattagggagagatatgacataccatttaagttggctgcagtaaaaaccacttcccttagagaacataagtaagttgagggcattgtgagtttggcacctttaagaaacccctagcaatggctcaataagcctggaggctactacagttgtgctcattcttccaacaagcatttattgagcacttgtttattaggttcttcccatgataatcattactttgagtcttcataattttcatcataaagataaaactagacaatattactccttcctggtaagggtgggtgtgtctttttttttaaatcaagcaagtttgttttaataaa

SEQ ID NO: 798014 - DNA, 641 bp, Homo sapiens
aacaatggacttcttgtcagaaataatagaggtcataatgaaaggtccttgtatccgttcaaacctcgagagcgcaccaacagacaacaccaggcggtgtggagcaacacgctgttttaatgagcccctgggtgcgggctggctgaggcctaaaatggcgtcagccccaaatgaagagggggaaggaattttatagtcctctgtaaacaggaagtgtcccagtctgacgtgactgctaggtagtacccggatggcctctttcttgatctttaggggtacgtgtcttccggccagggtaggtgtcttctggtgggctctcttcctgcttctgctatcttgctgacacacgctgctgaagtaagtarccttgcgccttgggactgggcctgagaaggggggagttactcatcccttcaagctttcaggccctggggagaatctttcacgtaacaatagaagaacatctttaaagtgctaaaagaaaaatatggccttccagaattctgtctccagcaaaaatatctttcaaaaataaaggagattttcagtttccagtcaggcatgtaagaagcttaaaagttgccactctctcccaaaaggtaaaaaaaaaaaaaaaaactgaacaaactgctttcaaaacc

SEQ ID NO: 798015 - DNA, 562 bp, Homo sapiens
gcacagatgcactctgtcacatcccgtcctggcagaggccagaaggggcttggcagaaggagccttaggtgagcaccgttcccacccaaaatgcctgccctccagtccgccacggtcggcccaagctcccataccactgcccatgttggaaaagcccctcttggcagcccctatcccccagcaggcaagagtggtcctgagcctggaaggaatgttctagatgggaagaattgtctcctactctcggtggggtgccccggaccagctacaaatggtgaggaagacttgactcaagagtattacagcagggacagagatggactcagytctgaacacagtggggacacctggggattgacagcccatgggcaaagggaggggctgtggatggaaaatgatgacgtggaattcaatcatttgtcaaggggaggggattctcaatcagctcacttaggattctctgctaaaattgagttcagcaggccgtggtggagtctcgtggagaagagctcagagagaagggcccaactgaagggcagccagggagggatccctgttcagc

SEQ ID NO: 798016 - DNA, 580 bp, Homo sapiens
tgggtgcagagcccttggctgcgctttccttgttgggttttctgctggtgcggtgaaggagggccacccgactccctcacctcaaagagggggacgtgggaggccccagcagagggtacatctgcagcaggcagggtgtgtggtggggctctggggctctggggctctggggctstggggccatggggctgtgggctgtggctgtgggccgtggtctggcctcaccacttgctgtgaacaggttccagcccacagccttttttcatggaagaaattctctggctaaatccaattctcccagttgccagacaagcctgccacaatcccatatcctgttctagggacgtttgtttagctttgtgcacagacaaaatcggtgagagtttctacatacagagtgtgccttaacgggcttgcatttgaggctggggtctgtgtgggtgagggcggaaggtgggccttgcttccgaccctccgctgtgtggccttggggagtcgccatcccccagtctccactcctcctctgctgtaaaacgaggacaatggggcccaacctttggggttgctgtgaggatccctt

SEQ ID NO: 798017 - DNA, 480 bp, Homo sapiens
tctgggatcatctttgctgaacatctctttttacagctatggaaaaagaggccaagaggaatccagaaagttgcctcaggccatccatgggtttctgcctcaggcctccccagggctcctcctaggaatatagtaagggacagggtaaagtcagtgaaaacggcagagtcaggacctccaaaaagtgtctccttgaaaacaatgagaataccggcaaaaattggcagcatcaacgatttcaaagttctggaaattgaccataggcctrcaacaattctaggaggatttattcaagcaaaccggcagaatcttacaaagaacaagccttgcagcactttaacttactctatccccatgccacactccccagccctgtggtagacttgaaaaccaataacccactatcagggtgaagactaatagcttggcagccgccagaaaggaaaaatggctagaagcaacttcaaagcctcattaaca

SEQ ID NO: 798018 - DNA, 580 bp, Homo sapiens
cccaactcattttatgaggctaacataaccttgattcgaaatactgattaggccaatataagaaaaaaatagatctacttcatttataaaaatagatgcaaaattccaaataagctactagctaattaaccctactgtgtagtttaaaaataatctagttggatttattctaggagggtaagaacaatttgacattagaaattctatgaatttatctaccatattatcggactaacagagcaaagtaactcttgacagatgccgaaaaggatttgatgaagttcaacgtctctttctgattttttaaatttctcagaaaactctgaatggaactgaatatccttaatgcaataaagctttgcatattaaaaactttgtagaaaacmtactactctgcagatgaactttaattcattctctttaatgttggaaacaggacaagcggaagcaccgcagctattcaacctaacacgagaggctctggctagtgccataagatgagaaaatgaaaagataggaagagaagagggagggaagagacgcagctgtcatcacacgcagattatatatcatctacata

SEQ ID NO: 798019 - DNA, 610 bp, Homo sapiens
tttttcagtacaaaagtagtacctcatctttttttttttttagacatattctcgctctgtcgcctggctggagtgcagtggcgtgacctcggctcactgcatcctctgcctggcgggttcaagtgattctcctgcctcagcctccccagtagctgggactacaggcacatgccaccacgcccagctaattttttgcattttttagtagagacagggtttcaccatattggccaagctggtctcaaactcctgacctcatgatctgcccacctcrgcctcccaaagggctgggattataggcgtgagcaactgtgcccggtcaaagatattgaaagaatgaaacacaaccctgtctcagcaactcaacctctgattgtagtttgctgtatttcctttttgtgggttttttttttctgtttaatgtttttcaataaaaaagtagtacctcatcgttttttaaaacatagatatgagatttttaaaagtcatccctattcccagcccctaagagaaaactacttagcattattgaactttccctttcgtgttcttctataagaacaattgtgttttcaaaatatgaatcatcgtcatacatatacttggtttt

SEQ ID NO: 798020 - DNA, 605 bp, Homo sapiens
tgagacaggatctctgtcacccagactgaagtgcagtggcataaacacagatcactgcagcctcaacctcctgggctcaagcaattcttccacctcagcctcccaagtagctgggaccacaggtgtgcaccaccatgaccagctmattttttaaatttttggtagagatgagggtctcaccatgttgcccaggctggtcttgaattcctgggttcaagagattctcctgcctcagcctcccatggtgttgggattacaggcatgagccactgtgcccagtgcatttcactttttaatatataattttagtttaattaatttattaaacaggtaatacatgcacttgcttcaaaattctgaagtacagaagggtgtagaagattcttcctcccatgtcactctcccaagcaccagaacctctctccagagtcacccagtggtctcaatgtctggggtgtatttacagagatcctctgtgcatacaaaagcaagcacattgacactgtttatctctttttgtacacaaatgattgcatctctatacttggcctattctatacttggcctatttcttctattcctccatacttggcctttttcataca

SEQ ID NO: 798021 - DNA, 537 bp, Homo sapiens
ttttaagaggagaagtagcatcatgccaagtatgagattctgagagttattctggcagggtggaagacagatttgtgggaagaagggtgagaaagacactggagacacggaaaccagtaagagcctggtgagagatgatggggccttggatgtcagcaatgtaatttttttccttagaggaggccattgtttatatccttgactgcagttaaccagtcagctgcctacacaccttcccactccagcacaaacacaaccaggartaagggcactgatgccttgacagaaactcaagtatccagtggaaactggggcatgtgggttaggggctgcagagagggattttgcttccagaatccctgtcactggtgggttctgggcctctgaacagccaactgcaaaaccagtgaacccaaggatccaaaatgagagtgtacaccattcttaaggagagactgctgaactctgcaaaatgctaggaggctctcttgaacaaaagggatctgaagaaggtggctaaatccctattcccacata

SEQ ID NO: 798022 - DNA, 558 bp, Homo sapiens
cttagttgaaaatcaggaagtgcggacaagcttctgtcgagaaaatggaggtgaatttatgtgtaaatgttaaagacatatggatatgttgattatagccatctttaagtgtttgtgttataggcagacggtttgcagagttagagtaaatggattaaagatattgctaaaattaaaataactttatttttcaagtttttttggtattatgtttgttttttcaggaaaccagatacttaaatataaaactcggtaattatttttgtaactattttattaataatttaatgttaactactagaagtctataattttacattgaatatacaaaatattatttgggcaaatgattattaaaataatatcatagtaatatacatcccccctttttrttatggtaaaatgtacataacacaattcaccatttaatcatttttaagtatacagttcattgttatgcaaccatcatcactatctccagaacgctttcatcatcctgaaatgaaactgtgtgcccgttacataataattccccgttacttattatctcccctttaa

SEQ ID NO: 798023 - DNA, 607 bp, Homo sapiens
gatacttacctatgagatctccagaaattgtatatttagctatgaaaatcttcagaaactgtgagcatattaagcacacatataagactgtaaaccttagaggatgattttagatttctttctcttttttactttttatttttgaaaaaaataagcccattccagtttaatgaatatgataatttgaaatccaggtagaataatgtatctcattttcgccctcatattttaaagtgagatagtttataaaatggagaataartcatgttgttagatgttgactcttatagtataaaagtatgaatcttatatagtgatattctattttaaatgctttatatgtttaaataatttagaagaagggaattatagaaaaactgaaacaaaatgcttgaattaatactataaacatgatgttagcatttataattgatattttaaattgttacataaaaatgtatgagtatggataaaaacatatatattagtctaaatgaaattaatggcttcttttatacactcacaatatttatacttttctttaagtatatcagatgttgataagtgttctagagaaaagtaagtacattagggatggtaataagga

SEQ ID NO: 798024 - DNA, 559 bp, Homo sapiens
aaatgactttgaatcttagttctaattcttataaggcctgatttaatttttattttgcttgggattttgaatataggtattaaataaatataaatttggataatatgtatgggcttattcaacaaatactaataaagagcttgctctgttttaggtgctatgtatacttttagctcttgctctactgatacataccttttagtataggaaatagataaataagccaatttgtgttataatagagaataatggaagagggtgagtgtttttttaaaaaaaacatagagtgttgtatgtagcattcttgtagggtattgtagtcattctttygttctttcttgtttttagggtcccagttttgttttggagcctaccctcagggataaattctgattagtctaagctggtaatgggaatctattccatttgtcagtgattgagtttacaagggacagatgactcaatcttggctaggaagatgtgcaggtcttcaggggagatgactgtcagtggtttcctctctcttaaaattaagagacagattcccagttgttctttt

SEQ ID NO: 798025 - DNA, 599 bp, Homo sapiens
tgtttaatgtgcatagaggccaatggccaataccatggcactggcttttgagaaaataaaagctttattgcaagtcaaccgcaaggagacaggaagatatgctcaactctgtctccctgtgcagggcttgttttctttttcttttcttttcttttcgtctctcgctctctctctttctctctttctttctgagatggagtcttgctctgttgcccaggctggagtgcagtagcataatctcggctcactgcaacctccttctcctgggttcaaatgattctcctgcctgagccttccaagtagctgagattaaaggtgcccactaccacgcccagctaatttttgtatttttttagtagagacagrgtttcaccatgttggccaggctggtcttgaactcctgtcctcaagtaatctgcccacatcggcctcccaaagtgctgggattataggtgtgagccacagcgcctggcctgggccaggttttataagcataaagtcatgagatgtgatctgattggatcttgcaatgaggtgatgctgggaggtatgatttgattggatcctgccatggggtgatgccaagcttgatacgatta

SEQ ID NO: 798026 - DNA, 597 bp, Homo sapiens
ttttaggtgattttacacagctatttatatgaatgaatttatgaattaaggatgacagaaatcacttaaattgttttagtgatttttggcatattagtctggtttgagaaggagggagaaaacaagggaattgattttgtaatgtcaaacagaacttacaaattyaggacagatttacctagaccattatgaataaataaatagatccttttaattggtaagaaactagaccaaatttaatatagttgatttagtactagtttatgttgatgatgtagacaacttcaccaaaggaaggggagtagtgaataaattagttataacttattttactgtaaagtaatgttaattgttagaataattataggaaatatttgcttaccaataaatatgactttgacagtcttacaatgatgaattcgtttttgttgaaatagcagacaaaacagactttttcgttttgttcacttattcctagaatccattttagtctctagtttttgttagtatgtatcacctaccttaactatttttctttttgccaaaacagaaagaatgcggcttccgttgatatactggagtcacttagaatatcaa

SEQ ID NO: 798027 - DNA, 670 bp, Homo sapiens
ctttagtttctcctatggtaatattttgttttcatatgagttccttctcattcttagatcctatttatgcttctttgctttaggataacttattgacatataagtggtatttattgaatacatctaatttttagaaaatttcagcattcagtgctgtcacaaagttaattaagttcatagtccccctttaaaatacagtgtttccaggtaagatggactaatagggatggtctttccacctaagacaactaaagaatgggacgaaataatgaaaccacagttctcaagacatttgccgtcaagcagcaaaagacattgatcccyaagggatgggaaacaaattaggcgagatcatgcggttgctctagctcacacctagagagggtttgtagggatggaacaaagcagtggaacccaggaggagcctagagatttctctgtattgaagaggtagagctagctgggagattggggggccaaggcagctagagttcacaaggtagagtatgagaaaggagaaagctgcaagagacagaaattcacagatctgtagaaattgctttcaataattcaattgactactgatcaatacatgcctgtaaggaaactatgggaagctgcggaagaaccaccaaaaaggaattgagggaataatataataattagagct

SEQ ID NO: 798028 - DNA, 616 bp, Homo sapiens
tctgtgcttggcacctattggtcaacattatgtttggaaaatttattcatgctgtttatgtagtagtaatttgtttatgttcattgttatgcattattctattacgtaattttatcacaaaggattgcttcattatacttttgatagatatttggattctttccagatttgagttattatgaacaatgctcytacaaacactggtaaaagactttttatgtgtattattttgtgtttaattgaatgtatagctagaaatagaatttctggaaataaggtaaatagtatttttagttagtacagtcattttattttttaatctatgggaatatgaataataacataatagataaggataaatataaaataaatgtgatattaaaaatggctgaatacaaatcggaacaatccttaaaatagtatttttttctattttttaagaattggaaatagagagagtggtaggattttgcatagtattacctaggcaatatattcacaaaggacagtatgcattatttaattaatgacttcttatttaccaattataataatgcatattttgcaacaaacttctcatcaaatatacaacttgacaagttagatcaaagctttg

SEQ ID NO: 798029 - DNA, 616 bp, Homo sapiens
tctgtgcttggcacctattggtcaacattatgtttggaaaatttattcatgctgtttatgtagtagtaatttgtttatgttcattgttatgcattattctattacgtaattttatcacaaaggattgcttcattatacttttgatagatatttggattctttccagatttgagttattatgaacaatgctcttacaaacactggtaaaagactttttatgtgtattattttgygtttaattgaatgtatagctagaaatagaatttctggaaataaggtaaatagtatttttagttagtacagtcattttattttttaatctatgggaatatgaataataacataatagataaggataaatataaaataaatgtgatattaaaaatggctgaatacaaatcggaacaatccttaaaatagtatttttttctattttttaagaattggaaatagagagagtggtaggattttgcatagtattacctaggcaatatattcacaaaggacagtatgcattatttaattaatgacttcttatttaccaattataataatgcatattttgcaacaaacttctcatcaaatatacaacttgacaagttagatcaaagctttg

SEQ ID NO: 798030 - DNA, 517 bp, Homo sapiens
gtgaaaactggatggaaagatgtcttccatcctaacttgtaaaataattagcccacggtttgttttagtagagttatgatgtgcaattctttaattaaatatgtggtttatttaaaatttatatttttatgtgttaagaggttttctttttttgatcttctagatgtcartctctttaaaaatttaaaatttccccaaatatttgaaatagtaagattttcatacaatagtatgtttatttacttttagactttgaaccattgtacattatatttacctctattcatgtgccagtatatactgtttatataatgatgctttgcagtctattttaatatattttactgtaaattaggattcctattacacttttaaaaaatatttttttctttgaacttttttatatttctatgtgagctagacagtgtttttgtttcaaaatattatactttatatttatttagacaccataaaaattgtagtttaccttaggggaactgacatatatgtaaagtag

SEQ ID NO: 798031 - DNA, 509 bp, Homo sapiens
tttgcattttacatttaggtctgtgatccatgttgagttaatttttgggaaaggtgtaaggtgtctagattaattgttcttgcatgtggatattcagttgttctaggttcgtgttttgaaaagactatctttgctccattatattgcctttgctcctttactgaacatcagacatttatgtaggtstatttcttggctctccattctgttctattgatgtatttgttctttcaccagtactgcactattgtgattactgcagctttatagtaagtattgaagtcatatagtgttagtccttcaacttctccttcaaatggtggctgctctaggtcttttgcctctccatatactttcgaaacaggttatcaataaacacaaaataacttgctggaattttgactgggattccattgtacctatagatcaagtcgagaagaactgacattttgatgtactcagtcttcttttctataaacatgggctatctcttcatttatttattactt

SEQ ID NO: 798032 - DNA, 612 bp, Homo sapiens
gtatttatgtaatagcttgtggaatattgattaaaactgaggtaaacctactggtaaatttaggaagaatcaacatcttaacagtcctgaaccttcctaccaaagaatatgaactatgtctctgtttattaatatttagatcaaatttgctttatctcattggtgttttgtagttttctgtgtatagatcctatacatattttattacatttatacctaagcacttctctttttgggggtgctaatttaatttttaaaatctcaaatttcaatcttttttgctaatgtggaagaaagtaattcaattctgcaaacttactatmatctctagttaattctaggagtttttctgtcttcttctttgaggttctttacttatataatcatctgtaaacaaggaaagttttatttcttactctcaactgtatttacattttataacccatttcactggctaggacttccagtatgatctggaatagaaatagtaagaggggatatccgtgccttattcctgatcatagggagaatgaaaatgccctgcttcccacaattaagtatcatgttagctgtagattcgtatagatttctttaatcagttgatgaagtttc

SEQ ID NO: 798033 - DNA, 612 bp, Homo sapiens
gtatttatgtaatagcttgtggaatattgattaaaactgaggtaaacctactggtaaatttaggaagaatcaacatcttaacagtcctgaaccttcctaccaaagaatatgaactatgtctctgtttattaatatttagatcaaatttgctttatctcattggtgttttgtagttttctgtgtatagatcctatacatattttattacatttatacctaagcacttctctttttgggggtgctaatttaatttttaaaatctcaaatttcaatcttttttgctaatgtggaagaaagtaattcaattctgcaaacttactataatctctagttaattctaggagtttttctgtcttcttctttgaggttctttacttatataatcatctgtaaacaaggaaagttttatttcttactctcaactgtatttacmttttataacccatttcactggctaggacttccagtatgatctggaatagaaatagtaagaggggatatccgtgccttattcctgatcatagggagaatgaaaatgccctgcttcccacaattaagtatcatgttagctgtagattcgtatagatttctttaatcagttgatgaagtttc

SEQ ID NO: 798034 - DNA, 641 bp, Homo sapiens
ttgaagaaaggagtatgtgttttattcaggcaatcctgagttctagtcagtcatatctcttgcacttactagtggttcaaccttgggcaggtaagtacactttctgagccccagtctcctactctgtaagatgcaggtaataatactcataccagtggtgtgctggtaaataattaacaattgactctttctggaaagtgtttccatatttataccyatttaactttattataaatttttgatatagacagtacaaataataagatacgcaatattattttttgcaaagtgcacctaaccatagtaatttccatgtgatttgccatttctttataaatccactatcatttttataatccaacaacagcatcacaatatcagactatgaataaatgcttgattactatccaattcagcaaagaaactcttcatgtcattgacaagtgaatgtagttctgatgtgaatattggttgataattttatttatgttaatgagtaagacaaaaatgaaacagtgaagacatgctagaatttcactcattcatcaatgatgtgaatgaattctttgttgaatctaataatagttatcaaatactgaaagaatgttttctaaattttttgtcctattcatggtgtaata

SEQ ID NO: 798035 - DNA, 671 bp, Homo sapiens
ttggttggtgtaaatattgctacaataaacatgggagggcagacaatactttgagcctggaatttcatttcctttggatatatacccagtagtataattgctggatcatatggtagttatagttttagttttctcgagaaacttctagaccattatccatagtggctgtactaatttacattcccaccaacagtatactagggtttccccttctccatatcctcacagcatctattattgcctgtctttttgatacaagccattttaactgaggtaaaataatatctcattctgacactgatttgcatttctctgatggttagagctgttgggcagtttttcacatacctgttggccattcatatgtcttcttttgagaagtattttttcagatcttttgcccatttttattggattatttctttttcttaataatttcaacttttatgttagattcatagagtacacgygcagtttagttacatgggtatgttgtgtgacactgaggtttggggtaagaatgatcccaacacccaggtagtgagcactatgtccaataggtagttcatcccttacccccctttccaatcctctctagtagtccctattatctattgtttattttctatatttgtctgttctcacactgctataaagaaatacctgagact

SEQ ID NO: 798036 - DNA, 661 bp, Homo sapiens
cctgagggaagtataaattacaatactatactgcagcttgaccttttctgtaagagggaaggcaaattgagtgaaataccttatgtccaagctttcttttcactgaaggagaatacatgcaaagcttgcaatttatatcccacaggaggacctctcagcttacctccatatcctagcctccctatagctccccttcctgttagtgataagcctcctgtaatctccccttcccagaaggaaataagcaaagaaatctccaaaggaccayaaaaccccctgggctatcggttatgtccccttcaagctgtagggggaggggaatttggcccaacccgggtacatgtctccttctccctctttgatttaaagcagaccaaggcagacctggggaagttttcagatgatcctgataggtatatagatgtcctacagggtctagggcaaactttctatctcacttggagaaatgtcatgctattgttagatcaaaccctggccttcaatgaaaagaatgcggctttagctgcagcccgagcatttggagatacctggtatcttagtcaagtaaatgatagaatgacagctgaagaaagggacaaattccctactggtcagcaagctgtccccaatatggatccgcactgggatctagactcagatc

SEQ ID NO: 798037 - DNA, 661 bp, Homo sapiens
cctgagggaagtataaattacaatactatactgcagcttgaccttttctgtaagagggaaggcaaattgagtgaaataccttatgtccaagctttcttttcactgaaggagaatacatgcaaagcttgcaatttatatcccacaggaggacctctcagcttacctccatatcctagcctccctatagctccccttcctgttagtgataagcctcctgtaatctccccttcccagaaggaaataagcaaagaaatctccaaaggaccacaaaaccccctgggctatcggttatgtccccttcaagctgtagggggaggggaatttggcccaacccgggtacatgtctccttctccctctttgatttaaagcagaccaaggcagacctggggaagttttcagatgatcctgataggtatatagatgtcctacagggtctagggcaaactttctatctcacttggagaaatgtcatgctattgttagatcaaaccctggccttcaatgaaaagaatgcrgctttagctgcagcccgagcatttggagatacctggtatcttagtcaagtaaatgatagaatgacagctgaagaaagggacaaattccctactggtcagcaagctgtccccaatatggatccgcactgggatctagactcagatc

SEQ ID NO: 798038 - DNA, 695 bp, Homo sapiens
taacacaaacagcgcatcttggatccagttcctcgcaacgccacaaagtgtggtcaggaatgtcttttcagtggctctattgttactaacgtttacgacaagtcaatgtctctcgatttttctctggaaaacacacacacatacacacacacattttttctctggaacacacacacacacrcgcgctttgacttacggttggcactaccatttaaaatatttttatttgtatgtttaaagtcttttctagcaccaccacctttccctgtatttatatgtgctgttgcattgccccatcattgtttaatatgtatcaccctctctctccaccccataaatagcaaattcctcaaggacagcgatgatgccagctcctcattctgcaacccctgttgcacaaggctgtataaacaggaaatgtgagtgctttgacgattaataatttggtccatatgttccctgaaacatttacaacccaggaacactggaaataagtgaccaactacaggaaaaaactttggtaaattaccgtccttgaaaaaacataacagttattaaaaatgagacttgggaatctacaataatgtggggaaacacttatgctacaatgttacgtgaaaggaggattaaaatataagtagcctatgattctaactatatgcatatattattattttgctatttatttaaaccca

SEQ ID NO: 798039 - DNA, 695 bp, Homo sapiens
taacacaaacagcgcatcttggatccagttcctcgcaacgccacaaagtgtggtcaggaatgtcttttcagtggctctattgttactaacgtttacgacaagtcaatgtctctcgatttttctctggaaaacacacacacatacacacacacattttttctctggaacacacacacacacgcgcgctttgacttacggttggcactaccatttaaaatatttttatttgtatgtttaaagtcttttctagcaccaccrcctttccctgtatttatatgtgctgttgcattgccccatcattgtttaatatgtatcaccctctctctccaccccataaatagcaaattcctcaaggacagcgatgatgccagctcctcattctgcaacccctgttgcacaaggctgtataaacaggaaatgtgagtgctttgacgattaataatttggtccatatgttccctgaaacatttacaacccaggaacactggaaataagtgaccaactacaggaaaaaactttggtaaattaccgtccttgaaaaaacataacagttattaaaaatgagacttgggaatctacaataatgtggggaaacacttatgctacaatgttacgtgaaaggaggattaaaatataagtagcctatgattctaactatatgcatatattattattttgctatttatttaaaccca

SEQ ID NO: 798040 - DNA, 638 bp, Homo sapiens
ggagagcatttacttctagagaaataagaggaaacactgattagggatgggcagaaaggagtgtcttgaggtgttggcaatatctgtttcttattgtgcatgactgttactcaggtatttgcttgataattacttgtataagttatacatgattttatgtgtttttgtgtgtatgatctatctcaaaaaataatttaattgggtagatgaacatacattttcaaagactttgttagctgtgtctgctatcaaggatattatcttctgactgtcaaatggctgagaagtaaactgtaatcagggtgttgattcccaagaatgaaaagaaaaaatggaataggctttggttgtggggaaaaaatcaccataaaatcttgttaagttattgacaggattatttgtgcctaccaattgcaacatyttattgggaattgttaatggataagcactgatgagtttcctagatgctatctataccatggtaccttctgtttaagtattttttatacatcttcctgttgcttatatccagatttaaggatatatcttaccaaattgatgacattgagtagcactcataccctcataaagaaattcatttatatgcaatgttctagtgtcagttaattcttcagatg

SEQ ID NO: 798041 - DNA, 609 bp, Homo sapiens
actttccaacaagtagaatttctaactgtgattgcctaacatttagaaaaaggttatagtcattcgaaataattgttttctgtctcttcatatcttggatgtcatcagaagattttaactctgtttgcactattatcactgtattgcaaatacagttttatgccacataataacaattcagccaatgacagacttcatatgtgatagttttcccataagattataatactgtatttttactgtacttttgtgtttagatacacaaatacttaccattgttttacaattgtctacaggattcagtaaaataacatactgtacaggtttgcagcttaaaggaataggccatattatatagttttggtgtgwagtctataccatctaagattttataagtatatacaatggtgaaattaatgttttcaaaaagtaactacgttgttaagccacacatgactatactagattacctaattatcacctcaataaactatatcaaactccattaagttagagaccacttttttgctcacaattaggccaccctatcttccaccattgttttgttcagtactgacaaaaagcattatggaatgaactgcatccctt

SEQ ID NO: 798042 - DNA, 632 bp, Homo sapiens
agggactttttaaagcaccatgaaacatgctcagagatgatagatcatcaatatctcccccccgttttaggatcttcagcaaagcataatgtgtttttttctatcagaacttaaaagaacactttgttcttccacaatctttttttcactgtatgaacttaagactgttttttaaaartaagctcctaggatttccctttacaatccaaatagttccctgacctagtctaaaagtcctaataaagagttattttgagattgacttttcttttgtagttttatatttattgcgttttaagaaagcatctcccagaaacattgcattaacaaaataaaatctaggccgggtgtggtggctcacacctgtaatcccagcactttgagaggccgagccaggcggatcgcttgagcccaggagtttgagaccagcctgggcaacatagggagacaatgtctctgcaaaaagatataaaaattagccgggcatggtgacacgcaactttactcccagctacttgagaggctgaggcaggagtatcgcttgagcccggaaggcagaggttgcagtgagttgagatcgcaccactgcactccagccttggtgatagagggagaccttgtctcaaaaataa

SEQ ID NO: 798043 - DNA, 633 bp, Homo sapiens
ttatttaagtcctccttaccaagggatgtttgttctatctggcttctagtgaggtagaaaatgtcatcaagttggacttttcagttctggtattagtactgttatatctgatattgcaaattccaaagggctaaaaaaatacagtcaaagaaagccaaccaaattgctttaaagctttaaaaacaaacatttgcatttcaatcatgggtaaaggcctgggaaagagggaagaatctgtgcaagtatttaaattaaatcagtttgcccacctcctaacacattcttagaccggtggtatatattggcgggattcttaaactttttgtaattgtgtgataaataatagcatgttcaaatatctcatgaattatgattagaatccaatgctgaagcttaacatcccttttgaraaaaatatagtcagtgaatcattctttataacaaagagcttgggaaaaaaattaagaacagtcacaagagaatttgggatattggtaaccaatcagaaggtttcaggaaaaaaacagtttgcatttggtataacttaagagactattttggaaatttaataaacctagaacaaagttatttgaaactccagtaatgaatacaatggttaaattccactcattc

SEQ ID NO: 798044 - DNA, 632 bp, Homo sapiens
tttcatataacctccttttatttaaaaaaactgtttaattatcacatttgagtgtcttctttttctggcacatgcagctatgtagattaaaggggtaactgtactttaaaaaaaatcaataaatcagacttttcattacttcktctggtctcttccttatccctttggtccaaatgtattatgcagtattgaaatatggtggtaattcatgagggctaataatctcatgtattgagtacttaggtgctagagtttggcatgcattgtctcatttaatctttattattacccacctggaagataagtattattatctcaatcttccacacaagaaaactgaagtacagatgtgtgaaggaacttgcccaagagcccacagccggcagcctgtgtgggactggagcctgcattcttcattctcagtgcaaaatcaaacagtgaattcctggggtcagagcagttggtcttaaagtgggtcaccttccctgcttctactggttgtttctccctttcctgattgccttctctcttccttctcattttcttgtttgcgactttgacttcacctcatcactcttcaccctttgtcctttactcagccttctactgtctcatgagctggattttctcct

SEQ ID NO: 798045 - DNA, 632 bp, Homo sapiens
tttcatataacctccttttatttaaaaaaactgtttaattatcacatttgagtgtcttctttttctggcacatgcagctatgtagattaaaggggtaactgtactttaaaaaaaatcaataaatcagacttttcattacttcgtctggtctcttccttatccctttggtccaaatgtattatgcagtattgaaatatggtggtaattcatgagggctaataatstcatgtattgagtacttaggtgctagagtttggcatgcattgtctcatttaatctttattattacccacctggaagataagtattattatctcaatcttccacacaagaaaactgaagtacagatgtgtgaaggaacttgcccaagagcccacagccggcagcctgtgtgggactggagcctgcattcttcattctcagtgcaaaatcaaacagtgaattcctggggtcagagcagttggtcttaaagtgggtcaccttccctgcttctactggttgtttctccctttcctgattgccttctctcttccttctcattttcttgtttgcgactttgacttcacctcatcactcttcaccctttgtcctttactcagccttctactgtctcatgagctggattttctcct

SEQ ID NO: 798046 - DNA, 612 bp, Homo sapiens
ttcttgggtgacttgtatcaataggcagataaactatattacctgccagtagatcagaaaatgcctttgaccaaggaggcaagttctcagtcatggtggcatggcagtcataaaagtacccattagagtctgccagtctttggccttggatttagttatagaaaacattctctggggtgttgagtaaagggtcttaggtcagggaagggaaaatgtgcacaagaaaagggaaaggtggaggccgtgtggctatcagcgtggcccctgccgcccgcatgagagctgacattctccgtcctctgcacctctacatgaagaargcaagcactgaagacctcaagcagcaccagtcaccgggaatggcttgctagaaagttcttatgctcattgtacatgagcctgcttagaaagatgcttcctcgggcagctaggctgtaactgacatgatgtgtttctgcgctgccaattcgagagctcagcctgagtgttcagccgcaggatctggaacgtgttgagtccatgcggtcccagcttcctcggcgcagctgcccaaggatgctggaagggctgagagggtgctttcatgttggtttagattttacttgctcagag

SEQ ID NO: 798047 - DNA, 590 bp, Homo sapiens
tctcagctcactgcgggctctgcttcccgggttcaagcgattctcctgcctcagcctcccgagtagctgggaatacaggtgcctgccaccacacctggttaattttgtatttttagtagagatggggtttctccatgttgatcaggctggtctcgaactcctgacctcaggtgatctgctcacctcagcctcccaaagtgctgggattacaggcgtgagccactgcacctggccgatgccagagtctttttaacaaacagatctcatggtaactaatagagtgagaactcattcatcaccacaaggacagtgccaagccattcatgagggatctatccccatgaccctaacaccacccaccaggcttcacctccagcattgagagtcacatttcaacctgggacttggaggggacaaatactcaaactgtatcatcttctttccrcagatcagggcattctgctacaatcatatgccatgaggaagctttctatgacccgtcaggccagattaagtcttcatattttgtatacatagccacagttgacactaaagtttatctcataccacttgtcacaacaataaatagc

SEQ ID NO: 798048 - DNA, 589 bp, Homo sapiens
ttgtgagaggcaaggagtttagtgactctagacattatacctttgaccatatgtggagaatcaaggaacataatgaagctggttgggtattcctaagttcagtggacaaagtgatgaaggaacatgatgaactcagggattctatctcctagcttcagaagcagatattgaggctcaaacctgctaagattgccctgggtgagagtcttatctcctgtagagaaagagctgaaactgtggaaaaacagacacaagctcttatcttgtgagcaaatgatctgcaatgaaaggagcatgcacagccttgccaggtgtctattgttaaaagtcaggaaacaacagatgctggagaggatgtggagaaatggaaatgtttttacaatgttggtgggagtgtaaattygttcgaccattgtggaagacagtgcaacgattcctcaaggatctagaaccagaaataccatttgacccagcaatcccattactgggtttatacccaaaggattataaatcattcttttataaagacacatgtacacatatgtttattgctgcagtattcacaacagcacagacttagatgcccatc

SEQ ID NO: 798049 - DNA, 555 bp, Homo sapiens
taatgtgctagaacaaagctcaaaaatacttgagtccaaaaattccacttctcaacaatataaaattcaaaatgtctgccagccaattaaaaatattagaaatgggccaggtacagtggctcatgcctgtgatcctagcacttcggaaggccaaggcaaraggattgcttaagtccagaagttcaagaccagcctgggcaacataatgagacctcatctttaccgggaaaaaaaaaaaaaggaattagctgggggttctggtgtggtggcacatgcctgtagtcccagctattcaggaggctgaggcgggaggagcacttgagcccaggagttggaggctgcagtgagccgagatcgcaccactgcactccagcctggagacaaagcaaaaccccaactcaaaaaaaaaaaaaaaaaattaggacttctaatttctggtttggcacaaaaggagcctaaaagtcaccactccatcctaacaacaattaaaaagctgaacacatggaaaaatcaaccactcttcttagatatgtcagagcagtgaggtcacagggc

SEQ ID NO: 798050 - DNA, 557 bp, Homo sapiens
gagttcgagaccagcctggctaacatggcgaaaccctgcctctactaaaaatacaaaaattagctgggcatggtggtgggcacctataatcccatctactcagggggctgaggcaggaggatcacttgagcccaggatttcgagaccagcctgggtgacatggtgaaaccctatctcaacaaaaaaatacaaaattagacaggcatggtggcacacacctgtagtcccagctactcaggctgaggcgggtggatygcttgagcccagggaggtcgaggctccactgcactacagcctgtgtgacaggtgagactttgtctcaaaacaacaacagcaaagtttctgaaaccagggacagtcttatgtctggaggctgtgataagtggcagtcacacaatcacacaaaatgtggcagaggcaggaatcggttcagaggggcggggaatggtttgaattcttaaatgtctggagaggttggtgtctaaggctgggcttgtgcagaaatgtcagtgggtaactggtgtgatcagtatctgggtggaatccccagtgaaagt

SEQ ID NO: 798051 - DNA, 596 bp, Homo sapiens
gtagctacctcagaaagatgaataattcgttatttcaaaatccagtgattaactgagcacttagcacttagtatttgttcgttgctgatgctcctggtctcgggaacatactttaagaaccgttgatgtagagagattagaaatatcaggggaagtagttaaaaactattctggagtggtgagatgcaatctcaggctttgaattagagggtattayataaaatgcattgtagggatatttctctggtagcagttatagaattgattaaagggatggactgttagactgtagggaggtagataggaagctgttgaaataataagacagctataaaatcatgagggcctgggttacagtggcagtggtaacaggaaaggagtgaagttaagaggtttttgaagaataatttgtttatcgaaactaattgaaataaatatttgtaaagtctttaggatgtgaaccatctctaaaatgagaagttaatcatagatatttggaggatagtttttcaagcttcattgaaaagtcaggccatcagttattattggcagtatcttgatgaaatttcaaaaagccatgaaaacatcgcatgaat

SEQ ID NO: 798052 - DNA, 537 bp, Homo sapiens
ccatgttggccaggccggtctcaaactcctggcctcaagtaatccacctgcctccatctcccaaagtgctgggattacaggcatgagccaccatgcctgacctgtcgtttcttaaaacagcttttgttctgagggagtggtwatttacaaaggatgtgaagtttccaggaaatagggggaagggaattacattatcttcttgttctctgtctgccttattagttctgtttcatgcttgctttgcatgagaaggttggcaaaccttattttaactgctgagacttaagcatcactaaatctgaataccacattcttcagcagcacacttggtatccatatcactctccctgctaccaaatgaccagatgtgaccacctggatggggcttctctttctttccatgcagggaaaatcacagtgaaattgaacggcggcgacggaacaagatgacagcctacatcacagaactgtcagatatggtacccacctgtagtgccctggctcgaaaaccagacaagctaaccatcttacgcatgg

SEQ ID NO: 798053 - DNA, 556 bp, Homo sapiens
aacacatccactgatggctcctataagccgtctttcctcactgatcaggtctctgggacttatagttctgagagagtctggaatctgggtgaatctcttgaaagttttcgttttttggacaagaattcagcttttcaggaagaagtcagacaatgggaaaacgaatttcartccttggctataacattaattagcattgggacaatgagaagtagagaagagttgtgaaaactatttaataagctaataagtattaatatttgagaacttgactcatgaatatagcatataggatggaagaagaacagtggaatcacagaggaaatgactatgtccatggaaccaattttctttcttgcctttagggttatagaagatggaagaaatctatttcttatccctgaagcagcttctagttttagtaatagaatgaatctgtcccacctttggtgatagaagaactgagagtctaattgttgcttagggatgtgctctgttacatgtgatcactatgaaaaaaagaaggcgtaaacattttctgcctttcaggaacttc

SEQ ID NO: 798054 - DNA, 587 bp, Homo sapiens
gcctctcaaagtgctgggattacaggcgtgagccaccacgcccagccctgttcaaattcttgatacagaggggatctggtcctggtcatcttttgtggctgacctgtggaccagctgcccttgatggttcaggggctgccttaggccaattggctgtaacggaatgtggtggggtcacttggcacaaagcaagacttcttgagctcaaaaggccggcagaggtcaagcrtcctaaacatgtccagcagacccaggcaccttggtccgggcccactgggaggttttgtggagctgtgatcctcctgtagagttctttcatattcttccctttcccctctccacgcatccacctagctcctacttttgactgctaatgaatggctaaagaaaaaaagtaggtccttttttttttttctttttttaaatggacgttctgtagaaagtacaggcacttaagtcctggattaagattcacgagtcctgagttgaaagctaggtttttgttacttaccagctatgtgaccatgacactgggcagaccttttcacttctctgagcttcggatccctagctgtgaaatggagcca

SEQ ID NO: 798055 - DNA, 614 bp, Homo sapiens
gatactcactgctgtggtggaagccaggcaggccccttctgacccctgctgtgctccagccggcacacccgacttccctctgaggaatctgggcgtccctcagtggacgcagtaaaaagcttctccaagtcgacgtagaacctggaccagcacaggcaaaggcaccgccaaccattctgaaagttctgacataactcccaggcctcaggctgccaagscaagttttctgtcttcagatgaataagctgctgtctccactgttgtggaggatgatactcacacttaaggggccatatttctaccctgttgattagaggacagggaaggggagctgagagataaacacaactaagcaatgcaacaccctctttccctcccctttccctccagtaaccctgctggttgtggctgcggctataagagtattggctgtgactttcactgatgcccttagggacacctgctgatatgagagtctgaagctctgtggtcagacaggcttgggttccaaaccaggtcctgacacacaagagcctcagctgccccatctataaagtgggaataatagccctgccatctgcttctcagagttgttgggagaatcaaccagagtt

SEQ ID NO: 798056 - DNA, 609 bp, Homo sapiens
aacatgaactctctattagataataaattgttttcaacgttaaatatcccaaatttgatcatgtgtcatggatatgtaaaaaaaaatgttccaggagatctcctactgaagtctttaggggtaaagggtactggtgtatacaattaccctcaaatggttaagcaaatattaatagcaatatgaatgtgtgtgtgtgtgcatatgtgtgtgtgtataaaaacacatccacacacatatgtaaagttacaaggagaaaaagaggtgaatgtggcaaagtattaataattggcggaggcatctgaagagtacaggaaggtttactgttattgcaattttcctgcacatttgaawtttttctgaaatgaaaagctaaaatagatcaggactgagtaaggacagaagcgagtcatttaagaaataaatagaactgaaaaaattattggattgtgatgtgactaactatccttgctacccagcaagaaaggaagaagggattgatggagaatgctggtggcagttattgggaaaaataaaactgtttcacctaaaaaaatcatttggagttcaagatgcaggctgaagggagaggagaagggagggggcagtgat

SEQ ID NO: 798057 - DNA, 615 bp, Homo sapiens
cccaggctggagtgcagtggtgccatctcagctcactgcaagctctgcctcccaggttcatgccattctcctgcctcagcctccctagtagctgggactacaggtgcccgccaccacgcctggctaatttttttgtatttttagtagagacggggtttcactgtgttagccaggatggtctcgatctcttgacctcatgatccacctgcctttgcctcccaaagtgctgggattataggcatgagccaccgagcccggcctgtatttttagtagagatggggtttgccatgttggccaggctggtcttgaactcctgacctcaaataatctgcccacctcagcctcccaaagtgctgggattacaggcatgagccaccacatctggtggagggctacttcttgagagayttcatctgcatcacatctgcatcacaacacagcctttgctcaccatgtctttcctcccctcaacctcccataacctgtggccaccaccccctaagaactccaagcctagttagtcctttttgtgctgcacataaacttcaaccatacggccttctttgaggcttttttttttttttttgagacaaagttttgcttttgttgcccag

SEQ ID NO: 798058 - DNA, 631 bp, Homo sapiens
tgactggactttccttgtttttggatttaatgcattatgatattatgatgtttaattgtccaggacatgtatgtcaacccaaggcaaatgtttaatcttgtttacactgttcaaatgcctctaacattagtctctgttatagactcctattttaattgtattatctgtttcatgttggaaaagtatgcctggattagaaagggagaaggatcttgctcatttcccagttcccagtgcagcctggaaagtaattttattcatttattctactaataaatttaaagttcctactgtatgccagtgttggggagagactaacgaaaggtagacatggtacctgccttcatgcagcttatagtctaatacgtttgaatgaatatttatgattctagaaatcattgacaaggkttctacttcaggattagaaagatgatgtcatttcagcaattaacatgaaattacatgttttgagtagagtacttagtatacactaaatattttgttacatgtcatttcatttaatctgcactacaaacccagcaggtaatgttagtctaattttacaggtaaggaaattgacacacagacaggtctcataagtttccccccgttagatagttacccaggtcta

SEQ ID NO: 798059 - DNA, 591 bp, Homo sapiens
gtataaaacagcgcctgccctagtgtgctcacaaagttattgttaggatccagcaatccagtagggagctgtggtttgagggtaaggacttggcagctgaacagagagcagtgtgatgggtgcccaccgtttaccctctccaagcctgttatctgtaaaatgagaataacagtagcttgtttcctctccaggttgaggtaagaattaatgtatgttggccggatgtggtggctcatgcttgtaatcccagctctttgggatgccaaggtgggtggatcgctcaaggtcaggagttcgagaccagcctggtcaacatggcgaaaccccatctctactaaaaatacaaaaattagctgggtgtggtggtgcatgcctgtagtcccagctactcaggaggctgaggcaggagaatcgcttgaacttgggaggtrgaagttgcagtgaaccgagatcgtgcgactgcactccagcctgggtgacagaataagactccatctcaaaaaaaaagaacaaaaaaagaattaatataatgtatgtatgttaagtaaacctttaagaaaaggtttttgttatttttatgtaaaaatgctt

SEQ ID NO: 798060 - DNA, 572 bp, Homo sapiens
ctttgcatgcttggaatgatgttttcttcccctttttgcctacaaggaatgttgtaagcaggcataaacaaatgccttcattatttatcctagtctcactgcactaaatctttgtacatgggaaatttgctgttttgtttggctggcaattgcttaagctaaggggccatgagagtctttctcagggttgcatcttgggattgttctagtgcaagtgaatacccattagactgaaagttgttataaaaattgaaaccatgagattgagtaaaaacttcttcatcactcttacctctggcaccttgtagcccaggttctactgtgattgtaagagtaatcggccaggcacggtggctcacgcctgtaatcccagcactttgggaggccgagktgggtggatcacaaggtcaacagatcgagatcagcctggccaacatagtgaagctctgtctctactaaaatacaaaaaatagccaggtgtggtggcgcgtgcctgtaatcccagctactcaggagactgaggcaggagaatcacttgaaccagggagtcagaggttgcagtgaactgagat

SEQ ID NO: 798061 - DNA, 638 bp, Homo sapiens
tcccacttgtgaaagaatccagtctataacctccttgctagatggttatttagctcatgcttgaacagttctgttgatggagagctcattatttcattctattattatatcactgaaattctgacacatcacacatcagttactgtctccgagtaagcagaagttcacccagaggtatacgaagatcttagtaatgtatcatctcacttctacatcttcctttagttatactatgtatttatgttttcatgtacattttattctcttaaaacaccaatttgaacccaaaattgtggcatgtaaccatattatgctaaaattgttatcttctttgaatgaacctataaagataatacatrtaagagtcactttatgacattgcaccgttaaaaaaccctctatatctaacttctgcctttataaaattgcaccctcaaaataattacattagagaaatataactgtcttttgaacttacatacagtcatgcactgcctgacaatgttttggttaacaatggacttcatataaaatgccagtcctgtaagattataatggagctgaaaaattcctattgcccagtggcatggtagtgcaatgcattactcatgtgtttggagggatgttggtgtaaacaa

SEQ ID NO: 798062 - DNA, 600 bp, Homo sapiens
gccctacattgcctccctgtttcattcagagtaaaagcttaggttttataataatctgtaaggctctgcccccttcataaattctatgacctcatctcctactattttttcctttactcagtacacccatccacaccaagctctcagccacttcttcaacacactcttatgttataaggcctttgctccagctgtacccactgtctggaacttttccttcatcttaactgtctaactccattgcttccaagtgttttcttagatattttccccaaaagagccctcctgctaatactgccattttcactccttgccctaccatggcattctcaatctccccttacctgctctaccttttcttttttccatagcaataaccaccttctaaratatatattacttaggctatgagcatcatgagagtaagaaccttagtctgttcctttactgttgtacatcaagagtctaaaatagtgtctgtacacagcagctgttcaattgatatttgttgaataaacagaataatgtatgactagatgtggatttctcttcctttactctccttagtataatgagggcttcctatatctatggatccat

SEQ ID NO: 798063 - DNA, 581 bp, Homo sapiens
gtataactattgttttatagagttactaattaagttggctaagtgtataagaagaagaaatatgcatttttactatcattcatacttacataattatttttacctgtgctctgtttttttcatgtggattctaattacattatggggtcacttgctttcaccataaaraacttccattattatttcttgtcaaacagttttgcttgcaaataacttctatggtttatttgggcatttctttatttcacctttatatttgaaaacatgtgctctcagtataagattcttggttgatatttttttctctcagtgctttgagtatgtcttctcacttcctctcctcaattgttactggtcagaaattagctgtttctcatactggggcttttttgaatgtgatgaaatgttttttcttgctgctttaaagatttgttctctgtcattgtcttgaagtatttttactatgatgtatgtgggtatgaatctctctgcacttattctacttagagttcattgagcttattggtttaaggattaatgtcttttataaaattgttaagtaattacttgaaatatttatc

SEQ ID NO: 798064 - DNA, 584 bp, Homo sapiens
agctcactgcagactaaacccccaaggctcaagcaatcctcccacctcagcctcccaattagctgggactacaggtatgtgccaccatgctgagctaatcctttttacttttatttttattttttggtatttttttgtagagacagtatttcaccatgttgcccaagctggtctcaaactcctggacttaagctatctgcccrcctcaacctcccaaagtgctgggattacaggcatgagccaccacacccggtctgctttatttctatcctaggttaataaattccttaaagataggaggttctaagacagtgtgtcagctatttatatatataatagtggaaagggggataagacttccactaacttttcctttgtcatttctttctttcctagtcatttttttttttttttttttttttttggtgtgtgtgtgggggggcggggtgtgtcctttagtagggacattcatggagagagagatgagcaaaattatttgaaagttgttctgggaacctattctgagttcaccgtacaactgaccagagactccccatttctcccagagtgagaagttgcaccca

SEQ ID NO: 798065 - DNA, 433 bp, Homo sapiens
tttggatccaatcagcataatgtcattaatgtaatggactagtatgatatctcgcggaagcaaaaagcaaacaaggtctttctgaataagattatgacacaaagcctgagcattgatatacctctgaggtaggacagtaaaggtatatggctggccttgccagctgaagacaaattgcctctggtaggcctmatggacgggaatggagaaaaagccatttgccaaatcaatggctgcataccaggtaccaggagatgtgttaatttgttcaagcaatgaaacctcatctggtccagcagctgcaattggagtcaccacttggttaagcttatgataatccactgtcattctccaagatccatttgtcttctgcacaggccaaatgggagaattgaagagggatttggtgggaatcaccactcctgcgtctttc

SEQ ID NO: 798066 - DNA, 433 bp, Homo sapiens
tttggatccaatcagcataatgtcattaatgtaatggactagtatgatatctcgcggaagcaaaaagcaaacaaggtctttctgaataagattatgacacaaagcctgagcattgatatacctctgaggtaggacagtaaaggtatatggctggccttgccagctgaagacaaattgcctctggtaggcctcatggacgggaatggaraaaaagccatttgccaaatcaatggctgcataccaggtaccaggagatgtgttaatttgttcaagcaatgaaacctcatctggtccagcagctgcaattggagtcaccacttggttaagcttatgataatccactgtcattctccaagatccatttgtcttctgcacaggccaaatgggagaattgaagagggatttggtgggaatcaccactcctgcgtctttc

SEQ ID NO: 798067 - DNA, 536 bp, Homo sapiens
tttaatccccaatgtggcagtgctgtgaaattttaagaggtgattggctgatgagggctttgcactcataaatagatgattaatggatgaatggattaaagggttaataggctaatggattaatgggttatcatgggagtggaactggtggctttataagaagaggaagcgagacctaatgtaatacacttagccctcccaccatgtgaagccctgcactgccttgggactctgcagaaaatcctcagcaggaagaagaccctcaccagatggcgcctctccatcttggacttttcagactctataactgtaataaatamatttttttctttataaattacccagtttcaggcattttgttataataagcaggaaatggactaggataaacacaaaagaaagggagagctatagaaaggatttcagtcttctcagaagttatctaaatggttgtgatcagaatgctggcagaaatataaagagtaaaggctattctgataacgtcttagatggaaatgaggactatatcattgaaa

SEQ ID NO: 798068 - DNA, 576 bp, Homo sapiens
cattggaatcctgggaggcctgagctggggagaggctcaggggctgggaggtgccctggggcctgcagggctgctggctcacagtgaggctgtttgtgccccaccacagggtcgctggacacccatcaagccccagcccaggccctgaacgagactcagtgggcactagaacgcctgaggctgcagctgggctccccggggtccttgcagaggaaactcagtctgctggagcaggaatcccagcagcaggagctgcagatccagggcttcgagagtgacctcgccgagatccgcgccgacaaacagaacctggaggccattctgcacagcctgcccgagaactgtgccagctggcagtgagggctgcccagatccccggcacacactcccccacctgctgtttacatgacccagggggtgcacacyaccccacaggtgtgcccatacagacattccccggagccggctgctgtgaactcgaccccgtgtggatagtcacactccctgccgattctgtctgtggcttcttccctgccagcaggactgagtgtgcgtacccagttcacctggacatga

SEQ ID NO: 798069 - DNA, 638 bp, Homo sapiens
tggagttcttccaagacctctgggatagggtctgatgtccccctcccgcctccctccagtttctcagccgatggcacacagtcgtcctggtgcctgctcttggcactcagcctttatccactcaagccgtgggatccagctcagctcagtcccagcatccccgacgggtggagaactcgggcctgacatgttgtgactcacgcagtctgaycatgcctggtgcatgtgctgatctattctctggccccagaggtggggccgctgccgggtggaatgcggcagctgttgaacatctggctagcaatgcagtccagcagctgagcagaaggtggggtggcccctgccctgtaggatggctgactggagccaaccagcccaaccggccagggcaataggctgttggagcctggagagggaagtgcattatgagggctctgtcctaagtcagctcccatccaccaagggtggtaacgctaagcttttactctctgcttaaaccatccagcaagtcatcaaagttacaaaagcccctgcttagtgcgttctgggttacttcattgtgaagatcaggggactgaagctcagccagatcaagtgcctcgcctaaggtcatgcagcttggccaaatccaaaccctt

SEQ ID NO: 798070 - DNA, 638 bp, Homo sapiens
tggagttcttccaagacctctgggatagggtctgatgtccccctcccgcctccctccagtttctcagccgatggcacacagtcgtcctggtgcctgctcttggcactcagcctttatccactcaagccgtgggatccagctcagctcagtcccagcatccccgacgggtggagaactcgggcctgacatgttgtgactcacgcagtctgaccatgcctggtgcatgtgctgatctattctctggccccagaggtggggccgctgccgggtggaatgyggcagctgttgaacatctggctagcaatgcagtccagcagctgagcagaaggtggggtggcccctgccctgtaggatggctgactggagccaaccagcccaaccggccagggcaataggctgttggagcctggagagggaagtgcattatgagggctctgtcctaagtcagctcccatccaccaagggtggtaacgctaagcttttactctctgcttaaaccatccagcaagtcatcaaagttacaaaagcccctgcttagtgcgttctgggttacttcattgtgaagatcaggggactgaagctcagccagatcaagtgcctcgcctaaggtcatgcagcttggccaaatccaaaccctt

SEQ ID NO: 798071 - DNA, 505 bp, Homo sapiens
ccattcttctcttgtcttcatgctccatcacttcctagggtgttgtctacacctgcatagccatagctaattttccattctcagcaccaaccaggggaagaggaggaaaggtagcctccttttcatgataggtgtgaagttatgcaggacactctcagggtgaatggaccacagtgtggctcctgactgggcagggaggaagaatctgctgctagagaaagaagggaagacagtcatctttgacatcatgagttgcataagatgggaataaaaactggaaaagacctwaatcaccatattagaaaactctagccattctaaagacattgaagaatcctgtttggacctttttagcagtgaggagcgtccagctgtggttatctggagaatgcaataggcagaacttgctggtagaggccccgcttccctgtcttgaatgcctggcttttttttttcttttaaattttgcatctgcttctggatcacattgctgtgagccacattg

SEQ ID NO: 798072 - DNA, 522 bp, Homo sapiens
gacaccattagtcctttggcattgttggaaaatggatctcatctgcctgtggctgcagagcctcactggttggagctctgtcctaggggccttcagtctgcattggagctcctaattgttgagccatcggtgtatcagcagtmaagtggccagcagtcaagggatagttttcctgctcgtcttatatctccgccatgggttccaccccctgtctctccaccatatgacccattggcccaagtcatcccagtctaagggaagatttggtaaatctcatttgtccacctatatccagagagtggccaaaatttctgccagctggttacccgctggagagctggggacagaaacataagcccttgcttttggtgagaccgcagtaagtatctttggcaaacctgctgacttccagaaactgtgcagcaggaagatccagctgctgatctcaggggaggattccattcatgtgtaggacagcagagagcatatattgttgacttccaggaggaggatcccacagac

SEQ ID NO: 798073 - DNA, 561 bp, Homo sapiens
tttacactgctagtgggagtgtaaattagttaaactattgtgaaagacagtgtggcaattcctcaaggacctagaaccagaaataccatttggcccagcaattccattacttggtctatacaaaaaggattataaaccattctactataaagacacatgcacacgtatgtttattgcaccactatgcacatatagcaaagacttggaaccaacccaaatgcccatcaatgataractggataaagaaaatgtggcacatatacaccatctaatactatgcagtcataaagacatgagttcatgtcctttgcagggacatggatgaagctggaagccatcattctcagcaaactaacacgagaacagaaaaccaaacactgcatagtctcactcataagtgagagttgaacaatgagaatacatcacacaccagggtctgttgggggttgggggataagggagggatagcattacgagaaatacctaatgtagatgacaggttgatgggtgcagcaaaccaccatggcacgtgtatatctatgtaacaaacctgcacattct

SEQ ID NO: 798074 - DNA, 620 bp, Homo sapiens
caacaaaatttcagaaagaatttctctgcagtgggttcaggtcatgactgcaagcccttgacagctctcagaccgcctctccttcatctgctcatgttgacactgcctcccacatctgggcagcacagcaagtggggaggagttggctctggaaccggttccaccttgagcaagggacatatccgctccgtgcctcagtttcttcatctgtaaaatggaggtgataagaggacccacctcacaaagttgctgtaaggattaaattagctcatgggaagcactcggtgcagcgcttagcatgcagtgagcgctgggtgctcaagagctttggtttccatgactacaactggctactctgagtcttagtccttggggatggctcagtccccctctcggcatctaggtctgcttctgtagcccacacccaaattcttcttaccgcatccatcagtgcctgctygtgatggggctctgatcctcagcttcatggaggacacagccatgattgagctcccactgtctacaaggctcagtgaggcacagcagctgtgacgccccagggaacttagttaccctcttcatacttcatcttcctcatctgaaaaacaggcgtgtaaaca

SEQ ID NO: 798075 - DNA, 484 bp, Homo sapiens
gtttgcacagctttctctatcacttcctacaggtctttattaaaatgttctctttgctgaaaggcttttcctagctaccctgttaaaattgcatccatgagcaatatccccctttcccatactttgtttctttttagctattttgtgttttttaatgaatttttttagcagaaagtgaactccacacatgccaataattttgcctgcttagttcactttatattaaactaggaaggtttactcttgtacaaaactggaaattaggaaagtgcttgccacatactattcacctaacatatrtattttttgattgattgatttttttttagagacatagtcttgctctgtcacccatgctttggtgcagtggtgtgataatagctcactgcaatctcgaactcctgggctcgagagatcctccttcttcagcttcccaagtagctgggattacaggcacacactaccacatctggctcatttaaaa

SEQ ID NO: 798076 - DNA, 639 bp, Homo sapiens
aatgcattcttcagtgaaataatttaacaacacaatatctgtatccttacacacaagtatcttttttttttgagatggagtctctctctgttgcccaggctggagtgcagtggcgcgatcttggctcactgcaacctctgcctcccagattcaagcgatcctccttcctcagcctcttgagtagctgggattrcaggcactgccaccatgtccagctaattttttgtattttttagtagagacgggttttcgccatgttggccaggctggtcttgaactcctgacctcaggtgatccacctgccttggcctcccaaagtgctgggactacaggcgtgagccaccacacccaggcaacacgcaagtatcttatttctgaaatacattccaaagatacactaaatatattttaaatattatataaatattttaaggaaacatttgttaagcatatttaattcccaagggtaggagataaaaaagatacttaagacatgtttcctgctaacaaaaaatacgaactcaaatttgcagaaaaacatattaaataatatcacattgccagataataaatataaagttacataatgggaacacacacactatggacatctaattaaaattgaactcatagagaaac

SEQ ID NO: 798077 - DNA, 645 bp, Homo sapiens
tttaatttttccatatatgaatgagtcatacttcttaaatctttaacattccataattacatatagtaacacttggcagctgatactctgccagacactgtaaattaaatctataccctacaggagtttataatctaactgagcaaagcataaaaccccatgtkgtacaaaacaaatgatcaaaataaaaagaaagtaaagaaaataaattacgtttaagcacttacaaggttaaaaccttctagttattttgtctttgagcactatacatttttccaaagaagctatcaaaatatctctataggtgagtatgctaaggtataggagcatgctgctcttgaatctcttagcctggagtcaggtcaggaataccagctgtgataaattgtaaagtaagtatgtacaatttgacaagccaggcaaggatttgcttgttggagtgttctaaatcttttgttcttagttttgtccctcaaaattttcaaaggtagccaaacagcatgcaaaatcaggcatagggagtgtagcaattgcagagtactgcatatttgtttttcactttgtgggcgcattattcacaacattatttttctgatcatcaatttgcattgcattgttccctctcatatttatgaatactgtttt

SEQ ID NO: 798078 - DNA, 596 bp, Homo sapiens
ccacataaatttcttcttttgagaagtgtctgttcatatccttcgcccacttttggatgggtttgtttgtttgtttttattgtaaatttgtttaagttccttatagattctggatattagcccttgtgagatgcacagattgcaaaaattttctcccattctgtaggttgcctgataactccgatgatagtttcttttgctgtgcagaagctctttagtttaattagatctcatttgtcagttttgacttttgttatcattgcttttggtgttttagtcatgacrtctttgcccatgcctgtctcctgaatggtattgcttaggttttcttctaggtttttttatggttttaggtcttatgtttaagtctttaatccatcctgagttaatttttgtataagatgtaaggaaggggtccagtttcagttttctgcatatggctagccagttttcccaacaccaattgttaagtagggaatcctttccccatttcttgtttttgtcaggtttgtcaaagatcagatggttgtatatgtgtgatgttgtttctgaggcctccgttgtgttcctgtggtctatataactgttttggtatc

SEQ ID NO: 798079 - DNA, 596 bp, Homo sapiens
ccacataaatttcttcttttgagaagtgtctgttcatatccttcgcccacttttggatgggtttgtttgtttgtttttattgtaaatttgtttaagttccttatagattctggatattagcccttgtgagatgcacagattgcaaaaattttctcccattctgtaggttgcctgataactccgatgatagtttcttttgctgtgcagaagctctttagtttaattagatctcatttgtcagttttgacttttgttatcattgcttttggtgttttagtcatgacatctttgcccatgcctgtctcctgaatggtattgcttaggttttcttctaggtttttttatggttttaggtcttatgtttaagtctttaatccatcctgagttaatttttgtataagatgtaaggaaggggtccagtttcagytttctgcatatggctagccagttttcccaacaccaattgttaagtagggaatcctttccccatttcttgtttttgtcaggtttgtcaaagatcagatggttgtatatgtgtgatgttgtttctgaggcctccgttgtgttcctgtggtctatataactgttttggtatc

SEQ ID NO: 798080 - DNA, 594 bp, Homo sapiens
gtggccatggtggcagggatgaaggttatgcatgggctcagcaaatggacttccacttaccaaggctgacctggctatggcctctgctgaatgcccaattttccagcagcagagactaacactgagccctcaatatgatatcatttctcgaggtgatcaaccagctacctggtggcaggttgattatattggacctcttctgtcatgggaagggcagagatttgtcttcaaggaatagacacttactccagatatgcatttgcctatcttgcacacaatgcttctgccaagaccaccatccatggactcatggaatgccttatccaccatcatggtattccacacagcattgtctctgaccaaggcactcactttatggctaaagaagtgcrgcagtggtctcatgctcatggacttcactagtcttaccatgttcctgaccatcctgaagcagctggattgatagaacagtggaatggccttttgacgtcacaattacaatgccaactaggtgacaatactttgcagggctggggtgaagttctccagaaagctgtgtatattctgaatcagagtccaatatatggtactatt

SEQ ID NO: 798081 - DNA, 554 bp, Homo sapiens
aatgtgctagaacaaagctcaaaaatacttgagtccaaaaattccacttctcaacaatataaaattcaaaatgtctgccagccaattaaaaatattagaaatgggccaggtacagtggctcatgcctgtgatcctagcacttcggaaggccaaggcaaraggattgcttaagtccagaagttcaagaccagcctgggcaacataatgagacctcatctttaccgggaaaaaaaaaaaaaggaattagctgggggttctggtgtggtggcacatgcctgtagtcccagctattcaggaggctgaggcgggaggagcacttgagcccaggagttggaggctgcagtgagccgagatcgcaccactgcactccagcctggagacaaagcaaaaccccaactcaaaaaaaaaaaaaaaaaattaggacttctaatttctggtttggcacaaaaggagcctaaaagtcaccactccatcctaacaacaattaaaaagctgaacacatggaaaaatcaaccactcttcttagatatgtcagagcagtgaggtcacagggc

SEQ ID NO: 798082 - DNA, 501 bp, Homo sapiens
ttagactattgattttagatttttattctttctaacaatgccacaaatctccctctaagcactgctttcactgcatccctcaaattttgataaattatatttcattttcatttagttcaaaatatttttaaaattcttttgaagtttcttttttgcgtgtgttatttaaaagtgtgttgtttcaatctccaagtatytgggggattttccaggtaccattctgttcatgtttctagtttaattccattgtggtctgaatttgcacacattatgtgatttctattcttttaaatttgtagaggtgtgttttatgacccagaatgtggttaatcttggtgaatgttccatgtaagctgataagagtgtgtaacctgctgttattggatgaagaagtctatagatgtcaatcatatccagttgattgaagtgttgttgagttcaactatgtccttaccgattttctgcctgctggatctgtccatgtctgacagagaggtgtta

SEQ ID NO: 798083 - DNA, 633 bp, Homo sapiens
tagaacctcaagtagacttttaaggttttttgactctagtccctaagtcccagatggcacttctggacccacccagggcttaggggaccttgctgccctgaagggaagggcacaggcctagctggctttgccacctgctatttgtaragccccaaggcctttagtgaacataggtagtagacagggagtagttacagtaggccttgggcaagacccagtgctatgctggcttcaattctgacccagtatagccaaagtagtggtggacacagtggtgctcatgtcagttcaccccctgctttaggtgactcagaacagagagaagcactctgtatgtctgggaaaatgtaagggaagagaacaagagtttctgcctggtaatccagagaattctcctggatctggtcaaagaccatctacaagtctataagaaccacaatgttactgggcttgtggtgcttcctaaaccagatacagcttatatcacaacacccaagtcctttcagatatttggaaagccttcccaagaagaatggatacaaataagcccaaacagtaaagactaaaatgaatacctaattcttcagtacctagaccctgaagaacatctactagcattgacaccatccagga

SEQ ID NO: 798084 - DNA, 558 bp, Homo sapiens
agagaggaagagaaaagagacttttagaaaagtgagagaactaaatatgaatacaaccatggagatggggaagaaagaccctcaatatgaagaaataccccttagaacaattcaggagcagccttctgggtggtgaactagggaaaccaggctctggggcagtttctccacacttctgatttcctcaccatgcaatgaggacaactacwctgtccccattgtagtggtaacaattaaatcacacagtgccaaagcctgtgcagcatatagacattagactataaactttgttatgaaaggagttatttattgctaagcactgaaacagtatccaacatagtgtggatactttagctgaagtagtcacatgagtctttcagtctacagcaagcagccacttactgaaaatgtgccattgatgctgttactctcttggaagggacccaacatgatgcctgaaataggatacaggttagccccacttcaggagtttcctgacacgctgggtgtgttctctttaaaacatggctaaggcacttagcctaatgacatacatat

SEQ ID NO: 798085 - DNA, 618 bp, Homo sapiens
ttctccaaagtcattcatctggtcaataattgagccaggatataaactcataatcaaaggctgtttctttcacaaagctaacatacaagtagaattgagtctgcatacatacacaattgagcacacaaaaacacactgctgatttctatgtagttaaaaggtctatgcctttacactataggattacataatgttataaaagccttttttccaggattttcagatgatgttcatgtatctktatgatataaaacaaacaaacaaacaaacaaaacagaacttcagacaatgtggattgtgaaaattttgatatgaatcatttaattggaatgtttcttcatctttattctaataaaccatctagtcaaaactataaaaacatttcagatttgccttttctgccttacagtgggtaatctttcaggactctacactgaaaggtgccacacaataatcaaataattctttaaacaactggcatgcttaagtttcttaaaatactaaaatatatacaagtatatgtttttatttttgtttttattttattttattgcaagtcaatgcaaaacaaataagctaaaaattagctatatcttaaaatgcatcttatttttagtt

SEQ ID NO: 798086 - DNA, 538 bp, Homo sapiens
actgttcaagactatggacatacagtgatgaataaaatgcacattgtctatactgttgcagtcaacattagagtcacattaaacaatttggtagaaatgagtggcattttaagaaatttctacaattaatggtaaaatcaaacttgcgtcaagttcataagtcttccctgagttagttacatcaagtgtgacactaatgaggcaaaagtggctttatgtatacgtagtatataggtgggtgggaaggaggctagtagcatgtgatttacgtaaggtagtgttatatgcaaacgcattaagasgggaaataacacaaaagaaaaaaatgagtcattctaggtggaatgtaccttacaaagaattgggtaagatataaacacggtttatctcattggacaatgacacatcatgggcaatgttaataatctgaggctttaataaaaatagaggatatttggagagttttagacagaagagtaaaataatcactatgtttttttataagtacctaattgtcatgtaaagtatattctttgcc

SEQ ID NO: 798087 - DNA, 611 bp, Homo sapiens
tataatttctatgtttaaataatcatttgccaactgtcaaactgttttctaagataattgcaacattttacatttccaccagtggtgtacagggattcaaatttctccacatacttgccaatactgttatttgacttattaatcctagccgtcttagtgtgtgtgacatagtatctgataagtaatgatgttgagcacctctgcatttgcttattggtaatttgtatatcttcttaggaataatattctttcagatcctttgtccatttttaaattttgtgttattgaatcatatgagccctttgtatattccagatacaaatcccctgtgacatatatgattgcacatattttcttcctttaatggattgtcttttaacttttttgataatttcaactgaatacaaagtcaatgtatatacatttttgcagcaaattatawagagacaaaattaaataaaatgaacagtaatataaaaatcaaatatgaagtataaaatagatacacagtattgcacaaatatttattgaacagaaattttaaaaatcatttaaatgaaaggacttatcatgcacattgattgaaaaattctcctttttcatttctaagt

SEQ ID NO: 798088 - DNA, 613 bp, Homo sapiens
ctaagtattgtctatattttagaaatgctgatctttaaactttattgtttattttacattattaattgacattaaattataaaaagttctttcttaaaatattcaagctgactgttgttttgaaaagctaggtcatattttcgctgtggctttacattttctttgacacattgctttatagtttggcttatatgtttgttaatttaaaaataaataaataagaaaataatctaaaacattttatgtatgatttagttatatattgtgtgcatgaatatgtgccaaatgttgcacaaattctgttctattaaatgtggcttctgatcaagagaactggccactgaaattcaaactacagcactgaggttccgtcagcgaactcatagatttcaattaattgatcaataaaaagatcccagttaaagaagcacaaacctattatataattggtctgtcaaataaaattggctcaagagatatagkttgattaagtgaattaattaaccaattggttaatccaactatatgtcagccccacatatctgggcatcatgaatcatcaaattcagattaaacaactaatttatgaataaataaaaatatgacacaaaca

SEQ ID NO: 798089 - DNA, 519 bp, Homo sapiens; identical to SEQ ID NO: 796140

SEQ ID NO: 798090 - DNA, 630 bp, Homo sapiens; identical to SEQ ID NO: 796147

SEQ ID NO: 798091 - DNA, 630 bp, Homo sapiens; identical to SEQ ID NO: 796148

SEQ ID NO: 798092 - DNA, 541 bp, Homo sapiens
ctgatatggtttggatctggaaccccaccaaatctcatgttgaattataatccccagtgtttgaggtggggcctggtaggaggtggttgaatcatggggctggattttccataaatgttttaacactatcttcttggtgctgttcttatgacagtgagtgagttctcatgagatctgataatgtaaaagtgtgtaacacctctcccttccctttctcctgctcatgcttcaaccatgtawtatgccttctccccctttcccttctgccatgattgtaagtttcctgaggcctcctcagaagcctagcagataccagcaacatgtttcctgtacagactgcagagctgtgagccaattaaacctcttgtctttataaattacccagtctcaggtatttctttatagcaattcaagaacagactaatacactctctttgataatgatatgattctatacctagaaaaatcttaaggactcaagagaaaatctcctagaacagataaacaacttcagtaaagtttttcggatacaaaatcaatg

SEQ ID NO: 798093 - DNA, 588 bp, Homo sapiens
gcagaccttaacattcttcgttcagtttaataatctaatatcatttttgattttggagagactgcctgtgggcaatcaattaaacttgtgttttttgttggccgtcaacaaggcagtattcatccaccccacagaaaagaaaagtgagaatgggagaatatctgaaggttatgcmcaagaggtgcaggagcttgagccatctctcattgtttctaataggcttatgaaggttaaggagaataatggctaattcacagttggtgctagttagtgggggatgacagacttggtagtaagttgaatttaaggttctgtcaaggctatgggagagccacaccagggcatttacatttggaagaaagattccaaggtggttttgaaagatgaagattcattaatgtcccttcctctcccacatctcccaaaatgtaaagtgttcctttccaccttcacaaatcagtagccataatgttatatttctccccagtcatctcctgtttacatccacatcttacatatggaagagtcaggtgcaacaagcacaaaatcatttttataaaacttaaccagaactatatatttggattc

SEQ ID NO: 798094 - DNA, 599 bp, Homo sapiens
aaaaaaaaaagagagagagagcctggcaactcctcttctctctcctgcttccttcctttcaccatgtgatgctggctccctttccccttccaccatgattggaagccctcaccagaagcaggggctgaaaccatgcttgtacaccctcagaaccatgagctaaataaacctcttttctcgatacatttctcagcctcaggtattcyttcaaagcaatgcaaaatggactaagacagttatattataaggcaaaagggactttgcagatgtgattaaggtcatgaactttgagacaggagactatatcaacctaatttgagtgaatgaggtgggcccattctaatcatataaactcttaaaagcagaagaagaaagcagagagataagatgggagaagacagaggagagactcagagagtgagagggagtcaacctgccatcactggatttgacagcagaagacaggggacatgagccaaggaatgtgggtggcctctggaatctgggaacacattcagctggcagtcagcaaggaaataggacctcaggatcctaaggaactgaatttttttaacatcccaaatgaacaaggagataga

SEQ ID NO: 798095 - DNA, 598 bp, Homo sapiens
cacacctccatttttcagacttttatgtaggttttattctcaggcaggctcatttcacgataaccactagcagctctggtgtgtactgacttagatacatctaaattttccagagaaacatgtcagttctaattctgattggaccatcttgggtcatgtgcccagttctgagccaatcactacagccagacagaggatattgctgatcagtcagccctcagatacatgctcacccttggagccagatatacgttcagtgcctgcctcactacctggataaagaatggggagagatggggtggayggagaaggagggcaatgcacaaagtgggtttgatccctggctcttgcttggcagctgggctgggatggccaaactcaactggacttatgtgggcacactgaggaacttccacaatcagaaggagatgatgcacctgcaatctggcaccacctctgcactctgactacctggctcaggtgaccatacctgccttcagtccaccccagctgacccggcctccatctgaggggtgagggtgggcagagctgtcctgatgctgctgggcccacagagcaagcgatggctcagctgctc

SEQ ID NO: 798096 - DNA, 545 bp, Homo sapiens
gttgcttgggcttgttttgaactcctggcctcaaacaatcctcctgcctcagtctctccaagtgctgggattataggcatgagccactgagcccagccacaaaaatctttagaaagaaaattctagacacaaaatccatggcttaaaacctacatatttctaattagtttccaaatatctggatattattaatatgctgcttaacctctttagtattcaaaagtatcttattaaagccttattaattagtgtggctgcagaatcaaccaaattaattaaaactaccaaaaactttaaaattctaagtagtatattcaaataaataggtattcaattgtttgtgggctcagctttgtgccgtccagcctattgacacaaacatgtwagatagtcttgcctccttacagcaaggttaacattttaagatcagagacaacaacacattaaatatgaaaagccaccacagatttgacaagtgatcttttgtttcaacatagtaacagtattttcaaactaaccggcctcaatgtgaaaaatgcatagga

SEQ ID NO: 798097 - DNA, 606 bp, Homo sapiens
tgcaatgacaatccaggagccaattaggttggatggtctctggtacatacagcaaacctaacgatatgtacctaaaaaagatagttctactctaacttagattccagagaaagaacagttatccctacctgtgtaacaaacctgcacatcctgcacacgtacctcagaacttaaaaaaaaattaaaaataatttttaaaaaagaacagttatcccaaataacaattttaagaaattaaaaattgtatcatcagccgggcatggtggctcacacctgtaatcccagcactttgggaggctgaagtgggtgtatcacctgaggtcaggagttcaagaccagcctggccaacatggtgaaaccccatctctactaaaaatacgaaaattggctggacacggtggcgcatgcctgtaatcccagctakttgggaggctgaggcacgagaatggcttgaacccaggaggtagaggtttgcagtgagccgatatccagactgggtgacagagcgagactagtcttaaaaaaaaaaaaaaaagtatcaacatattagggtcatcagggtttactgaaaacaatgctgagatgttgcttaagacttttttgtcc

SEQ ID NO: 798098 - DNA, 625 bp, Homo sapiens
tatttaccttcctaaattgattcagcataatccttagaacagctttccttcatttctggaagacatatagataatgtggtacttatatgaaagcttacatgtcactgaaaaactgtgatttttgccttagctcaacggagcagcaagattatattaacatagactttgggccatttgagttcccatagggtatagagtgtagctgatatgacatgacttgcctccaacagttgttttaacaagatatccttcatatacagtatattgagctgaaaggcataactgagtaatgttagcaagaaacactgttggcaaaatkcttgactttcatctttatctgattaatccaaagcaatgtgttagtacaaaaaagtattttcagctgaatatatatgacagaatatttatttctttttaatgtctataactttacaagaactatttttggtgtgtgatatttttattctacaaaaagtttttctatatccattacaaagggcaagtagaaaaatatccaggactttgtgaggcttgatgaggcttattcatttgtataaagatttgttgagcacctaccaggtaccaggcaacatcctaggcatcgtggggatacaacagtgggtga

SEQ ID NO: 798099 - DNA, 625 bp, Homo sapiens
tatttaccttcctaaattgattcagcataatccttagaacagctttccttcatttctggaagacatatagataatgtggtacttatatgaaagcttacatgtcactgaaaaactgtgatttttgccttagctcaacggagcagcaagattatattaacatagactttgggccatttgagttcccatagggtatagagtgtagctgatatgacatgacttgcctccaacagttgttttaacaagatatccttcatatacagtatattgagctgaaaggcataactgagtaatgttagcaagaaacactgttggcaaaatgcttgactttsatctttatctgattaatccaaagcaatgtgttagtacaaaaaagtattttcagctgaatatatatgacagaatatttatttctttttaatgtctataactttacaagaactatttttggtgtgtgatatttttattctacaaaaagtttttctatatccattacaaagggcaagtagaaaaatatccaggactttgtgaggcttgatgaggcttattcatttgtataaagatttgttgagcacctaccaggtaccaggcaacatcctaggcatcgtggggatacaacagtgggtga

SEQ ID NO: 798100 - DNA, 625 bp, Homo sapiens
tatttaccttcctaaattgattcagcataatccttagaacagctttccttcatttctggaagacatatagataatgtggtacttatatgaaagcttacatgtcactgaaaaactgtgatttttgccttagctcaacggagcagcaagattatattaacatagactttgggccatttgagttcccatagggtatagagtgtagctgatatgacatgacttgcctccaacagttgttttaacaagatatccttcatatacagtatattgagctgaaaggcataactgagtaatgttagcaagaaacactgttggcaaaatgcttgactttcatctttatctgattaatccaaagcaatgtgttastacaaaaaagtattttcagctgaatatatatgacagaatatttatttctttttaatgtctataactttacaagaactatttttggtgtgtgatatttttattctacaaaaagtttttctatatccattacaaagggcaagtagaaaaatatccaggactttgtgaggcttgatgaggcttattcatttgtataaagatttgttgagcacctaccaggtaccaggcaacatcctaggcatcgtggggatacaacagtgggtga

SEQ ID NO: 798101 - DNA, 584 bp, Homo sapiens
gtaataacagacataattgttagcttctaatgaaattaggaatgtacaaatttattgcaactattattataattttgaacacctccaaaactgatttttgctttaaatcttggtgcttccatgttaccacatgtgtatcttgttttcactatgtaacaggtgtttttctgaaagatttaatggatatggttctgcaaacttagaattattcagattttaaaaatagtgactgcagaattgtagaattaccatttttatttcaagttggcaaaaagcagttaacgtataygttgggacattgaacaagtgacagcagagttccagatgaccatcaaagtgacatttaaaaatattgctagtctgactttacagtcctcgagttttaaatcattataaaattggaggctgtgcggtgtgttctttaccttttgtggttgaaaggtaggagtgcaatgagtgtgtgtggtctgagtttttgtggacgtgatctacatttaatctggggaaattaattccctaagctgctggcaggcagcatgtacttgttaattattcaggtggatgacaaatgcagagcagaggtt

SEQ ID NO: 798102 - DNA, 603 bp, Homo sapiens
tgtgattatgaaaaggactgtgtgtgtcctagaaggtgttccatcttaactagagacattgagtaaagaaagtacctagaaatgcaaactatttagatagaaatcatccatatgtgttacctaaatataaaaataacttcaaaaattgttcattgtttttctataagatggtcatcacccaatcttkgtcatatatgcaatccatcagggatttgttttgatagagactttggtttccatgtacagtggtttataagaaaaacacatgtggaaaattctatgaaggtgacctgcatctatctgatgatttggcccacatcactgctagggagaaatctctatgatagatccttgatttgtaaattaaagtctattttatagactttaaaatgtcttttctagaaaacagaactccatattttgggagactccaaggtccctcacgagtacttcaacaatcatgtttctgtatccattatttgcaatacacagatgggagcctcatccaaattgtcatttctcttaaaaaaagaaaaaagagtcagctttaaaatctgttgtaagctacttgggtgccttttagtggctttttggaggaaatca

SEQ ID NO: 798103 - DNA, 603 bp, Homo sapiens
tgtgattatgaaaaggactgtgtgtgtcctagaaggtgttccatcttaactagagacattgagtaaagaaagtacctagaaatgcaaactatttagatagaaatcatccatatgtgttacctaaatataaaaataacttcaaaaattgttcattgtttttctataagatggtcatcacccaatcttggtcatatatgcaatccatcagggatttgttttgatagagactttggtttccatgtacagtggtttataagaaaaacacatgtggaaaattctatgaaggtgacctgcatctatctgatgatttggcccacatcactgctagggagaaatctctatgatagatccttgatttgtaaattaaagtctattttatagactttaaaatgtcttttctagaaaacagaactccatattttrggagactccaaggtccctcacgagtacttcaacaatcatgtttctgtatccattatttgcaatacacagatgggagcctcatccaaattgtcatttctcttaaaaaaagaaaaaagagtcagctttaaaatctgttgtaagctacttgggtgccttttagtggctttttggaggaaatca

SEQ ID NO: 798104 - DNA, 611 bp, Homo sapiens
ctttgagtccaatatagaaatgaaatgaatctacctctggagtaaaatatggtagccatttaattattttttaacaagctacgtattaagcacagttgtatctttatgcaataaatgttttgctgaggaactttatcaattatatttcacattaaaatgttcagactttatttttattcttactaaaaaataacatgttcttttgattagaaaaatactcagaaagttgactatttaaaaataaatctctgttgagtctttttgtcaagccgaaaaagattccttaatgtatcacatagrtgtgtctcgagttttcttacggcagcacaagtcctgcttcatcttggggtggtgtggagcggggggtgagaggaactccaacagcatactatcttgatggacagaaccaatgcacactcaactcttaattgcacaaatggaaataatccaggccgttttcttttccctttaggcttccttgctagatgatctcatccactcttagggtgtcaaatagcagctctgctgatggcccattccttttcatctcttcttcccatttcttgccttattttctgcttaatctttcaaactgtctgatgaactcctct

SEQ ID NO: 798105 - DNA, 548 bp, Homo sapiens
gcatactatcttgatggacagaaccaatgcacactcaactcttaattgcacaaatggaaataatccaggccgttttcttttccctttaggcttccttgctagatgatctcatccactcttagggtgtcaaatagcagctctgctgatggcccattccttttcatctcttcttcccatttcttgccttattttctgcttaatctttcaaactgtctgatgaactcctctctcaagatatcttaccaggaactctgtcttagttttatgttgctatagcagaawaccacagactgggtaatctataaagaagagaaatttaattctcatactcctggagtctggaaagtccaatatcaaggtgctggcatttcatgagggacttctttacggcgtgatttcatgatagaagatggaagggcaagagagcttgagagaagaagagatcaaacttgcagtttcataccctttaataatcagcattaatccattcttgaagatggagccctgatggcctaaacacctcctattaggccccacctcccaacact

SEQ ID NO: 798106 - DNA, 575 bp, Homo sapiens
cctggatgtgagacatggagtcaaaggagatcattttggagctgttagatttgactgccctgctggatttcagacgtgcatggggcctgtagcccctttgttttggccaatttctcccatttggaatagctgtatttacctagtgcctgtacctccattgtttctaggaagtaactaacttgcttttgattttacaggcttgtaggtggaatgggcttgccttgtctcagatgagactttggactgtggacttttgagttaatgctgaaatgagwtgagactttgggggactattgggaaggcatgattggttttgaaatgtgaagacacgagatttgggagggaccggggtgaaatgatatggtttcgtcctgtgtccctcacccaagtctcatgttgcaagtcccacaattcccacgtattgttagaggtgattgaataatgggggtgggtctttcctgtgctgttcttgggatagtgaatgggtctcatgagatctgatggttttaaaaacgggagtttctctgcacaagctctctcttttcctgctgccatccatgtaagatgtgactggc

SEQ ID NO: 798107 - DNA, 575 bp, Homo sapiens
cctggatgtgagacatggagtcaaaggagatcattttggagctgttagatttgactgccctgctggatttcagacgtgcatggggcctgtagcccctttgttttggccaatttctcccatttggaatagctgtatttacctagtgcctgtacctccattgtttctaggaagtaactaacttgcttttgattttacaggcttgtaggtggaatgggcttgccttgtctcagatgagactttggactgtggacttttgagttaatgctgaaatgagatgagactttgggggactattgggaaggcatgattggttttgaaatgtgaagayacgagatttgggagggaccggggtgaaatgatatggtttcgtcctgtgtccctcacccaagtctcatgttgcaagtcccacaattcccacgtattgttagaggtgattgaataatgggggtgggtctttcctgtgctgttcttgggatagtgaatgggtctcatgagatctgatggttttaaaaacgggagtttctctgcacaagctctctcttttcctgctgccatccatgtaagatgtgactggc

SEQ ID NO: 798108 - DNA, 575 bp, Homo sapiens
cctggatgtgagacatggagtcaaaggagatcattttggagctgttagatttgactgccctgctggatttcagacgtgcatggggcctgtagcccctttgttttggccaatttctcccatttggaatagctgtatttacctagtgcctgtacctccattgtttctaggaagtaactaacttgcttttgattttacaggcttgtaggtggaatgggcttgccttgtctcagatgagactttggactgtggacttttgagttaatgctgaaatgagatgagactttgggggactattgggaaggcatgattggttttgaaatgtgaagacasgagatttgggagggaccggggtgaaatgatatggtttcgtcctgtgtccctcacccaagtctcatgttgcaagtcccacaattcccacgtattgttagaggtgattgaataatgggggtgggtctttcctgtgctgttcttgggatagtgaatgggtctcatgagatctgatggttttaaaaacgggagtttctctgcacaagctctctcttttcctgctgccatccatgtaagatgtgactggc

SEQ ID NO: 798109 - DNA, 617 bp, Homo sapiens
acatcatattcatgtttctattcctcatgcccagtacatgccagggaacatagtgggtactcaaaatttgcttttaaacagtcatttagttttttgaatagcaatttttgcttctttaatttcagctgttgattgtggtaaaaaaattcagttgaacttcttttctatatcttgatttacagtaggagtactgtgaggaattagatgggtattattataaatgttayattccggccgggtgcggtggctcatgcctgtaatcccagccctttgggaggccaaggtgggcagatcacaaggtcaggagattgagaccatcctggctaacacggtgaaaccccatctctactaaaaatacaaaaaattggctaggcgtggtggcaggtgcctgtagtcccagctactcgggaggctgaggcaggagaatggtgtgaacccgggaggcagagcttgcagtgagcagagatcacaccactgcactccagcctgggtgacagtatgagattctatctcaaaaaaaaaaataaaagttatattccttgtctaacacagttgcattttctaaatgattacccagtctgtattcccccactgaagtgtttttatttttagtaatt

SEQ ID NO: 798110 - DNA, 449 bp, Homo sapiens
tcagcaaataattgatcagtgattattattaccattatttttggccaaatgcaatgggtggactcatttctctattctttctctcactaggggagaacaaaataggattttattgctttatataactgttgggaccctctttatrccttccataacgtttcataatgagaaatgttgaaaaaacatttatgtcgggcaatgactggaagcattcttcctttttcctacaagcataacacaacctggcaagccaagtttaaaataatcagaacatttataattctaataggagcaaattcatctatgcatgttttgggtctccttgtgttattttaaataagtggtagaatctattagtaattaattttgtaaacactagtttattgtacatgagcatagagtaagcttgaattatgactttttttgttatccattagcacctattttcc

SEQ ID NO: 798111 - DNA, 515 bp, Homo sapiens
attttataagtattaggaaactaacacatacctaaaagacattgactataatgaaaattcctgcctttatttaatgaatgtttaggaacgcctgaattcctaaaactcctgaatactgttattattacatgattacaaaatataaagtgcttagaagacttactgtattgatgaatgaaagcatagatttttgtagaaataagccatgtcaagytcataagacaggaatccttaagtaaaaacattcatctccttctgtgttaggaattactaacaacatattttgaaaaataaacaaattaagttagttataaaaatattcatctaagaatccactttatgtaccaaatgcaaatctttgaagtcctacattatttctccctgcacacatcaccttctccttctcagatctcataccctgtattagaatgacagtatcaattttgtgttgatatacatattaggatattcaacagttaatattcacaagggcaattatgcatatattaaatacc

SEQ ID NO: 798112 - DNA, 515 bp, Homo sapiens
attttataagtattaggaaactaacacatacctaaaagacattgactataatgaaaattcctgcctttatttaatgaatgtttaggaacgcctgaattcctaaaactcctgaatactgttattattacatgattacaaaatataaagtgcttagaagacttactgtattgatgaatgaaagcatagatttttgtagaaataagccatgtcaagctcataagacaggaatccttaagtaaaaacattcatctccttctgtgttaggaattactaacaacatattttgaaaaataaacaaattaarttagttataaaaatattcatctaagaatccactttatgtaccaaatgcaaatctttgaagtcctacattatttctccctgcacacatcaccttctccttctcagatctcataccctgtattagaatgacagtatcaattttgtgttgatatacatattaggatattcaacagttaatattcacaagggcaattatgcatatattaaatacc

SEQ ID NO: 798113 - DNA, 628 bp, Homo sapiens
aaaaaaaaagtttcatttaaaaaatgaaaaaaaaaaaaggcggcttagaaaacattttaggaaatagaaaatagagataatctttaaatgaaactttttttttgagacactattgctttgttaccaggctggagtgcagtggcatgatctcagctcactgcaacctctgcctcctgggttcaagcaattctcctgtctcagcctcccaagcagctgggactacaggcatgcgccaccacrcccagctaatttttgtatttttcatagaggcagggtttcaccatgttggctaggatgctcttgatctcttgacctcgtgatcggccctccttggcctcccaaagtgctgggattacaggcgtgagccaccatgcccggcctttctaagctttctctctctcttgcaaagtcttggaattaatcttaccctagaagttattcactacaaatgaggatttcatagcttgtatgtgaaaataccttatatacgtttccatatctatttgtgcttgtctatatttctcagtagattgtgttatccttatccttatcctcaaaagtttttatttggtaccgggattgttatagtgttggcaaacacctataatagactgctcagaggtgcaaa

SEQ ID NO: 798114 - DNA, 628 bp, Homo sapiens
aagaatggagttagaaacaagaacactccttaggtctctcacataattttggtcctgttcctacaaacaactcttgatcttgtttcccatgatatagatcaggattcctccaataattttccttttgtatgtttttctaagcaagccagagttgattcatagacttgagccaaaagtcttaataattaaaaatcattgtaaaattttaaaatcagaattttaacaaaaatctyggaaatatttacatatatttttaggctgggcactgtggctcactcttgtaatcccagcactttgcgaggccaaggtaggcagatcatttgaggtcaggagtttgagaccagcctggccaacatggtgaaaccccatttctactaaaaatacaaaaaaaaattagccaggcgtggtgatgcacacctgtagtcccagctacttgggaggctgaggtgggagaattgcttgaacctgggaggtggaggttgcagtgagccgaaatcataccattgcactccagcctgggcgacagaatgagacttcttctcagaaaaaaaaaaaagtatgcaattttttaaaaaaagtaacatgttacaaattagaaaattctacaatagtaattttactggtacaa

SEQ ID NO: 798115 - DNA, 624 bp, Homo sapiens
tgtgaaactgctccatggaatcctttgggagaagatgctgatgaaaaggagagcattagttgtattgttaatacaactatacagcagacaacactaactgccctagtgacaagcttacaggtcttcctaacagtgaacgaatcactacatactatagtgtacttaagcactgcttgtctactttctaatggaaaatatttgtttctgctttcargtatatgttcattaagtcaggaatttagaaaaagcagaaataagctctccaccaaggaaaaaccactgcaaacaatttggtatatgacattcaattctttcttctctccatgtatttcatgtgttatgtgaagatatacctgagtgtatttaaagtcatatgtccttactagttccaatttttttacttatatcatttcagcaatatttaaatattcatctagaaaaaatagagttacattatattataccaaatagcttaggaattatttatattgtgtaggtttaaccaagtatttaatatatgatgttttttccccaattttctacttaaataaacattatttttcatgaggaagaaatgcccagtaaggagattatcagatatactagcatttttaacatttatgt

SEQ ID NO: 798116 - DNA, 573 bp, Homo sapiens
tagtacttttcagaatgattagagggcaaaaataattttaaataatatgattactcttcttaatttaacaaaaaatctgatgccaagccttttcaaactaaaataagaaaatatagcctatagtatacaggaaatcataatgtggaaaagctatatttatatttattccaatattatgctctgacactaaaattactaaaaaggaaacagaataaaacagaaatataaatctgctagcatatatattgaagataattttaatatttgataattatatgtgtcatcatattcagtacagagaatgactagggttaaaggcattaacagttggtagaatctctcttattttcccacacatccactataattattcttgaccatatgctgatagctcwtctcctgacatatccttgtgcccctgagttgtcaccaagctctcctatgcaatatgttagaaatctttcctgtatacattttcttagcattctgtgtctctacatcaagatgatcagatggaatagcactcagacaagaatttgaagcgggttaccatattaccattccaatggaaca

SEQ ID NO: 798117 - DNA, 584 bp, Homo sapiens
attcctgcggttttggaggtcatggctagagttacatataaataatgcaaaaaaacagcagataaaactcatttagagagaaatattaaagatcaataatacatttgcaggaaaaatattggttaaatgaatgagtgaatacattagtcaataggaaagatcaaaaagcagaaaaataaaaaattccttatagaaaaaggaacgcatgmccagtattaaaagattctcggccgggcgcggtggctcacgcctgtaatcccagcactttgggaggccgaggcgggcggatcacgaggtcaggagatcgagaccatcctggctaacacggtgaaaccccgtctctactaaaaatacaaaaaaaaaattagccgggcgcggtggcgggcgcctgtagtcccagctactcgggaggctgaggcaggagaatggcgtgaacccgggaggcggagcttgcagtgagccgagatcgcgccactgcactccagcctgggcgacagagcgagactccgtctcaaaaaaaaaaaaaaaaaaaaaaaaaaagattctcaacctcagtcataattaaagaaatcaaaatattacaa

SEQ ID NO: 798118 - DNA, 655 bp, Homo sapiens
tcaattttcctattctggatattttatataaatggaatccaaaatatgtggccatttatgtctggtctgtttcactaagcataatgttgtcaaaggtcattttagtatatatcagtatgatattcttttttatggctgaataacattctgttttatgtatatatgacaatttgttcatctattcatagattgatggacatttgggttttctccactttttgactcttatgaatagtgctgctatacgaacatgcatgtgcatgtatttcttttagtacctttttccaattcttttttgcattcatataggattcatattttaattctaacttttttattatactatgaaccaccaaactgttttccacaaagagtacaacgttttgcattgccatcagcaatgtacaaaagttccaatttctccacaaccttccgatatttattattttccrttaaataatattataaccatcatagcagacatgaagtggtatctcatggctttgatttgaatgtctctaattactaattgtgttccatatcttttcatgtgctttttgggcattcacgtatctttggagaaaggtctattcaagtttttggccattttttaaatttggctgtttgtcttttgttattaagttttaggaatttt

SEQ ID NO: 798119 - DNA, 594 bp, Homo sapiens
tttttatggttaaatttctgtatagcattcttcaatgtacttacttaaattaagtagttctagttatagagtgaggaatgtattttgttataatgttctcattttaaaaattattttctcatatttatacatattattcatttttatatttttgaagtatagcatcatatcatgttttatcaagactaatttattcaggcttcattaattttaggatttggggattatgcagtgagacagaactgtgtggttgaaataatctaacacatcactagattctgtttacaatattaagacactatctgatttcagactttccttaaagaaatttttagtgaatatttcataaactccaatctcctcccaggaaaaattttctcacatcactttgctgaggaaagtaataattacaaccagagagatttgtaatgcaatcckgtttgcccagggctttgtggttgatttgaaaattctaagttacaaaagcatctcacgttttcaaaactgattcttattaaagcattgcagaaaatcatattaatattctatgtcaattatttgacatatacagaaaaaaacataaacaagaaatcc

SEQ ID NO: 798120 - DNA, 605 bp, Homo sapiens
ttttataatgaagcaaatgtcaattccaaatagcttcctcaaagaacaatcgagaaacaaaaaaagaaattactttcctttattcaaacattctagtgtaacaaatgaatgacaagaacaaggccttgtccttgtacaccatgcagcatatgcaggttttctataaaacagttcattagaacaacattctaaaaggggtggataaaaataatgttacttttctctggtttgccagaaatgacttatataaatggaaaggatgtattcaataattatcctaaaaaaaaacctggaagggttttgttgacaaggttgactaagaccttatacatttttttctataaaataagcaacaattctttatatataatatgtggtggaaagagggaaaatttaaaygatgaaacttgttttaatgcattgtgactcaaataacagtcttggctgcttgagtccagattcttggggcctctgactgtgcttcctcttctgagtatcctatgcaggttttctatttctatagtttctacataaagcttttgatctcactcccccctgacttaggttgtccatggctgttcttattactagctcttttttattct

SEQ ID NO: 798121 - DNA, 605 bp, Homo sapiens
ttttataatgaagcaaatgtcaattccaaatagcttcctcaaagaacaatcgagaaacaaaaaaagaaattactttcctttattcaaacattctagtgtaacaaatgaatgacaagaacaaggccttgtccttgtacaccatgcagcatatgcaggttttctataaaacagttcattagaacaacattctaaaaggggtggataaaaataatgttacttttctctggtttgccagaaatgacttatataaatggaaaggatgtattcaataattatcctaaaaaaaaacctggaagggttttgttgacaaggttgactaagaccttatacatttttttctataaaataagcaacaattctttatatataatatgtggtggaaagagggaaaatttaaacgatgaaacttsttttaatgcattgtgactcaaataacagtcttggctgcttgagtccagattcttggggcctctgactgtgcttcctcttctgagtatcctatgcaggttttctatttctatagtttctacataaagcttttgatctcactcccccctgacttaggttgtccatggctgttcttattactagctcttttttattct

SEQ ID NO: 798122 - DNA, 612 bp, Homo sapiens
attctgaaaggtataagacagtagttttaatctgcatttctctgataattagcggtggtgagcattttttcatatgcttgttggtagtttgcatgtcttcttttaaaaaatgtctgttcattttctttgcccactttttaatggttatttgttccttgctgttgctgagttgtttgagttcctcattaattctggatattagtcccttgtggaaaacagtatgaagatttctcaaagaattaaaaaatagaattgccattcaatccagctatgacactactgggtatctaccccctgaaaaaaattatgtgcaaaagataacctgcactcacatgtttatcgcaacactattcacaatagcaaagacgtggactcaacctaagtgtccaacaatagataatcacagaaagaaaatataaaatrtatatacaatagaatactactcagccataaaaatgaatgaaatcacatattttgcagcaacctggatggaccttgaggcttttatcttaagtgaaacaactgagacacaggaagtcaaatattgcatattttcacttagaagtgggaactaaataaggtatacacacggacatagagtgtggaataata

SEQ ID NO: 798123 - DNA, 469 bp, Homo sapiens
atcctcctttcaaataaatacttctggaatttttctaaatctgtttttactctgtaaatgatcacacagttttgatataaaattccaatgaatattcagaatttggtatttatttgcatgaaaattctaaatgcagaagataatgccacttgtctgtaggccaacaatagcttaaatttcctttatgaaagaaacacctggtaagtsaccgggattaaataccggtataagaaaagggaaaggattctcaaacctctaagaatggtctccagacagacactatcctggtaagcagttaactaatctccttactacatatggccccccaatccctgactgtatctggccaattccactggcctgcttctgttacctaccatgtaacaggggtcccacaataaagtgctaaaacatcagtggtgtctaagactcatttttgacacaaattggaccaaaggggaaaagttat

SEQ ID NO: 798124 - DNA, 529 bp, Homo sapiens
caagccagaatcacgcatttgaacccttctcaaattcctgacctccaaaatcatgaacaaaataaaatggttgttgctgcaagctgctaagtaataggtactctgttgtgcagtaacagataataagagacagatgtaattagtgttacattatcagatgttgtctgagatgtcatcactctcaagttatctccagattatattttgatagaaagcagaaaagttgatacagccatgaggcaggaaataaatatatacttttgttactgtcatgtgaggaaaaagtgattctaattttataattagatgaaaaagtactttctagttttatatcagtggctattcytgtttgccagtggagataacacactggaaatgtacctataattagcaaaaccacctggttacatttgtcataatcttcagtattagttctcaaaatgtggcccctagatgacttcagatgtggaaagacttaatatacaaaaagcacatatcataacctatttaatatatcagtcattgttaa

SEQ ID NO: 798125 - DNA, 590 bp, Homo sapiens
gatttttcatgctgaagtggtaggttacaaaaaaatagaagaccagaataatccatgaggtaatgaattaaatgtggaaacatcagtatgcttagcttactatagatatagataacacagaaatatttaaggatatgtatatacacagctgtcaatacacacacagatattttctcattctgtcagttgcaatggcctagaagaaatatatttcagtagtaacagacactcctagcattcagatcatggtttccaatgtcattcttcaacaaaataaattaaggctccttagacatacagggattctaggctgtggcatatttaagatgaatatgaacatgaatatggagcattttatactaccagaaaagaagacagtattaaaacacacatacacacacacacacacacacacacaatgatggaragaagtcatttgtaaaatggcaagtgtaaaaatagggagctctgacaagaactaccacagccacatatagaaggtcaacattatcaacagtgttgtcatgttgatagcatataatcttgatatggtataattaaaatgacacctaacccctgtggttttcttc

SEQ ID NO: 798126 - DNA, 494 bp, Homo sapiens
tttttatttttccctcaaattccacatctctgggaggaaattgatttgtccatatggctgaatgatcagataatggaatttataagactcttggggaagcaactgaaatagaaaatatcgtatactactgctttacagcaagactcctaggagcctaaattttccaaataaatcatacatgccctcttatatagaagcacttaacactgaaaaaaaaaaaawcacttctagtcttcgaagagaacattattaataacaacggcatcaatgattcctcagtttaagtaacaaaataatattcgtgatgacactaatatacaatatttctgtgacgatttcatgaaaaaataacatgaaaatatttagtaaactgcaacttattattgtaacacacactaattaggaatttttctcttctccataacttgccactaggatataaagctgaaaaaataaaaataatgtacactttggggactcctcagctcatccaa

SEQ ID NO: 798127 - DNA, 569 bp, Homo sapiens
atacaagtttccatttattttcaaaattacttaggtaaaaaacattttccacaaactctagtaagttagattatgtcatacatttgtaatacatttaaatttgtctttagctccttaatttcatcctgaggttattcaataccctagttgattttgttcatatacattaaggtttattatttgtaccataagtttctatgagttttaacaggatagtgtcatgtatctaccactacgatattgtatgaaataatttccccacactaaaaatttcccatatgcttcatctatttaacatccttccctcactaagcacataccaatagctggtctgctttctatatctatagggttttgtttgtttgtttgtttttcccmgaatgtcaggtaagtaggctcatagagttatgcatctgtttcagactggcttgtttcacttagcagctggcttgtttcgcttagccatatgcaattaagatttatctatgttgatctgtagaatgatagttcattaatttttatctctaaatggtaattccattgtagagaaatgccatcatttgtatatc

SEQ ID NO: 798128 - DNA, 554 bp, Homo sapiens
ttattggaagtctacaggcatagggcctagataacatttttataaccaatccatttaggatatagattatgatagtttgataggtacctaaaattatttctatttattttagaatcacaatgagttaaagtctgaaagactgaaaacataatttatttgtacaaggtttatttcaattaatctaaattaatccccattttctgaccagaaactratacacagagaggttacttgcccattccccaatcagaaacttgtaaagctaaaattttaacaccagtctggctccacagttttatccaccacactctgctacttttctcatttaaatatttgtgtggaatagtgacattaacgtttgctctagtcctctcttcctttagaaatttttctaaattcccacactaaagaataactataattctcttctatgtctcaacactgctctctcttttgtaataaaattgccaaattatgtttcaacatttaagaaaagaaaaatttgacagctatctcacacacacttcagcttggaggcaaattatacataatcg

SEQ ID NO: 798129 - DNA, 466 bp, Homo sapiens
actccttcaggattcaatatgatattagtggtgaactgtctacaatatcttgtttacattcaaaattagtttgtaactaatgtctccaggtaaataaaataaaaataagtaaacagagaacaaatgctaccaaaaaaagttataacactgactaataacagtcagcattataagcaaacgtwtttttattaaaataagacaataattatttacgtaattttattcacattctacataaaaaagtaagtgttctccaacacagctagaaggatgtaaagtctaatcttctctaattgatatgcatttggaatattccgagaattctcttcatctcagctacagtcctcaacatggtttaaatatgcagacattaacatacatttaaataacactagtaaggtcagttaagaatagtctgaatatataggatggtaaatttgcatgtaaaatgtaggagaaagcccac

SEQ ID NO: 798130 - DNA, 565 bp, Homo sapiens
ggtcattttctgaattcacacttgatttgctttaacttttattctaaccttacctgatgctaacagtgaatccccattcacagccatttattgtttgtttgtttgtttgttttgaaacagagtttctctctgtggtccaggctggagtgcaatggcacaaccatagctcatggcagcctcaaactcctgggttcaaaggatcctcccactccctgtcccagcctcctaggcagakagggctaccagcagaggacactacaaccagccaggaagctaatttttttttttttttttggtgtgtgtgtgcgtgtgtgtgtgtgtgtgtgaaagaagaattttcaccatgttgcctagtctaatcttgaactcttggcctcaaacaattctcccaccatggcctccaacaatgttgggattacagacatgagccactgtgcctggctacagccttgttttgtaaacatttcttcaccactatttttttaaatttctttgatctttttccattcacttgctgtaaccattctctgttggttttgaaaaaaaattcatcaaagaagccatt

SEQ ID NO: 798131 - DNA, 655 bp, Homo sapiens
ctcatcccttccgggcaaatggaatcaaatgagggtgagggtggctggggaataaagcagggtgagtgaagagatgggggactgctcttagaagcagtgtctgaactccaccccctccaggatgaactggaaagtgcttcttctcctccctyccttgactgatggctatgggaactttagatggggaaatacggatatactgatctctcaaccaaatgtaatttgtattaagaattaagagttcacaagttattctctgtctctctctctttttttttttttaaagaaacagccttgccctgtcacccaggctggagtgctgtggtgctatcatagctcactgcagcctcaaaatcctgggcttaagtgattctcccacctcagcctcctgagcagctagtactacaggcacacactaccataactgaccaatttttctgttttctgaagagatgaggtttcgctctgttgactagactgatgtcaaattcttggcctaacgtgattttctccctgggcctcccaaagtgctgagattaggagtgtgagccaatgcacccagccaacttatccttttttatcttcatcacaatcttatgaggtgggtatcgttattagtattgtcatttaatagaggaagagaacaaggattggg

SEQ ID NO: 798132 - DNA, 613 bp, Homo sapiens
agtgtttttaagaaaattacattgaaggtacatgccttgaaggaggaaaaaacagaatgcttattatgtgcccgggaagtttacctatattatttcatataatctggacaatcaccctatggtatggattttattacctctattttacaagcaaggacactgagattcagagaggcacagaggctcaccaaggccactcagccagaaggtaacaggactgggaggcaggcccggcactgtgagcccagagcccctgctccttcctatgtggaagatacccagagagagcgtcgagtgttatttaggaaaatgagtgctagacgcatgatatgtaacaatcgcagctgctgcctccatcagtggagcagctggcatgagaaaggagctgaaataaagagaagtgaagggacttgtagcttcccaaaagtgaacctgcaaggagagagaacaactcagtctccactggatgygattctccttaggcaccagaggctgtttcctcttggaggaaagaccatgaggctattactggacagtgtatctgctcgttaccaaaaatatccatatttacataaaagatatagcttgaagtaactgagctcacccggttaaa

SEQ ID NO: 798133 - DNA, 536 bp, Homo sapiens
ttgctaatccagtgtttatattagagaatataaaaatttattgaggcatagactgacttttatttcctacccttcatggtaccaagcctagtgacctttatacaccaatgctgataacaggcattttttttatggcttgaaccagtattttaatttgaattatgaactgtggggtccttcatctaaatattaaaactactaaatcagctacagtaattggactaaatatgtggagcatggaaaaccattagtatgatgaaggtggctgttgcaggccacagaaggctggcatgcttttttacaaaaagccaggtgctgggccatggaagtaggaaagtgatcatgcaaagtacrcctccgtctgcagcacgatgaggctgtgttatcatggtttatgttatcaaaattggctgcagccaacctaggtgagtacatttcccttcaggaagttaagaaacttcatggcacaaatccacgaagacaggcccttctctgtgactttttttttccataaaattataaaagccatatttatg

SEQ ID NO: 798134 - DNA, 597 bp, Homo sapiens
ctccagcctgggggacagaacaggatccatgtctccaaataaatgaacaaacaaacttatttaaaaaacccccaaaacaaagaaaattgggcttgtaggtacaaaagccagtgactaatgtgtgtggctggtgattaaaaatccttacaaaccagacaagacaaatcactcctgtatatcttgygtaaaattaaaaggtcagccaggaagaaaaggaatgatgaaatttcttaagttcttcatcaagctgaaaagctcatttgatgctttgggtattttttaaaaaggcatttcatggaaaactcccaaaccagaagagatggaatattacataggaaaccatttaaaagctcagaaaatcctttaagtccaaatcaaagaatgcaattcccatcatatggaactcatttctttttgaaagtcagtaagtcaaaaattttttactaggaatcggctggttccctctgcattttttccagagaaggcagtttgggaacacagttccagaacctcagcctcatgagttctactcctggattttcctggattttctctctgaggctgtggaaaaattctctttctctctctgcttctgag

SEQ ID NO: 798135 - DNA, 721 bp, Homo sapiens
atgcagtttgcaatctgtttcattgttttaaattttagatacaaattaaaaactccttatggtcaaataggatggaaataattcacattttgtttcttcgtctagaagaagcaacagtccagctgttaaagcgtaggccatagcattgctatgttattattgcttatttcgaaactgtttacatgcaggaatgtgtagcatcccacaggctggaaataaaaaatgtgctgaagggagcttggatgaatcccacctgtctcaaacttactttgcaaaggaatgtctgtgacggggtccacctatgtcagcggcaacagcaactttagtaattgtttagagcttgcaargaagagtgttttatcagtgacactgtttaaaaattgtcagcatttgatgataataagcagcagactgacttggagtcagttttattattgtctttaaattctcaccccattactgcctgcacttgctctctctcacctccctgcccattatacaccactgtgggtggaccattacaggggaagctggtgatacacattaactccaggaacactgtactggagacacagcagagggaaggacacgtggtattatctatccaaaagatcaacaaagatgaaaacagacagcttcctactagggaagtcttagtgtggctcattgttatgccaatgccctgtgttcaggatccagcaggaaggttgtgagcccaggg

SEQ ID NO: 798136 - DNA, 566 bp, Homo sapiens
gactgtcatagagaccattgtttttttgactacagtgcaatgaaatttgaaatcaacaatgaaaagaagttaaaaataataattacaacatatttggaaactagtaaaaaataccttctaaaacatggattaaagaggaatctacaatagaaatgataaaatatttagaagtaaatgacaatgaaagtttctcctatcacaacctgcgagagctggtccagaaaacaaaacaaaacgctgttaagaatatttttgaggtaacgaaccaaatttgaacaagatctgtagattagataatagtattatattacatttsctgattttggtaattctactttgtagtaacagaatgtctttgttcttagaaaatatacacaaaatatttagggataaatattttgaaacttattctgaaatggatcagatgatgatgatgatttgaaacttatttctgaaacttattctgaaaggtatcagatgatgatgacgatgatgatgatgatgatgatgatgatgatgatgatgatgatgatggtgatcatatccagagagaagcaaagtgaatg

SEQ ID NO: 798137 - DNA, 418 bp, Homo sapiens
aattttatctatttttgtgttagttatgtataacaaaaggtaagttagtgtgtgtgtgtatctgtctgtttgtgagtcattctcaaatgggcgcaatttctgcctgtcccctaggcatttgacagtatctggtgacttttggggttgtcctaatttgtgggtggtagttgctcctcagatctagtgggtggagaccagggatgctgctcaacrtcctacattgcacaggacagtacaccatgtcaaataatcatctggccctaaatgtcaatagtaatgagacaggagagttcactggccctccttgcagggcatgcaacaggggtgcagctctctctttgactgctgtgagctcaaacacctacgggagggggagcacacagacaagcaggtgcaggagctggggcaagcgctttgg

SEQ ID NO: 798138 - DNA, 618 bp, Homo sapiens
gatagaatcctgacattaagtgttgcgggaatcaggaggaccagagacgccacagggtaaagcagaagtattttattcagtgcactcagacccagtggattatcattcagagactgggcccagaacaaagacagcacttgacctttatacacacttcaaaaagggggttggctagcctgaaacaagcttacagtggtgcgaagcaaaagcaaggatacagaggcaaaacaaaggcagttaatcaaattgtgacaggtgcattactcaggattacacgtgacatcttgctatgtggcccagatggctattatctaggcttgctctagtgccttgcctgggcttatctcataaccttcactatgtcgcccaggtggctgtagtccaggcctgctcagatagctcatgaccttcactgtaccgcttagataaaacagaatrcttgaagttaccagttacagagaacaggaatctataaactcataccataagagaaacgaaaattgcttttctcctccctatgttgagggagtgctgggagagtctccagagcacattcctttgtgtcctaacttctcagatagtgtttatggaggctcttcctgggtctgggctgtgcct

SEQ ID NO: 798139 - DNA, 582 bp, Homo sapiens
gtgtgtgttcagtatgagatctttgtttaactcagtggtacaaacacttttctcttaaatttaggtttagcattttatattttaacattaacaggatttattatttatgcagttagtttttgtccataatgtgaggaaacttgaggttcattatttttktcccatttggatacccagatgggaaaatgtcagccttcgtaatgtacatcaaatgcatagtgattatactcctctacagttttctgagattttgcataagattgaaataatttttttcttaaatctctgatagacttcatcagaaagccacttgaacctggagttcctttttcgaaggtttttaatattcacatttgatttttaaaatgtatgtatggcaattcaagttttcttgtactaacatgcactttaggtaatgcgtgtttttccagaatttgttcatttcagaaaggttgtccatagttcattggcataaagttgttatccatagttccttactatttcctcaatatatgtatggtgtcttctattttattactatattggaaattgtaaaagtttctttgttcttgacaagtctta

SEQ ID NO: 798140 - DNA, 589 bp, Homo sapiens
gcatatgttcattgcagcactattcacaatagcaaagacatgaaatcaacctaaatgcctatcagtgccagactggatagagaaaatgtggtacatatataccatggaatagtatgcagtcataaaaggaaacaacatcatgtcctttgcagggacatgaatacagttggaagccattatcctcagcaaactaatgcaggatcagaaaaccaaatatcacatgttatcacttgtaaatgggagstcaatgacgagaacacatggacacatgcaggggaacacacactggggcctgttgggggtggttttgggggagggagagcatcaggaagaatagctaatggatgctgggattaatacctgggtgatgggatgatctgtgcagcaaaccatcatggtgcacacttcctatgtaacaagactgcccatcctgcacatgtacccctgaaatttaaagttgaagaaaaaaatttccctctatatttagtaagatttgatagtctagataaagaaaatctactacatgtaccccatggaatactatgcagccctaaagaagaataaaatcattttctttgcagcaacatgg

SEQ ID NO: 798141 - DNA, 589 bp, Homo sapiens
gcatatgttcattgcagcactattcacaatagcaaagacatgaaatcaacctaaatgcctatcagtgccagactggatagagaaaatgtggtacatatataccatggaatagtatgcagtcataaaaggaaacaacatcatgtcctttgcagggacatgaatacagttggaagccattatcctcagcaaactaatgcaggatcagaaaaccaaatatcacatgttatcacttgtaaatgggagctcaatgaygagaacacatggacacatgcaggggaacacacactggggcctgttgggggtggttttgggggagggagagcatcaggaagaatagctaatggatgctgggattaatacctgggtgatgggatgatctgtgcagcaaaccatcatggtgcacacttcctatgtaacaagactgcccatcctgcacatgtacccctgaaatttaaagttgaagaaaaaaatttccctctatatttagtaagatttgatagtctagataaagaaaatctactacatgtaccccatggaatactatgcagccctaaagaagaataaaatcattttctttgcagcaacatgg

SEQ ID NO: 798142 - DNA, 554 bp, Homo sapiens
atgggaacaaggaaagatttcatggcaaagatgccaaaagcaatcgcaacaaaagcaaaaattgacaaatagaatctaattaaacttaagaccttctgcacagcaaaataaactatcaacagagtaaacagacaacctacagaayaggagaaaatttctgcaaactgtgcatctgacaaaagtctaatatccaacatctataaggaacttaacaaatttacaagaaaaaaaacactaaaaactgggcaaaggacaggaacagacatttaaaagaagatatacatgtggccaacaaacatatgaacaaaatagagaaatacagatcaaaaccacaatgagataccatctcacaccagtcagaatggctattattaaaaagtcaaaaaataacagatgctggtgatttgtggagaaaagggaatagttttacactgttggtgggaaggtaaattagttcaatcattgtggagaggagtgtggcaattcctgaaagagctaaaaacagaactaccattcaacccagcaatcccattactgggtgcatacccaaagga

SEQ ID NO: 798143 - DNA, 616 bp, Homo sapiens
tctaatgcatatgaccactgggggagaaaaaacaagaaaaagatggacttactgaaaaaaaatttttaggaagttttaaatcaggcacatgacaacgtaataagatcatttttaaaagaatgtctattctggaattattatttttcttaataaaattatagtgtactgaatggaaaatacagatgtaattgttraagtccacagtagaacatcatgctaaaacagtgtatgaaatatctcaagaactgtaaaaaacccacatcatctcaatgtttactattccttttaagtaataatacttaataggtaaacacaaagattctgtagaaaaaacaaagacatcttactattcattcctaatatatagtctctacatctaaaaaaatttctcattacaatattttaagaatgtcacaaaacaattgaaactcaacacacaatgtaactaaaatagctctgacccacatcttaaatcatgaaattacacgaaactggatctatttcttttcttttttttttaacagactgcagtgagtataacctctcctagaacctatctaactgtctgagaaagttatctagagatatcaataagcattaaataggacaaaagaga

SEQ ID NO: 798144 - DNA, 646 bp, Homo sapiens
gagaaatctttgcttttatctgatcctcggctgaatcttgtctgcatattgttcctttgcttttactgtttttctctctgtgactatggaattttccctttggtttctcttcaaggggtcctcgtgtttaaggggtgagggaatgattgtctactgcagtctgccttaataaaagtggcaagctcttggcttccccgtggtatggctctatccaccacgggggcagagcttaactacaccatgtagatgtgcctgccagtcagggaccgctgtaactgtcgccccttacgtgtgctgtgtgccctaccgggcttccccagagaatggtgacaaccaaggcaaggtaaaccctgttccatgttaactgggagcgcagaattcctttaaagtcaaactttgcgaacaagaataatcttgaaaaagaccctttaggcgcaaatcaacgctcaagaacgttgccaatcacttgtaacctccttagrcatttcacggatgtgttatttatgctcaaggaggggtctcctttcagcccggcaacccaaatctttgctctgtgcttcggactcagtgggggcttgtcggatgagccactgggaaaatatgcgtcccctcacttctccttaatcaactaaggtcaccttgacgg

SEQ ID NO: 798145 - DNA, 653 bp, Homo sapiens
taacaaaaaaagtaaacaatggattaagacattgaaatggcccacatgctggaattagaagatgagaaatttaaaataagctattataagcatattcaaggatttaaggaatagatggtcataagagagaatatatggagaatctcaacagagaagtaaaaatgataaagggataataggacaaattttagaactgagagacagaatatcttatataaaagtgtcattttatgcacataccagtaaattaaagatggcagaaaaaactatcagtgcacttaaaaacagatcaagaacaatttcccaatacagytaatacaaaggagaaaaataataaaaatatgaccagtagcactaacataattggactcctagaaagagtagagaagaaaatgagacagaaaaagctatttgaaaaagtaaagaccaaaagttttcctaattgtcagcatatatcaacttacaggtttaagaaactcaaagaacagaataaaaatatacagaaccaaatgtagacataccatagtcaaaccactgggcaaaaaaagagtaaatcttgaaagtagctaaagggagggagaaaataatttacatacgtggaaacaaataggtcatctacctgtcatcagaaatgacactttaaaaagcaatga

SEQ ID NO: 798146 - DNA, 642 bp, Homo sapiens
ataaaaaataaaaaaagacccccaaccttttctagactgtggggtttcagtttcaccccaggggggtcctggttgggttagaaccctgaatctggtttgagttcgtatcctaaagaataaagggaataaaggctgtagccactgagctactcaatctggtccggttctggcttttgtgtgtctgtctgtatttttggtctaaatatttggcccaacagaggttaaaggctttgatgctctcagcaaaagccttgtgagatctctagtttatctgtgtgctcaactggaacaaagagactccataaactagaaaaacctaaagaaaatggcacgcgtgaaaaaatgagagccaactcctgtttgttgttctgtccacctccctctctcactcctccttctgcctttgctgtggtcccatgggtgtatctgtctttctggggacctgagattcagtgttagagtgaagtccatkattttaaagccttcatgtctctgctttttaactctgcctgctttgctgagctcttataatgagaaataaaccattcataacagaaacaacagggcatcagaaaaccaacttcaggcagccctccggccagtacctacctagaggggaagggcctactgaaggagatttaa

SEQ ID NO: 798147 - DNA, 666 bp, Homo sapiens
gaaaatgtggtagatacacacagtggagtattattcagccctaaaaaagaatgagattcagtcatttgcaacaacatggaaggaactggatatcattatgttaagggaaataagccaagcacggaaaggcagacattgcatgttctcacttatttgtgggatctaaaaatcaaaacaattgaactcatggacatagtaagtactagggggctgggrggggagacagggcacgggtaatgggtacaaaaataggcagaaggaatgaataagacatactatttgatagcacaacagggggactctagtcaataattgtacatttaaaaataactaaaagaatctaattggattgtaacacaaaggaaacatgcttaaaaggatggatacccactctccatgatgtgattagttcatgctgcatgcctgtatcaaaacatctcatgcaccccataaatatatatgcttattatatactcacaaaaatgcttgaaaataaaaataaaggaactactgaaggtcaggtcagagtggaaatgtaaaaatactaattagagaataatgtgaatacaacaggaatcctgttggtattctatttatattgtaagcagcagttcaattgttttgtaaaagtaatttcaattttaatcactgaactaaagaaatggg

SEQ ID NO: 798148 - DNA, 361 bp, Homo sapiens
tctgctctatcagtcatcaggcagcaaccactcaggctgtgggaacctggccatccctccttccttgagtagctgaggttgctggcttgtctgcctgctacaggtgcagccttgcagatgtggctagttgctctgagccagcttggccttgcctggcatgcataggycccaggtactgacactctgcaccgagtcagcttgtcctgccttgggtcaaattctaagtctggccagggccacagaaggcccagtcccctgggtgctaatcttggctgctttctgcacttgaacataaagtcctcctcaagaaagcctgtggtctgcctgttggcgaccaagaaacctacagtgccatacgagc

SEQ ID NO: 798149 - DNA, 624 bp, Homo sapiens
tttacctttaaaactatcttggtctgggattttctttattgtaaaattttaactatataaaatgtctttaatagacataacactaaccaggttatttatttattctttagtgagtttttgtaatattttacaaagagttggtctatttcatctaagctgtcagactgatgcattcctttattatccttttaatgtctgtaaggtctgtagtgatataattacttttgtttctgatattgatgacttatgtcttgtctttttccttttgcttagtctgtctaggggtttatcaattttattcttttttccaaagaaacagcttttgttttcaatgattttctctatgattcttaggtttttattattgcaatggtttctgcaccttgctttattgttacttttcctttggctagctttgggtttaattttctcttttttcttatwtcttaaggtggatgcacagataattgatgagcgacttttctaatataaacattttatgctatagatttctttctaaactatgatttggctgtatcccacctgttgcattttcaaataaatatattttgaaatattctctaatttcccttgaagcttcctccatgacccaaaggcttaaaa

SEQ ID NO: 798150 - DNA, 599 bp, Homo sapiens
cccacatggtgcctaccgagaaacagggcacacatgaggaagtcaggccattccttccttcgcattctttcctcaagtgagagagactggtgcctccgagttgaagattctatctgaaaacgaagagaattaggctttgatgtctgtagcatgtgaacaccggatggccgttattagtttactatccagtgttcaccttcccacccgcttctccttaaagaggccatgtggatttttatcccattatcctcccctgctccatgggctatggggaaggctgacactacatgatgccaggggtgaccagggcagcatctttccttccctggccacagcatctggtcgttttacataaaccatctgatcagggttcctctcaaaattgttgcttgggaaaatgctctccgtctgygaattgtcctgaattcttcccagaaaacaagggacccagctttcagacgaagcgtgactgcagaatgcaggtcttgatgacatcatctggcctctgaatcaatcaactctgatatctgccctactctgtactttcagctacatgagatttttaaaaaatcatgttttttgcttaagcattttgattt

SEQ ID NO: 798151 - DNA, 580 bp, Homo sapiens
actctacttcctaattccactgaatataagccattaataggtgtattctctgctttctcagatacttcctccatattcagctcttacccttctagaatttttctgaaatttaagatttctttttaaacctgttttccttgagcacctattgctttcttagagcccctggcatgtattaacatcctccactagttccttatcctgctgatgtaagtttgccttactttttacctccttttaatcatttcaatgaatttagaaagaaagagccagaaatatgctcatgtgaccgccatcctcaggaatatctaaggattctatgttttataaaataataattaaatcaataacttcagcattaaaaaaattgtgaacaaaatatgaacaraaatatcctagtgaaaataaggattgacatactcaataattttatcaaagaaataaacatatttagtcaaaaaatttaaaaggtggtatcgtattgtggttttgattttcatttccctgattattagtgatattgagcattttcttcatatgtttgttggccatttgtatatcttgttttgagaattgtcta

SEQ ID NO: 798152 - DNA, 646 bp, Homo sapiens
ctagggtgggagtttgaagcggtaactggaaggtagattaggggattgctggtaatgttctgtatttttacctgggagctgcttaaataggtatagtcacagaaaatttcattgagttatatagttaagatttttgcactatatgtatgctgtaattcaacatgaaattgtcagttaaatagaaaaagagtagctaaattgcagataagttgcaggataggtacaatggacaaatctgaagacaaagttaagaaaaattataagaacattgatattttccatctgaaatattaaaaacaggaatgaaatgtcaaaaaaycatagaaataagttagagtgttttagttttctttaatatatattgaagtataaaaacttcaatatttctttctttcagaggctaaatctagaatgaatgtaaataatataggcaaccaagaggaattattatcatctcagataacaggaaatcttgaggtagggattttttagttacttaatttattgatccaataacattatcaagagctcagttttatttcttcttttcacattcatatgttgcattataactggaataattaaaacaccctgatgagctaaaaacaatcaagattcacatttgggttctggagacatcctttct

SEQ ID NO: 798153 - DNA, 527 bp, Homo sapiens
ttaaaattatcagaccaggaatttaaaataattatgattaaggccaggcacggtggctcacacctgtaatcccagcactttgggaggccaaggtgggaggatcacctgaggtcaggagttcgagaccagcctgaccaacatagtgaaaccccatctctactaaaaatgcaaaaaaaactagccgggggtggtggtgcatgcctgttatcccagccactcgggaggctgaggcaggagaatcacttgaacccaggaggcagaggttgcagtgagccaagatcacgccactgcacttgagcctgggcracagagtgagactccgtctcaaaataaataaataaataaaataattatgattactatgttaaggtctctaatagaaaaaatagactatatgcaagaacagcggggtaatataagcagagagatgaaaactctatgaaaagaaaatgctcaaaataaaaaactattaacagacatgaagagtgcctttgaaaggctcatcagtagactggatatagctgagg

SEQ ID NO: 798154 - DNA, 610 bp, Homo sapiens
aaatttaaaaaatattacaaagtagggctacaattataattaagtaacttctaaaaatgatcaataatagatatgaccctctaaaaaagaaattactaaaataatgactttatcttttacatatattctgacatataatttattatattaatttattatatattatatatttatattacatattttgctaacagttgcaaaataaattctccaaactattcccttgctcccattttccaagtgaataataaattwaaaaaatcaagattccctctgccatggaaatctattttttcagccaaaataatcagagggaagagaattacttttaatgtttttcactattagtatgccatgcttaaattttttctgcaacatgtactacaaaataacacaatacagtaaaacacaggaatgctttgtcaacttggaaaagttgatacttaccaagggggacatttttcttcttcttgacggagatacttcactttccttatctgcttgttggcgcaacaaatctttgagctgattaactatagagcaaaagcagagggtttattaaccttatttgagatccatggtttcttaccacccatccatccttccaact

SEQ ID NO: 798155 - DNA, 635 bp, Homo sapiens
aggtttaattgactcatagttctacaggctgtacaggaggcatggctggggaggcctcaggaaacttacaatcatggcagaaggcaaaggggaaaccggcacatcttacatggccagagcaggaggaagagagagagtgaagggggaagtgctagacactttcaaacaaccagatctcgtaagaactccatcatgagacagcactggaggatgatgctaaaccattagaaaccatccccatgatccaatcacctcccgccaggcccctccaccaacactgggaattacaatttgacatgagatttgagtggggacacagagccaaaccacatcaaataggatgtgtacaaaaaaagatttmttataaggaattggcttatgcaattatggaggctgacaagtcccaaagttggccgtcagcaagctggagacccaggagagccaatggtgtatggagttccagtcccaaagccaaacaggcttaagacacaggaagagtacatgtttcaattcaagtccgaaggcagggaaaaaaacaatgtcacagcttgaatgcagtcaagcagaaggagttttctattacccagcctttttgttctattcaggccttcaacagattggataatggccactca

SEQ ID NO: 798156 - DNA, 601 bp, Homo sapiens
aaactcctactcatgttaatattttgatctccactcatggacgatgaatgctctgaatggcatctagaatggtggatcttcaggttttcaatttactttacccagatccatcagaggaatcactatctatgggcagctatcaccttacaaaatctatttcttaaataataagacttgaaagtttaaatgactctatgggctgcaaaatggatgttgtgttagcaggcatgaaaataatctccttgtaaacatctccatcagagctcttaggtgaccaggtagattgttaatgagcataatattttgaaaggaatcttgttttctgcrcagtaggtctcaagaatggccataaaatattcatttcaataaaccatgctgtaagcatgttgtaagcagatgtgcctatataaacaggctttgctgctccatttatagaacacaggcaaagttgatttagcatcattttaagcaccctagcatttttggaatggtaagtgagcattgacttcaacttaaagtcaccagctgcattagtccctaaaaagagtcagtctagggggcgtcacagtgactcacacctctaatcccagcactttgggag

SEQ ID NO: 798157 - DNA, 601 bp, Homo sapiens
aaactcctactcatgttaatattttgatctccactcatggacgatgaatgctctgaatggcatctagaatggtggatcttcaggttttcaatttactttacccagatccatcagaggaatcactatctatgggcagctatcaccttacaaaatctatttcttaaataataagacttgaaagtttaaatgactctatgggctgcaaaatggatgttgtgttagcaggcatgaaaataatctccttgtaaacatctccatcagagctcttaggtgaccaggtagattgttaatgagcataatattttgaaaggaatcttgttttctgcgcagtaggtctcaagaatggccataaaatattcatttcaataaaccatgctgtaagcatgttgtaagcagatgtgcctatataaacaggctttgctgctccatttatagaacacaggcaaagtygatttagcatcattttaagcaccctagcatttttggaatggtaagtgagcattgacttcaacttaaagtcaccagctgcattagtccctaaaaagagtcagtctagggggcgtcacagtgactcacacctctaatcccagcactttgggag

SEQ ID NO: 798158 - DNA, 615 bp, Homo sapiens
ctccccagtatctaaaataaaagttgaaataaaaataattagaaagccaaaaaaattaaagttaacatgattgattcaaatagtccaaataaaaagacgaaactgtcagagtgaagaagaaaacaagcctcaattatataatgtctgcagaggaacattttaaatataaatatacatagagactaacatttaaaaaaatgggaaaatgtattctatgcaacactgatactaataaaaccctaatagcaatataatatttgacaaaaaatataaacaataaataataacaaagataaataagaatattgcataataatacaggatcaattcaccaaaaagacataataatctcgaatgtatatgcacccagtcacagtctcgaaataagtgaaacaaaatctgatataactaagaggagcaataaatagataaatggacaattayagttgaacatttcatcagtcttctcttagaatttattaaagcaattaaacaaaaaaacagtgagatggcctggcgtggtggctcatgcctgtaatcctggcactttaggaggccaagggaggcagatcgcttgaggtcaggagttcgagaccagcctggccaacatggtga

SEQ ID NO: 798159 - DNA, 634 bp, Homo sapiens
gtggtggctcatgcctgtaatcctggcactttaggaggccaagggaggcagatcgcttgaggtcaggagttcgagaccagcctggccaacatggtgaaaatccatctccactaaaaatacaaaaattagcctggcatggtggcacatgcctgtagtcccagctactcaggagtctgagccaggagaattgcttgtatccgggatgagaggttgcagtgagctgagatcgtgccactgcactccagcctgggtgatagagcaagactccatctcaaaaaacaaaacaacaacaacaacaacaaaaagttagatatagaacattagcaaatattatcagctaatttaacttaattkacatttttagaacattccattcaacagaagcacgatacatgtatctttcaaatacacaagaaatgctaagacagaacatatgctgattaataaaacacgtttctataaatttaaaataatttagaacatacaaaatatctataattaccataaaaattaaaatagagaattcataacagaaagataactggttaatttctgagtgtgtggaaattgaacaatcttagataatccatagatcaaaggagaaatgacaattggtgttgttttattagaaaga

SEQ ID NO: 798160 - DNA, 600 bp, Homo sapiens
agagtttttttttagtaaatactgaattattaaatgcagttcttatggctcatgaggatacatttcattttcaacttaattaaaaacataattttaaatcaattttaatgtatatacttgtgtataacactggataaattattggactagtgctatttcattgctttgattttaattcctttaaaaaatctattttctgcttaatttttattgagactgttcaataatgtgcayatagcattacttttgtttggtgcattgttatttagcttgactaccaatcgttagttttacataactatgtttcaaccttaatcatttattttaataaattataagttttcaggccttcacatttttgaatgtgtcttcttgttgggccatttaatggtagaaaagtgttttcactcatcacatttcattttactcataaccaggttcttaagactgtggcagcacactaggcagcattaataaagcatgtcttggagcactgtatttgttttcacagactgaaatcaattcaccttgaaagtactgctcatataggatgaacaactgcagataagaagatctatcctactagcaatgaaaaaatag

SEQ ID NO: 798161 - DNA, 600 bp, Homo sapiens
agagtttttttttagtaaatactgaattattaaatgcagttcttatggctcatgaggatacatttcattttcaacttaattaaaaacataattttaaatcaattttaatgtatatacttgtgtataacactggataaattattggactagtgctatttcattgctttgattttaattcctttaaaaaatctattttctgcttaatttttattgagactgttcaataatgtgcacatagcattacttttgtttggtgcattgttatttagcttgactaccaatcgttagttttacataactatgtttcaaccttaatcatttattttaataaattataarttttcaggccttcacatttttgaatgtgtcttcttgttgggccatttaatggtagaaaagtgttttcactcatcacatttcattttactcataaccaggttcttaagactgtggcagcacactaggcagcattaataaagcatgtcttggagcactgtatttgttttcacagactgaaatcaattcaccttgaaagtactgctcatataggatgaacaactgcagataagaagatctatcctactagcaatgaaaaaatag

SEQ ID NO: 798162 - DNA, 597 bp, Homo sapiens
gagtggagccaacataaagcaaataaactcatgccacagaatattagaaagtatcagaaatttgaggcaagaaaagagttgcagagagagggcaaatattaaaggatatttgattgtggcaattttgatgcagagaagttaatatttcattttaggaartcaatagatatcgaaataaaaaaatgtaaacttaggctatataactgaaagtaaatacaagaacaaagagatgaaatttgaatttggggaaataaattccatcttatcaaatatttgtaaagctattctactttaacaaatacgtgtagacatttccttagtttaaagcaatcaaataaaaaaacccacaagtacaatcagaatatagtaccataaactactaataaatggcccccaaatttttgaaatgtaagtagaaggtacatagaaatttagtctctaaaataataaattatatacagaaaactgtaggcatttgattacatcaacataaatatggactattatacattctaaaaattacattattaaatactagcattagtttaggattcttcatatttattcagtggtcatttataaataaataaacaaaac

SEQ ID NO: 798163 - DNA, 597 bp, Homo sapiens
gagtggagccaacataaagcaaataaactcatgccacagaatattagaaagtatcagaaatttgaggcaagaaaagagttgcagagagagggcaaatattaaaggatatttgattgtggcaattttgatgcagagaagttaatatttcattttaggaagtcaatagatatygaaataaaaaaatgtaaacttaggctatataactgaaagtaaatacaagaacaaagagatgaaatttgaatttggggaaataaattccatcttatcaaatatttgtaaagctattctactttaacaaatacgtgtagacatttccttagtttaaagcaatcaaataaaaaaacccacaagtacaatcagaatatagtaccataaactactaataaatggcccccaaatttttgaaatgtaagtagaaggtacatagaaatttagtctctaaaataataaattatatacagaaaactgtaggcatttgattacatcaacataaatatggactattatacattctaaaaattacattattaaatactagcattagtttaggattcttcatatttattcagtggtcatttataaataaataaacaaaac

SEQ ID NO: 798164 - DNA, 597 bp, Homo sapiens
gagtggagccaacataaagcaaataaactcatgccacagaatattagaaagtatcagaaatttgaggcaagaaaagagttgcagagagagggcaaatattaaaggatatttgattgtggcaattttgatgcagagaagttaatatttcattttaggaagtcaatagatatcgaaataaaaaaatgtaaacttaggctatataactgaaagtaaatacaagaacaaagagatgaaatttgaatttggggarataaattccatcttatcaaatatttgtaaagctattctactttaacaaatacgtgtagacatttccttagtttaaagcaatcaaataaaaaaacccacaagtacaatcagaatatagtaccataaactactaataaatggcccccaaatttttgaaatgtaagtagaaggtacatagaaatttagtctctaaaataataaattatatacagaaaactgtaggcatttgattacatcaacataaatatggactattatacattctaaaaattacattattaaatactagcattagtttaggattcttcatatttattcagtggtcatttataaataaataaacaaaac

SEQ ID NO: 798165 - DNA, 597 bp, Homo sapiens
gagtggagccaacataaagcaaataaactcatgccacagaatattagaaagtatcagaaatttgaggcaagaaaagagttgcagagagagggcaaatattaaaggatatttgattgtggcaattttgatgcagagaagttaatatttcattttaggaagtcaatagatatcgaaataaaaaaatgtaaacttaggctatataactgaaagtaaatacaagaacaaagagatgaaatttgaatttggggaaataaattccatcttatcaaatatttgtaaagctattctactttaacaaatacgtrtagacatttccttagtttaaagcaatcaaataaaaaaacccacaagtacaatcagaatatagtaccataaactactaataaatggcccccaaatttttgaaatgtaagtagaaggtacatagaaatttagtctctaaaataataaattatatacagaaaactgtaggcatttgattacatcaacataaatatggactattatacattctaaaaattacattattaaatactagcattagtttaggattcttcatatttattcagtggtcatttataaataaataaacaaaac

SEQ ID NO: 798166 - DNA, 703 bp, Homo sapiens
ctggactaacactagcctctgactgcccaatgggcattggcagtaggatcttcaatctttttctattgcaactttcctccttttctttcctggaccgtcttgcctcctgtcccctctctgtatgcaatgctgtggaaatttttgcagttcaggaaaataatcctattaggcaagatcagcaaatgccatagtaaccaggaatatagctcaggggattggcatttttgtgattttctaggaacagaggatttcctccctgccccccaacagtttacatctctctctctatccttggtctggagagcacatggagagcacattgtatttctttcttttttttttttttagacggagtctcgctctgtcacccaggctggagtgtagtggtgcaatcttggctcactgcaggctccacctcccaggttcaagctattctcctgcctcrgccttcctactagcttagactataggagtgcacgaccacacccagctaatttttgtattttgagtagagatggtgtttcaccatgttggccaggctggtctcaaactcctgacctcaagtgatccgcccacctcggcctctcaaagtgctgggattacaacgtgtgccaatgtgcctggccagaaagcacatggtatttcaagacttacagtaccatctagtggaatagggatcctctctatgatgcattttgttggc

SEQ ID NO: 798167 - DNA, 658 bp, Homo sapiens
atgcacacacacacacacatgcacatatccccacacaaatatacataagaacttttatacctcctattttccatgaaatgttattctacacatagtgattaacaactaataaagtcaattctgcacacagtattcaaaagtatacattttctaataatatgaaaccactctttaacaatgaagcatattttagacttcttattaaattaaggaagagcaataacaattaatttggacatctgcagtaaacctgattaatccctcctatgaggaaatattgatataaagatgctgaaaaaatgtatagcaaacaaaaatgagtagcaaaaaagccacttattttcaaagagcaaatatttacaaaaggtataaatagcacgtaaaaaccatgtgtctctaatttacacttactcagctattatgctaagaaatagttttgcatagtatccacaatttataattatgcctcactgatacattagttaaatgcatkgcaaatgtcctgcttgattttgaattagcaacatcaaaagctgatttataaatcttttactgaacattttaattctttttagaaagaaagccctttggctataacaaataaaatacagtgcatgctaagtcaagtgtatctgttctgcatggtttttgtcatcac

SEQ ID NO: 798168 - DNA, 613 bp, Homo sapiens
catttcaataaaaattacaggggattttttttttgtagaaattgcataactgatttaaagtcttcaaaattcataaaaatacacagaatagaatatagaacaatcaaaacaactttgaaaaaaaaagattcatgttagggaactgactatgtgatattgaagccaattttaaagctgaaatagtaaaaatgttgtgatattggcatatagaagagatcaatagaataaaaaagagagactacatataagccatccatatattttctgatggttacttttgtgtgtcagcttgactgggtaaagtgataccaagataccttgtagaacgttttttctgggtgtgtctatttttgatgtttccagaagagattagcatttgaatcagtggrcagagtaaagtagatccacccttaccattatgggatcccccgaatagaaacaaaagggggaggaaatgtgaatccactctcttctttaattgagacatccactttctcttgtccttgggcatcttgagctcctcgttctcaagccttcaaacttggattgaagtacacaactggctttcccagtgttccagcttgcaaagggcatattgtggaactactgagcc

SEQ ID NO: 798169 - DNA, 549 bp, Homo sapiens
tcacgcaagggaagaaccttagcaatcatcctggctagcaattctggggtctctgaaaccttttgtggggttatatcttctctcagtttgtgtgtataattttacaattagagacatttgctccctttttttttttagatggtgttttgctcatgttgcccaggctggagtgcaatggcatgatctcggctcacagcaagctccacctcccaggttcaagggattctcctgcctcagcctcctgagtagctgggatcacaggcgctcaccactgtgccyggctaatctttttttttttttttttggtacttttggtagagacggggtttcaccatattggccaggctggtctcaagctcctgacctagtgatctgcatgcctcggcctcccaaagtgctgggattacaggcgtgagtcactgctccctgcctgctcactttttaagaaggagtttgtaatatcttgttccctctggtgtttgtctggaatattgcagactgtctggcattgtatcaagctgatgatctctcctttgttctctgtggccc

SEQ ID NO: 798170 - DNA, 644 bp, Homo sapiens
tttttaatactccttaaagttagctctaaatcccttgacattctgagcagtgtgtatagcaaaacttagctcttctagggggcagcatgaatgacttgctaagtcctaagggaaaaactgaaacatttaatctgtctttaaatcacttctgtttgtttgatcactctgagtgttatttacaaaattgcctttattagtgacaaataattaaattgacataggaacattttctggaaattagagtgattggattttctttagaaatctccaaattggtggctgggcaaggtggcttacgcctgtattcccaccacttygggaggccgaggcaggcagatcacgaggtcaggcgttcgagaccagcctgactagcatggtgaaaccccgtctctactaaatatacaaaaaaaaaaaattagcagggaatcattatttgatttttttattgtgtgacccacatagtatgacaccttttctttagtctttttttttttaagctttcattgaacacatttgagaatttggaattttttgctttctgcccataatggtagagaagaaaattgagagaaacgcttctaatgattaaatggatcagaaaatgaatgcaaagagataaaataacactttagacctggagtgac

SEQ ID NO: 798171 - DNA, 644 bp, Homo sapiens
tttttaatactccttaaagttagctctaaatcccttgacattctgagcagtgtgtatagcaaaacttagctcttctagggggcagcatgaatgacttgctaagtcctaagggaaaaactgaaacatttaatctgtctttaaatcacttctgtttgtttgatcactctgagtgttatttacaaaattgcctttattagtgacaaataattaaattgacataggaacattttctggaaattagagtgattggattttctttagaaatctccaaattggtggctgggcaaggtggcttacgcctgtattcccaccacttcgggaggccgaggcaggcagatcacgaggtcaggcgttcgagaccagcctgactagcatggtgaaaccccgtctctactaaatatacaaaaaaaaaaaattagcagggaatcattatttgatttttttattgtgtgacccacatagtatgacaccwtttctttagtctttttttttttaagctttcattgaacacatttgagaatttggaattttttgctttctgcccataatggtagagaagaaaattgagagaaacgcttctaatgattaaatggatcagaaaatgaatgcaaagagataaaataacactttagacctggagtgac

SEQ ID NO: 798172 - DNA, 526 bp, Homo sapiens
acagtgagtgttacagttcttaaagatggtgtgtccggagttttttcattctggtgggttcgtggtctcactgacttcaggactgaatctgcagatcttcacggtgagtgttacagcccttaaaggtggcccgtctggagttgtttgttcctcctggtgggttcatggtcttgctggcttcaggagtgaagctgcagaccttcacagtgagtgttacagctcataaagttagtgtggacccaaagagtgagcagcagcaagatttattgcaaagagtgaaagaacaaaacttacacagcgtggaagggracccgagtgggttgccgctgctggctagggtggcctgcttttattcctttatttggccccacctacatccctacaccctgctgattggtccattttacagagagctgattggtctgttttgacagagtgctgattggtgcatttacaaacctttagctagacacagagtgctgattggtgcatttacaaacctttagctagacacaaaagttctcca

SEQ ID NO: 798173 - DNA, 494 bp, Homo sapiens
catgtgcagcaaaaattcagcactctttttgggccaccgaccttgtgtccagccccactgcttggcctgcgcacacttgccaactccaccattgtaacgtcggaatggtatgcactgtttctgtaaagtgacatctttaagatacttcgtggcttttcgtatatgcatacccttgatggcctgagcagtttcacgagtgtycttaaagtgaacacgaagattggaacctcttgatttgcatgatttcatggggttctccgggtcaagtgaatagcgaaccattttcacagattacttcaggctgcttagggaaagagctgaaccatctttatattccacaaatcactcttggtcatgatgtgtaatagttttaatgtgttactggatttagtttgcaagtattttgttgatgatttttgcattaatattcattgtgcatatttgtagttttcctttcttttagtatctttgtctgattttggtatcaggtaata

SEQ ID NO: 798174 - DNA, 616 bp, Homo sapiens
cactaccaagagcaaagcaagtggcatcttcaggtttccattgtgatatgactgtgcctagaactatggtacttggcggtaagtagccatgagtaggagaaaagagtaccaacatttggggattcttttaattccgtgtcgttttttccattggcgattgacttttatttcttccctccctgtgccttgtcctggaataggatataaatttgcctctacatcttacacttcatagtgccagtcatctgtaaaggttgaccctctgtgctttctttttaatatttggcattttgttgatttttctcatggagcacattggagctgtgagctcttgtccaggggaagccctctaagatttctacaagtatgagttaaaaatttattcggattttgaccttctcaatgtacccttcttccactgctatgaattatcagctgttggyattagagtctgtcccacataaagatcatatcacttgcactttctaaaaaatgttaaaagaactacatttttaagggattctttatagagtaacacatcacatattttctttacaagacaaaatttaatatgtttaaactatggcttaaatttaacaaggaattctcaggaact

SEQ ID NO: 798175 - DNA, 564 bp, Homo sapiens
tgatgtttcctatttcctgttttgttatttatgctctaatctttatttatttccttcctttgggtaactttgtgtttagtttgctcttttcttagtcccttgagttgtaaagttaggttgttgatttgtgatctttcttttttaaatgtaggcatttaccactataaacctccctcttggtactatttttgctgcatcccttaagttgtggcatgttgtgttttcatttttatttatctcaaggtattttctaatttyccttgggaggtattctttgattcattggttgttcaagtgtgtgttgcttaatttccatatatttatataatttccagttttccttctgctattaatttctagtttcatttcattgtggttagaaaaaatatttggttgaaaaaaaatttggtattaaatttctttatacttattttgtggcctaatacgcaatctatcctaaaaaatgtaatatatgtttctgagaagactgtgtattctgctgttgttggttagagcatttggtatatgtctgtcacatcccattggtctttagcgttggtcaag

SEQ ID NO: 798176 - DNA, 524 bp, Homo sapiens
aggccaaggagggtggatgacttgaggtcaggagttcgagaccagcctggccaacatggcaaaaccccatttctactaaaaacacaaaaaattgtccaggcgtggtggtgcgcacctgtaatcacagctatttggaaggctgaagttcaaaaattgcttgaacccgggaggtggaggttgcagtgagctgagatcgcaccactgcattccagcctgggcaacagagcaagacactgtctcaaaattaaataaataaataaataaataaaataaaaagaaagagtaactgggtatggtcaagactgtaattaaatatctcaaacctgtttgggagttaaawaccggatttagcaccggagaaccttgttattcggggctgttattttatccatttctcatctcttttctgtttggactcaatatatttcccagcagccagccttccgtattacttttctaccatgcttcacttaccccagacagactctgggattaactcgggcaatccattctgttcagttgag

SEQ ID NO: 798177 - DNA, 619 bp, Homo sapiens
agacctggattcaaaacccagctctgtcctttctgacgggtgaccttctacaattcgcttcccttctctgagcctcagtttcaggcagggccagaggccaggagccagccaagagccaggaggatgaggcagcagaagrcagaacccagtggacaggcagctgtccagcatggggacttgcaggagctgtggcagtgagtggaaagggaggtcaccaaaggccccaggctaggagaggccccttatcatgtaagcagtggctctggcgtccaacctagcatcttccccagtggagcccaccctggctcaggccaaggccggtgggcacttctgagtctacctgtctgcatagggatcagagacccatgttctctgacagatacctatttctctggtgcatgtcacagcacccagtgtggcccctgcccagtgtggaagcaagggaggtggccacctctgccaagctgcctgtgtcttcctccatcttccttctcctccagatccaagattcactgaattgcccaggtaccttctccccacatacacaccatagccaccccccgccacacacacacacacttgggcacatatacacccatgcaccatacaccacagtcat

SEQ ID NO: 798178 - DNA, 600 bp, Homo sapiens
tgtttaagggagcttagcacttcccacttttctctcttgcttcctctctcactatgtgatctctgcacacactggttctgcttcactttccaccatgagtggaagcagtttgtgggcctcatcagatgcccaaccttgaactttcctagatatcagaattgcgagccaaagataccttttcttctgtataaattacctattttatatattcctttatagcaacacaaaacagactaagaaaggtactcaatagcaacatatggctagtgactactattttggacagtgaagctgtagaagactctacaaatttaaaattatgacatgtactatcctaataattttgcacaataattccatgacacattttgcaagtgagtaacctggtaaccaggaagttaaatagctcaactaagtcacagagattattataattttttttcagtaagaaaragaagggttgaataggtaaataaaaagattatatagctgttaggtgcaaaagtatcttaaacctagttctgcttttggttcagtgctctttcaaaagtaccttacaatttgggtttttccagcgatctcagtcaaacttggagatag

SEQ ID NO: 798179 - DNA, 520 bp, Homo sapiens
gtaatcgctcaaacaataaggtgaagaaaactaaggcccaggtaggaaggtcacatacttaatacacaagtaataagaaaaaaatagagtaataagaaaaaattatttgtaaattaaaaacagcttcacagcatttctagaaccctgaaaaatagaacccccccccrccacggggagtggggaggctcaggcatggcgggctgcaggtcccgagccctgcccggcagggaggcagctaaggccctgcgagaaatctaccgcagcgccggtgggctggcactgctgggggacccagcataccctccgcagccgctggcccgggtgctaagcccctcattccccggggccggcagggctggccggccgctccgagtgcggggcccggcaagcccacactcacccggaactccagctggcccggcaagcgccgcgcgcagcctggttcccgctcgcgcctctcccttcacacctccctgcaagctgaaggagccggctccggccttggccagcccagaaaggg

SEQ ID NO: 798180 - DNA, 520 bp, Homo sapiens
gtaatcgctcaaacaataaggtgaagaaaactaaggcccaggtaggaaggtcacatacttaatacacaagtaataagaaaaaaatagagtaataagaaaaaattatttgtaaattaaaaacagcttcacagcatttctagaaccctgaaaaatagaacccccccccgccacggggastggggaggctcaggcatggcgggctgcaggtcccgagccctgcccggcagggaggcagctaaggccctgcgagaaatctaccgcagcgccggtgggctggcactgctgggggacccagcataccctccgcagccgctggcccgggtgctaagcccctcattccccggggccggcagggctggccggccgctccgagtgcggggcccggcaagcccacactcacccggaactccagctggcccggcaagcgccgcgcgcagcctggttcccgctcgcgcctctcccttcacacctccctgcaagctgaaggagccggctccggccttggccagcccagaaaggg

SEQ ID NO: 798181 - DNA, 520 bp, Homo sapiens
gtaatcgctcaaacaataaggtgaagaaaactaaggcccaggtaggaaggtcacatacttaatacacaagtaataagaaaaaaatagagtaataagaaaaaattatttgtaaattaaaaacagcttcacagcatttctagaaccctgaaaaatagaacccccccccgccacggggagkggggaggctcaggcatggcgggctgcaggtcccgagccctgcccggcagggaggcagctaaggccctgcgagaaatctaccgcagcgccggtgggctggcactgctgggggacccagcataccctccgcagccgctggcccgggtgctaagcccctcattccccggggccggcagggctggccggccgctccgagtgcggggcccggcaagcccacactcacccggaactccagctggcccggcaagcgccgcgcgcagcctggttcccgctcgcgcctctcccttcacacctccctgcaagctgaaggagccggctccggccttggccagcccagaaaggg

SEQ ID NO: 798182 - DNA, 520 bp, Homo sapiens
gtaatcgctcaaacaataaggtgaagaaaactaaggcccaggtaggaaggtcacatacttaatacacaagtaataagaaaaaaatagagtaataagaaaaaattatttgtaaattaaaaacagcttcacagcatttctagaaccctgaaaaatagaacccccccccgccacggggagtggggaggctcaggcatggcggsctgcaggtcccgagccctgcccggcagggaggcagctaaggccctgcgagaaatctaccgcagcgccggtgggctggcactgctgggggacccagcataccctccgcagccgctggcccgggtgctaagcccctcattccccggggccggcagggctggccggccgctccgagtgcggggcccggcaagcccacactcacccggaactccagctggcccggcaagcgccgcgcgcagcctggttcccgctcgcgcctctcccttcacacctccctgcaagctgaaggagccggctccggccttggccagcccagaaaggg

SEQ ID NO: 798183 - DNA, 469 bp, Homo sapiens
taatcgctcaaacaataaggtgaagaaaactaaggcccaggtaggaaggtcacatacttaatacacaagtaataagaaaaaaatagagtaataagaaaaaattatttgtaaattaaaaacagcttcacagcatttctagaaccctgaaaaatagaacccccccccgccacggggagtggggaggctcaggcatggcgggctgcaggtcccgagccctgcccggcrgggaggcagctaaggccctgcgagaaatctaccgcagcgccggtgggctggcactgctgggggacccagcataccctccgcagccgctggcccgggtgctaagcccctcattccccggggccggcagggctggccggccgctccgagtgcggggcccggcaagcccacactcacccggaactccagctggcccggcaagcgccgcgcgcagcctggttcccgctcgcgcctctcccttcacacc

SEQ ID NO: 798184 - DNA, 469 bp, Homo sapiens
taatcgctcaaacaataaggtgaagaaaactaaggcccaggtaggaaggtcacatacttaatacacaagtaataagaaaaaaatagagtaataagaaaaaattatttgtaaattaaaaacagcttcacagcatttctagaaccctgaaaaatagaacccccccccgccacggggagtggggaggctcaggcatggcgggctgcaggtcccgagccctgcccggcagggaggcagctaargccctgcgagaaatctaccgcagcgccggtgggctggcactgctgggggacccagcataccctccgcagccgctggcccgggtgctaagcccctcattccccggggccggcagggctggccggccgctccgagtgcggggcccggcaagcccacactcacccggaactccagctggcccggcaagcgccgcgcgcagcctggttcccgctcgcgcctctcccttcacacc

SEQ ID NO: 798185 - DNA, 469 bp, Homo sapiens
taatcgctcaaacaataaggtgaagaaaactaaggcccaggtaggaaggtcacatacttaatacacaagtaataagaaaaaaatagagtaataagaaaaaattatttgtaaattaaaaacagcttcacagcatttctagaaccctgaaaaatagaacccccccccgccacggggagtggggaggctcaggcatggcgggctgcaggtcccgagccctgcccggcagggaggcagctaaggccctgcgagaaatctaccgcagcgccggtgggctggcactgctgggggacccagcayaccctccgcagccgctggcccgggtgctaagcccctcattccccggggccggcagggctggccggccgctccgagtgcggggcccggcaagcccacactcacccggaactccagctggcccggcaagcgccgcgcgcagcctggttcccgctcgcgcctctcccttcacacc

SEQ ID NO: 798186 - DNA, 582 bp, Homo sapiens
tcaaacaataaggtgaagaaaactaaggcccaggtaggaaggtcacatacttaatacacaagtaataagaaaaaaatagagtaataagaaaaaattatttgtaaattaaaaacagcttcacagcatttctagaaccctgaaaaatagaacccccccccgccacggggagtggggaggctcaggcatggcgggctgcaggtcccgagccctgcccggcagggaggcagctaaggccctgcgagaaatctaccgcagcgccggtgggctggcactgctgggggacccagcataccctccgcagccgctggcccgggtgctaagcccctcattccccggggccggcagggctggccggccgctccgagtgcggggcccgscaagcccacactcacccggaactccagctggcccggcaagcgccgcgcgcagcctggttcccgctcgcgcctctcccttcacacctccctgcaagctgaaggagccggctccggccttggccagcccagaaaggggctcccacagtgcagcggtgggctgaagggctcctcaagtgccgccaaagtgggaatccaggcagaggag

SEQ ID NO: 798187 - DNA, 637 bp, Homo sapiens
acgctgtcacctctcaataccgtctgtttatatactttgaaacggtttatataacatgaaatttccatccttcaaaaactctgaaaacccttgcacactgttggtgaaactgtaaaatgttgcgactgctatggaaaacagtatggcagttcctaaaaacattaaaaatggaatcaccacatggccsagcagctccacttctggatatctgtccaaaagcactgaaagcagaatctcaagagatagttacacatcgtgtgcaaatatgcacatgttcatatcagctctattcacaatagcctagaggctgaagcaacccacatgtccatcaacagatgaatagataacaaaaatgtagtgtatacatacaagggaaactttaaaaaggaagtaaatcctgtcacgtggtaccacatggaagaactttaaggacattatgctaagtgaaataagtcagtcacaaaaggacaaatactgtgtgattccacttatacgaggtaccaagagtagggatattcatacagacagaaagtagaatggtggttaccaggggctggggcgggggagaacagggagttattgttcatgggtacagagtttcagatctgcaagatgaagaagttcaggagagggactg

SEQ ID NO: 798188 - DNA, 642 bp, Homo sapiens
acgagggctgcaaggactgccagcacgctgtcacctctcaataccgtctgtttatatactttgaaacggtttatataacatgaaatttccatccttcaaaaactctgaaaacccttgcacactgttggtgaaactgtaaaatgttgcgactgctatggaaaacagtatggcagttcctaaaaacattaaaaatggaatcaccacatggccgagcagctccacttctggatatctgtccaaaagcactgaaagcagaatctcaagagatagttacacatcgtgtgcaaatatgcacatgttcatatcagctctattcacaatagcctagaggctgaagcaacccacatgtccatcaacagatgaatagataacaaaaatgtagtgtatacatacaagggaarctttaaaaaggaagtaaatcctgtcacgtggtaccacatggaagaactttaaggacattatgctaagtgaaataagtcagtcacaaaaggacaaatactgtgtgattccacttatacgaggtaccaagagtagggatattcatacagacagaaagtagaatggtggttaccaggggctggggcgggggagaacagggagttattgttcatgggtacagagtttcagatctgcaagatgaag

SEQ ID NO: 798189 - DNA, 627 bp, Homo sapiens
tgttcccagctcccccaagagcacagggaagcttggatccacagctgcagtttggccagctgtagccccatccaggagctccatgaagtatgcagccccagtcgagcctccgtgctgcagctggcataatgtcagtgccatcattcccccctctgaagaggtacacctaactgctgttaggatagagatgatgactgctcttaactgcttcatgctgacaaggggcattattttggcaaaacgagagtaatgtctctctctctcagaggcctatctaagggtccccagtacaaaggagccattgtctgaggctccattttcatgaccatttggagtttgatggcccacatcccttgtttcctctgagttgcagtctgagatcactggtggttcaccctacaattgttaaaagctacaaatagctcaaaagaaagacttccttgattctgaaaaacagaacatarggattagcaatgttccaagaaaaagcaaatagcaaaaagtcaaaaaagattcgtcttccagtagctcagttcacccagtccattcctgttcacaatcttcaaagttatcagaaacctgcacttgagggttataatccatcctatgaagaggatcaaaacaaga

SEQ ID NO: 798190 - DNA, 597 bp, Homo sapiens
aacttgttggaaatgagacctcctgaatcagaagctctgggggtggggcccaacagtctgtgttttaataagccctccagatgattctgatgcacataaagtgtgaaagccacttccccagagcaagctattaaaatatgatggaaaaatatataacaaaaaagccaatagaatgaatagttacactggaatactagaaaatattcaatggactccaaagaaatcaagaaaggaggaacagagagggaaaaaagagagagggaaaagaagtagaaaacaaatcataaaatggcaaaattaaattcaatcataccaataatttcactaaatgcaagtggactaaaagctttaactgaaggcaaaaattagcagactggaggaaaaaaaagaagycagaccaaagtatattctacttacaaaagacttagtttaagaaaaaagatgtaaacagattgaaagtaaaaggatggagaaagatatttcatgcaaatgctaattatataaaagctggagtgactatcttactctgtgatcaaatagacttcaagataaggagtctatcagagataaagagatatattttataatgatcaaaag

SEQ ID NO: 798191 - DNA, 613 bp, Homo sapiens
taagacaaagagtttatcaattttattaatattttcaaagtattaaactttggctttgtttgattttctcgtattagttgccttctacttaattgatttttttatatttgttatttcctttctgtacatacaatgagtttcatttgttcttttttcasacttcttaaggtggaaatgtaatagtcaattctaaatttttcttctttttctaatatttatttttaatatttaaggcaaaaatttctctgttagcactgcttcaggtacataccccaaattttaatatttatgttttcattttcattgattttaaacatttcaaatgtctcaaaattccttcttttactcatgggttatttgttatttaatttccaaatgtttggtattttctagatattcatatatctagtttaattctgcaacagtcagagaatatattctgtgagatttctattccttggaatttattgagacatttcatagttcagcatgtcttttctcaacaaacatttcacatgcacttgaaaacgatgtgtattatgcagttgctaaacctggtgttctataaatgtaagtgaggccaaattagctgatagtattccttagatcttct

SEQ ID NO: 798192 - DNA, 644 bp, Homo sapiens
gagaaccaaagtcacattctgaatgctttgctgcttagaaatctcttctgccagataccctaaattatctttctcaagttcaaaattccgcagatctctaggtcagggaaaaatgcttccagtctctttgctaaagcataacaagaatccctttgctccagtttccaacaagttccttgtctccatctgagaccacttcagcctggacttcattgtccatatcactatcagtattttggtcgaagccattcaacaagtctctagaaagttccaaacttttccatatctttctgttttcttctgagccctccacgctgttcctacctctgcctgttacccagttccaaagtcgcttgcacatgttccagtrtctttatagcagtgccccactctctgtgacactaatttattgtattagtccattttcatactgttataaagaatggcctgatattgggtatttcataaaggaaagaggtttaaatgactcacagttcaccatgactggagaggcctcaggaaacttaaaaatattgcagaaaacaaaggggaaacaaggcaccttattcacaaagtggcaggaaggagaagtgtcaccttaatatggtttggctctgtccccacccaaatctcatcttaaattc

SEQ ID NO: 798193 - DNA, 554 bp, Homo sapiens
taactctttaattctataaaggctcagagagatgaggaagctgtagaaaaaaaaaatagtttgaagctagcagagacagattcatgatgtttaaggaaagaatccatctccataacataaaagtacaaggtgaatcagcaagwgctgatagagaagctgcagcaagttattcagaagatccagataaggtgattgagaaaagtggctacaccaaaaaactaacttttaatgtgattgaaacagcttcatattggaagatgttatcgaggactttcacagctaatgaaaaaatcaatgccttgcttctgagctttaaaggacaggataactctctcattatgggctaatgctgctgatgactttaagttgaagccagtgatcatttacaattcagaaaatcccagattccttatgaattatgctaagtataccttgcctgtgctccataatggaataacaaagattggatgacagcacatttgtttacaatatggtttcctgaatattttaagcccagtgttgagacctactgctataaacagtctttcaaaata

SEQ ID NO: 798194 - DNA, 606 bp, Homo sapiens
ctattagtttccttcagatttttaaaggaatctcttttgtttttcagcgctgactgtttcctggataatttgctcccttctgcctatcctgtcaatttctttctgtatctctttttctctcttttacccatttcttcttctttgtgtatttacgtgtgaaagggtgaagatacagaaccttgtttttgtattgaacrtctgcattccctaattttcttatattttattgccaattttaaaaatctcattgtcctttcattctactcttcgagaatcttcaactttttgtatcttctattgatgttttctctcttaaatataatttcatttccacaaattcttttaaatttattctcagggtattcatttttaatcaccttgtataggtgctctatgatggaaatagctctctgagcatattagttacaacgttttcctattccaggtattgctctttttatctatgtttcctttgcccagctccagacttccttgatgagataacctgagctcttttccagttatcgtaaacatcaatgcctttaagacaccttccaaatatcgccagatctgtaaagatggtctcactgcctcacagccagaatg

SEQ ID NO: 798195 - DNA, 478 bp, Homo sapiens
ttttatttctccttcatctatgaagcttagtttggctggaaatgaaattctgcgttgaaaattgttttctttaagaatgttgaatattggcccccactctcttctggcttgtggagtttctgccaaaagatctgctgttagtctgattggtttccctttgtgagtaactygacctttctctctggctgcccttaacattttttccttcatttcaaccttggttaatctgacaattatgtgtcttggggttactcttcacaagcagtatcttcgtggtgttctctgtatttcctgatttgaatgttggcctgccttgctaggttggggaagttctcctggataatatcctgaagagtgttttccaacttgattccattctccctgtcactttcaagtacaccaatcaaacctaggtttggtcttttcacatagttccatatttcttggaggctttgttcattccttctcattcttttat

SEQ ID NO: 798196 - DNA, 674 bp, Homo sapiens
aaaaaggaggagagagagattctgtaaaaaagaaaaaacataggaaagctgagtatgctgctacggggagaattgaggaaaagaggaggccattagagatgtggtgacaatgttggttgtaagcacttcctcctccgtctcccccaagaacctcagtaaatatctgcattgcctcttcaagtcagatctggggcttggtgaaaaaagaacagctaggactatcctcaagggaggcctggggtgcccggtcacacttatgtcgagaaaggtggttgacattcactcaggatttcattggcttgttcatctcatcagtaaatgtttaataagcatgttctgtgtgccaggcactgttctaggtgcttaggtttcaccagtgaacagcacaaatgtccctacattgttgccagagaatgcaataaattataaagagaataaataactatacacagaatgttagaacatgatgagtagaatggaaaaacgaaaaagtagaggagacagtgattttaawcagggtagtcggggtacaatgcccccttggtaaagtgatacttgcgttaagccttgaaggaggtgagggagtgagctatagtttggatatttgccccgcctccaaacctcatgtcgaaatttgattccgatgctgaaggcagggcctggtagaggtgttc

SEQ ID NO: 798197 - DNA, 705 bp, Homo sapiens
ttggatggaatttagacctctaggttctgggatcctaaagaactgaagtaattagccagacatggtggtgttcacctgtagtcccagctacaggttgaggtgggaggatcacttgaacccaggagttttagaggctgcagtgagctatgatcacaccactgcactccagccccagggccacagtgagaccctgtctcaaaaaaaaaaaaaaaamaaggaactgaagtgaagtcagaatatcttcttttcaggccttagagaaagatcgttatgagcatagtcccaaatctggatttctctgaagccaggtcctcccttggcttaccattctgtcttccactgataacttgaggcacgtagccattaactggactgcccagctgttcctggcctagggaggagccagaacccccaaccaatagtaatgaggatggtgatgcgagccttgggtcctccctaacttggctactgtgttacagaagcaatatccaaggcagtgtcatctgcaacaatgctgtgatcgagaagggtgcagacatcaaggactgcttgattggaagtggccagaggattgaagccaaaggtaaaccagattacaatcacagattccatttttacttctcacaccagcactgataatgccaaaggctggtgaggatgtgggaaacaagcacatacgtacactgcgggcgagaacataaattg

SEQ ID NO: 798198 - DNA, 486 bp, Homo sapiens
tcatttttggaaaactgaattccttccagcttatacattagctggtaagcagtgaagtcttacagaaatggcgaaatcttactaaagataacttacagtagaacgttccgaatgaacaatgcactgaagtgcattgagactcatctagggatgcttactgatatgcagaygcttctaaaaagatttcaatatttttatttaaagactttatgaaggccgggcgcgatggctcacatctgtaatcccagcactttgggaggccaaggcgggtggtcaacatggtgaaacaccatctctattaaaagtacaaaaattagccagccatggtggcgcaggcctgtaatcctggctactcggggggctgaggcatgcctgaactcgggaggcagaggttgcagtgagctgagatggcattactgcattccagcctgggcgacagagccagactctgtctccccccaaaaaaaaagactttatgaaaggcac

SEQ ID NO: 798199 - DNA, 389 bp, Homo sapiens
atcagacaacaaacactttcctttggaagtgatggagttgcacagaggatgagatgtgtttggtctcagtgactcttacatggtgcattctctgggaacagaggcaggagaggggctgatggaacagcacctccgtctgtatgctaggccctgtkctttcagacccacgcctttcttttcacactaagaacagatggcaaccagacattgagtggaggggtctgttccttgtgatccttggggattttgcattcagtttagcaaaaagtcatcaaaacgcaaagagagaaatgagcctacagcctgttcacaattatgcaggacttgtttggcattcactgtactgacagatttaaacacttttgcagatatcgaatgataacagcatt

SEQ ID NO: 798200 - DNA, 545 bp, Homo sapiens
atattctgtgatcagcatggcagtggtgagtttagtcactcaccagctatctgtgctgcctggaacagtaccctttctggaaagctagatattgtccgcacagaactcaatccatcagagaaatataaagctatggtattggcaggactgcgacaagagatcgtgttggacgttagctcctgagcagtggccttctggacatatcaggtacatcaggaacatctctatcaagaacacaatttcatcaaggctgagggccatctgaaacagacggagaaaatatatactcagcaaatacaaagcgaggatgtagaattgacctctatgaaaggggaagtcrcctccatgaagaaagtgctagaagaatacaagaaaaagttcagtgacatctgagaaacttatggaacgccatcttcagcatcaaaagctccaaggcctctatgatagccttaggctacgtaacatccctattgctaaccgtgaaggcacccttgaaccatctacgattgcacagtctggtgtttttggcttcccattaggaataa

SEQ ID NO: 798201 - DNA, 594 bp, Homo sapiens
ttatttagttttgcctctcctctctgagtggtgaattagagcagcagcaatttctagcagggccttcaaagtaaaaagaatttgagccaggcatggtgtcacacacctgtgatcccagctacttaggagactgaggctgggaggatcacttgagcccaggagtatgacactgtaatgatctaagatcatgccactgcactccagcctgggcaacagagtgagaccctatttctaaaaaacgtaaagataatttagctaactttacagaatgtttccaggttcaccttcagtaatttcatttagcaaatcttttatctagatasgactccccagcctccctgtgcttttaagtctctgaagttgtcatcaaattatcaacataacaaactcattggcaatggggaatggtttagagtctggtttctctgttcctattaattaaagcatgagcattttattaatctcaatttcattgtgaactgctgaatcttcatccctagtgagaaggtcacaatagtatttgtttcaactctgggctgtttctgactgagctgtgttgtttatgccttaagtacctgtgttatatgctacacg

SEQ ID NO: 798202 - DNA, 599 bp, Homo sapiens
ctctctaagtgttagtgggctgaaattactattgttaattaaataaaaaggaggaaggaaactttctcaacaaataagcaatataaacaagatttcaaagaagaatcggttacttgcttaaaagaacaaactttttcaagcatattaaatgtactggttttctttaatattgtttcatatgactagatattataggagcaacaggatggtatgcccgctgcacggtaacagccatgattgagtgggtgctgagcgatgagatggaggagaccctaaaattcatctccctgaggagatctgggttgggatttttaaggggaccatgaggagaaagaggatgggaattggggtcattgattggttgggttacggrggatgaaatcatcaggatgtggaaactgcattctttggtgagtcagcttctcgtgggatccttcaggcaagctgatgtcagtagtttcactggtacgtaggacctgaaagaatatctcaaatggaaaacttaacattatataatgttcaagctgttatccatagagcagttaaggggaactataattttgtcacagggtctacgtgattctgggacaagaggcaaa

SEQ ID NO: 798203 - DNA, 583 bp, Homo sapiens
agatagacagaaaactcagaaacattcatgattcttaaggattagggaaggtgttatacgcttcattaagtcaaaagtagttgacaaatgtttaatattgcactatcagattaatttcaaatatattatatcaaaagacataaaatgtacggaatttttataatcctgtttcctcttcctaataggatcacagtttttccctttccttctttctttttatttttttgttgcttatcagttcaatgtaagattcaagggtcaacatttataaatttaaatggtttacagttttctcatgatcattggctacttgaacaattgctgytagaggggtcacatgggaactgacagaaaagctcagcaacggaagactggagaagcatacctcaacatttatagaaaggaaatattcaaataatatttttaagtggtaggttaggcatccctatacagcacatgacctgtaaataaggaagtatgacgagacagaagaaagtggagaagcgagataatgatacattgggtaaatccataattatgtaaccaaggaatgtcctcaaagtcttgtacacacaaacaggtt

SEQ ID NO: 798204 - DNA, 641 bp, Homo sapiens
ggaagcgtagaaaggaaattatttttttgtgtgcctcaggaatttcatttgtagggagatttgaaatagaaatgtgtatttctcaaggcttaaagttccttttttaaatcctgaaatccattgatactttattgctttaatcttggtaggtttgggagaacaaaaatctttgtagaattatcaaaaatattttcttattcagtaacctctatgctatgacaaacccaaatattatatttgtaatgattcattttttggcgttttgaaggaaataagaaaatagattttatttgattgcttcagaggttataatattttcctccccgcccctcataagctttaatctgataatttcatttgaacaaacatttgaaatttagggaggggactgcaagtgtatgtaggctgtggtatggacgactatgggattacactccttatattaattgtaaaayacctatcaggcagtttcttcggcaatgctaagaaggttattcaagcccaagcctaaagtatcatcagtagtgttctccagggtagtcaacaggtgtttgttcacagacatcaaagttcttttttccttgaagtgccttttctgtgctggaaaattctgttttcgtgcccgggagtttgaacacaag

SEQ ID NO: 798205 - DNA, 607 bp, Homo sapiens
aaatctggggtgcacaccttcgacatttatcttatgtagaccattgttatttaggttctattataggcagtgaaacttaaatacactatgggttgccctcgtgaattcttactacccacagatgttacagtcactgtttttacaattgaagaaacaaagtttcagggaggcaagtaatcagctttggaaasagcaaggagacactaagacaataggactggaaagagactgaggccaaatcatagcgaatcctcaatgtcctctgaccagtgatggacagcatcagtgttcaagaaaggttttcctcatagttccatgagggataaattgtgatcaatttaaagattattgtgttaatctatgcacaagataagagtacgagtagaaatctgcagtcaggtaaaagtgaaaagactttgtgatccattgaatgtgatgtgggagccaagataaatcatttttggagtactgctcctttatgtggtaaaaaagatatctaataagacttagtgctcagttttgtactttgaaaatatatccattacaataaatatattaacattgaacacttgcagaattaagtgccatattttttagtgaatttcca

SEQ ID NO: 798206 - DNA, 607 bp, Homo sapiens
aaatctggggtgcacaccttcgacatttatcttatgtagaccattgttatttaggttctattataggcagtgaaacttaaatacactatgggttgccctcgtgaattcttactacccacagatgttacagtcactgtttttacaattgaagaaacaaagtttcagggaggcaagtaatcagctttggaaacagcaaggagacactawgacaataggactggaaagagactgaggccaaatcatagcgaatcctcaatgtcctctgaccagtgatggacagcatcagtgttcaagaaaggttttcctcatagttccatgagggataaattgtgatcaatttaaagattattgtgttaatctatgcacaagataagagtacgagtagaaatctgcagtcaggtaaaagtgaaaagactttgtgatccattgaatgtgatgtgggagccaagataaatcatttttggagtactgctcctttatgtggtaaaaaagatatctaataagacttagtgctcagttttgtactttgaaaatatatccattacaataaatatattaacattgaacacttgcagaattaagtgccatattttttagtgaatttcca

SEQ ID NO: 798207 - DNA, 668 bp, Homo sapiens
aatccctccaaccttggcattccaggaaaggactttctgcaaataaccatctttcttcatatgacttagataggactcactttccactttttctcatgactcccataacagttgaggataactccaccatttacctgtgtcaggaacaaacagagaactttcccctcttgcatgaatttgctgacaaggccaaacacagatcctcaacttcttgttacttggctcatgattactgaaattagaaacgcttgtcccctggaaaaactagctaatacagagaaaaacactttctgttcagccaaccaactgatattacccctgcttgcaaaaacactctactgtaaatcacttcacctgaaatttgattaccattctttctgaaactctaaggcaaaatcacctgctgagatacgctgatctttgaattggggatgctctaccattgcaatagcctgagtaaaattaaaattaatayccttacttgtccaatttttgtttttcacaatagcaaaagggattttgcagatctgtttaaggtcccttttggttgactttaagatagtgaagagaaatcagtaacactgattccatcttttctagccaggcatggtggtgtacacctgtcatcccagctacttgggaggctgaggcaggaggatcccttgagc

SEQ ID NO: 798208 - DNA, 648 bp, Homo sapiens
gtggaaaaattaaaaaaggaatggaatgttatttgtattactgatgttgtctacaatcatactggtatgagcttcattgactgccttcattaattttgatgagaatttatgcacacacacatatacacacaaataagagaaaggaagaaagaaagagaaaggaaaggggctaacataaattttaaaaacacaaatgatgattaggtgtccttcygtttaaaaaattaatatttttcctttcaaagaaaacattcttaattgaggattaagtcaatatataagtatcttgcatctgttgcttataaatacaggagagtgatcatagaaggaacataatgatcacatatttcaacttacagtacagtagtccccccttattcgcagttttgctttctgaggtttcagttacctgcagtcaatcacatttcaaaaatattgaatattccagaaatcagcaattcataagttttaattttcatgctgttttaagtaacatgacaaactctcatgccatcctgctctatcccacctggaatgtgactcatccttttgtccagtgcatccatgctgtaaatactacctgtccaccagttacttaatagcctgctcagttatcagataaaaaaacacaaaatatcaaaatatata

SEQ ID NO: 798209 - DNA, 538 bp, Homo sapiens
cagtgacctctgaatgtgggttctctgtaccgccccgctcccacccatacctgccctgtctctttcagcgtgccctgtcccccatcccgtcctcagctgctctgaggcgagggggctgtgcaggtcctgggcacccgacccccactgtcatgagacagagacccaggtctcaggctcagctcatttgacagaggaggaaaacagaggctccggatggtgatggtgttagggtcacagarccgccctgggttctcccctgctgtctctctactgagcccccgctactgctgccaggcgactaatatggaaggggagaaattagggctgatgtggaggcagtgggtttgggagggacctgcattgggtcctgcgccccctggctgccctcttctcagcctcctggggcacacagggctggggggtgagggtggatgtggacatgcagtgccggctgtgggacagtagccagcagctgccccagaccagacactggggatccggatgttgacagggcagccagttctggtgctgtgcagag

SEQ ID NO: 798210 - DNA, 602 bp, Homo sapiens
ctctatagggacgtaagaaagcaaaggacggggtttccacactcaggctctggggtcacattgacctggattcaagtcctgcctctccatgccctggccatgtgacctgagggaagaccctcccgttctctgagccccacrtcccttgtcacagggttgaatgagaactaactaggtcaggagagcaaaggctcagcctagctcaggataagcgctcaacaaacggtagcttaaaaatagataatgaatgcaaaatagctcctggaaacagcatttgttgccttaatctggtcccaatcactttctcaatgtcctcagcacctcgagtgcctgccacccgctgcctttcccatgaggcaggatgtggcttaaaacctctgtaggtttccccttccagccatgaaggcccacattagctgtctgcacagacaggtaataaaaattaaaggccgggtgcagtggctcacacctgtaatcccagcactttgggaggccgaggtgggagggtggcttgaggccaggagttcgagataagcctgggcaacatagtgagagcctgtctctattataatatatacaatattaaaattaaaagtaaaaat

SEQ ID NO: 798211 - DNA, 602 bp, Homo sapiens
ctctatagggacgtaagaaagcaaaggacggggtttccacactcaggctctggggtcacattgacctggattcaagtcctgcctctccatgccctggccatgtgacctgagggaagaccctcccgttctctgagccccacatcccttgtcacagggttgaatgagaactaactaggtcaggagagcaaaggctcagcctagctcaggataagcgctcaacaaacggtagcttaaaaatagataatgaaygcaaaatagctcctggaaacagcatttgttgccttaatctggtcccaatcactttctcaatgtcctcagcacctcgagtgcctgccacccgctgcctttcccatgaggcaggatgtggcttaaaacctctgtaggtttccccttccagccatgaaggcccacattagctgtctgcacagacaggtaataaaaattaaaggccgggtgcagtggctcacacctgtaatcccagcactttgggaggccgaggtgggagggtggcttgaggccaggagttcgagataagcctgggcaacatagtgagagcctgtctctattataatatatacaatattaaaattaaaagtaaaaat

SEQ ID NO: 798212 - DNA, 618 bp, Homo sapiens; identical to SEQ ID NO: 789685

SEQ ID NO: 798213 - DNA, 618 bp, Homo sapiens; identical to SEQ ID NO: 789686

SEQ ID NO: 798214 - DNA, 542 bp, Homo sapiens
gattcaatatgaattttagtatgagttttcctatttgtgcaaaaaaatctttgggatgtgatagggattgcattgaatctgtagattgtattgccatcttaataatattaaatccatgaacacaggatgtctttccgtttatgtatgtcttctataatttctttcagcaatgccttagagctttcagtgtacaartattcccctacttggttaagtttattcctaagtattttattctttttgaagttattgtaaattaaattgtttttcttattttttggattgtttattgtgagtttatagaaatggaactgatttttacagttgattttgtatcctgtaactttgctgaatttttaattagccctaagagtttttgtgtgtgtgcttgtgtggattttatacacatgagattatattatctttaggattttatatatatgagattatattatccatgaacagaaatcattttgcttcttcctttctaattaagatgtcttttatttcttgttcttgtctaatttttctagctagatctt

SEQ ID NO: 798215 - DNA, 520 bp, Homo sapiens; identical to SEQ ID NO: 793094

SEQ ID NO: 798216 - DNA, 604 bp, Homo sapiens
gtaggcacttcttgttgcttctctccctggcttaccctagaggcagaatcaaacctcaagctaaccttcttgtctttgagagttaagaacctgacattcactagatgcctggcaacaaagaccaaagcaatgggctgaaagtgtatggtctgaacatgaatataagtgtttgccacagatcctctacctgacttagtgyggagtgattgggagataaacaccagtttcccactttgccctgaggagaaaggaaaccaggtgatacttttaacacctcaacttctgcagctgcttcctgagggactggcttctatctcagcggccttggggcactgatgggacttggtagaacctgatcatctgggggcccagtaagaacacagattgcagtttggacaaacacaaagatttgagaggcacttgtaacctctggctgggctgattgggtaagcttatctcttacataaggctattatgtcaagatacagagatgtggttgtttaatgtgcagaaaccaacacagagagtcaaggaaaatgcagaaataaaaagaaaagagaaacatgtttcaaacagaacaccaaaataaatctccagagactgt

SEQ ID NO: 798217 - DNA, 648 bp, Homo sapiens
tcaaaaactgcctctagagacaaagatcatcattgcataataataaaagggtcaattcaagactaagatataatgattataaatatacaggcacccaacatcagagcatctaagtatacaaaataaatattgacagatctgaaagatgacattgacagtaatacagtgattgcatgagactttaataccctacttacaataatgaatagaacatctaaatagaaaatcaataaagtaacagtagacttgaataatgctataaatcaaatggacctaacaagcatgtatagaactttctctttaacagcagactactatacatttttctcaagtgcacgcagaacattctcgagtatagaatcacatgttaggtcacaaaacaaatattaacaaatttagaaagatccaaatcataygaagtaacttttcctgtcacaatggaatagagctagaaaccaataatagttaagaaaatgagaaaatttacaaatatatggaaacaacacactcttgaacaatcactgggtcaaaaagaaaagcaaaagaaaaatttaaaaatatattgagatgaaatgaaaacacaacgtactaaaacttatgggatgcagcaaagacagtactaagaggaagtttatcatgataaatgtc

SEQ ID NO: 798218 - DNA, 602 bp, Homo sapiens
agtaataagatacagagcaataatatatctaatcgagaattttaaaactatagaaaaaaatttaaaaaatttctttgaaaaatacacaaaattgacaaactcttacctagatttaagggaaaaaagagagaagactcaaataaataagaaaggggggacactaataagtaaaatcagaaatgaaacaggaggcaatctcctttttcaggataagagattatttgaattcttatrtgcctacaaattggataacctagaaaaaatagataaatttctaaaaacatacaatctactaagactgaatcaagaagaaatagaaagtttacatagactaataataaataagtagattaaaattgcaataaaaaacctcctagaaagccaggtgcagtggctcacacgtgtaatcccagcactttgagaagccaaggcaggaggatctcttcagcccaggagtttgaggctgcagtaatccatgatcatgccactgcacttcagcctgggcaatagagttagactccatctctaaaaagaaaaagaaaaaaagaaagaaaagagaaaaagagaaaagctcaggaccagatggctttatgactgaattc

SEQ ID NO: 798219 - DNA, 519 bp, Homo sapiens
gagatggaagaggttttggagatggcctggaatcttcccgtgcccatcttgcaaactgaagccttgtgcactctctctgtgcttcaccaaatgtacccttcactcatccccaaaacacacagcacctgttactcactaaaaggggtggcaaagggaggggaggggatatcctgaccccacagcctttgccacaatacrgtgtcctaagaccaggctgtcaagcagtgggtttgagagcccagccagggggcactggggcagaagcacagacaggaaaaggcagggaggaaagaagttgctttctgagatgatgggcaacaaagccacttagacaggaactctgggcaactgcagggctgccacccaagcttcagggccctggggctcagagcagacagtctgactccacaggggtccccacctaggcccgagcaccaccccatggcccagagagtcgggtcagacctgcaaagccaccaatggctcaaatagctgccaatgccaggattagaaagcact

SEQ ID NO: 798220 - DNA, 576 bp, Homo sapiens
aagtcttaatcacacaattaataaatataatggaatggattcaacaaaatacatagagaactatatccagcaggatgtgttacctttatctggagacaagttacagagagtgttcaagttctattccagagggaccacctaaggagattatacatcaatcacacattcacttctgatatattttctctgatatattctgctagaatgcccttcatgaatatcagcatcccatgtttgaggcaratgttgggttaggccctataggcgcagaaattgtcacaaatgccagcctttggtgtgagagacaagccttctcatctatcagcaagcacacataacaaggttatctttgaggtcatggggaagtgggttcccacaagcgggcaagtgcatcagcatctcagtatggtctacagtccaagaccagtttgtaccattttaaggttatcctacctcaggtagaaggaggtgggataatgaccacatactacattcttgagaatcctcagactagggtgaaacaaagtgatccaccctcagcttgaatgagtggacacatttaaagcatgttagagt

SEQ ID NO: 798221 - DNA, 576 bp, Homo sapiens
aagtcttaatcacacaattaataaatataatggaatggattcaacaaaatacatagagaactatatccagcaggatgtgttacctttatctggagacaagttacagagagtgttcaagttctattccagagggaccacctaaggagattatacatcaatcacacattcacttctgatatattttctctgatatattctgctagaatgcccttcatgaatatcagcatcccatgtttgaggcagatgttgggttaggccctataggcgcagaaattgtcacaaatgccarcctttggtgtgagagacaagccttctcatctatcagcaagcacacataacaaggttatctttgaggtcatggggaagtgggttcccacaagcgggcaagtgcatcagcatctcagtatggtctacagtccaagaccagtttgtaccattttaaggttatcctacctcaggtagaaggaggtgggataatgaccacatactacattcttgagaatcctcagactagggtgaaacaaagtgatccaccctcagcttgaatgagtggacacatttaaagcatgttagagt

SEQ ID NO: 798222 - DNA, 501 bp, Homo sapiens
attgtgaggaatggatgatacttatttggggattcattaaatgatttctacttttgaatatgtttggacatttatataataaaactttcttttctttttttttttttgagatgtagtttcactcttgttgctgagattggagtgctgtggcatgatcttgggtcactgcaacctccacctcctggattcaagcsattctcctgccccagcctcccgaatagctgggattacaggcgtacaccaccacttccagctagttgttgtatttttggtaagatggggtttcaccacgttggccaggctggtctcaaactcctgacctcaagtgatcctcccaatgtggcctcccaaaatgctgggattacaggcaaaagccaccacacccagcttatataataaaacttttggaaaggaaaaaaattattaaagttctctatattgtgtttttattttctttatttttgtgtttggtatgaatgtgcagtggtttctaaacctgaa

SEQ ID NO: 798223 - DNA, 536 bp, Homo sapiens
agaattcagaggggaagggatcttagggactttgggggcagcccttccttttgtaggtgacaactaaggccgggagaggaggactgcttacccgagcagagtgctcctgctgagcccaggcggtttccatttcccggggtctctgttaggattgcagcaccttcaaaacattkaacatacttccctgccggaagccacatccttcagtggtgacacccagaaacagcccccttggtcttttgcttgttttggagagatgcagcgtgactgcttttattgttacaacactgggtggtctaccagtgagcacgtagtataaataacaactaataaataattttacagcaaaagtcctaaatctttccagatagtgcactggtgcatggctgtcaaatgccggacagatcctaagaaaacagtaactttaacccatccatcttttacgtacatggcacattgtcgtcataaaattttcctaaggtttcagtggcttaagggagaaaatgtacatgtaaaaacacacgtacacaaacaca

SEQ ID NO: 798224 - DNA, 657 bp, Homo sapiens
cagggcatctctgaaagaaaggcaacagccccagtcaggggtctatagataaaactcccatctccctgggacagagcacctgggggaaggggtggctgtggatgcagcttcagcagacttaaatgttcctgcctgccaactctgaagagagcagcagawctcccaggacagctgtcgagctctgctaggggacagactgcctcctcaagtgggtccctgacccccaggcctcctggctgggagacacctcccagcaggggtagacagacacctcatacaggagagctccagctggcatctggcaggtgcccctctgggatgaagcttcccgaggaaggagcaggcagcaatctttgctgttctgcagcctcctctgttgatacccaggcaaacagggtctggaatgcacctccatcaaactctagcagacctgcagaagaggggcttgactattagaaggaaaactaacaaacagaaagcaatagcatcaatatcaacaaaaagcatgcccacataaaaactccatccaaaggtcaccaacatcaaagattaaaggtagataaatccacgaaggtaaggaggaaacagtgcaaaaaggctgaaaattccaaaaaccagaatgcctcttctcccccaaaggatcacaactcctcacca

SEQ ID NO: 798225 - DNA, 657 bp, Homo sapiens
cagggcatctctgaaagaaaggcaacagccccagtcaggggtctatagataaaactcccatctccctgggacagagcacctgggggaaggggtggctgtggatgcagcttcagcagacttaaatgttcctgcctgccaactctgaagagagcagcagatctcccaggacagctgtcgagctctgctaggggacagactgcctcctcaagtgggtccctgacccccaggcctcctggctgggagacacctcccagcaggggtagacagacacctcatacaggagagctccagctggcatctggcaggtgcccctctgggatgaagcttcccgaggaaggagcaggcagcaatctttgctgttctgcagcctcctctgttgatacccaggcaaacagggtctggaatgcacctccatcaaactctagcagacctgcagaagaggggcttgactrttagaaggaaaactaacaaacagaaagcaatagcatcaatatcaacaaaaagcatgcccacataaaaactccatccaaaggtcaccaacatcaaagattaaaggtagataaatccacgaaggtaaggaggaaacagtgcaaaaaggctgaaaattccaaaaaccagaatgcctcttctcccccaaaggatcacaactcctcacca

SEQ ID NO: 798226 - DNA, 591 bp, Homo sapiens
gagggtgggatcgctacaagctgcttctgggaattgaggtatggtggggatttgaggagaacctgcagtgaagaaggtcttgcacttctgcttcctgccatggtccctgagaagtgattgcaacatccttgatttctgaaagcctttcctctgtttcccttttctgtcccacagcctttagggagaaaggggtcttttctgacatcctcgaggaagggttttctaaagtcaaggttaccagcaccagggttggataagtaatagtagctgtgctgtgtgctttgagggagaagggaggatgggagttagctcaggcagtgggaatagcttcctgagattgtgartatcagctgaaatgtgacctgcctcccttttctttcccttccttcccttttctcctgtgtctcctcatcccaggcctctccagccaattagccagatcttgtcccttaggatttcttcatcctttatcatgtcatgcaatttagtcttctcttggtcactttcttttgtattcccacccatcattttttcagcaaaacaaaagatcagtttttcagcaagacaaaagatcagttagaagaagagagg

SEQ ID NO: 798227 - DNA, 591 bp, Homo sapiens
gagggtgggatcgctacaagctgcttctgggaattgaggtatggtggggatttgaggagaacctgcagtgaagaaggtcttgcacttctgcttcctgccatggtccctgagaagtgattgcaacatccttgatttctgaaagcctttcctctgtttcccttttctgtcccacagcctttagggagaaaggggtcttttctgacatcctcgaggaagggttttctaaagtcaaggttaccagcaccagggttggataagtaatagtagctgtgctgtgtgctttgagggagaagggaggatgggagttagctcaggcagtgggaatagcttcctgagattgtgagtatcagctgaaatgtgacctgcctcccttttctttcccttccttccctttkctcctgtgtctcctcatcccaggcctctccagccaattagccagatcttgtcccttaggatttcttcatcctttatcatgtcatgcaatttagtcttctcttggtcactttcttttgtattcccacccatcattttttcagcaaaacaaaagatcagtttttcagcaagacaaaagatcagttagaagaagagagg

SEQ ID NO: 798228 - DNA, 556 bp, Homo sapiens
aaatacttcggatggccacttctggagggtggatttatgattgggtgttttaaatgttatctaactgccccaagagtacagatttaagttaattttatacatatatatcagtttatactgaagttttataggcaatataacaatagttttagctgttgtgtggaaagtggattggtagagaccagagtagatttaaataatccagttagaagacctttgcaaatgcctcaatgagagaagattacgaataaatagagcaatcactgggtgctgactgtggaaggggccaaatgagggagaagagctggagattcctcagaacctggacttcataactgtggtaggacacactgtcatttgctgkgggatgtgtctgtttcccaattagactgtgagctccctgatagcagggactaggctctcatccctgtgtccttggagcccagagttggtgcttagcaaagtgtgttaaactctgaggaaaaggaaaggtatgtcatggaaaaagaaatcagggagaagaagatgagatgagaagggatggacactcatctgg

SEQ ID NO: 798229 - DNA, 576 bp, Homo sapiens
attcaatttctcagcaagtcgtttgtttcatcttcaaaatatttcccgaaactgtgttttctcattaccatgattgattctgcccttttccaaatgaccgtcatctttcctaaaccaggtaatgtcttcttaatgacacagtttcaactcctttccacctactgacacttttccactcagcagccrgactgatcattcataattgtacatcagattacaccactcctccactcagatctcctgagccttcttatctactcacagcaaaaggcaaatttttccacaccaaggaagctctgcatgacccaacacatgcctgcccttccaaccttgtctctcatatggttctaggttattcacttcatttgccacacctatttctgacttaacttttgataagctaagattgttctgatttcagattttgcactttatttcttctttgccaggaatgttcattccccataaagctcattttcttactgtattcagagttctattcaactgtcctctgtggatcatcccatgaaaaattctctagcctttgctctgctttgttttctataaacaatttat

SEQ ID NO: 798230 - DNA, 624 bp, Homo sapiens
atatagcaatcaatctttatgatcttaaaggtaagttgattaaaggatctaattaaaatagtcttcatgttactttagtacctggaagggtatacttagtatcatagggctgttgtacaaaggaccacaacctaggtaacytaaaacaacagaaatttattctctcacagttccgaaggatggaagactgaaattaaggtgttgacaggaccatgctacctctaagcctctatcggaggctcctttcttggctttcctagtttctgacagttccaggcattctttggcatgtaaatacatcattttaattgctgtctccaatggtcatgtggctgtcttccccgtgctatgtctaaatttccctcttcttataaggacaccagttatactggattggactcccaccttactccagtatggcctcatcttaactgatcacatctgcacctaccttatttctaaatgagatcacattcacagataatagggtcggggggtgtcttcaacatatctttttgaggaacaccatttggtattataaaagtacttaagtaagtcatttttaaaaattcttgtcaaagtaatgattctatttcaatgaatctggtatttttcctagtaaca

SEQ ID NO: 798231 - DNA, 621 bp, Homo sapiens
gctaggaacaagtatagtaagagtatagtttaaataggagcctcagaaataatccccccaacccctggctattttcttttgtctccatagttttgcctttgaaccagtatgcagccttttcagattaacttatttcacttagcaatgtggatttaagtttcttctatgtcttttcatggcttgctagctcttttgtttagcactgaatagtatgctattgcttcacctactaaaggacatcttagttgcttccaagttttgttgattatgaataaagctgctatacacacctgtgtgcaggtttttgtgtgaacatgactgtgatattttaaggtcatacctattgaggtataatttatatacagtaatattcactctttttagtgtggaattctaaaagttttttttttttttttttwtttgagaaatctctattaattctccttttcatattttttcttttttttaatttttttttttattatactttaagttttagggtacatgtgcacattgtgcaggttagttacatatgtatacatgtgccatgctggtgcgctgcacccactaacgtgtcatctagcattaggtatatctcccaatgctatccctcccccatcc

SEQ ID NO: 798232 - DNA, 654 bp, Homo sapiens
ggtagaggagttgtgctgtcctgggggttcccttctgttctcagatgatttggactttccaaagccctcaggctggaagggctgagtcacccaaagagcacaggtggcagctcgcttgttctcctgggaactccatcccagggagagtctaataatttagaaaaataattatacactggggccaagagggatttcttcaagtatgtaagactgattcaacatttgaaaattaattaatgtagtttatctatcaacaggctaaaaaaaagtatatgattctaatcaatagatgtaggaaaagcatttgacaaaatccaaccccatattcaggataaaaactcccagcaaactatgaataaaggggaacttcatcaatttgataaaggatatctgtcaaaaaaaaaaaaaaaaccaaaccctacaactaatatcatacttaatattgagaaacagaatgatttctccttaagarcagggataagggaaaaatgaccactctctctgctcttaatcaacatcatagtggatgtcctagctgatggagtaagacaagtaaagaaaatgtatacacatttggaagtaagaaataaaactgtctttattcacagataacatgattatattatattagaaaataccaaagatcaacaaggt

SEQ ID NO: 798233 - DNA, 528 bp, Homo sapiens
tatggagatgaaatatggacttatccttatctgccaatcaaatgctctataggtgcatgtgtgtaacttaaaccgcaaggaagtttcagactggatgtgtgccatctcagtgccatcccccggccacacacagaaatggtgacatctccatcacagatgggttgcatgagactcagatgatagtggggtccttggcagaaaagaatgtcacagaggagggttctgacaagtgcttggaaatacttgggtcaatgttaccagactcctcttctctcttagcttacagcctggatgtctgtcaccaaatccctttgagcagtgacttgagccacctggtggcagaggtaygaggtctgagagggcagctggagaagagcattcaggggaacaattgtctgtgactgcagctgcaacagcagctggatagcctgctggcaaagccagcctcagcccctcctctgttaaccagaacttcccagccagcgctgaccctggaaacaagcagctgctcctccaaggtaggaagga

SEQ ID NO: 798234 - DNA, 528 bp, Homo sapiens
tatggagatgaaatatggacttatccttatctgccaatcaaatgctctataggtgcatgtgtgtaacttaaaccgcaaggaagtttcagactggatgtgtgccatctcagtgccatcccccggccacacacagaaatggtgacatctccatcacagatgggttgcatgagactcagatgatagtggggtccttggcagaaaagaatgtcacagaggagggttctgacaagtgcttggaaatacttgggtcaatgttaccagactcctcttctctcttagcttacagcctggatgtctgtcaccaaatccctttgagcagtgacttgagccacctggtggcagaggtatgaggtctgagagggcagctggagaasagcattcaggggaacaattgtctgtgactgcagctgcaacagcagctggatagcctgctggcaaagccagcctcagcccctcctctgttaaccagaacttcccagccagcgctgaccctggaaacaagcagctgctcctccaaggtaggaagga

SEQ ID NO: 798235 - DNA, 560 bp, Homo sapiens
caggtcaatggcaccaataccttttggatccaactatgctaattccagggagagggtgttgtgccatcttcatgttggcacaaatatttacaaacttgcaaactttcctgagtccagatctctctccccagcataacacttctgaactctcaatcttacctgtgaagggagagtgacagaactgatatcaggactaaagcaaggtcctcttcagagttgggagtttgataccagcctgaggcgaggttctcttaagctacaggtgtgtaggcctgtgctagtctgcatggggaattccagagtctcattattcctgcctaatggcctcatcctaaactgtcctcagctggaggtattcraggctgtgaaggaggaaatccagttcaggagggttgagaagattgtagaatcctttgaactggaaagagccacaaagcacagggtgctttatgtcttctgcctggtcagtaagagtctgttcctcttatccagagagaatcgacagaaagggaacttctagaactgagaaccaaagtatccaaacaggagtggctccttca

SEQ ID NO: 798236 - DNA, 620 bp, Homo sapiens
gagcatcaaattgaacattatttcttttggaaccatgcaaaaacatatgctaaagtatatgagcaagggccatatgaaaagtcatgtaccagggccaatgcttactgtctttaaatgttaatattcatatatatgactattactgcaaatgaattcttactcagaagtttaatatataataacagatagcagtggagcttcattggtcgaattggaggtgagggaggcctgcttgcttggcttttctacagtgataacctcttctctctaactcctaagatcrtgaaaattatgacttgaaaaccactgctttctatatcttcattctaataatgataattatttatcagattattaagcttaccaaaataaaataatttgcattggtttaggtaagcaagtctatttttgccttctggacaaccttgccgacagagctgttaaaactttccatctgcaaactctgtcacccctagtttcaagactacagcttatgaaggaataaggtttatgattagcctgagaggccagctgttatagtctggtattaatcttattattatagatcaaagacctgatatacttggttgtatgcctttggaacctgtatactatttgat

SEQ ID NO: 798237 - DNA, 631 bp, Homo sapiens
tgctccggaattcccaatgctgagtacaattctatttaaaaacatttgtacaaatttatggggtacatgtgcagttttgttacatgcatggattgtgtagtggccacatcagggattttacagtattcatcactcagttaaygcacatggtacctattaactaattattaactaatttctcaacaaatacaccccttcatgccctcacccttccaagtatgcattgtctatcattccaatctctacatctatttttacacagttttcagcacccaattatgagtgagaacatgtgaaagttgactttctgtgcttggtttgtttcacttaaaataatgacctccagtttcatccattttgctgcaaaatcatgatttcattctttttaatggctgaatagtattccattgtacatctatacccgactttctttatgcattcatctgttgatggacacttaggttgattccatgtctttgctattgtgaacagtgctgtgataaacaaaccagtgcagatatgtttttggtacattgatttcttttccttttggtagacacccagtagtgagatttctggactgaactgttgtatctttagttccttgagaaattgtcacacttttttcata

SEQ ID NO: 798238 - DNA, 587 bp, Homo sapiens
atttcatcagtgttttgtagttttctttgtagagatctttctttcaccttcttggtaaaatctwttgggtatttttttgtagttattttaaatggaattgtctttttgatttctttcttacatagataattattggtgtatagaaatactactaatttttgtacattgattttgtatcttgcaactttaattcatgatcaaatctttttggtggagtcttaggtttctctagatataaagtcacatcatcagcaaacagggataatttgacttcctctttaccaatttggatgccttttatttccttctcttgcctaattgctctggctagaacttccagtataatgttgactagaagtgtaatgtgggcatccttgtcttgttccagtcttggaggaaaggcttaacttttctgtattcagtatgatgctaactgtgggtttgtcatatatattttgagatgcggttcttctatgtctattttgatgctaagttttatcaaatgttttttctgcatctatgagaagatcatatggtttattgtccttgattgtttatgtgatataacacatttattgacttgcata

SEQ ID NO: 798239 - DNA, 597 bp, Homo sapiens
cagatagttagcatagtaccgaataggtagtttttcaaaccaaacggatccttcccctccttccccccatagtagtttgcagtgtctattgttgtcatctttatgttcatgtgtgctcaatattgagctcccacttataagggagratatgtggtatttggttttctgttcttgcattagttcacttaggataatggcctccagctccattcatattgatgcaaaggacatgatttcattctttttatggctgcatagtattccatagtgtatgtgtaacacattttctttattcagttgaccattgatgggcacctaggttgattccatgtttttgctattgtgagtagcatggtgatgaacatcggtgtccatgtgtctttttggtctaaggatctattttccttcagatatacacccagtaatgggatttctaggtccaatactagttctgagttatttgagaaatctccaaatcgctttccacagtggctgatctaatttacattcccaccaacagtgtataagtgtttccttctccacagcctcatcagtatctgttgttttttgactttttaataatagccattctgattg

SEQ ID NO: 798240 - DNA, 615 bp, Homo sapiens
agatgcagttttactttgtcacccaggctggagtgcagtggcatgagcttggctcactgcaacctctgcctctcagcttcaaggggttctcctgcctcagcctccccagtaggtgggattacaggtgcataacaccacacccagctaattttggtatttttaktagagatggggttttgctatgttggccatgctgttcttgaactgacctcaagcaatccatctacttcagcctcccaaagtgctgggattacaggattacaggtgtgaaccatcgtgcccggccacgaagtatctgtcttttgagaagtgcctgtccatatctcttgcccatttttaaatgagattctttgttttttgcttgttgacttaagttccttatggattctggatattagacctttgtcatctgcagtttgtaaatatttcctcccattctgtagactgtctgcttactctattgatagtttattttgctgtgcaaaatctctttagtttaattaggttccacttttcaatttttgtttttgttgcaattgcttttagggacttagtcataaattctttgccaagaccaatattgctaagggtatttcctaaattttcttctaggat

SEQ ID NO: 798241 - DNA, 656 bp, Homo sapiens
gcatgagaatcgcttgaacctgcgaggcagaggttgcagtgagcagagatcacgccactgcactccagcctgggtgacagagtgagacttgatctcaaaagaaaagaaataatgtgagaattgcaaaagagtctaaccctgtctcagatgaaaggaaagggtatttctccccatattacaggaaagcaggacattctgtagtcccatatcaggccaggagtgggtcatagtgatagattgcycttgggaactcaggaagagtgagaactgaggtagagagcagggggctttgggagggacagattcagggccaacaggggcagtggcctaccttccctatcccctcccagctataggtgggtctctccttgctccttgcacactcattgccatctggccatgccggagtccttcatccatccaataaagaacctactctatgtcggctgggtgtggtggctcacgcctataatcccagcacttgggaaggctgaggtatgggcagccacagacaggctctgaggcagattttcgttttagctttaggatgatcactctggctcaagggatgtgtgtgtgcatggcagggggaaggggaatgaagagaaaagagcagaagcagggagagaggaggaggccgatgtgccactcaggca

SEQ ID NO: 798242 - DNA, 626 bp, Homo sapiens
ctaactcctcattatagtgctagaaataaagtattcttctttcccccacatttaaaaggtgggaaattgtatatttaaaaatatgagattttaaaaagatgttcattatagcatcggttttggatttatataaagccaggcccaagtctcagccacttaccagctgtgagaccttaacccctcttttcctctgtttcccaagtgatgagggttacatgagagaatgaatatcgaagtacttgacccatagtaaatgtacactaaattattaactttggttgatattgggaatatgactgggatacccagaggctggatggttcrtgtaatctagcacagagttatccttgatgctaaactagaaggacaggtatgtcaccttccagagctcacagctgtctccaccctttagctatgatcgtaaaccctctctccctgtagccatttctcactgatggtgcctttatatgattggaggcatttaggtgaactgtctggaaatttgtttagttatatttagcttatcgtgctcaattaactttatttccctgtgaataagaatgggaaactgcatacatcaaaaaacaagcctgaattttggaacttgcataaaacataaaattctc

SEQ ID NO: 798243 - DNA, 537 bp, Homo sapiens
gccactttgcaaagcaagagttacagtgttctcctgggggaaaagatgggcagtgggcttttatttttttttttctcagctattcaccactatgagagaatttttgaaaagaacaaaatggaatacattgtaagtaattcagaatgcctccagactttacaattctccctagagaaaaaactcaaacaatttgaagtcttcacaaactgcatccaaatcctttttctaacttcattaagctccagtacttaaaaatcgttcatagcaagtactttaattagagacgagccagtgcagaatagctggacaggcagtgcgtccacccagcgagcagactgcccaggggggacagtctccacctcactgatgcaactggtgaagggacagacaggggcgtggawacatttcttccttccccaaaacaaaatgggaggatgcgtgtgggttggtgggttacagagaaagattcaaacatcattctggcctgatcagtattctggcagtttaccattatacatacagaaaaagaacagaaag

SEQ ID NO: 798244 - DNA, 607 bp, Homo sapiens
tggcagagacacctttatgtttcctatgcaaatactgcttacaaaagccattaatgggaattatggaaggggaaagccaactaaatacatgggccagaataagcaggatgattcaactggtcttcaggggccttctcctctgctggtaattttattagaaccattaccagtgaagaaattttcagcttttcgaattgaactgtaaattgtttctgctttccatagtatcttaaagggatttcagggggaatttttgtttggtttgtggagtgatcagactaggggaagttttttggaaatttctgggttactgttgggaatttttccagaaatggattcttcttctttggaagtcttttggtcattagtttaaatactatattggaaaatttctacataaagatttgtaatgtgcccccaattttctgtttataggatttataagaatattattgtaatggtaacatcttrtaatggtgacaatatttctattaattttatgaaaccctataccactgctttaatctctgcagtaagaagtcattattttttaaagcgccaaacacagaatgtgtttattacaattcttcatgacccaaattatttt

SEQ ID NO: 798245 - DNA, 529 bp, Homo sapiens
attataaaatttatataattttataaactacagactatataattttataaaatataaaaacatattactctattttttctctgaatatttgaaatattacataaaaattaagagaacataaaaaaacaaaaatataaatgaaaaatgagagggccgggcacagtggctcatgcctgtaatcctagcactttgggaggccaaggtgggaggattgcttgagctcacaagtttgaaaccatcctgggcaaatattgagacctctacaatgaataaacttttttttaaataaaatttttaaaaagaaaaaagttaaaggaaaaagaaaagtgagaatgtgaaggacaacatgtagagcaagggwccccagccctgggccgtggactggtactggtccggggcctgttaggaaccaggctgcatagcaggaggtaagcagcagtggaacatgaccgactaagctctgcctcctgtcagatctgcggcaacattagattctcataggagcatgaacccgattgtgaactgcaca

SEQ ID NO: 798246 - DNA, 409 bp, Homo sapiens
ttacatatcaataataacagtgactataaatggtctaaattctccaattaaaaaacatagaatggctgaataaattttttttaaaaagacccaactatatgatgcctataagagactcatttcaccagtaaggacacaaacagactgawagtaagtaaagggaaaaagatatttggaaatagaaaccaaaagagagcaggagtagctatacccagataaaatagagtataagtcaaaaactgtaaaaagagacaaagaaggtattatttagtaataaaggagtcaattcattaagaagatatgacaattgtaaatatatatgaacccaatctcagtgcacctaaatataaagcaaatattaatagatctaaacagagagagagattgcaatacaataatattagggggc

SEQ ID NO: 798247 - DNA, 409 bp, Homo sapiens
ttacatatcaataataacagtgactataaatggtctaaattctccaattaaaaaacatagaatggctgaataaattttttttaaaaagacccaactatatgatgcctataagagactcatttcaccagtaaggacacaaacagactgaaagtaagtaaagggaaaaagatatttggaaatagaaaccaaaagagrgcaggagtagctatacccagataaaatagagtataagtcaaaaactgtaaaaagagacaaagaaggtattatttagtaataaaggagtcaattcattaagaagatatgacaattgtaaatatatatgaacccaatctcagtgcacctaaatataaagcaaatattaatagatctaaacagagagagagattgcaatacaataatattagggggc

SEQ ID NO: 798248 - DNA, 663 bp, Homo sapiens
accatgtgaaaaattattaaccaaattaaaagtgctctaaggggccaggcatggctcacacctataataggctatagggcctataggctcacacctataatcctggcactttgggaggcccagaaagaggatcacgtgagcccaggagttccagatcagcctgggcaacatagcgagaccccatctcaatcaatcaaatcaatccatcaatcaataaagtactgtatgtaagattattattaaggatacttagggacgaacgtggtggctcacgcctgtaatcccagtcctttgggaggctgaggtgggcagatcacgaggtcaggagatcgagaccatcctggctaacacrgtgaaaccccatctctaccaaaaatacaaaaaattggctgggcatggtggcaggcgcctgtagtcccagctggaggctgaggcaagagaatggcatgaacccgggaggcagagcttgcagtgagctgagatcgcaccagtgcactccagcctgggtgacatagcgagaccctgtctcaaaaaaaaaaaaggatacttagggtaagggaggagaccactcttcatattgtcttatgctgaccacccctcatattgtcttatgcctaatttctgcctccaaagaaagaagaagtaaaaactaaaaggcagaaa

SEQ ID NO: 798249 - DNA, 590 bp, Homo sapiens
atgtgactcaatacacatagaaaaagatggttttttctctttactaaaacaaaacagaaaaaatgtgcttcaggaaacagtgtagagttgtcattattattatcatgattgtcaatggtggaatgatattatagaaacagacttgtaaccagaacagacctaatgtagctctgtatcctagtagcaaagattattaaggaaatctaagtgaaaggtgtatagtaacaaactttgtgtagggtcttattgttctaatcagtttcaacacttgctgagaccattttggaaatcgtgtagaaagtaaattatgctgttttagcagggggraaagcctcactcttcactctaagtagcctagcattcaaaagaattcctttttcagggtgggcgctgtggctcacgcctgtaatcccgacactttgggaggccaaggcgggtgcatcacttgaggccaggagttctagaacagcctggccaatatggtgaaaccccgtctctactaaaaatacaaaaattagccgggggtggtggtgtgctcctgtaatcccagctacttgggagactgaggcacgagaatcacttaaacctgg

SEQ ID NO: 798250 - DNA, 620 bp, Homo sapiens
caatggccaagatgaaaattaaatcaagaactcaaacccttttacaatagctacaaaaaataaaaaataaaatatctaggaatatatctaaccaagaaggtaaaagatcactacaaggagaaatacaaaacactgatgaaagaactcatagatggcacaaactggaaaatattccatgctcatgggttggaagaatcaatgttatcaaaatgaccatactgcccaaagcaacctacagtttcaacgcaattccyatcaaaatacccagatagatcatttttcacagaattagaaaaacaatcctgaaatttatatagaaccaaaacacagctctaatagccaaagcaatcctaagaaaagagagcaaatctagaggcatcacattatctaactccaaattacagtattaggttatggtaatgaaaacagcatggcactggtataaaagcagacacagagaccggtggaacagaacagacacagagaaacaaagctaaatatgtacaataaactaatctttgacaaagcagacaaaaacctacactggggaaaggaatttgtattcagtgaacggtgttgggaaaattaaatagccatgtgccaaaggataaaactggatc

SEQ ID NO: 798251 - DNA, 594 bp, Homo sapiens
cccttttacaatagctacaaaaaataaaaaataaaatatctaggaatatatctaaccaagaaggtaaaagatcactacaaggagaaatacaaaacactgatgaaagaactcatagatggcacaaactggaaaatattccatgctcatgggttggaagaatcaatgttatcaaaatgaccatactgcccaaagcaacctacagtttcaacgcaattcccatcaaaatacccagatagatcatttttcrcagaattagaaaaacaatcctgaaatttatatagaaccaaaacacagctctaatagccaaagcaatcctaagaaaagagagcaaatctagaggcatcacattatctaactccaaattacagtattaggttatggtaatgaaaacagcatggcactggtataaaagcagacacagagaccggtggaacagaacagacacagagaaacaaagctaaatatgtacaataaactaatctttgacaaagcagacaaaaacctacactggggaaaggaatttgtattcagtgaacggtgttgggaaaattaaatagccatgtgccaaaggataaaactggatccttatttgtc

SEQ ID NO: 798252 - DNA, 620 bp, Homo sapiens
caatggccaagatgaaaattaaatcaagaactcaaacccttttacaatagctacaaaaaataaaaaataaaatatctaggaatatatctaaccaagaaggtaaaagatcactacaaggagaaatacaaaacactgatgaaagaactcatagatggcacaaactggaaaatattccatgctcatgggttggaagaatcaatgttatcaaaatgaccatactgcccaaagcaacctacagtttcaacgcaattcccatcaaaatacccagatagatcatttttcacagaattagaaaaacaatcctgaaatttatatagaaccaaaacacagctctaatagccaaagcaatcctaagaaaagagagcaaatctagaggcatcacattatctaactccaaattacagtattaggttatggtaatgaaaacagyatggcactggtataaaagcagacacagagaccggtggaacagaacagacacagagaaacaaagctaaatatgtacaataaactaatctttgacaaagcagacaaaaacctacactggggaaaggaatttgtattcagtgaacggtgttgggaaaattaaatagccatgtgccaaaggataaaactggatc

SEQ ID NO: 798253 - DNA, 604 bp, Homo sapiens
agtgctaatatccaagacagtggggaaaaggcctcaaaggcatttcagagaccttcatggcagcccctcccatcacaagtcctggggctaggaggaacgaatggctttggaggtcaggcccaggtccccactgcctgcacagctttgggacaatgcttcccacatctcagctgcaccagctayagccatggctaaaagggacccaggtacagcttggactgctactttggagaacataagccataaataagccttggaagcttccatgtggtattaagcctacaggtgcacagagtgcaagagtggtagattattggcagcttccacctagatttcggaggatgttggaaaagcctgtgtgtccaggcagaagcctgctgcaggagctgactaatcatagagaacctgtactagggcactgcagaggaaaaatgcgggtttagaggccccacaaagagtccccactggaaaactcactagtggagttgtggaagaaggccatcatcctccaaatgcaagtggtagaacctcttgcatcctccaaatgcatcctccaaatgcaagtggtagagccactggcagcatgcactgtgaacctggaaaa

SEQ ID NO: 798254 - DNA, 613 bp, Homo sapiens
aactacatacactacctacgctgtttctctcctttccttcatagtcaagcctttagaaaaaataacctatgttcatgatgtctacttctccaccttccattcattctccaattcctaaaatatggcttctgtctgggttacttctctgaagctgttttctctaagggcttcattgacacacttattatcaaaccaactatacctttttattccaattattctcatctttttgtagtgttcgcttctrttcaccactacatctttctgaaaattattttatcattttctatcctgcaaattcctcctgattctctttctattctttttatgagcactccttagttttcccattgatgtttccccaggtacccactcaaatcatttatttctttcttcatgcaattttcttaggcaatattttcaacttccacaatgttaactccacatatcctcaattactcatccatatctacctatcacctacaacagttcttggagctgaggaggcatttaattagtatgttctgaataatcaatggatggatggatggctggatgggtggatctacatgagaagtcacaatctagaaatgttaacgatgaatgtgaagta

SEQ ID NO: 798255 - DNA, 535 bp, Homo sapiens
gcataagctaaaagaactttgacattcatatatatgtgtgtgtgtatatagatacatatatatctgtatatctatatatgtatatatacatatgtgtgcatgtatgtgtgtgtgtatatatatataatatcagactgatcctaattagcattgcttccagagattaataaaaaagtatgaaaataacatagtttagcaattccatggtcacctctgaatgctttgggattatttatttatacgtcatttatacctacctgaaatccttcttgaagatagcatattcctttttttctyaaaccccctattttgttctctgaagatcttgaaatgtctggatttttcattatgagttagtattattgtagttatggagtctcttcaacaacctaacttcatgttattgttacagacagcaaagaagcttgtaacataatgctgtgagtagaatttacatgattttccttgcctttaatctacattaattattcaagaatatgtatgttaactaaattgattgattaaggagtatatt

SEQ ID NO: 798256 - DNA, 526 bp, Homo sapiens
tcctttatcctttgaatttttcattcttgatttttaaatgcatacttcattgagcagaatagtttctaatactagtcttgagaatcatatttagggggtatattttctgaacatttacataattttcttgtaccttttacttraatagctctgtacatatttctttcagcttctgtctttcaaaattctgtagataccacttcataaatttatgacttttaatcattctgaatgtgattcctctgtaggcattttgtatttactaactgaatgcttgaaagattaatttttttctttttccttaaaattcaaaaatgtatctaggtcatagattggcattgtcaccattgtgttaattttttgtagtgagtttttaaatattctcatgaaagcttttcatcagccctgaaaaaaataagtgtttttgagtgcatttttgaatgatacttctcatccaattgtcctagtgatgtatcgttacatttcctcttatttattcactgtttttatttacattctagaggag

SEQ ID NO: 798257 - DNA, 572 bp, Homo sapiens
aagctgcaatagatgatacattgttttgaaggggatgaaaataccagctaatatgtaccttggctgttttaaatatggttaaaatttgtccttaaataatgcccccaaaaacctgcagaagttactatattctataaagtggtgaatcacccccatgaataactctgatcttaattctagccctacatgaggattttactcatacattttaaagagatggaacttttagtctccatcatttaccttaagagacttgagagactcaaattargtaaatgactggaaatgtcaagtaattaaacatctggtttttaatatgaaacaaatcacttcatgcctgtggtctctgtcacttgatccctcccagtgctctgtgtttaagctgcttctggctatatttaacctctttgccaagccagacataactccatgcttcccatggtaggcctggccattcttgtccccaaggacttcttctaggattgctgggtctgtggctcaggcctgagtttagagtctagtttctttcttgctctacttaggataaaatatagctgaaggaagtgatactg

SEQ ID NO: 798258 - DNA, 603 bp, Homo sapiens
aaacacattaaaaaataagaaatttcatgaaagagtaacccaagcttctgccttaataaactagaaaaagaaaataaatttcaaagcaagcagaggataaaacaataaagattaaggtagagacgagtaaaacaagtaatgaaaataaatagagaaaataaaactagaagttgtttttttttcttttaaagttcaacaaagttaatcaagaatccatttttctagaccattagctagactgattaagaaaaaagacagaggcagggcgtggtggctcacacctgtaatcccagcactttgggaggccgaggcgggcagttcacctgaagtcaggaattcaagatcagcctggccaacatggcgaaaacccgtctatactaaaaaacacaaaaagtagccaggcatggtgrcaggtgcctgtaatcccagctacttgggaggctgaggcagcaagaattgcttgaacccaggagaaggaggatgcagtgagcagagatcgcgccactgcactccagcctgggagacagagtgagactctgtctcaaaaaattaaataaataaataaataaataaataaatataaaaataaaaataaaaaggaga

SEQ ID NO: 798259 - DNA, 634 bp, Homo sapiens
cctccccctacgctcacccacacggattgaggcaagggctgcacttgggagcaaattgcaaggtgggctggggatcagtgggcagtgcttgctgggcaggtgaggcagcggaccggagccaagtgaggcagacggtgttgatttcattcccacactgcacccaagggagctcatctgcccacgctctcaccaagagtgagatccatgtaagatggagttcaaatctagatctcccgattctaccactgcaacccagggctctttcagccacaccgcaaatcacctgtccaagtgctggacacatgcactctctgcttttggcaattgctggaaggaaagcattcgagaacaaactgccacatttgtattttcacaggccacatccaataggccaggagggaggatgcaaaccrctaattcatcattttattttatttattatttatttatttatttattttgagacttcagagaagtcagcacacagcaggccatggaagcaagtggaggactgggttcctctccctgggggaagagggggaagatggcagccgtggtccctggcacctgcagagccatccagccctcttcccatccattccacggttggcaaacatggagtgtgcagccctgc

SEQ ID NO: 798260 - DNA, 664 bp, Homo sapiens
acaggttcttactgcagaaaggatccttgtaggtgtcagcctcaaagtgaactgttttcttgatcggcaaagagttggacctcccgttctcctttctggatgataaaatggaggattctggagatggctcactgatgtcgctggtcttacctgggcccccttgcaggacctggtcaataatctggtgcatgaactcggtggagctgtctgacagcgcatggctggaaacaccatccaggcggaattccttcatgctctcgggcttgtcacagacaaagactttggagggtggtgggtggctggtttcatggttaacagtgtaggtacgctccccattttcagtcagaacgaagactttgctctcctgttcagaaggagtttctttgatgcgaacaaaagtggattcgataggaacttctttatctgaatcgaaaatatcttcctgcaaaaaaaaaacaaaaacaaacaaacaaaaaaaaacaaaagaacaacaacaaaaaaaagcacagagcaacatgagtaagaagargatttaagtacaacccatatccacctttcccaaaacacaaacaaacaaaaatggaaaaagccacttcaaaccaatgcaaagtgttctaagatgtaaatggttagagaagactcttgttcctgctgaaatatgaaa

SEQ ID NO: 798261 - DNA, 619 bp, Homo sapiens
ctgtataagacccgttcttttcaaatgcatatggcacatttaccaaaagaaaccatgtgctgggccacaaagctagcaacaatgtgtggtacacggtcagggcccaacaaatgtttactgaaatgaaataactcagcagaattgttaagaacagttcaytgcgtgtctggataagctgtgaattctcatctgtattcccttgtagatgtaaatagactgttctgcagtgatgcagcatgttctgtgaaccagaatgactttctccaggtattatttctggctcaatcttttcccatctgcagtttctgacctcagcattggggagatctgtgtcagatttgctcaattttagctgtggctttgactcacacaaataccgtatgttttagttgatttcaaactctgcctacagattaagagctcagggctaatgaaagccccaatgcctagtatttcaaaatacagtaacaggccaggaaaattgaattgcaaaataataatcactacttttttttttttgcttaaaacaacaaaaatttgttatgttacacttctggacatcagaaatccaaaacaggcctcaatggactaaaatcaagatattggcagggccggatcc

SEQ ID NO: 798262 - DNA, 619 bp, Homo sapiens
ctgtataagacccgttcttttcaaatgcatatggcacatttaccaaaagaaaccatgtgctgggccacaaagctagcaacaatgtgtggtacacggtcagggcccaacaaatgtttactgaaatgaaataactcagcagaattgttaagaacagttcattgcgtgtctggataagctgtraattctcatctgtattcccttgtagatgtaaatagactgttctgcagtgatgcagcatgttctgtgaaccagaatgactttctccaggtattatttctggctcaatcttttcccatctgcagtttctgacctcagcattggggagatctgtgtcagatttgctcaattttagctgtggctttgactcacacaaataccgtatgttttagttgatttcaaactctgcctacagattaagagctcagggctaatgaaagccccaatgcctagtatttcaaaatacagtaacaggccaggaaaattgaattgcaaaataataatcactacttttttttttttgcttaaaacaacaaaaatttgttatgttacacttctggacatcagaaatccaaaacaggcctcaatggactaaaatcaagatattggcagggccggatcc

SEQ ID NO: 798263 - DNA, 540 bp, Homo sapiens
tagcaacaatgtgtggtacacggtcagggcccaacaaatgtttactgaaatgaaataactcagcagaattgttaagaacagttcattgcgtgtctggataagctgtgaattctcatctgtattcccttgtagatgtaaatagactgttctgcagtgatgcagcatgttctgtgaaccagaatgactttctccaggtattatttctggctcaatcttttcccatctgcagtttctgacctcagcattggggagatctgtgtcagatttgctcaattttagctgtggctttgactcacacaaawaccgtatgttttagttgatttcaaactctgcctacagattaagagctcagggctaatgaaagccccaatgcctagtatttcaaaatacagtaacaggccaggaaaattgaattgcaaaataataatcactacttttttttttttgcttaaaacaacaaaaatttgttatgttacacttctggacatcagaaatccaaaacaggcctcaatggactaaaatcaagatattggcagggcc

SEQ ID NO: 798264 - DNA, 617 bp, Homo sapiens
tggtatacggagtcctacgttagcctaacccacgtggaaggcaacttcacagggatagccaaaccctttaaacaggtatgggctctccccctctgtcattctgctaatgaaacctggtccttaaggaaataatctgggatgcacgttgagctttatttactaagatgttcactgcggtgttgttatatctaaaaggaaatatttcagaaacaacctcaatgtctaccagtagtggaagagctaagtacatttttttttttggagacagagtctggctctgtcgcccaggctggagtgcagtggcacgatctcagctcactgcaacytccacctcccggactcaagtgattctcctgcctcagtctcccgagtagctgggattacagactgcgccaccacgcccagctaatttttgtattattagtggagatggggtttcaccatgttggccaggctggtctcgaactcctgacctcaggtgatccacctgcctcggcctcccaaagtgctgggattataggcgtgagccaccacgcccagccactaagtacattttagtatgcccactagatgaattattatgcagccaataaaaatatataatacattatagaagt

SEQ ID NO: 798265 - DNA, 593 bp, Homo sapiens
taaaaatataacctttgaaagaaaaaaacggtattatcattgttggcctgaggtaaaaatgaagtaacaatgagccaatttatttttaatgcaaaataaatctccaagaaatgaaactgtctgaagcattgcctttaacttcggaagaggcactagaactctcccagtcaaccaccactgcgctggttcctgcagtttggaggccctcccaagtgccctctggtggccttcaagacaagacaaaatgaagyggctgttgctgatatttggagtcttcttaagtcactggcaagatttaaattatttccagaaaataacaatctttatggatgattttttttttttaagttcacaggagtcctgactgggaaaaccctgagctacaaaagcaagattttactgaaattaattatttcacagacagactggagatcacaggtcactgaaaagtcatttcactgaacagagctaaggatctaggataaattgtaataacagcaaagtgaaatttttttaaagaagagcaaaactcaaagtcaaaacatcacatactcttatgcctttggaaaagaaataataaaaatagaaatttg

SEQ ID NO: 798266 - DNA, 643 bp, Homo sapiens
atgcctttggaaaagaaataataaaaatagaaatttgcctccatcaaaattataatactatttctgaattcagtgaaaagacagtgtaattaaaggaattaattaaatatatcaaatatctactctattataaacataccaagaaaatgaaacaaaaaattaataaaacaaattatttggctcaccgaaaagtaaatccctccagttacacacacacacacacacacacacacacacacacamaaacttaccatttcatctttttcccatttatctgtgttgcttttgtcttgatttactacataaccaggaggaagccaattcacagggggatcaaatattgacaccaccatgcggctgggtagtcccttcttttttccaaggcgatacagattacagttgctgacctttagcagaaaatattaggatacttatccataaatgatcactgctggaattcattcaaggcatattaacatatcctcagttaaatgttcttaaaattaatcaattaattatatgtcatcaattaattataagggctctacagtttttctacccattcatgttataaaaagaatattaaattcccacatattctatgcttttttggtgtaaatatttctgaatataagatgcagag

SEQ ID NO: 798267 - DNA, 526 bp, Homo sapiens
cacgtcctgtttagagctggcagagtggagctatgacaaacctggaagcaggataggaaaagaaaagtgaattgagggaaaatcgcttatttacaaatccgtctgcttaatcaacagtggcacatattccatgattttgttgatcccagctactgtggaaagcaaggactccttgggtcccaggactcatttgttttgtgtcattttggttttgaggcccagctctctgtctggcctttatagttccctggaacctgaggaatggaacacctggcatttgtactttgtgttgacccagcaggaaartgtgatggaaggactatgtacttgagaatcagaaagggctcacccacatgttacttaacttttctgggcttcagtaacttcatctgttgaataatgatttaatagctttctctgaggatattgtaagttttaaatggaatattatatgtaacatgaggagcacatgataatgcctaataaacgttgcgtagagttcttttgtgcctacaaagtatttctt

SEQ ID NO: 798268 - DNA, 524 bp, Homo sapiens
cctaacttgggtttttaaaattctaaatcctttatgcttcactcctcctcttcttcagtgaagaaaaaaatttctggctgtaaggggaagttttgatctagtttagtttaattcagctaatgctttcagtgtgctaacagtgatccatcttggggttgtggagacctaatgcagaccctgcagctgcagggaacttgcagtgttgaaaagacaaggcatgaggtgccttggtcattatgaatagaatgccatgaaatcagggagcagtaatgaatgatatttggggctatgatattcttatagattcataaagtattctaagctaagaaggccctaaaatccacttccacatattatgtatgctaggtctatgttgggataagagagggtagcattagctatgtgtgrggacgcaaggacatgcaacctgaagaaataagacattaaatgaataaaatgttaataaagatttaaatagctagtcaagatagaagacatcacaagatgatatatatttatatgct

SEQ ID NO: 798269 - DNA, 542 bp, Homo sapiens
ttacttgactaaggcacaaataattgagaattgatattaatcttatattttgctttaaaaatatataggcttataataattcagatgggcccatcacctgtttggtgtgtgcaaattccaaaaaactcggctgagagattactggtttgagaatatttattcatccattcaacattattcgttgtgaagctatgtcatgccacacattgtgctaagtgctggaaataaaatggtgaaaaagagagttgtagtccctactctcttagaaattacatgcttttggtgaagacagggaaaaacaaaaccaaacgtaaagaggcaaataaataaaataattatagattgttataaacatggtaagggcttaaaaaaagactaattgacakgacagggagatgtactttagataggactgagaccatcttgctcattgctgggcagaaaaactgaaaattctgtaatggctatagggagctctattagggagagtttttccagagaaacagtaccaacattgtgtgtgtgtgtgtgtttgtgtgtgt

SEQ ID NO: 798270 - DNA, 620 bp, Homo sapiens
ggtgaaggccttcttgctgcatcctcacatggcagaaggtggaagggcaagagagcaaattcactgagtgagctcactatgtgaagcctcttttgtaagtgtcttagtcctattcaggaaggaggagccctcatggcctaatcacctcttaaagtccccacctcttaatactaccactttggcaacacctggattttgaaggagacacagtcaaaccatagcccccattttcttttctctttcatttgctagtttctaagctttgtagaggcagcagcatgtctgtcttggttactactgtaacatcagagccagtataccgcatagcatgtagaaggtactcagagaatatatgagaataaatgaataacagcttctccttctagtaatgtattggcttttcctttaagaccaagtataggtactttgacactttaaaattargtgtcctttttgcttttaagagatgaagttttatgtacctgaagctattagttatatttttattttcaactacttttttgcctgcttgatctttcagagacttaaaatgtttttttaatgcatgtcttaaatgttttttatacatttcaatgctgtgtgtctccgcaaaattgttt

SEQ ID NO: 798271 - DNA, 624 bp, Homo sapiens
agttgtgattatgccactgcactccagccaaggagaacttgtctcaaaaaaaaaaaatctaaagtctatgttcccacctttatactttattacgttgaaaataatttaatcttttaccccacaagaactcaggaagtgcaacatgtccgaacaaacagtgaacaggcaatcaaatgatgggggtttccaatcccagctcaacaccaactagctatgtgtccttacacaggacacctgacctctctggtctcagctctcttatctgtaaaataagaaacttgaacaaagtgaattttctttcttttttttttaaattttattattattatactttaagttttagggtacatgtgcacaacgtgcakgtttgttacatatgtatacatgtgccatgttggtgtgctgcatccattaactcatcatttaacattaggtatatctcctaatgctatccctccccctccccccatcccacaacagggcctggtgtgtgatgttccccttcctgtgtccatgtgttctcattgttcagttcccacctatgagtgagaacatgcagtgtttggttttttgtccttgtgatagtttgctgagaatgatggtttccagcttcatccatgtccc

SEQ ID NO: 798272 - DNA, 624 bp, Homo sapiens
agttgtgattatgccactgcactccagccaaggagaacttgtctcaaaaaaaaaaaatctaaagtctatgttcccacctttatactttattacgttgaaaataatttaatcttttaccccacaagaactcaggaagtgcaacatgtccgaacaaacagtgaacaggcaatcaaatgatgggggtttccaatcccagctcaacaccaactagctatgtgtccttacacaggacacctgacctctctggtctcagctctcttatctgtaaaataagaaacttgaacaaagtgaattttctttcttttttttttaaattttattattattatactttaagttttagggtacatgtgcacaacgtgcatgtttgttacatatgtatacatgtgccatgttggtgtgctgcatccattaactcrtcatttaacattaggtatatctcctaatgctatccctccccctccccccatcccacaacagggcctggtgtgtgatgttccccttcctgtgtccatgtgttctcattgttcagttcccacctatgagtgagaacatgcagtgtttggttttttgtccttgtgatagtttgctgagaatgatggtttccagcttcatccatgtccc

SEQ ID NO: 798273 - DNA, 555 bp, Homo sapiens
gaatgaaactggatccctatctctcactatatacaaaaatcaactcaggatgaactgaagacttaaatgtaagatctgaaactctaaaaatgctagaaggaaatccatggaaaactattctggacattggtctaaagaattcataaccaagacctcaaaagcacaagcaacaaaaacaaaaatagasaaatgggacttaattaaactcaaaagctcctgcacagcaaaagaaacaatcaacagagtgaacaaacaacctgcagaatgggggaaattatttgtaaactatgatccaacaggggaccaatatccagaatttacaagaaactcaaacaactcaataacaacagaaatcaaaaatacaattaaaaacgggcaaaggaaatgagtggacatttttcagaaaagacatacaaacggccaacaagcatatgaaaaaatggccaacttcacaaattatcagagaaatgcaatttaaaaccataatgggatatcatcttatatcagtcagaatggctattattaaaaaataaataaataacatgttggagaaag

SEQ ID NO: 798274 - DNA, 625 bp, Homo sapiens
atagtactggcaaaattggattgccatatgcagagaatgaaactggatccctatctctcactatatacaaaaatcaactcaggatgaactgaagacttaaatgtaagatctgaaactctaaaaatgctagaaggaaatccatggaaaactattctggacattggtctaaagaattcataaccaagacctcaaaagcacaagcaacaaaaacaaaaatagacaaatgggacttaattaaactcaaaagctcctgcacagcaaaagaaacaatcaacagagtgaacaaacaacctgcagaatgggggaaattatttgtaaactatgatccaacaggggaccaatatccagaatttacaagaaactcaaacaactcaataacaacagaaatcaaaaatacaattaaaaacgggcaaaggaaatgagtggacatttttcagaaaagacatacaaacggcmaacaagcatatgaaaaaatggccaacttcacaaattatcagagaaatgcaatttaaaaccataatgggatatcatcttatatcagtcagaatggctattattaaaaaataaataaataacatgttggagaaagtacggagaaaagacaactcctacatactgttggtgg

SEQ ID NO: 798275 - DNA, 659 bp, Homo sapiens
ccatctcacatcagacaaaactgagctaacacaggggacgaaaatttcccaaagttttcaatcttcagaaggaaaacatggagcatgtaaggtcatgtagtgccactacaagaatgagacagctctttgatccaaaaaaggcaggttcctggcattgcctaacaaaagaatgcaaccaactctcatagaatctgccttttcccacggtgtttcctgataattaactagatacacatagcagccggccagagccagtgggaatcctgagaaaatctcagtccaaatgtttataaggtcctaatttaatccaccaaatacaaattaaagttacttctcttttatatcaagaggaggaaatagaacatgaaacagaatgtagccgttttcctaataacaaaaarggtatcagctcactgtatcagtttaagtgtattttaagttgtaaaacatattaaatagtcttcatccaaaaaatatggcaatgagaggcaggctcttttaagtccaagtaaagtaaatttaaaagttctcataaaccaattttttttaagtcttcacagaaatatcaacaagtgacacaaaaaatggcaatttatacaagaaatataaattaatattcatgctatattttccatgtaaaattagaaaataacttttca

SEQ ID NO: 798276 - DNA, 659 bp, Homo sapiens
ccatctcacatcagacaaaactgagctaacacaggggacgaaaatttcccaaagttttcaatcttcagaaggaaaacatggagcatgtaaggtcatgtagtgccactacaagaatgagacagctctttgatccaaaaaaggcaggttcctggcattgcctaacaaaagaatgcaaccaactctcatagaatctgccttttcccacggtgtttcctgataattaactagatacacatagcagccggccagagccagtgggaatcctgagaaaatctcagtccaaatgtttataaggtcctaatttaatccaccaaatacaaattaaagttacttctcttttatatcaagaggaggaaatagaacatgaaacagaatgtagccgttttcctaataacaaaaaaggtatcagctcactgtatcagtttaagwgtattttaagttgtaaaacatattaaatagtcttcatccaaaaaatatggcaatgagaggcaggctcttttaagtccaagtaaagtaaatttaaaagttctcataaaccaattttttttaagtcttcacagaaatatcaacaagtgacacaaaaaatggcaatttatacaagaaatataaattaatattcatgctatattttccatgtaaaattagaaaataacttttca

SEQ ID NO: 798277 - DNA, 594 bp, Homo sapiens
ctgtttccagggaacccaacctacaacatcgtgtcacttagaaagaaagtttcaaaagaaaaaaaaaagacacttcatggtgtgtctctcttggctggtcaatttccttaaacattcgatctctattttcatcagtcatgaggataaggtagtgcagtgggtggcagatggccaagtgctgaccactgtccatgacagagtgaattgtgatgaagccatgctagcaatatttcaaaatgaagattgttatcaatcacattgtacagtttctcctgccacatattcctgagtagaagtatccctaaaaagttgtcagattgttcctattttgttactatttaaattgattcatttcacaagtgtaaatgaactgctagartaaagtgagtaggctgtaaaatataatacaaataacaattgataatccagtctactaatttaaatatagatagatgattagatagatagttgagatagagatctgatatatacaagcatatatacttgagaaaatacaaaaaatatttctcaagagatgtcacaaactataaatataccactggagaagctctcacattttacttcagtgataga

SEQ ID NO: 798278 - DNA, 495 bp, Homo sapiens
atccaggctttgttgttctatttatagagcacaggcacagtagatttagcataattcttaagggccctaggctatttgggatggtcagtgagcattggcttcaacttccaagttaccagctgcattagctcttcacaagagagtcagcctgtcctttgaagctttgaagccaggaattgacttctcctctctagctgtgaaagtccaaaggcttttttgtctacattgagaatatgttgtttagtgtagcaaccttcatkgattattttggctagatcttcttaacttgatgcagcttctacattagcacttacctcgcacttttatgttaatggagacagcttctttccttaaacctcatgcaccaacctgctagcttcaaacttttcttcggtagcttctttgcccctctcagtcttttagaattgaaaagagttaaggcttgctctggattaggctttggcataaatgaagggaaagttgtagctgttttgg

SEQ ID NO: 798279 - DNA, 632 bp, Homo sapiens
tgtttggctagttgtttgacccagacttgttagtttgtttgttttcctgtcattttttcaaaaatccaaatctaggcataatgtgtacatttgtctcagtggatccatttctcctgggtctgaagctagctcatctcaaccatcccttcactttggaaaagtctcccaagcmagctttgctaaccatcagcaaataatccctttggctactaccgcttaagaagtacctgattctgaagatatgttctgctgatttgtcacgtagaagaacggaagcatagaagattgttatttatttatttatttatttatttaatttattttttgagatggagtcttgctctgtcacccaggctggagtgcagtggcaggatctcggctcattgcaatctccacctcccgggttcaagcgattctcctgcctcagcctcccaagtagctgggactacaggcttccaccaccacgcccagctaatttttgtatttttagtagagacaagatttcaccatgttggccgggctggtctcgaactcctgacctcaggtgatcctcccacctctgcctcccaaagtgctcggattacaggcgtgagccactgtacccagccaccaagtggggaaaattagagcat

SEQ ID NO: 798280 - DNA, 559 bp, Homo sapiens
ctttggagactgtggttaaattggaggagagccctccctgttaatcttaagttagtagtgattaggaggaagtaagagaaatgtatttttgaagattcaaaaaaataaaaaaccgaaaaagtagaaagcaaatgaggaatacagaagggaaggtaagtggctgtataaatggagactgaattgggctgtgtctttctaactgcctggatcatccaacatctttgccagtacctggataattctgctgcctgcttcccatggctattctatctggcaccctcatggcagaggcctggaggaagatggcagaggacaagctgrtggatgttgaattctgaccccgcccttctattttcttatctctgtgactctagtttggttccttgtctaaagaaagctggtcaatggccaggctgttttgctcctgacagaaacaagctcacagaactctctctcattcagggcgttaattggccttttcttttgtgatacgtgtgaagacattcttctgccttctttgtaaatactttcttttctctagagtagagagatggcctcc

SEQ ID NO: 798281 - DNA, 620 bp, Homo sapiens
tctaaactataactaaagagaagttgaaagtggcctcagatgcattctctgtggagatcagaaaagagacatctggaagacctggtgttactaaagaaacaaacttgtcactcttcatcaacaccctcagccacttcttgtcctccctctgtcccctcccacaatctaactctgaagttgggcttcaaatctaacatctactcaagccctcytattcaccaaatacagtgaattagaataattcactatattaattgcttccagacccaccctcatgttccctcttattgtcctgctatgtcctcccttcatttcaaagagagtattttctctaagaaacctccccaaatctaccaagaggtatctgtatccttcttgtccccccatttatatgtgaagagtcctccaggatgtatatatgttgagacattttcacaactaatgacattcatggctgtttcgtgccataaccccccatgtgggacctgctctgtgttctgcagccctgtctccatgtctcacatgtttgccagttttcactaggctacactgtggtaacaaatatccccaacatctcagtggcttataacaaccaatgcttatttttcactcctatacat

SEQ ID NO: 798282 - DNA, 645 bp, Homo sapiens
ttcttgggggcagccattaaagcccccatatgcaagagcaacgttctgtagatctatgttgtccaagtacagtgtttctccctgagggtgctcctggcatttatagcaggataatcttcatttgatggcggggtggggttgcattgtacattgcaggacatttacatcccgggaatagacccctccttattcccaagaatacttcagagcatttcccaaagaacctatgaggctgtgcttttctcccacttaccatggagccccagaacaggagtcagcaaaccaaaggcgtcttcactcccccaagctccagttgtttcctctgtatacraacaagaatgccatctacctttcacttacctttgggtcttgtgattgttcagaacaaaagaataagaaaaaagaaggcaggggagaaagaatagagaggaggttaaggttcccaaatagtacttttttataaaaggcaaaatcttgactcacaaatacaaaataaacatgtcattattaatgaggaaactggtaagatgttataactagttcaaaggagaatttttaaaacatcacatagaacatcagaaatgctgaaataaatacagatagatataaaattgatcagtttctacagagaaataatcaaattcc

SEQ ID NO: 798283 - DNA, 627 bp, Homo sapiens
ggccacaggagtgcttgtgtcactccacccctagctttacgtggctcagaacagagtgagaaactgtctctttgggaaaaaagtaaaggaagagaaccagagtctctgcctggtaattcagagaattcttctagattttgtccaagaccgtgaaggcaatacttccatgagtctgcaagaaccatggtgttactgaacttggggtgyccccctaaagcagatacagcttagatcacaacaccaaagtcctttcaaatatctggaaagcctttgcaagaaggacagctataaataagcccagagagttaaggctacagtaatactcctcaaggagagcaagcccaagatacataatcttcagattcgccaagattgaaatgaagacaaaaatgttaaaggcagccagagagaaagatcaggtttcccacaaagggaagcccatcagactaacagcagatctctcggcagaaaccctagagagagaagccagaagagagtgggggtcaatattcaacattcttaaagaaaagaattttcaacccagaattttatatccagcaaactataagggaaggagaaataaaatactttacagacaagcaaatgttgagggattttgtcaccatc

SEQ ID NO: 798284 - DNA, 627 bp, Homo sapiens
ggccacaggagtgcttgtgtcactccacccctagctttacgtggctcagaacagagtgagaaactgtctctttgggaaaaaagtaaaggaagagaaccagagtctctgcctggtaattcagagaattcttctagattttgtccaagaccgtgaaggcaatacttccatgagtctgcaagaaccatggtgttactgaacttggggtgcccccctaaagcagatacagcttagatcacaacaccaaagtcctttcaaatatctggaaagcctttgcaagaaggacagctataaataagcccagagagttaaggctacagtaatactcctcaaggagagcaagcccaagatacataatcttcagattcgccaagattgaaatgaagacaaaaatgttaaasgcagccagagagaaagatcaggtttcccacaaagggaagcccatcagactaacagcagatctctcggcagaaaccctagagagagaagccagaagagagtgggggtcaatattcaacattcttaaagaaaagaattttcaacccagaattttatatccagcaaactataagggaaggagaaataaaatactttacagacaagcaaatgttgagggattttgtcaccatc

SEQ ID NO: 798285 - DNA, 668 bp, Homo sapiens
actttcaagaaacttgaatttttgaaataattatttcctgaagaaatatttttgagcacctatatattccaatgactgctgctaggtattagggaaacaaaaaaactagacattgcttcttgccttcatgtaccttacagtttagtgggagaaactgaatatataaacaagtttaaaatcaagtttaaaaagtatattaagtagtgaagagagcatatactttacctaggttaataggagctgaaggggtttgtaagagagagcttctattagagaaagcaaaaaagagtcacattaggaggcaaatgccatgttctagaaactgtaagaaaactgctgtggctggagggaaggccaagtaaggaaagcatgcatgagakatgcttgaacaagtagacaggagcctgatgatgcagcgacttacagattctaccaagaattgttattttgttttaaatgccacataaaaacattgaagagttttaagtttcctctgtcctctgtgtttataatgattgtaggaacaaggaggaagtgtattaatgcctatgctgcaaaacaaatgaccacaaatagcccatcttaaaacaatccaattttattctgtttctgtgggtcaaggatcatggtactggtgaaatgagtcctctgatctggatctcgccagg

SEQ ID NO: 798286 - DNA, 616 bp, Homo sapiens
taatgtatattgcagttttactattaatcatttaaagcactattgttttgccttctgatttatattagttttcatggaaatagccattgactaaacctcatgctaagtatgaatccactcagatgtctctactccaagtctcaaggtttcactcttttccaatcaattctctatcacataagagatctggcaagattgcaacttatgttgtaattctgcaacctgcacaattaaattttgtgcctgattttcagtaagctataagaaacaaggaattttttaagcagctctctggttctctgataatgactttggctgggagcttaaagacctgggtttgaatttcttctctgagtgctccagtgcattcaaagaaaagcattccataccacagtgcttgtagtcgtcatcacttccataatggtcagcactaccaatgcacttgattaytaggcacttccacacagttaacagcagatgaaaattttattaatcctgatgacactatataccatatattactaatatctcattacacatttgcacagaactcagtactgtattcaagctcaagcatacaaccaatgcaatccccaaatctcatctttgaaggtct

SEQ ID NO: 798287 - DNA, 616 bp, Homo sapiens
atgattatctcaatagatacagaaaaccctttcaaaaagatccaacatccttaatgataaaaacccctaaggaaataggcatcaaagaaacgtacctcaaaatatccttaatgataaaaacccttaaggaactaggcatcaaagaaacatacctcaaaataacaagagccayctatgacaaacccacaggcaacatcatactgactgaaccaaaagtagaagcattctcccagagaactagaaataagacaagggtgtccactctcaccactcctaatcaacatagtactggaagtgctagcaagacaatcaggcaagaggaagaaataaaaggcatccaaatagaaaaagaagtcaaattatctctcttcactgatgatataattctatacagagaaaacccaaaggactctgacaaaaggctattataactgataaatgactttatgaagatttcagatgcaaaatcaatgtacaaaaagctgtagcatttctatacactaatatagttcaagctgagagccaaatcaagaatgcaatttcatttaaaatagacagaaaaaataaaataaaatacctaggaatacatctaacctaggaggtgaaagatctttat

SEQ ID NO: 798288 - DNA, 686 bp, Homo sapiens
gaccagttttcgatttattgtctcttgactctaaaaccattatactttttctctaatcactaaaaaaaaaataatctgataaacttaggcttgtagctggtacacattgtacactttgtcagatgacaaccttcctaagttcaggtttgatcatctgtacaattttctgccacatggtcattttgtgacataaatgagtttctctctctccaagtatacacacacatacttacatatgcatacacacacacatatatatatacacacacacatatacatatatataaactaccaaaggccatgacttaatgtacacattcaataaaggtacatccaaatcatccaatcctattccccattttgtttgtctacttagaccagataatgctggctgcttatctttttatattttgctcaaatgtctatgtagaataacctgtctagatagcaggtatgacactaggaaacggcagatattcattgcagcaaacacacaggaatccctctctgaagcactgttctaagttccatgaaaagcacaamgataacacaaactgtagactgtgtccttcaggagtttggtctctgatggtagaaaagcaattagaaatgtcacgaaatagaattgacatctctgctataaacagaactcaggtcgagtttcagggattgggtatgtctgtctc

SEQ ID NO: 798289 - DNA, 539 bp, Homo sapiens
gagcactatattttttgtttaatcaagccccaggtattaagtgtttagtaaaagtttgttaaattgaagtttatcaaattgattggatttaagattattggactgattgaggttgcagggactgaggaaaaagaagaccccacagttttctttgattcattaatttcttttatttccaaaataaccttaacagaaaaggaaattacaagcctgtacagaaagatacttggctatttttactggattgtatagctatagctcagcagtaaaaagcagtctttcaatctattaaggaaaawaatatatatataaaagacctgttggaacccaagcagttatacaaaacagaaattgacttggcccagtccacagaaatcctgttgcttttattggaaatggtttcccttttagtaagtgttttttttttcagttgcccagcctggaactgtagctacagacccttggttgagaaaatggtcacacagagacactgccagggaatcttgcctaaaagggaattctggggaggaaagcatggg

SEQ ID NO: 798290 - DNA, 539 bp, Homo sapiens
gagcactatattttttgtttaatcaagccccaggtattaagtgtttagtaaaagtttgttaaattgaagtttatcaaattgattggatttaagattattggactgattgaggttgcagggactgaggaaaaagaagaccccacagttttctttgattcattaatttcttttatttccaaaataaccttaacagaaaaggaaattacaagcctgtacagaaagatacttggctatttttactggattgtatagctatagctcagcagtaaaaagcagtctttcaatctattaaggaaaataawatatatataaaagacctgttggaacccaagcagttatacaaaacagaaattgacttggcccagtccacagaaatcctgttgcttttattggaaatggtttcccttttagtaagtgttttttttttcagttgcccagcctggaactgtagctacagacccttggttgagaaaatggtcacacagagacactgccagggaatcttgcctaaaagggaattctggggaggaaagcatggg

SEQ ID NO: 798291 - DNA, 531 bp, Homo sapiens
gtctgtgtgatacatactgtatccattcatttaatagctctcatgcatagagtttagtgttgattttttaaatcagttctgacattcttaatttttttattgaaatgaatttattaacatttaacttaattatcaatataattggatttagctctaacttactacatttgttttctgtttgtccctcttccattttttttgtccttttccttcaaaacaagcaatattctcctataaaactcatccaacattgaaaagttgagtaggaattgctttgaaaaatgactaaatctaggccaaacaagaaggaaacaaataataaagagcagaaatcaacagaatagaaaataaaaataaagaaaatccacaaactagttatcygtaactgtttataaacatgcccctcaaagttgtcttttccttgagtctcttatttcacctgtgttttctatatcagtttttgtccttctatctctcatttcctggcttcttttctgttatttggattttattcatatttcattttagttt

SEQ ID NO: 798292 - DNA, 634 bp, Homo sapiens
tttcgcctttctctcattcactgcatgatatgattgacttaaatagaaacaacaaacagtcatagaattttgctgtaaattctttattctgacaataattatgtgtgttttgagtctactgatttttctcttcctttcctaatatggtaacttatttaaatasaaaatatggattacagaccatagactatttattttgaatttttcagggcataatatagtttttggcaaacagagaattcactggatgaaaaaaatagtttgttagggtttataacattgtcccctctgtcatgtgttaaaaaagaaagaaaatgctactaaacagggaaaaatagtccagtatcactcactgtatgtaacatttccgtattcaatattttaccccccaaattatgaactttagcagtgaatggaaggagaatgtttaaattgttcaagagatagtatattattaaaaaggatggcatctgtcactaaaactgattacttaataaaaatatcaatggtaatgaataaaaagactctccaaaactaaactactgagttgcaaatccttatttgaatatttggagctcgagtcaatgatgagaggaatcatgatattggcatgttatatgctgagagattttaa

SEQ ID NO: 798293 - DNA, 583 bp, Homo sapiens
ttattcctgcggttttggaggtcatggctagagttacatataaataatgcaaaaaaacagcagataaaactcatttagagagaaatattaaagatcaataatacatttgcaggaaaaatattggttaaatgaatgagtgaatacattagtcaataggaaagatcaaaaagcagaaaaataaaaaattccttatagaaaaaggaacgcatgmccagtattaaaagattctcggccgggcgcggtggctcacgcctgtaatcccagcactttgggaggccgaggcgggcggatcacgaggtcaggagatcgagaccatcctggctaacacggtgaaaccccgtctctactaaaaatacaaaaaaaaaattagccgggcgcggtggcgggcgcctgtagtcccagctactcgggaggctgaggcaggagaatggcgtgaacccgggaggcggagcttgcagtgagccgagatcgcgccactgcactccagcctgggcgacagagcgagactccgtctcaaaaaaaaaaaaaaaaaaaaaaaagattctcaacctcagtcataattaaagaaatcaaaatattacaa

SEQ ID NO: 798294 - DNA, 357 bp, Homo sapiens
ttttcagcctgcatagaactatatagatagagactgacttctaactcctcctgagagtgaccttaatggtcaaatcatcaatgattatgttcatgaaaagttagatacctctttctagaaataaatgaccaaataaataagctgaattaattcaatcacattcaattataggtggcagagtgtagaaccagaacaattagaccagcaagctgacraccttcttacatatcaagcccttaagtttatctgcctcatgctcttcaactatttttctacttataggctgtggaaagatgaaggatgaaatataagagtagcaatgtgagattgctgaattattaaattttggtgcttggt

SEQ ID NO: 798295 - DNA, 603 bp, Homo sapiens
taatgtttcaacatgaatacaaaacttgatgggaattcacttgaaaacaacaaggattcttcctacctgctgtttcttagttaagaaaagattcaaattccagaagattttttttaaataagtgatttattatttcactgkttctaaattactgtaagcaaagcatcagattagtaatgtgtttaatatgagctattaaattcccattagattaaattgccacccctagagatctgcaaagctactatgaattaatttgcattcttcaatagtcacacacttcaccttttctttaatgccgcagatacttgaggaagtgtatcctaactccaggaacaataagttgtcttatgaactctgaaattcttagttctgcatattgttttgtgataataatgataataatttgagacatttataaatggttctgataggtttcttttggtcatttttaatatacaatataatattagcacaatttcaagtaaatctgtgtcaaaagctatttttacaaggctgtacagagcaaaatctattcactatttatgttcttttcagttgcatttaacaggaccatcaatttaaaaccatcattgaattgac

SEQ ID NO: 798296 - DNA, 474 bp, Homo sapiens
gacaagtatgtcccctgaacaaagcaaatgtatgtgcagataacgtggtatttcaatttctgtgcactaagatgatttggcaagagtgatggtgactgcacctgtttagcagaagaaaaatgtctcatcacaaccccaaataacattatgttatgctattatgacatcaaggatctaaaaatgaagctaaaggaacatcgaggatgttataatagcatattggtatagaatattggtacctactttctccatatcaaccaaacatctattttctaatccctctttttaacaaccaagatatgtgcattttagtwtgacaatgcctttattttatttaataatttcaactcaccagcaaaattagaaaaaaaactctgaagaatatgaaattaaacagaaatatatgtggaattcatgtcttatttttcaaacaaatgaaaatgagtatcaaaaaagcagaaaaaagaagctttg

SEQ ID NO: 798297 - DNA, 626 bp, Homo sapiens
attagctagctgtctgacaaaagacaagtttattaactgccccaaatctgttttctcagttgtcaaatggaacattagtagttcttccccacctagggaagttaaatgacatgatgaaagtaaataacttgaaacaaggcttaggtcaaaatatacatatatatgttcaatatacatatatatgttttatatatatatataaacatatatatgttttatatatatgtatatagaaatacatacatatattatacacatatgtgtttctttcatccatatgaaactacaamtatatgttaagcagttattaatgtatatttttttcaaatgtatatgtcatctataaattaatcttagtatttctaatatatgtgttgaatattctggtcagtaacccacccaagaaatggtatgaaaaatattattattgataaggaaccataaactataagaataacaaaatatgaaaaagatatgcaattattttgttgagccattaactattttgatagaatagttctatcttaaggagccagttgactacatatacattagttttaagtcaatccatgcttattgagttcctgaaaggtgcagaacacttttctagatggaatgagagataa

SEQ ID NO: 798298 - DNA, 639 bp, Homo sapiens
atatttggtgtttataaaaatactaatgtctactaaattagaaataaattgctaattgaattattacacagatttaaagtgtattctttgttattacatgtgttaacacaaattgctttgcagtgtatcatatgtaaatctgatgcaaattgacatgagcaaatattcagtggattgtctggaccagttattcagttattgtgaagaatttttaaaatgccaatagagaaaatgtttctcagttagtaaatattaaaattagaaaaacatttttaaaaaggtcatccttccatccacccattttaactgccttaccttaaaaacattagcaattccttcttcatagttcagtgcaaagacatttgaaaatacaattcagtatctcaaaagtactgtgaaggtaaactgcctcttggggattcratcaccatttgatttaatgttgactgtttaatcatattataaacttgtccaacaggactgcataattgccttcttagcagaagaaaaaaaaaaagtaaacagcttaccttgcaactccagtttcttaagaagcccattacattcctgaaaacatcaaaagatttgtcagcacttccattatcaatctccattttctagagttgcaagttggctatg

SEQ ID NO: 798299 - DNA, 617 bp, Homo sapiens
taatcatgtaatctccccatcccctcacacacacacactactttttgggtcaaaggaatcatttcctgtattttcatggatttttgcataagtaaacaggcatagaaccaactcttatgagccgtagattaatgagaagcttcttttgattctgacttatgttaaacacagagaagatgtgtgaattctctgcgctcacacaagatttgctacaaattaatgtgaattgtagactgatgagaggcacagaatgggacccgcacatcacacatattcaaagacaggagaagaaaatcttgatgagtaccaggtcagagatttccctaagttattcctagttatcactttctctgatgccctgaaaagtggagagtgaaaattaccctaaaacctactctcagtgatggytatcaattttttgtaattgatgtacataattatacttaaattaatatttgaaatagtgaaagttttgacacgcttcggtttgtgcacatgagggaggtagtaagcaggcagggtaaagctgaggtgtcctgggatctctgccaatctcctttaagactcaggccatgatcagtgtcttccaacacttacctgtctgtctagatatacta

SEQ ID NO: 798300 - DNA, 611 bp, Homo sapiens
aggaaacacctgaggcatagaaggaaagggaaaggaggcagctgacctaagtaggatcgataaagtccagagaggctccccagtgtgggaaaagggtgagaggtccctagaagtcaacattcccaccatagattcctccaatcctagccatgggagagccacccttacaggccctgaccagtggcattgctctagagagggagctcatgtgagtcacacacacacaccgtgagaaccaagcagatgcagcatagtgccttttttcctctgcctcctgggttcaagtgattcttctgtcttagcctcccaagtagctgggactacaggcatgcaccaccaygcccagctaatttttgtattttcagtagtgatggggtttttccatgttggccaggctggtgtggcccaacatccctacatcgtagagccccactgacatccccctgcatctatgcagtgggctgcagacactgccactgagagcaactcaatcctacccagcggcaggaccaccacacagttggatgcaccctgagaacaggctctccctgacaactgccattgctgttaatgccacccaggcacaccacttggggtcctggggatttccc

SEQ ID NO: 798301 - DNA, 565 bp, Homo sapiens
accatattgtaccccatgaatgtgtaccattatgtcaattataaattaaaatcttaaataaaaaggaagagaggcttagactacaataaagagtgacaccatttaattgtgaagcctctgaattgttaaaaatatgccagaaatcaaagtttccattcatttttataaaaatttaagtaaaagaccacaattcaattaaatgaattgaaaagaccaattaattttcaaaataattttgaaaattaattttcaaaatwattttgaaaattaattttcaaaaaaagaccaaattaattttcaaaataaactatgaagttacatgtaaaaatcatgaaagtgtttctactgcaaggatatggaaacactctattacttcatatactatatgcacttaaaaagttgaaagtcaattttatttttccaagagtattaatcttttttaaaaagtttaaacattttaaaacagaaataattgatttaaaaatcagaatgaataaaaaaagattccaacataaagaaataaattaaagagaagtaaacatggattgggtagaagaaacaaaaa

SEQ ID NO: 798302 - DNA, 650 bp, Homo sapiens
gatggcagaggccaagcggtggcactcaaccatcaaaggcaaggtgggcatagttactgcaatggacagcagaggcaaagtagcaatcagaatagtctgactcatgtagagctctggcattggctaattaatcacggtgtttctagaagtgaaattgctaggaagcccactgcatttttacttaatttatataagcagaaaattccatgtcaagtggacaaaagactgatttgaattataaagacagaatcatggaccctcacccaatttccagacttgaaccagtttacagtttgtaaacttgacccactttacttgaaggaaaggctggatccccttgaggaaggatcccactacactaccaacagtttatgctgttaatctttcttccatctttccccaaagagacctccagccttttactagggtaactgtgcataggggaaagggaaataatcagamctttcagggactactggtcactggctctgagctgacattgattccgggggactcaaaaatgttattgtgatcctccagttaaggtaggggcttatggaggtcaggtaattaatggagttttagctcagatccaacatagagtggctccagtgggtccttggactcaccctgtggtcatttccccagtg

SEQ ID NO: 798303 - DNA, 500 bp, Homo sapiens
cagtttgatctcagactgctgtgctagcaatgagcgaggctccatgggcgcaggaccctccgagccatgcgcaggatataatctcctggtgtgccatttgctaagaccattggaaaagtgcagtattagggtgggagtgacccggttttccaggtgccatgtgtcacccctttcttttactaggaaagggaattccctgatcccttgcacttcccgggtgaggtgatgcctcaccctgcttcagctcacacttggtgcactgcacccactgtcctgccaacactcccaagtgagatgaacccggtacctcagttggaaatgcagaaatcacccatcttctgcgttgctcacactgggagctgtrgactggagctgttcctatttggccatcttggctccaccgctctttcagcacttttaatatacaacaccacagccttctggacttcaaaagtttctaatgctgagtcagatgttaatctcactggggttctcttcta

SEQ ID NO: 798304 - DNA, 661 bp, Homo sapiens
tctttctttttcaacatttttacagtgattagtctggtcatggattgatttgtatttattctacttagatttaatagaactcagatgtatagattaatattacctagtaaatatttttcaaagtattcagccaattttcttcaaatattttttcttattctctctctacttggaagactctccttctggtattcccattatattaagtttgcttactccttctgacatttcaaatctttycttgaccctgtaatgaattttcccttgtagttattttacctttcaattccaaatattaatttggttctttaaaaatttaatttacatcacaatgttgacatctatttgataaaagattgttattgtaccttctttttcttctttgagaaatgttttaattatttgatgatattattattattattagactactttgtaatcattgtctgctaaatctaacgtgtaggactctcacaagcagttttccttgcctttttccttgtgtttgggttacagagtactgtttctgtgcatgtcctaaatttttttgctaaaatatggacaatttagataatgtattatagcaaatctgtatgttgattgactcttcctttttgtggggcttgttgtttttgtttgtttgctgcttgttgttgttgtt

SEQ ID NO: 798305 - DNA, 557 bp, Homo sapiens
atgagaactcatgaacacaaagggaacaaaaaacactggggtctacttgagggtggagggtgagagaagggagaggagcagaaaaggtaactattgggtattgggcttaatacctgggtgatgaaaaatctgtacaacaaacctccatgacatgagtttacctatgtaacaaacattcacagatacccccgaacctaaaatgaaagttaaaaataaataaataggctgggcgcagtggctcatgcctgtaatcctagcactttgggaggctgaggcgggcagattgcctgagctcaggagttcgagaccagcstgggcaatatggtaaaaccccgtctccattaaaatagacaaaaaattagccaggtgtggtggcatgcacctgtaatcccagctacttgggagggtgaggcaggagaattgcttgaaccagggaggtgggaagttgcagtgagctgagattgtgccactgcgctccagcctgggtgacagagtgaggcttcatctccaaaaaacaaataaaattaaataaaataagttaaaataaaataaaataa

SEQ ID NO: 798306 - DNA, 649 bp, Homo sapiens
tcattataaaaagtaatcaaatcacaaagtaaagcagaaagagaggaagatagggcacagctataaaacagagagaaaacaatataattgcaatagtaagtcttcacctagcaataataattttaaatataaataggttaaagttaacattcaaaagatacagagaagctgaaaggatgagaaaagcaagatccactatatgctatttgcaagagacttgctttagagttaaggacaaactgaactaaaagtgacgggcttaaacactaaaagagaaggagaggaaaagatatcccatgcaaacggtatcaaaaagagagcagaagtggctgtacttagataactaagatgtcaagagacaaaaaaaaggtcaccacacaaaaataaaagggtcaattcaccattaaaatgggcgacagagcragactccatctcaaaaatatatatatgtatataacaatgataaatatacctgtgtccaacgtcagagcacataaatacataagaaaagtaataataggtatgaagagagagacttcaatactccactttcaaaaatggatagatcatccaaacagaaaatcaataaacaacagatctgaacaacactgtagaccaaatggacctaacagccatttaaagaacattc

SEQ ID NO: 798307 - DNA, 555 bp, Homo sapiens
aaaataaataaaataaaattataaaatgtcaatctctactgaattgggggtttgggggtcatgggtgtcagctaaattatttctttgtactttttaaattgtttgaaaggtttcatattttaaaagtttcatcaggtagtatgactctgtagtttaattgtttagagtactagttgtagtttaagactgycctggcttgtcatctgagtttttagtgtttgtatgattttgtacctgtttcttattttcttcaaatctcagtttccaaatctggtatctgtgaaaattaaatgaaataacccacatgaacatcttagcacagtgtctcatacacagtatgtgctaaaacataattttattatcaactgaaattaatatttctttgctcataaagacttcatggaaatatttatgatatatagataaagaagtcatcgttatagtaataagtataaccataacatattttatattttaagttgaagagatgtcagaaaatatttataaaatcaattttagctttaaaatgaaaacacacaagtaaattatacctag

SEQ ID NO: 798308 - DNA, 708 bp, Homo sapiens
ccttatttctcaccatgtacaaaaatgaactcaagatggattaaagacttaaatctaacccctaacaccataaattctaaataaaaacctaggaaacactattctggatactggcctaggcaaataatttatgatgaagaccccaaaagcaaatgcaagaaaaataaataaatgagacctacttaaactaaaaaagtttctgtacagcaaaagaaataatcrtcagggtaaagagagaatctacagaatgaaaaaaaaaattgtcaactctgcacctgacaaaagactaataaccagcatccacaaggaaacaaattagcaagcaaaaatcaaataaccccatgaaaaagtgggcaaagaacatgaatagacatttcttaatagaagatatataaatggccaacaaacttatgaaaaaaaagcactcaatgtcactaatcatcagggaattacaaattaaaactgcaatgagatatcaccttactgtagccagcatggccattattaaaaagtcaaaaaacaatagatgttggcacggatgtggtgcaaagggaacacaaacacactgccggtgagaatgtaaattaaaacaacctctctggaaaacaatatggagatttctcaaggaactaaaagtagatccaccattcaactgagcaaacccactactgctcatctatccaaagggaattaaatcatcatatcaaa

SEQ ID NO: 798309 - DNA, 655 bp, Homo sapiens
  misc_feature 1, 2, 3, 4, 5, 6, 7, 8, 9, 10, 11, 12, 13, 14, 15, 16, 17,18, 19, 20, 21, 22, 23, 24, 25, 26, 27, 28, 29, 30: n = A,T,C or G
nnnnnnnnnnnnnnnnnnnnnnnnnnnnnnttccattcaggatggcaagttcccctaggcctcaagagtttttggaggtgctgtctgggagccagggattaggataaaatacattagaagtctacttggtgatctattttactgcagatgatctggcactcaaaccatgagactcagtccttcccactcttcccttccctttccaaaggcagagaactctcatcaacggccaccgccaccacaggcccatggggastactgccagaccatcatcaatgttcccttagggcccaaagtctcttcagccagatgtggtgaatattacccgacttgggactcatctttcagggcagtgggctcccctctggcacaggagaggtccagaaatgcagtccaatagccaagtcctagaatcaaggaccccaagtgtccgcttggtgctctaccccactgtatcttagctggtacctaatgtgcaagacaaagttccctttgtttttccttccacttttcttaggtggaaggagtcttgccccatagacaccacagctgggaacgtgctgagcctcacctgaagccagcaagtctaagagtctcacccaaagcccttaacatagtactaagtatcactgctgatcactcggggcccaggaac

SEQ ID NO: 798310 - DNA, 503 bp, Homo sapiens
ggttctcaactctgtacactagaatctcctgaggagctttaaaaacataatgatgtcaaaactctataatggaccaggtaaatcggtatctctcaggggataggatcgtagacaagggtaatttttttaatactccttgtgtgattctaatgtgcttccagaattgagaagcattcgtctataccttctgtgwtgaatttgtcaacaaagcaattagagtgtatttattttgtaacttgaatctgagagacgattaatacttaaagtcccactctattaatatatcctaccctttattttgttccctatcagtactaggaaaacatcagtgaagaacaaataatatattcttaagaatactgtccctttgtctaattcccccaagttgttttctctcatggttttatgtaacttttagtactgttaattaatgatatgaactttaaggtcagttaaatctgctgggtgtgagtgattaggtagatctcagcttcttaatttaa

SEQ ID NO: 798311 - DNA, 601 bp, Homo sapiens
ccccatttataaacatagtaattaataaattaatgcacgtggccaattatttctcaaggtgagaaataaagtcttaaaatatagacttttgtaattccttcttatcttgaaagactaataaaagacttcagatataataaayttaatcaaaatctacttgcagttataatgacaaattttacttaataaacacagctgctttgatacaaaaatagcctcctcctgtcaatctctggtaattctgcatcagctcatactgtattacaaaacagcatgaattttttataagttcactgaaagggtttgaaagatggtattctacttactatccacttgttgcttggctttaaattgctatgtaaggatttaaagaaaagtacaaaacataaatcttaaatattttatttaaatcaggtactctatattagaacttggtcattctcaaccatgacctctaataccttacatagttataaatacattttgttgaattttaaaaacatgctcatatctgataaaattacttaaatacctagtgatgttgtcttattagaattaattaattattatttcaccttataaacatttcttatttattttt

SEQ ID NO: 798312 - DNA, 590 bp, Homo sapiens
ttatatgcctttctaggagaggatccatttttattgaatgttgcatccttatcaatgaagcataatagatagtcaattagtaatattaatgtgagccctatagaaagggttctagcaacatataaaagtatagtttgcaagaggtacatakgaataacaatgtttgcattgtacaaaaacttcaacggccagatagatggatacatagcaaaatagggaaaaatagaaaattccccattacaaccctaactagtatattaaggatattagccatagttcttgaagcaaaatttgaccaagtttgaccagcactgtacaggtaagagttttttaatcgtgtgagggaccactaaagctgttaatggaggcaggtcatctgctgtagggttcattaagcctcaccaagactccaatataatagtcctacaggtcatatgacgctttttctctaagtgtaggctaacaaataaactttcttatttcaagtcaacctataacatacctcaatatcaacagaagaattggggcagggtggggatgacagagagcaacacatttctgctagtagaaaaagtttctcatttacaatt

SEQ ID NO: 798313 - DNA, 575 bp, Homo sapiens
cactgcactcagtctcactcagggaatttaaatctgataaaggaagaggttactagatatgagtcaggaaatgttcattcctttttttctctcttccctatttcttatgcattccttttcccagtacgaggcaaattctaggaggacccttcatctccaaggctaaaaagagtcttataagagggacaaactgagtacagttgtcacaggttatcagggtgactgagagcttagtctaggcgggataaagtcagctgtgagaacctttattagtaagcagtaacaggattattagcagtttgtaggtgggagggatacccacttgggagtgaagttgtcaagcaactgaggcaggtcatagggcttgtttaaactgaatggtctgctaggraagcttgcatttactttttttcatttgtagtcgtttgggctaatctctggaaacttgctttcctaggtgctgcccctcctccctccctgccttcaggaacaggattgaaagcagcattagcctgaagaagtcgttctatttagggagctagagcagagggccagtgattaggcccttatctgca

SEQ ID NO: 798314 - DNA, 552 bp, Homo sapiens
agtccaaagaattatcattataatattaggttttcctaagaaataaggtaaatttttgttttgttttgttttttgagacagagtcctgctttgctctgttgtccaggctggagtgcaatggggcgatctcggctcactgcaacctctgcttcccaggtycaagtgattctcctgcctcagcctcccaagtagctgggattacaggcgtgtgccaccacacctggctgatttttgtacttttagtggagacggggtttcaccatgttggccaggttggtctcgagctcctgacctcaagtgatccacccatctcagcctcccaaagtgctgggattacaggcatgagccatcacacccggcagaaataaggtagaattttaattttgcattgaagcttctacagttgtcacttccttaaaaccccaaatctcaatcctcattggtactttctcagcctacaccagtcattggtgataaatgcctttcatgaatccctattatagttagtacttttcctttaacttgattatataggactgcattgtattgtct

SEQ ID NO: 798315 - DNA, 622 bp, Homo sapiens
tccaatgttaaatttcccttcccatttttacaaacgaagagattgaaacaaaaaagttaataaatgaattaaggagaattcagaaatttgtggaaagtccagagtatatcccagttgaacaatactagactaaatgctttgtctagattagcttattaaatcttaatcttttatgcaaccgttggggaatacgtgctattaggggagggggtagctttgaagtggtgctattatctcattttatggaggtccagagagattaaatgacttcccaaggttatagagctagttagtagaagaataagaatttgaacttaggcactccaaagcctataatcttaaccacaatgytgtattgcttctgaaatgactcaatttacaggttgctgctctattcacccaagacactgcctttctaaatgcattctagataaattaactctagggttctactgtccctctctccatttacacttctcacatgcatggatgcattgagtagggcccctatttctatctagcagagtgcaactccagctttcagcagactaggccctgtctccttctgctgctgttaaataagtatgacaggcctgctactgtgctagactcacagagaagt

SEQ ID NO: 798316 - DNA, 553 bp, Homo sapiens
gttaactgaaggtccagagttactgaggggcggctgtgtttgtttttcagtaggctggctttactgagtgggatacaagagcccaaagcacaggccattcccagaagcctaacattttcatatttctttctctgccaaagaatctttggttagggttaagaataactagtctgtctgtggaaataccaaggccttttgtttgccagaagaaaagcgcttttgattaaggctgccttttctctctctcttttttttttcttaagctgttgtgggaagacttcagagcctctgaaggtgccgtatttaaggggtgtaggggaaggaatgatagctaaatagaactaagggagacttaatcgtgctttaccgcacatttgtgcagagattaamaacagcaacaaaatctacccagtttttggtcattgcttctactagcctttctttcttcctgtcttttatgaaatctacccaaaacagtagttcccaaaggacctgctgtactgatctgaccttgaatcatactctatcacttagtgtgatttggggcatgtta

SEQ ID NO: 798317 - DNA, 591 bp, Homo sapiens
caaaaattagccaggcatggtggcgcgtgcctgtaatcccagctattcgggagactgaggcaggagaatcgcttgaccttggggaggcggaggttgcagtgagctgagatcgcgcgccaccgtactccagcctgggtgacaaagaaaaactccgtctcaaaaaataataataaaaaaaaagtatagtgtgcctggatgcagttttgtttttatttatcctgcttggggatcataaagctttatcagttttggaaagttctcagcctatatttatttaactgttccttctgccccatcttcctcccttcttcaagactccagttacatatgtattaggcctgttcaccacttcccacaagtatcttatgttctttgctgtattttccatactctttgtctctgttyttcagcttagagtttttattctgtcctgtattacagttcaaagaatgttccttctgctaaatctaattgtagttaacccatatgctaagtacttaatttcagttattgtatttttaagttttaaatttccatttcattctttcttatagattccagttctttgatgaaagtctctattccacccat

SEQ ID NO: 798318 - DNA, 591 bp, Homo sapiens
caaaaattagccaggcatggtggcgcgtgcctgtaatcccagctattcgggagactgaggcaggagaatcgcttgaccttggggaggcggaggttgcagtgagctgagatcgcgcgccaccgtactccagcctgggtgacaaagaaaaactccgtctcaaaaaataataataaaaaaaaagtatagtgtgcctggatgcagttttgtttttatttatcctgcttggggatcataaagctttatcagttttggaaagttctcagcctatatttatttaactgttccttctgccccatcttcctcccttcttcaagactccagttacatatgtattaggcctgttcaccacttcccacaagtatcttatgttctttgctgtattttccatactctttgtctctgtttttcagcttagagtttttattctgtcctrtattacagttcaaagaatgttccttctgctaaatctaattgtagttaacccatatgctaagtacttaatttcagttattgtatttttaagttttaaatttccatttcattctttcttatagattccagttctttgatgaaagtctctattccacccat

SEQ ID NO: 798319 - DNA, 629 bp, Homo sapiens
atacttatccaataaactgacaatctcagtccgagctatttaaatccctgccccaacaaaaacttatgtccacaacaagacttgttttaaaaatgtttttagcagctttattcataatagttcgaaactggaaagaactcaaatgaccttcaacaggcgaatggataatatattcacacattgatatattactgaacaataaaaaagaataaactgctgattcacataaaaatatggataagcctgaaaaacattcttaggttaaaaaaagccagttacaaaggaatatatactgtatgatttcatttacatgaagtccaaacaaagatcaaactagtgtatagtgatagaaatcagaatggtggttggccatcatggataggagactgactggaagtggrgatgaatgaaaattctagggtgatggaaatgctccatatcttgtttggggttcagttacatgaatgtatatatttgtcaaaactctaaattgtacacttaagacctgtgcatttaactatacgttttcatgcaatttttttttaaattccaagaaaaaggatctgattgacccaatttgagtcaggcatcctactgtctttgcatagtcagtttttgccaaggaatcc

SEQ ID NO: 798320 - DNA, 629 bp, Homo sapiens
atacttatccaataaactgacaatctcagtccgagctatttaaatccctgccccaacaaaaacttatgtccacaacaagacttgttttaaaaatgtttttagcagctttattcataatagttcgaaactggaaagaactcaaatgaccttcaacaggcgaatggataatatattcacacattgatatattactgaacaataaaaaagaataaactgctgattcacataaaaatatggataagcctgaaaaacattcttaggttaaaaaaagccagttacaaaggaatatatactgtatgatttcatttacatgaagtccaaacaaagatcaaactagtgtatagtgatagaaatcagaatggtggttggccatcatggataggagactgactggaagtggagatgaatgaaaattctagggtgatggaaatgctccatatcttgtttggggttcagttacatgaatgtatatatttgtyaaaactctaaattgtacacttaagacctgtgcatttaactatacgttttcatgcaatttttttttaaattccaagaaaaaggatctgattgacccaatttgagtcaggcatcctactgtctttgcatagtcagtttttgccaaggaatcc

SEQ ID NO: 798321 - DNA, 669 bp, Homo sapiens
gcataaacagtcaaaaaaccatgcactgtggttttacagggacctctatttctaaagatgattgttgcatgagggtctctgcctttatgaagggaaatgtgtagattttaactagctctgtttgtgttttgaaaaagaaaatcatgtttctgcactaaaaaataaattcctaatcaaacctttaaagttaacatttagaacagggacagaaacttctgttgtttcctaagtgttttgctgttgttcctgtttagttttaaatcattttttagaagttttattgaggtataaaaaaattgtacacctttcatatattcacctggatgaatttggacatgtgtgcatacaccaatatcatcatcacaaccaaggtactgaacatacttattcacctccaaaaattttcttgtgttcttttttaatggtggtagtatatttttaagaattcagyctttgagcagggtacgaaggaccttcaacaacaaatgcaaaagtaaatgagctaagttcatataaagggttagctctcagtgagttattcaagttatgatcatatcctcaagaggcttgtaaactgactgtgggtttccagtttggttattcacagataggccttcatttgctcattcacctattcattcatatagccactcattcattctcaagaag

SEQ ID NO: 798322 - DNA, 610 bp, Homo sapiens
cttgaatctagatcatccttaaaaccagagatatctacatttcccaaatctcttgcaaagcatttgcataccatgttattttcattatttcaaaacattccttccccttctattctatcaacatctacaagatatgctgaattttacttagaagccatttagctatcattcatacacacacactttccaaaatgtaacaccttcaaatatacataataaaagactaaacttgtatcttttacagaaatctcaaaattaaaatttaactgacttcaactgggcaaaaccacaccatctcagttactataggttcatactaagtcttgatagctgatagggtaaattattcttccctgcttttcttcttaaaatgccctgctgttttcaaccacttactcttctacataaatatcatacaatcttatcaaattacatgaaaatcttattggtctttaactcwttgcctcaagagatcctcctaccttggcctcccaaagtgctggcattacaggcatgagccactgcgcccttgaaatcttacgaggatttttattgaacatgcgctgaatttacaaatcaacttgaaaagaactgaaatcttcacaatgtt

SEQ ID NO: 798323 - DNA, 560 bp, Homo sapiens
aatgttgagtcatcctatccaagaacagggaatgtctttccatttattcatgtcttcatttctttctggagtgtttaaattttttcctcatataggctttgcatatttcttgttaactgtattttgaactatcttctttattactatagtaaatgagtttttcactatcattatgccctctgtttrttatttgtgtatattgtctaattactattattattattttttttttgagacagggccttgctctgttgcccaggctggagtacagtggtgcaatcacagctcactgcaacctcatcccccagcctgggctcaagcaatccttttacctcagcctcccaaacagctgggaccacaggtgtgtgccaccacacccagcatttttttctttttctttttcctttcctttttcttttttgtagcccaggctggtcttgaattcctgggctcaagctgtccacccactttcatctcccaaagggctagaattacagacgcaaaccactgcactcagcctaatgatattttttaacattaattttgcatcctgttatatc

SEQ ID NO: 798324 - DNA, 560 bp, Homo sapiens
aatgttgagtcatcctatccaagaacagggaatgtctttccatttattcatgtcttcatttctttctggagtgtttaaattttttcctcatataggctttgcatatttcttgttaactgtattttgaactatcttctttattactatagtaaatgagtttttcactatcattatgccctctgtttattatttgtgtatattgtctaattactattattattattttttttttgagacagggccttgctctgttgcccaggctggagtacagtggtgcaatcacagctcactgcaacctcatcccccagcctgggctcaagcaatccttttacctcagcctcccaaacagctgggaccacaggtgtgtgccaccacacccagcatttttttctttttctttttcytttcctttttcttttttgtagcccaggctggtcttgaattcctgggctcaagctgtccacccactttcatctcccaaagggctagaattacagacgcaaaccactgcactcagcctaatgatattttttaacattaattttgcatcctgttatatc

SEQ ID NO: 798325 - DNA, 487 bp, Homo sapiens
aactagagatcaaataggttaaataacctgcctaagggcacgaaatgacaaaacagcaaatctaaaatctaaatctaggtaaattaacaaaatttcttctttatattcaaatgatagcagtatggaagtccactgctctatataaaaaaggyttaatagtttttatttacataaggaaaatgttatcatgtatatttctgatacatcaaaaataattttttttaggaccagaaggcaaagtagtggttccaaagccgtagtgcctaggagagtaataatattcagtatgcactggtcccttctactataaatatatctgaatataacacacttgattatttttccctaaatagcacgataattatcttccacataagttaaaagtgaaagactttggaggtagggaacattttccaattggaaagagagagctgtatatctaagacggatagagtagaatcaggtagaactaaacataccaacaggt

SEQ ID NO: 798326 - DNA, 471 bp, Homo sapiens
agagatcaaataggttaaataacctgcctaagggcacgaaatgacaaaacagcaaatctaaaatctaaatctaggtaaattaacaaaatttcttctttatattcaaatgatagcagtatggaagtccactgctctatataaaaaaggtttaatagyttttatttacataaggaaaatgttatcatgtatatttctgatacatcaaaaataattttttttaggaccagaaggcaaagtagtggttccaaagccgtagtgcctaggagagtaataatattcagtatgcactggtcccttctactataaatatatctgaatataacacacttgattatttttccctaaatagcacgataattatcttccacataagttaaaagtgaaagactttggaggtagggaacattttccaattggaaagagagagctgtatatctaagacggatagagtagaatcaggtagaactaaac

SEQ ID NO: 798327 - DNA, 487 bp, Homo sapiens
aactagagatcaaataggttaaataacctgcctaagggcacgaaatgacaaaacagcaaatctaaaatctaaatctaggtaaattaacaaaatttcttctttatattcaaatgatagcagtatggaagtccactgctctatataaaaaaggtttaatagtttttatttacataaggaaaatgttatcatgtatatttctgatacatyaaaaataattttttttaggaccagaaggcaaagtagtggttccaaagccgtagtgcctaggagagtaataatattcagtatgcactggtcccttctactataaatatatctgaatataacacacttgattatttttccctaaatagcacgataattatcttccacataagttaaaagtgaaagactttggaggtagggaacattttccaattggaaagagagagctgtatatctaagacggatagagtagaatcaggtagaactaaacataccaacaggt

SEQ ID NO: 798328 - DNA, 471 bp, Homo sapiens
agagatcaaataggttaaataacctgcctaagggcacgaaatgacaaaacagcaaatctaaaatctaaatctaggtaaattaacaaaatttcttctttatattcaaatgatagcagtatggaagtccactgctctatataaaaaaggtttaatagtttttatttacataaggaaaatgttatcatgtatatttctgatacatcaaaaataattttttttaggaccagaaggcaaagtagtgkttccaaagccgtagtgcctaggagagtaataatattcagtatgcactggtcccttctactataaatatatctgaatataacacacttgattatttttccctaaatagcacgataattatcttccacataagttaaaagtgaaagactttggaggtagggaacattttccaattggaaagagagagctgtatatctaagacggatagagtagaatcaggtagaactaaac

SEQ ID NO: 798329 - DNA, 501 bp, Homo sapiens
actccacctgactagggaaggcttattaaaggaggggataagtggaaagaaggggcagagctgagaaggatagaacagaggcccagaagtggcaatgggcaggagagtggacaatggaaaggagagcaatgcagatgcaataaagggatcaattatgctgagctcagaagaggcaaatgactaaagaaagagtcttcaaagactaagtgggagaaaaacaaaaacaaacaaaacttagctttataaaataagctaccactataccataatgacctcaccygtgagtaaaattatatctccaagaaacactgtaaatgcccaaaatgctgcagtcctccacagaaaaaccttcttcttagtttctgattgatcacttactgtaactgttgctaaaggcactttagagccagaatttggtccgaattttgtttatttccttcacatggcatggagatagcaccatgactaaacaattatacttctggcttttagaatcacagt

SEQ ID NO: 798330 - DNA, 740 bp, Homo sapiens
cccccgatcacactcatctcctatgtttaaagaattcttgttttttatctggagatacggaaatccagaaaaaaaatactgtatttcctcacttcctagaagctatatttggccaagtaactgaccagcagcattgaagtagggagaggtgacacttttaaccagaggggcgagccytcctcttccgccttttccgtttccactggctaggcagtggaggtgatggtgaaacatctcacatcacaatacctagggatagagaagcaacaagatggggaaaaaaaaacctgggctcccaggctgcttacctgcaggcaggtgagggagaaagaaacttctatcttgcttaagccaatcttatttgaagtctctcttccagcagttcaacatatattccacaaagatattactcacactctacctcctctacgctcatgtgggtcttagaggaggggtgtatgctaggcctcagccaatcactgtatcagtttcctggccagagattgttcaggataagtgtgtaccccacttagatccaatgataaatactttatctgggaatctggagaaagaaactcattctattccccaagggaatgtggcgatgaagccaccatcttacatgaagccggatactggagccgcccagagaaggacaaagtgaggatgtgcagaagcaagttcccgagaacatcccgggagccttgacctcagtgaggactaaggctagtctcatccct

SEQ ID NO: 798331 - DNA, 740 bp, Homo sapiens
cccccgatcacactcatctcctatgtttaaagaattcttgttttttatctggagatacggaaatccagaaaaaaaatactgtatttcctcacttcctagaagctatatttggccaagtaactgaccagcagcattgaagtagggagaggtgacacttttaaccagaggggcgagccctcctcttccgccttttccgtttccactggctaggcagtggaggtgatggtgaaacatctcacatcacaatacctagggatagagaagcaacaagatggggraaaaaaaacctgggctcccaggctgcttacctgcaggcaggtgagggagaaagaaacttctatcttgcttaagccaatcttatttgaagtctctcttccagcagttcaacatatattccacaaagatattactcacactctacctcctctacgctcatgtgggtcttagaggaggggtgtatgctaggcctcagccaatcactgtatcagtttcctggccagagattgttcaggataagtgtgtaccccacttagatccaatgataaatactttatctgggaatctggagaaagaaactcattctattccccaagggaatgtggcgatgaagccaccatcttacatgaagccggatactggagccgcccagagaaggacaaagtgaggatgtgcagaagcaagttcccgagaacatcccgggagccttgacctcagtgaggactaaggctagtctcatccct

SEQ ID NO: 798332 - DNA, 740 bp, Homo sapiens
cccccgatcacactcatctcctatgtttaaagaattcttgttttttatctggagatacggaaatccagaaaaaaaatactgtatttcctcacttcctagaagctatatttggccaagtaactgaccagcagcattgaagtagggagaggtgacacttttaaccagaggggcgagccctcctcttccgccttttccgtttccactggctaggcagtggaggtgatggtgaaacatctcacatcacaatacctagggatagagaagcaacaagatggggaaaaaaaaacctgggctcccaggctgcttacctgcaggcaggtgagggagaaagaaacttctatcttgcttaagccaatcttatttgaagtctctcttccagcagttcaacatatattccacaaakatattactcacactctacctcctctacgctcatgtgggtcttagaggaggggtgtatgctaggcctcagccaatcactgtatcagtttcctggccagagattgttcaggataagtgtgtaccccacttagatccaatgataaatactttatctgggaatctggagaaagaaactcattctattccccaagggaatgtggcgatgaagccaccatcttacatgaagccggatactggagccgcccagagaaggacaaagtgaggatgtgcagaagcaagttcccgagaacatcccgggagccttgacctcagtgaggactaaggctagtctcatccct

SEQ ID NO: 798333 - DNA, 740 bp, Homo sapiens
cccccgatcacactcatctcctatgtttaaagaattcttgttttttatctggagatacggaaatccagaaaaaaaatactgtatttcctcacttcctagaagctatatttggccaagtaactgaccagcagcattgaagtagggagaggtgacacttttaaccagaggggcgagccctcctcttccgccttttccgtttccactggctaggcagtggaggtgatggtgaaacatctcacatcacaatacctagggatagagaagcaacaagatggggaaaaaaaaacctgggctcccaggctgcttacctgcaggcaggtgagggagaaagaaacttctatcttgcttaagccaatcttatttgaagtctctcttccagcagttcaacatatattccacaaagatattactcacactctacctcctctacgctcatgtgggtcttagargaggggtgtatgctaggcctcagccaatcactgtatcagtttcctggccagagattgttcaggataagtgtgtaccccacttagatccaatgataaatactttatctgggaatctggagaaagaaactcattctattccccaagggaatgtggcgatgaagccaccatcttacatgaagccggatactggagccgcccagagaaggacaaagtgaggatgtgcagaagcaagttcccgagaacatcccgggagccttgacctcagtgaggactaaggctagtctcatccct

SEQ ID NO: 798334 - DNA, 620 bp, Homo sapiens
ctcctcttccgccttttccgtttccactggctaggcagtggaggtgatggtgaaacatctcacatcacaatacctagggatagagaagcaacaagatggggaaaaaaaaacctgggctcccaggctgcttacctgcaggcaggtgagggagaaagaaacttctatcttgcttaagccaatcttatttgaagtctctcttccagcagttcaacatatattccacaaagatattactcacactctacctcctctacgctcatgtgggtcttagaggaggggtgtatgctaggcctcagccaatcactgtatcagtttcctggccagagattgttcaggataagtgtgtaccccacttagatccaatgataaatactttatctgggaatctggagaaagaaactcaytctattccccaagggaatgtggcgatgaagccaccatcttacatgaagccggatactggagccgcccagagaaggacaaagtgaggatgtgcagaagcaagttcccgagaacatcccgggagccttgacctcagtgaggactaaggctagtctcatcccttgacatctcaattaaggaagacaatacatttccttttttaaaaaccaatttgcatt

SEQ ID NO: 798335 - DNA, 489 bp, Homo sapiens
ggggatgtgtttagcctggtgaggagagtggggcagatgtggtcaggctagctgaggctcagcagagacggatgggccaggatggggatgggtgcccagagcttgccactgtctcccatgcccctgccttcctctggcctgccagccctcccaccctctgtcataggagatgcatgtatggtgggggccatcaacccagagctgtacaagttcccrgaggacaaaagtgagaccgacttccccgacggctgcctggggcggctgtggttctcggtggaatatgagcaggaggctgagcggctgctggtgggcttgatcaaggcacagcacctgcaagccccctcggagacctgcagccccctggtgaagctctacctgctgcccgatgagcggcgcttcctccaatccaagaccaaacgcaaaacctccaacccgcagtttgacgagcacttcatctttcaggtacagcctctggagcaggcagggtct

SEQ ID NO: 798336 - DNA, 645 bp, Homo sapiens
ttatttcaaccctattgattgaataattcatatttccagtatagatttgaaatcttttttataatactacatttttatagtattaaaaatgtacaccatttttataggtatatacttctctgaaccttccactattttcccttgatctcttcatctgatatgaactgattctgataccaccgcctaagtgttttaattaatatgggtttaaaattcttttttttttttaagagacagagttgcactctattgcccaggctagacatgaactcctgggctcaatcgacactctcccttcagcctccactgctcctggctcaaaattcattttaatatgtggtaaggaaattatccaacatgtgctccaaaaattttctggctatgacctaggtttattgcctcagcagcagttaggcacttgaagtggagtgttgaatatatgtaagtagtttytcaaagtgcacaaacttgtaaaagtcctacagcaaatacttttataggaagcattcatcatctgtttttaaacatattgagagtagtcactgtttagaaaaaatactcagcaatgtggtttgagggtcaggaattttctagcctgcaagaggcttctttggctgcctcattatggccactaaagatttaact

SEQ ID NO: 798337 - DNA, 621 bp, Homo sapiens
tgtttcccgtcgtagtggattcttaagcacttttccacatgtgcagcatgctacctggatgtcttttggcataatttgttacacatggatagcacacaatttggtgtcttcaaaaaggccaaccagatgggcttcacttgcctcctgyaaaacaccaatagctgtgctctggaagtgcagatctgttttaaagttctgagctagttctcatgctgatggtgtaagggaatttggcaaatcataagttcaagggacttctgttaatgtctaatttcaaggagtgccacagtaccaggcctataatgatgaggtttcttcaccctttaagtagagggtacactccctctcgagtggcttttttagccatttgctttctgggtgcgttgtcactggtcgatttgcaggcagtttgctttgtatgagctatggtaccttcttacttaccccacttctcctttggctggagctctgcgagctagtggcagtgctgatgttgctgtggtgactgcctcctccattctcttttattattatttggtttgtgtatactattttaaaatcactatgaaataagatggaatcaaatgattgctatttttaattaattaattttaaagacag

SEQ ID NO: 798338 - DNA, 621 bp, Homo sapiens
tgtttcccgtcgtagtggattcttaagcacttttccacatgtgcagcatgctacctggatgtcttttggcataatttgttacacatggatagcacacaatttggtgtcttcaaaaaggccaaccagatgggcttcacttgcctcctgcaaaacaccaatagctgtgctctggaagtgcagatctgttttaaagttctgagctagttctcatgctgatggtgtaagggaatttggcaaatcataagttcaagggacttctgttaatgtctaatttcaaggagtgccacagtaccaggcctataatgatgaggtttcttcaccctttaagtagagggtacactccctctcragtggcttttttagccatttgctttctgggtgcgttgtcactggtcgatttgcaggcagtttgctttgtatgagctatggtaccttcttacttaccccacttctcctttggctggagctctgcgagctagtggcagtgctgatgttgctgtggtgactgcctcctccattctcttttattattatttggtttgtgtatactattttaaaatcactatgaaataagatggaatcaaatgattgctatttttaattaattaattttaaagacag

SEQ ID NO: 798339 - DNA, 564 bp, Homo sapiens
aacactaaaagtttaagaaaatgtgcagacaagttcactgagtaattctacgtttaggaatttatctggaggcagtaattcttgctcttggcgtcttgagatgattatactaaatgtgttttcttcctgcagtgtaactacagaacctaagagaaatcccatgattattccctactcctgttgatgcatttgggggcaaataataaagtcagaaccagagaaacagtattgtggtattgtagcaagagattaaactggagccaaacagaccagtatttcaactccaacttggtcacttacagttttgtgactgagtagttcattcatttctttgaacctcagtttcttcatcagcaaaagtgggattaatacayatacccttcagggttgtagtcacaggcagtaagtacatgagccagacaataattgctctgacacacacccctctctgaaaataaagcaaatgaaataagtttaccattggtaggttaaattaggaaatgaaaaaatgaacaacaaaacaacacaaaaaacctagaaaggatcagagcagagatacagtct

SEQ ID NO: 798340 - DNA, 567 bp, Homo sapiens
ttccctataatctgctaataattttgctttttcatttagtttgcctgttaagcaagaatgtacaaatcaggctatcttgaatgcccagaaattctagtgttagatatccactttaacttccaggacacaaattacaaactggcaattcctgggctggctttggcctgccgacacctaaaactcggaaaatctcccctacaaatccagatttcaaaattctctttcaaaattaaatgatctggctacattgggctyatacacttgagggctgtaatttgactagaggtgaatattggctgccttcttcagataagggttgtattctgatttgccagtctcctccaggtccacttcatgtatttccttatttagttgccccataaacattggaaatttttatctttgaagaaggagctcagtaagctttctcttccttcactatgtctcctgaagagtagaaacactgaagcactgaggtgaattggaaaagatcaagaacataattgggtcactttcttaaagagtggaatattaggctgggcatagtggctcgctcattcttgtaat

SEQ ID NO: 798341 - DNA, 622 bp, Homo sapiens
ttaagttttgtatttttagtagagacgggatttcaccatgtgaaatcccagctaggctggtcttgaactcctggcctcaagcgatgcacccaccttggccttccaaagtgcttcgccttccaaagtgctggcatgagcaactgtgccaggccagagataactactatttcatttgtatatattttttcaacttttattttagattcagttggtacatgtgcaagtttgttatctgaatatagtgtgtgatgctgaggtttggggtatgaatgatcccatccaccaggtactaagaatagtactcaacagttagttttccaacctttttctcyctcccttccacactaatggaccccagtgtctattgttgccatctttatgtccatgagtacctgatgtttagctcccacttataggtgagaatacatagtatttgattttctgttcctgattcacttaaaataatggcctccagccacatatatgttgcaccaaagtacatgatttcattcttttttcttgctgtgtacaattccattttgcatatgtgccatattttctttttccaatccactgaggatgggcacctaggttgattctatgtctttggtattgtgaatag

SEQ ID NO: 798342 - DNA, 576 bp, Homo sapiens
agagattatagcaattatttctcttttgtcaatatgccatccgagttatgctctaagtctgtatgaaaaagatagagtcatactactggagtgtgcttatgagaattgttgtatgggcaccaaggaaaatgctgaagcaccttcaaaactagctgctcttactaacaaagcaaaacaggcttttctattgcttgaaacagttgaacctccctaattttatgacaggaggaaaaagaaatttgaactagtgacaagtataatattttaaataaatgcaagggtaattctttcaagaaaacatagcaaccaaactggattaaaaaaaaactggcttatacagatatattggaacctggaagatgagtatttatacccagtacatcaattctgtttctagatgggwgcttctgaaggcttggaaaaacagtgtgctctccctattttgttaaatattcactcttgcagaattgtttatagtgtatttgcttagcaaacttttatcatatatagtacagaagttaaatccatcccaaccttgttctagattattcaatttttaatcagaatgtctaaatt

SEQ ID NO: 798343 - DNA, 623 bp, Homo sapiens
acacaatcctctgagctctgcttatcccctggagaggtgagtttagggcagatgtagtgggtttgggagcctcagagggcgagacctgtcctacccacgcccagatattcatagggaagggagcagtctgtgatgcaggaccttcctggttaagtaaatagccttgttttatttcttctttctaagacaattaggacattatgccaagtgattgaaatttatttgcataggaacattatattacttgtgaataccactaggagaatgaaggggcagtggggctgtttgggttgagaaactgagactcttttgtgtgatggaacaaatacactgttctggaagaagaaggaaactcagatcttttgctggccctratgttgagcagctgagtgaccttgggcaagttacttcatctctccaggcccccatctccttgtttttggagtgttgaggttacattattacatcactttgtagagccttctcatttgggactttgtaatccatgagggaaactgtctgcaagccccaaagcccttaatcttgattgaaatatggtcaaaaatagatctggaagtaattttaaaaagcaatttaaaatgttaaatatgatgtattagact

SEQ ID NO: 798344 - DNA, 593 bp, Homo sapiens
cttcacagccttgtatgaatagagcgtcttttccttctcttttctgctgttgatggacatttcagttggttccagtgttttgctgttgcatacagttctgctgtaaactttcttgcacacatcaactggcacacatgcacacgaattctttagggtatagttaagacaatttttgagttacaggtatgcgtatctgctattttaccaagaaaagcagattgttgtttttccagctgtatgtaagaattccagtaacttcacatcctagccaacacttgatagaatcagaccttaaaatgcttaccaacattataaacttgaaatgtctgagtgattttaatttgtatttccctggtttccagtcatattgagcatcctttaatgagtttattggctatttgtrtttcctctttatgaagggcctatataaatcttttgcttacttttcaatttgattgtctttttctagatttgtaagagttctagatactcatcttaaataatgtgtgttgcaaataccttctggcttgtggcttatcttttcacactttttatgattggttaaagattaatatgttgttaattttaacgat

SEQ ID NO: 798345 - DNA, 621 bp, Homo sapiens
agacaagaccactaggttcatgtcggacatgatctgatgtacattttagaaggaagctatgtggcagcaatatggcgcttagattgggctcagggactgagcgagaaatgaggattttaacttcttattttctacatgcattgagaccatctgggatgtgttgatcacaattttcwgtagtccccagagaagaacagtagcttatttgtggtacttaaaaaaattggaaacaccagacctgggtaagtactaatgagaagcctgataaatcagtaaggttgaacatttatagaaatagaaggcataggctgggcgtggtggctcacgcctgtaatcccagcactttgggaggccgagatgggtggatcacgagattgagaccatcctggccaacatggtgaaaccccatctctactaaaaatacaataattagccaggtgtggtggtgcactcctgtaatcccagctacttggcaggctgaggcaggagaattacttgaacccaggaggcggaggttgcagtgagccgagcaggcgccactgcactccagcctggcaacagagcaagattccatcacacatacacacacgcgcacacacacacacacgaaagaaatagaag

SEQ ID NO: 798346 - DNA, 611 bp, Homo sapiens
catcttgatttatgaattagggccctgcattttcatttttcactggatcccacaaattatgcaactggtcctggtcagatgttattccctgaggtttgaggcacaacagtgaccaaacagtgccacacctagcctcaggccctccaatcctggtcatgccctacgaaytccattaaatggacagtagagaagaaaaaggatcagtaaaacaaatgctgtcaagaagggtgagaagctgggtgctttggctgtataaagccacaaagagacagcctggcagaagcacagccactgacagcagaaacagaatgccacttgttatctgaactctccagaccacacactggtctgttcttacactcacctaaccaaatagtctccaaaactctaccactgaactgtcaacaagctgtctgggggaggctcgttacagtcttgacctagatttgagtcctatccctgtaaagtgctctattccattttctattaccttccttgggtatcatcctaccccaagctctacaaactaaagctgaaggagagaggtggcaaacttcgcctatcagatctatgaagcaatggcctgtgttctcatcagccatccttgagac

SEQ ID NO: 798347 - DNA, 611 bp, Homo sapiens
catcttgatttatgaattagggccctgcattttcatttttcactggatcccacaaattatgcaactggtcctggtcagatgttattccctgaggtttgaggcacaacagtgaccaaacagtgccacacctagcctcaggccctccaatcctggtcatgccctacgaattccattaaatggacagtagagaagaaaaaggatcagtaaaacaaatgctgtcaagaagggtgagaagctgggtgctttggctgtataaagccacaaagagacagcctggcagaagcacagccactgacagcagaaacagaatgccacttgktatctgaactctccagaccacacactggtctgttcttacactcacctaaccaaatagtctccaaaactctaccactgaactgtcaacaagctgtctgggggaggctcgttacagtcttgacctagatttgagtcctatccctgtaaagtgctctattccattttctattaccttccttgggtatcatcctaccccaagctctacaaactaaagctgaaggagagaggtggcaaacttcgcctatcagatctatgaagcaatggcctgtgttctcatcagccatccttgagac

SEQ ID NO: 798348 - DNA, 571 bp, Homo sapiens
cacctctccactctacacttcaaattccatggatccctccatagttggcattatttggtcccattatgtacaatccaaatgtcaaggcaagaagccccagctcactccacatctgcactccagaggttcccaaatgaagaaggtttgygttaaaagaagagtttctccacacgggccctactggcatttggagccagaccattctttcttgcaggggctgtcctgtgcatcagaggaagtttagccacagccctgggttttaccctcaagatatcagtaacactccccttcccaagttaagataataaaaaatgtctccagacattgccaaatatcccatgaggggcaaaattgacctcacttcccccagttatgaaccaccaccctaaagaccagtcctcaattagaatactgaggggaccattttctccctgccagcccctctgatgttaatcatgtggaaatgaccaattctgggaatctgcccatttctctcctcctactaattattttgattaggccagcaaagcagagagatttcttcattccaacagagtcttatggaacagac

SEQ ID NO: 798349 - DNA, 571 bp, Homo sapiens
cacctctccactctacacttcaaattccatggatccctccatagttggcattatttggtcccattatgtacaatccaaatgtcaaggcaagaagccccagctcactccacatctgcactccagaggttcccaaatgaagaaggtttgcgttaaaagaagagtttctccacaygggccctactggcatttggagccagaccattctttcttgcaggggctgtcctgtgcatcagaggaagtttagccacagccctgggttttaccctcaagatatcagtaacactccccttcccaagttaagataataaaaaatgtctccagacattgccaaatatcccatgaggggcaaaattgacctcacttcccccagttatgaaccaccaccctaaagaccagtcctcaattagaatactgaggggaccattttctccctgccagcccctctgatgttaatcatgtggaaatgaccaattctgggaatctgcccatttctctcctcctactaattattttgattaggccagcaaagcagagagatttcttcattccaacagagtcttatggaacagac

SEQ ID NO: 798350 - DNA, 487 bp, Homo sapiens
ttaattttatcaaactttttgcctatgggtaatgctttgtatgttccccttaagaaatcttttcataaacagttcttgtattttaaataattttcctgtatctatcgagatgtttcgatgatttctttcttttattctgttattgtgtgaattacatccattaattttgaaacattaggtcaattttattaggttggtgcaaaagtaattattacaatttttgccaaactaatgacaaaaccygcaattacctttgcatcaacctaatgtgttcctggataaatcccacttgatcacataaagtatcagttttatacataattggattcacataactaaaatttttctgaggagttttgtgtctatgtttataatagacgtttataatagcctcttaaaacaaattagagaatatcccttctttttctatgatctggaaacatttgtaaaattagtattatttcttccttatatatttgaaaatttc

SEQ ID NO: 798351 - DNA, 596 bp, Homo sapiens
cacccactaaagccaggagtaggatcccaatggccactatcacccccttggcctccaccagataagttcccaagacaacctgaccacagtgagaacgaaatggctctctaactgcaattttattttatttgtaatcagatttctttcttcattttcttgatcctaggttaggattaaaataatttaagttattaaatcatttcctctcacaccaagcctggcacaaaatgcacaaagtgagaagcaaagtggcaaagtgtcccaagaatgctgccaacagtgatgcatagctccatgatgagatgttgagagcttcactggggatgcaaactccaattagagaatttgacactggaagagaattcaygacttgttctaagtcacctttcctctctgacctgggttccctcttatagaataaaaatagtgtgatccaagtaacttttgatgacagtatttagacaacatgtcctcacactaaaacttaaaaaaaaacaaaatactgaacaaatactgaactctagttaataaggtattttttcccccacaaagccatgggttagcaattctgaaactaggactgaataaataaataa

SEQ ID NO: 798352 - DNA, 632 bp, Homo sapiens
gcagtttttcctccagcataggaacaaatcactgtttctttgactggacatcagatgaaatagttggcttagacttagggacccaagatgctcatcttttaatacaagtctcatactaggagaagcaagaagctcgaaattgggactgggactcactaaggacacagtgtcactgccgatatcctcaagtggatgggacacagaatcaccaagccaggcaaacacgtgcacgactcacctcctctgggaacacccccctgctggccgcctctcttctgccttttctctcccracatacagctgaaacctgcccatgttaaatgtgcatgagaagtagttccactgaatggggtttctagaatcttcattcctgaatatggctgggagggaagctcaacttcctatttagaattcctactccattccccaccatgaagattccagattaaatcattcccattgctagctacatgtaagttccaaaagttcaaaaacgtttggatgaggatattctgaaatcaaaattccgctcatgaagtgcaggggaaagaacagagggtaacagggactccacagagcagcacagggcctcagtttaccagctctgaaatgggaatggtagcaccctcctc

SEQ ID NO: 798353 - DNA, 513 bp, Homo sapiens
tcaactctgtgaatcattgactcaaattgacagcaaatatttgagtacctattgactgacccagaaggccatattctttttattaccctttctttccctcccaggacataaaccataaactcctaggcacaggaaagccatttattatgttgaataagaaaaattcaactttttgaagtgtcaaagccttggatttaagctagggtaaatcagttttcagatattacagagctctggagaacacacacccaaatgtcggcagagcagagccatgtggctgaagctcctcgcatcaaagcagcctgctgggttacaccragatggttacatgaaagcttggtggtgttttccaaagattctgtttagggcctgggaagagaggatagaccctcactttaattctgcaaacactggtgagttatgccatgtgcccaaatctgtgctggtgtctgggacccgtgctgtctgttctcagtagccttggcatgaacattcaaacactttttggccatg

SEQ ID NO: 798354 - DNA, 617 bp, Homo sapiens
caagaagattgtttccagtctactagaaaacacttccaataagcctgaattacaaccccaatatcattttagttttttagattaacatgtgaaataaagagtttttcttagtcacagttacttttactgccaaaaacccaatgaatatctttccctctggaaccaaatacactgtttaattttaatctcttagctgactgacacaggaacaaaactggttttgcattttcccttttcatttacttttctgcaattgatcactggccttaaaaagttgagaagatatatttcagttgccattttctgtactggttttcattcattagttttccttctcctccttcctttactctgcaatctccttctcttctatcacatcagttatatctcttgccacaagctcacataatttctgtcgtgtgtcttwgtaatatctaatttgttacgatgtattatgcatgcaaatgtaattgcagaggaggagttaagcagaatgacagcttaaagaggcatattttttttgactctgtcactcccagaaaacagcataaagagatctgggacaactagatgtcgtgatgaaaacattagaacgccaggatatcaaattaaacaat

SEQ ID NO: 798355 - DNA, 612 bp, Homo sapiens
ccacgcctggccacaaattctttctttttaatctagcttttaaaatgtaattttatttagattctgggaacacatgtacatacttgttacatgggtatattgcatatggtgaaaactgggctgctagtgaactcgtctctcaaacagtgaatattgtacccaacaggtaatttttcaaccctttccccttcccaccctcttcacttttcgaatccccagtgtttattatttccatctttatcagacttccaaattctttttcttttctttctttctttcwtttctttttttttttttttgagacaggatcctgctctgtctcccaagcaggagagcagtggtgcaatcccggctcactggagctttgacgtccaaagctcaagctatcctcccacctcagcctcccagagcacatacattcttctgacagactgggagaatatgcttcatttcatgagacaaaaatgaaacttggtgcacatttgcatttattttgcttaagagagctgaatggtgttttcagaggtagatttactaattaaattcctaacgagtgaaccgagggccaggctttatccagaaaaagcaagtattctttcagaaaacttgttg

SEQ ID NO: 798356 - DNA, 646 bp, Homo sapiens
ttgtttcttttttctttcttccttttttgaatacagaaataaaagcagaaatcggtcactccaatttctccaaattatgaactctgtgctttccaaaaatggcccacttgtgggacaatggatcacctcacccaggatatttracagggagcaaagagatggcgagatctcagggctggatggggcctaagtggcttttcattcctgtgcttgcattttacttgacgcccagggagagtgggatttgctgtggaccagctgacagccatgaactccaaggcctctcattgccaatttattggtgttttcatgatacgagactatgcttgcaagttaacagaaaaattaaaattatagggtttaaaggaaaaacttacttctacttgttttgacttgtgtgcccttcaagacacagataatctaatttcacctctccagtctggccccagagtatcttccattctcacctcccacctcttcccctctacataccctgtacagctggctcactcatcaccccaggctatcctggacattttctgatctttaggctttcactcaagctgagaattctcccttaataccttccctcctcctctatagaccaggcaaactctgctaacccctccaaatgttacctcaattc

SEQ ID NO: 798357 - DNA, 646 bp, Homo sapiens
ttgtttcttttttctttcttccttttttgaatacagaaataaaagcagaaatcggtcactccaatttctccaaattatgaactctgtgctttccaaaaatggcccacttgtgggacaatggatcacctcacccaggatatttaacagggagcaaagagatggcgagatctcagggctggatggggcctaagtggcttttcattcctgtgcttgcattttacttgacgcccagggagagtgggatttgctgtggaccagctgacagccatgaactccaaggcctctcattgccaatttattggtgttttcatgatacgagactatgcttgcaagttaacagaaaaattaaaattatagggtttaaaggaaaaacttacttctacttkttttgacttgtgtgcccttcaagacacagataatctaatttcacctctccagtctggccccagagtatcttccattctcacctcccacctcttcccctctacataccctgtacagctggctcactcatcaccccaggctatcctggacattttctgatctttaggctttcactcaagctgagaattctcccttaataccttccctcctcctctatagaccaggcaaactctgctaacccctccaaatgttacctcaattc

SEQ ID NO: 798358 - DNA, 641 bp, Homo sapiens
accagcaggccccaggaagatggaggaagcacatcttcacccccacactgatagggacccgggaaggaactcgcccatggggtgcacagtacaccctgcactatttcgcttgactcagaagccagaacccaccagagtctactgtgcccaagctctgcttattagctggaccacatacaccatgctttgggaaatgtgaggctatgaattagtgggacctccaaaatgtcctggggaaatgggctacactgtaaaaaytcacccgtctggacccttaagattggtttagtatatgcaagttgtacctcaattgaagaatggctgcaggggccagggcatgagaggttttttaattgtgtggtgaggcgcactgtgaagaactgaaggagggggtcctctcgggagaatggatggtggggactcaaggcagagaagcaaggcccagaaacagggtgaagccaggaagggatcccaatcaaacattgatattcttccattctttttcccttagcctctatagaatattctactaggcatcgtgcttaagaattttttcctagctggtgcagtggctcatgcctgtaatcccagtactttggggggccaaggcagtaggatcttttgagcccaggagtttgaag

SEQ ID NO: 798359 - DNA, 622 bp, Homo sapiens
cagagaggcccagccttgggtgtgggttccaagcccagatggcaataaaggagcaccctgtcttcctacgggctggagttccttttgagagtgcttcctgggaaatgttgtcataacattgacagggcagaatttcagcatttctcacccttggccctaatatccatctcccaaatcacccccagtgccaggaatcattaagaaagcagtggtagtgttgagacaaccaaaaggctgttagtttgagaaccgtcacatatagcagatggaattcttgaaaaagtgtcttcagcattaggtagaggcatattgttatacataaagaaaggccggagaaaaacaccaagaactttctggggtaacttctctacaggaggttgctgtgtccccctagacagctctatcaacaggtgaggactgggaatctagtggtgaattgatgtgactgggttggggcagaaatgccatggggcctgatgcarcacagctgtacgtcatggaaaatgatccctgagacagtcagcaactggatgtagaatgaatctgtttaagtaatgagtgttcgctttaggagagcaggatgcaggacaatagccaggagagagcaaaacctgtttgaaag

SEQ ID NO: 798360 - DNA, 645 bp, Homo sapiens
aaacattcattttaatcttcggctgcattgataatttttttaagttaattcaatcatatgctttcaaaaagatttaagtattgattattacttaagataacttgaaagtatgattctatgtaatatgagacaacttttgttgaaaaaatatttttatctattttcaaaaatgtagaaagcccttttaaaagcaggatcactaaagtatgcttacgtttatttaatgacaacattctgatcagsttttcttttcttttttatactcctttaatttttgcagttttctttagattgtgccacctcctggtctagctgtttctttgtgaatttcgtaataggctctctgtttgaattctatggtgttattccaaacattgctgccttctttttgaagtatgtggctcacatttcacacagatcctttatgatgatttccttgcatagtgggaagtttttgacgtgaaggtttactggagtcccttggctttcaagttggctcagagcagatggtactgctagagagagcaacaacacagctttgggcttgaaaatgttagtgtacacacgatgctttttcccctcaggactggtatgattgatgggactttggaactaaaaactgagaaaagtagatccttcacaatt

SEQ ID NO: 798361 - DNA, 689 bp, Homo sapiens
acatgcgaaataatgaagttggatccttaccttacaccatatatgaaaatttacatttaaatattccattcattttgagctaattttcatcttataaatttcatattatacttttttttgacggagtgttcctcttgttgtccaggctagagtgcmatggcgcaatctcatctcaccacaacctccacttcccaggttcacgtgaatctcctgcctcagcctcccaagtagctgggattaaagacatgtgacaccacacccagctaattttggtctcaaactggctagtctcgaacccctgacctcaagtgaccctcctgcttcagcatcccaaagtgctgggattacaggcatgagccaccacgcctggcctcatattatactttgaagccttacatttaaatcttccattcattatgagttagacctaaaagtataaaactcctataagaaatcataagggagggtggcttatcctcatttgaaaaagaaatcataagggaggccaggcatggtggttcacaccaataatcccaacattttgggaggccaaggcaggaggatggcttgagtccaggagttcaagaccagcctgggcaacatagggagacctcacctctataaatataaataaataaataaataaataaataaataaataaataaataaaataaaaagaaatcataag

SEQ ID NO: 798362 - DNA, 441 bp, Homo sapiens
atttacatttaaatattccattcattttgagctaattttcatcttataaatttcatattatacttttttttgacggagtgttcctcttgttgtccaggctagagtgccatggcgcaatctcatctcaccacaacctccacttsccaggttcacgtgaatctcctgcctcagcctcccaagtagctgggattaaagacatgtgacaccacacccagctaattttggtctcaaactggctagtctcgaacccctgacctcaagtgaccctcctgcttcagcatcccaaagtgctgggattacaggcatgagccaccacgcctggcctcatattatactttgaagccttacatttaaatcttccattcattatgagttagacctaaaagtataaaactcctataagaaatcataagggagggtggcttatcctcatttgaaaaa

SEQ ID NO: 798363 - DNA, 629 bp, Homo sapiens
ggaaaaaacatagtataataggattagatactattgtggtttcaggcatctgctaggggtattgaaatttatcccctgaaggtaagggggtagtactgtaggtagaatcacacaatacgtagtctagctgtatctggcttctttctctgagcataatgttttcaagggccatctgtattgtagcatgtatcggtacttaattccttcttacggatkaataatgtttcattgtatgaatataccacattttattcttttatttttttagacagagtctcgctctgtcacccatgctgtagtgcagtggcatgatctcagctcactgcaacctctgcctcccgggttcaggcaattctcctgcctcagcttcctgggtagctggaattacaggtgcacaccaccacgcctggctaatttttgtattttcagtagagacagggtttcaccatgttggtcaggctggtcttgaacttctgacttcttgatccacccgcctcagcctcccaaagtgctgggattacaggtgtgagccaccacacctggcccacattttattcatttattcgacaattgagggacatttgggttgtttgcattttttagctatcatgaataatgttgctatgaac

SEQ ID NO: 798364 - DNA, 601 bp, Homo sapiens
aaagcctctttggatttacttttccatgtcctaaagtacttttcaatcaaaagtgaagatcaatcaatcgtctcagggccattgtaaggaacagcactttgtttcaatgagtaagagggacatcacagatttgtccctcgccagtgaggcgtgagatattccaaccctgcaagcagatggagatgttgaaactatcttcaagaaaacagaaccacagaaccaggactgggcgtggtggcccatgcctgtaatgccagcactttgggaggctgaggcaggtaaatcatctgaggtcaggagttccataccagcctggccagcatggtgaaaccccatctctaataaaaatamaaaaattagctgggcgtggtggtgggtgcctataatcccagctactccagaggctgaggcaggagaatcgcttgaacccgggagctggaggttgcagtgagctgaaatcctgccactgcactccagccttggagacagagcgagactccatctcagaaaaaaaagagaagagaaaacagaaccagatttcccactggcactgacagggctggtattcttaaagcagtaactgtgaatttctatctgaaca

SEQ ID NO: 798365 - DNA, 484 bp, Homo sapiens
gatgtccttttagaatcaagggaatgtccctagtatatgccaaatcactacttaaagtttatctggtggggcatggtgcctcatacctataatcccagcactttgggaggtcgaggcaggaggatcacttgagcccaggagtttgagaccagccctggcaatacagcaagaccctgtctctacaaaaaataaaacaactagctggtgtggtgrtgcgcacttatagtcccagctactcaggaggctggagtgagaagatcacttgaggctgagagtcagggctgcagtgattacaggcatgagttactgggcctgatcttttttttttttcatcatgtaatacatccatgtaatgaaatttatttcttacagtgctggaggctgggaagtccacagtccctgggccgcagctggttggcttctggcaagggcctcatcctgcatcataacatggtggacagcatcacatggagggaagtcgcag

SEQ ID NO: 798366 - DNA, 484 bp, Homo sapiens
gatgtccttttagaatcaagggaatgtccctagtatatgccaaatcactacttaaagtttatctggtggggcatggtgcctcatacctataatcccagcactttgggaggtcgaggcaggaggatcacttgagcccaggagtttgagaccagccctggcaatacagcaagaccctgtctctacaaaaaataaaacaactagctggtgtggtggtgcgcacttatagtcccagctactcaggaggctggagtgagaagatcacttgaggctgagagtcagggctgcagtgattacaggcatgagttactgggcctgrtcttttttttttttcatcatgtaatacatccatgtaatgaaatttatttcttacagtgctggaggctgggaagtccacagtccctgggccgcagctggttggcttctggcaagggcctcatcctgcatcataacatggtggacagcatcacatggagggaagtcgcag

SEQ ID NO: 798367 - DNA, 498 bp, Homo sapiens
cgtggttttcttcatttccgcgcaaggatggttaacataacctcctttcatcctgggactccagcaggtcctttcaagcagtgccagatgctttggggtagttgaagaaatattttgggagctggaagtcttggagaatatcaacgactgagagagtagagcaaaccaaaattagattgggcctatgctgagttctttggcttttttgtcttcccagtaattcgggcccgctttgtggttgttgatttattattttttgagaccgagtcttgctctgtcacccaggctggagtacagtggcaggatctcggcacactgcaarctccgtctcccaggttcaagcaattctcctgcctcagtctcgcgagtagctcggattacaggcacgcgccaccacacccagctaatttttgtattttttgtagacactaggtttacgcaacttcgccgaggccggtctcgaactcctgagctcaagtgatccacccacattggcct

SEQ ID NO: 798368 - DNA, 568 bp, Homo sapiens
tctcaaactgaatttcagctacttgtctgcttctttcacatcacaaaacttatttcactaaattgtaacaatacagaataactaacatttattatgtttttaatttgtgccacttttaagctaactgctggccgggcctggtggctcatgcctgtaatcccagcattttgggaggtcgaggcaggcagattacttgaggcgtgaagttcaagaccagcctggccaacatggcgaaayccccatctctactaaaaatacaaaaattagccgggtgtagtggcacacacctataatcccagctattcagaggctgaggcacgacaatcctttgagccggggcatggagtttgcagtgagctaaaatcatgccaatgtactccagcctgagtgacagagggagactccctcttaaaaaaaaataagctattcactttccaaacatagatatatatgtttgaaaagtgatatatatacatattatatatatatatatatatatattttaagttatataggtcaaatttctgcacaaaatctaattatcatcattatcattatttgaagattt

SEQ ID NO: 798369 - DNA, 602 bp, Homo sapiens
cacttaacaatggggatgccttctgagaaatgcactattaggtgagtgcattgttgtgcagatatcatagggtgtactcacaaaccaaatggtagagccgactacacacctagtttatatgatacagtctgttgcccctaggctacaaacctgtacagcatgtagagtagtactgaatactgaaggtaactgtaacacagtggtaagcatttgtgtactagcttttctttaggatgggattaaaaatatatatatatatatatatatatatatatatatatatatattttgggaggctgaggcaggcagatcacctgaggtaaggagttcaagaccagcctggccaacatggtgaaaccccgtctctactaaaaatacaaaaattagccagkcatggtggcaggtgtctgtaatcctagctactcaggaggctgaggcaggaggcaggagaattgcttgaacccaggaggcagaggttgtagtgagctgcgattgtagcatttcactccagcctgggcaacagagtgagactccgtctcaagcaaaacaaaaaaaatagctaaacatagaaaagatactgtaaaaatgtgttccaatcctat

SEQ ID NO: 798370 - DNA, 602 bp, Homo sapiens
atggattgttacagtttttggtacttataaataatgctgctgtgatcaacatacatacaagttttacacaaacataagttttcatttctctagcataaataccaggaagtagggttgctgggtcacagggtggatgtatattcatctttataatagctgccactgtttttcagagtgactgtacaattctgtgctgcgaccagcaaagctcagggttccagttgttgcacattctcaccagtgcttggtcctgtcaacattttttattttagccattctgataaatgtgtrgtggtatcttgtggtaattttaacttgcatttccttaatggctaatgacgttgaatatcttttcatgtgcttattagttatactttcattttctttggtgaagtatttttcaaatcttttgcctagttttaattgctttttagttttgctgtttatttttgaatattgaatgttttttgtatattctggatacaactcttttgccagatgtgatttgcaaatattttccctcagtctttgaattgtcttttcattctcttaacagtatcttttatggagtgaaaagttttagtttttataaaattcaattt

SEQ ID NO: 798371 - DNA, 646 bp, Homo sapiens
gcccaaaggacttccgtgagcaaacaaacttgagaaaatctccttgcggcaggacttatcagagcctttactatgctagcatgcctcctgagcctccaagaggggcccacctaaaacaatgttttccactcttttctggaacgttcttcagagaagtgccgatctgaggccttcagcacagatgtatcttagtggtggttctggaacaagatggaaaactaatgaatctgaagtggtggtaaaatgataggcaggagtattgctgtttccatgttataaacagagaaaactgaggcccagagggagagaggaacttgccaggtcagcaggtgaattagtgacagagccagccctaaatctccatcatgcgttctttcctctgctgctatggttttgatatttatcccttccaaacctcatagtgaaatgtgatttccagtgttggaggtggggcctaatgggcagtgtttgggtcatgggagcagatccctcatgaatctccttccaggtygggggtgagtgagttctgactctgttacttcccatgacagctgtttgttacaaagagcctggcacctccctcccttctctcttgcttcctctcctgccaggtgatctctgcacacaccgctccccttcaccttct

SEQ ID NO: 798372 - DNA, 500 bp, Homo sapiens
tgcccaatcaacacatgaaatggcataaatcctgtgtagtcagtgcagggtggcaagaggtgctttatgaagtgggttagtcttttttttgttctgttttgtttctgagatggagtctcactctgtcacccaggctggagtgcagtggtgtgatctcggctcactgcaacctccgcctcccgggttcaagcaattctcctgcctcagcctcccaagtagctgggactacaggggcccgccaccacacctggctaatttttgtatttttagtagagacagggtttcaccatatgggccaggctggtctcgaactcctgaccttgtgatccacccgcctcagccccscaaagtgttgggattacaggcgtgagccattgtgcccggttgaagtgatttagtctttaaactccaagacagagagccctgggctcaaatccctgttcacagcaccatttggctgtgcaaccttgatccatgtgtttaaccctttatacccaggt

SEQ ID NO: 798373 - DNA, 545 bp, Homo sapiens
aggatcatgcttggcatgtaaacaattctcaatacatcttgttgaatgaatgaatgaatgaatgaatgtgccaaattgacttaagacttctgctcctaaggatcaatcccaaaccagtaggcaaagcggtaggtgtgaaatacttaatgagcatgatttatagtagcaaaaaaaatgggaatggcctcctgtccacccacccatgctggatgaactacatgagggtacagccaaaaagtcctgtacagtggtcaaaaagtgacacatgtctacattcattgatacccaagtttctccgctaccgtcaatgaataaaagaagcaaacggtcaagcagagtttaatttgatgcaatttgtgtaaaagtgtgtgtgtgtgcgtgtgmgtgtgcgtgcacaggtgtgtttgtgtgtttgaaggtctggaatggtagttacttgtttctgggtgacaggattccagggaatagtttttctttctcatgcctttctgaatcttttgatttttttaaaattgagaatatgtaaactttgcaagcagataaac

SEQ ID NO: 798374 - DNA, 523 bp, Homo sapiens
tgtaaatgtagaagatggattgatgtgtcatatgtttgtacaacccatcttgcaagtgccagaggacaattttctgtttggaaagagcttcaggtagagaagtgctaaagggacacattctcctggtatttgccactaatgaatggatcaaaatttagtggaattcctctgccctctgatgtcaaagcttccacaacatargtgaggtcctgttggccagcatgtcagaagactcagttgcaatgtcctgactgcagttattatcacatttactccagaagcggtgactgataagcccagggaaaattctgaggcctgtttgacaagtaaacttccttgagattatgtgggtagattcacagtgttcagtgcctccccaaagaaaaattgtctcttcagccccctactatcaaaaagaaggcccatcaccatattggacactgcgtattggaggcaattctgtgactcgtgattctgattggagcctctggcaaagaaaggcagcctgcagccagaagcaccc

SEQ ID NO: 798375 - DNA, 444 bp, Homo sapiens
ctctgtgaattatttaattaaatggatccagtcgtgaagtaaatcttaatattgaagtcatcaactcattgacaacatggtgcagtgtcctatcttgagcaaaggaagcttatgagacatagtgttttcattagcagattaagaaggggcttctcagtcttagagctgtatactaaaaataaggcataactgttctatgagaataacagctttgaaaagatgtctggtgactgttaacagtgcaaacaagaaagtgatctttatatcaaattgcattttttctttatagaaaagwaaattcaaatacaaatcttatgcaatctgctatatttgagaaattaaacataaaatatcactggattatttacgcattttatcacaggacatgtttaaagcaagcagcatattcaaaataccataaacaaccatttcaaagtcacacag

SEQ ID NO: 798376 - DNA, 570 bp, Homo sapiens
tctcattgcctgtgtttgtgcaaaactaatcatatccaatcatatagttgtcacggcaattgagttaactccatttttgttacatgttttgaggcaggtgccatttaaaagagtacaccttgattattcacaaaaccacaaaacagtttttcttttttttttttttttttttttttttgagacagagtcttgctctgtcgcccaggctggagtgcagtggcacgatctcggctcactgcaacctccgcctyccaggttcaagcgagtctcctgcctcagcctcccgaatagctgggactacaggcacttaccaccatgcccagctaatttttgtatttttagtagagacggggtttcaccgtgatggccaggatggtctcaatctcatgaccttgtgatacgctcacctcggcctcccaaagtgcaagaattacaggcgtgagccaccgtgcccggccacaaaagagtttttcgttgtgaaaaataataggcatgaaaacagagtagtgccacaaaagtatgatattggtggagcaaatatttatcattagggaaatagttgcattaaaa

SEQ ID NO: 798377 - DNA, 606 bp, Homo sapiens
tccttgacatttggctgggcaatggttttttggatatgtccccagaagcataggccacaaaagcaaaaatagacaaatgggattgtatcaagcttaaaaagcctcttcacaacaaaggaaacagtcaaccaggtaaagagacaacctatgaaattggaaagaagatttgcaraaccatacatctgataagggattcatatccaaaatataaacggaactcaaataactcaagtgaaaaaacaaacgaataaatgggcaaaggacatgaatagaaatttctaaaatgaagacatataaatagctaacaggtatatgaaaaaaatgctcaaaatcactatcatccaagaattgcaaattgaagccacaatgagagagatcacctcacacctgttagaatggctattatcaaaaagacaaaacatagcaagtgttggcaaggatatgcagtaaaaggaacacttttatacccatggtgggtaggtaaatttggatagccattatggaaaatggcatggatattcctcaaaaaattaaaaatacaactcccatatgatctagcaatcccacttctgggatttatatcaaaagaaatatatatcaaaagaa

SEQ ID NO: 798378 - DNA, 539 bp, Homo sapiens
aactgctactaaatttcatttcaagttataattattgacattggaaacagctactcgtatcacaacaacaaagcaacaattatacaggatctggtgtttctcatgcaaattacagcaataaaatacaggaaaatccggcccacttacagaccagtctttgtctttggagaacacagtctgaactatttggttaactaaattaaaatgtaaatcttggctggcttttcttcttagatagcgatatgaaacagtttctaaaagacagaaaaagcttaagggaccacatttcaaacaacttgtcatgaatattttttttaatgaattaggtctgaaaagcttaactgtctataacaatcacggattstacgatgctgttcaaacaggaaaagcagaagggagagtcctgtatattttccccttatatttttgtttgtaaaggaacttgagagtgttggaagatgcacggcagtagagtcccttgcgttgcacaagtaaagccatagctctcagactcccggtcggtgtaacatgtataatga

SEQ ID NO: 798379 - DNA, 450 bp, Homo sapiens
gcatttaccttttcatatgacttgctttaactctggcaatatcttattgatacagacaggaggcagagaaatactgggtcgactagggaggggtccctggcagaggctccaccctcaagcctggatccgcggccctaaattagaacatacattcctgttttcccacccgaatgttgtcttttccaaaaccaccctggcctgccgcamccccctaccctgtacccattgtacccattacaaccccaagttccactggcagaggagcagagtggcaaagcagagaaggagagtagagaagaaacttctgaacattgagaggagaagaggtagctggacatcagagactatggttggagaagagatcagccggggacagccaggggaagattatattccccctccatctcctttccagttccccatcccactgaaagccacttccattggtca

SEQ ID NO: 798380 - DNA, 594 bp, Homo sapiens
taagaagtttggagatgggccatgtctaactctgggttctttccattcccttctgaggctaaaagggaaaaacattaataagacaacataacatataccaacaagcatatttaggtatgcattgatgcccatgagtggtaaaggcagctctgatgagggactttgctgcatttacaggagacaagtgaggaaggccttgtgacagatatgaaaacccaagtgtaacaaatgtgctttttatgtatagaatatggacttgcaccaaatgaaatgttggctaaagttcagttctaagaatatkttgatgctctaagaatattttaggttcagtcaatttagaaaacatgtagatttgatactggttttaacttagagcctatactactattaataaaaaaaaaacaacagtagtaatagctaccagagcattgagcagtatgtgctagacaacatgtgctaagaattttacagacattatctcatataatcctcaactaaatactatgaggcaggttttattattagtattatcctcattttaactctctgaggataagataattttaatattaatattaataataaagataatta

SEQ ID NO: 798381 - DNA, 561 bp, Homo sapiens
accttggcctcccaaagtgctgggattacaggcatgagccgctgagcctggccttaacacatttattgagtgcctactgtacaccaggcactgttctgagagcaggagacatggcaatgaacaaaacaggcaggtcttctctcttggaccttacattcccaggagaaaagtcagacaagaaagacaagtgtgattatgaaatactatctcgttagatgataagttccctggaggaagataaagcagggaaggaggagacggtgacgtccacgatggtggtgaaggtaactctaagccttcgctacagaggtggtaaccgagcaaagagttgaagactgtgaggargaaggccaagtagacatttgggagaaagacaaggtaaggctctagagcacaagaatgccaagctcattctagaaacagataggctatttccagtatggctggagcagagtgagcaagtgggagagaggacggaggaggctggtgagatgcaggggagtggggagatcttgtaaaggctcgtccgaccctgtgagaactttgccttagcctggccca

SEQ ID NO: 798382 - DNA, 628 bp, Homo sapiens
tgtcagatgcacataatgccaccaaacagtgggttgttattgataatgtcatctagaaacaattctatctcatggagcatgtgttagatgggactctgaggaggctgtcatggggcatgtattagatggggctgtgaggatgcttagggagcaaagcatctgaattagtccatctcaacattttctctgaggaagcatctcaccagcttatattctggtctatgctagcagaagaaagcgacagggagggtgtccagcatcctggcctgggacctccacgacaggaccaagccattctccgacagcgatgcacttgcttacctgatgtgcatcggaccagctactccaaagtgacaacgtcatcagtcccatcttgctgatgtctaaaatcacaccatctacactccattgaggactctaatcytagacatgatgaaaataatcgcgcaaggggaaacacgactcttttcattttgaaccttagtgtaaataagtttcaaacccttttctaggggaccaggtttagattagaggtaaaaggaggaatgtagggacttagggaagggcatgaagggaagttctgtgtgacgtgctaaagttaaaaaaagagtttcctctttacaatctt

SEQ ID NO: 798383 - DNA, 446 bp, Homo sapiens
tctcaagcaataaatattaacccaaaagaaattatctaaatcctaaagtatttaaaaattgattttgaaagaagctaaatgagatgcaagataaatctgaaaaccaatataaaaagctcagaaaaataattcagaatatgaatgagaaattcatgaaggatatagatatcttaaaaaataaaataaaaataaaacaagacaaaaaagtcrgaaatcctataactaaagattttattgaaggaaacacaaaacatattcaaaagcttcaacaataggctagagcaaacaaacagaaggaagaatttcagaacttgaatacaggtcttttgaaataattcaattagataaaaacaaagaagaaagaattaaaataataaataaagcatttgagatgtttgggacaatatagagtgaccaaatgtatggattatttgtatctctgagat

SEQ ID NO: 798384 - DNA, 608 bp, Homo sapiens
acaatatagagtgaccaaatgtatggattatttgtatctctgagattgaaaagacattgaaaggtttaaacttatttaatgacataacagatgaaaacttcccaaatcgagcaagagatctaggcatctaaatacagaaggctcaacaatctccaggaaaatacaatgcataaaggattttgccacgtcacattataatcagactgtctaaaggcaaaatgtaagagaaaattctgaaaacatcacaggaaaaccawctagttacaagtacaggaaatctcatcagactaacagtagatttttcagaagaagtcttacaggccaggagaaaatgggataccatattcgaagtgctgaaagaaaaaaactggcaggcaagaatttgatatccagcaaaattaacctacataaatgaaggagaaataaagccttttccagacaagcaaatgctaaggaaatttgtcaccagtaaaccagttctacaaaaatagtttaagggattcctaaacgtagaaacaaaagcacaatttttaccatcatgaaaacacacaaaagtaccaaactcactggtgaatcaattaaacaatagagaaaaagaaaggaatcaa

SEQ ID NO: 798385 - DNA, 616 bp, Homo sapiens
acacacatacacacacacacgatgatacaaactgacagtatacggaaacacaaatatttataaaaagaagtttaggccaggtaccgtgactcacacctgtaatcccaacactttgggaggccaaagggggcagaacacttgaggtcaggagttcaagactcgcctggccaacaaggtgaaaccacgtctctacaaaaaatataaaaattagctggacatggtggtatgcacctgtaattccagctactcaggaggctgacgcaggagaattgcttgtacccaggagacggaggttgcagtgagccgagatcgcaccaatgcactccagcctaggtgacagaacaagatcctgtctcaaagaaaaaartaaataaataaaagaagtttaaagtcatttattaaaaacatgcaaattaaaattactctgagatacagtattaacctaatagataagcaaaaatccagatgtttaatggcatactctaatgataaggcagcaggaaaagaggcattctcatccattgctagtgggagggtaatctggtgcaactcctatagagggcaatttgacaatagtcatcaaaattataaaatcataccctttgtcccagcaatt

SEQ ID NO: 798386 - DNA, 627 bp, Homo sapiens
tcttacaaacactataaattagttggtggatatttaatatgatagaaactattccatctgaattttctagggaggtcaaagttactttggtattgtaactcttttaagccaaattaattgggttatgtttcctttttttttctttttcaacttttattttargttcaggggatacatgtgcaggtttattacatgggcaaatttcatgttgctaggatttgttgtataaatgattttgtcaccgagatagtgagcacagtacccaaaaggtagttttttgaacttctccctcctcccccactccaccttcaagtaggccccaatgtttgttgtttccctctttgcactcaatgtttaccccccatttataagtgagaacatgtggtatttggttatttgttcctgcatcattagttcacttaggataatggcctccagctgtgtctatgttgctgcaaaggtcatttaattctttgttatggctgcgtagtattccatggtatatatgtgccactttttctttagctagtccaccattgatgggcatctagattgattccatgtctttgctattatgaataatgctgtgatgaacatacatgtgcatgtgtctttttaaactatagg

SEQ ID NO: 798387 - DNA, 627 bp, Homo sapiens
tcttacaaacactataaattagttggtggatatttaatatgatagaaactattccatctgaattttctagggaggtcaaagttactttggtattgtaactcttttaagccaaattaattgggttatgtttcctttttttttctttttcaacttttattttaggttcaggggatacatgtgcaggtttattacatgggcaaatttcatgttgctaggatttgttgtataaatgattttgtcaccgagatagtgagcacagtacccaaaaggtagttttttgaacttctccctcctcccccactccaccttcaagtaggccccaatgtttgttgtttccctctttgcactcaatgtttaccccccatttataagtgagaacatgtggtatttggttatttgttcctgcatcattagttcacttargataatggcctccagctgtgtctatgttgctgcaaaggtcatttaattctttgttatggctgcgtagtattccatggtatatatgtgccactttttctttagctagtccaccattgatgggcatctagattgattccatgtctttgctattatgaataatgctgtgatgaacatacatgtgcatgtgtctttttaaactatagg

SEQ ID NO: 798388 - DNA, 505 bp, Homo sapiens
ttgcattactagagctcttcttgatggatagaaccatagaaaagtgttcaaaatccttatgaggaaattgtgcaagttgcctcatgcttagaggatgctatctcattgggacaaagcctacctcgcagagcagcccaggacagcctttgtgaacccaggtgggtagggtcatgtccttgctgatccaccactgcctttggatctaacacccaatttcctataggtgcagatgggaayggctgacagagaagagagagaacaatgatgaaggcaaattaccatttatttatattttggatgtgaacattacaccagggccttctctaataagcactggtcttttaaaagaaaagaaattttcaatactactgtatggaaaacgcatgttcctgcccaatacccatgtttctgtccagggtcagctcatttctttccttaactataaacatccaggagctccatcttccaggctgcctctagcattaaatcaagagcttctgaagat

SEQ ID NO: 798389 - DNA, 635 bp, Homo sapiens
tctgttttagctagctttctcaaacactcctctggcagggtccagtggtagccaccttattacttccaggccgaggtaaaagtccaggtgccctgcttgtcctccagtgacacctgagggtggggtagacaagggtaggaattctgttttctgtatcgtctccactgacagtgcagtgaagggggccttgttactgctaggtgatggtcttgactctccctyagacctcatttaataccaccctagccgggagaggaagggccaccttattactgctggatgggagttcagtttcctcacttggtcttcactgacactgaaatggaatcattccatgtgttcctcagattccaaagtccctggctggtttcagagtcttatgtttgcttaatatatattatgtccagggtttttagtggtacttagcagtcagaatagagaaaaatacatctacttcagtttcctggaagcagatgtcctcagtgaaaattttaaaaatttggtaacacttaatattgtcaagagtgtgacgaaatctcaatactgggagtatgaactttttcaaatttggaggagagcaacgcccaaaattcaaaaagatcaggaatcctacttgtaaggatctactgtataca

SEQ ID NO: 798390 - DNA, 635 bp, Homo sapiens
tctgttttagctagctttctcaaacactcctctggcagggtccagtggtagccaccttattacttccaggccgaggtaaaagtccaggtgccctgcttgtcctccagtgacacctgagggtggggtagacaagggtaggaattctgttttctgtatcgtctccactgacagtgcagtgaagggggccttgttactgctaggtgatggtcttgactctcccttagacctcatttaataccaccctagccgggagaggaagggccaccttattactgctggatgggagttcagtttcctcacttggtcttcactgacactgaaatggaatcattccatgtgttcctcagattccaaagtccctggctggtttcagagtcttatgtttgyttaatatatattatgtccagggtttttagtggtacttagcagtcagaatagagaaaaatacatctacttcagtttcctggaagcagatgtcctcagtgaaaattttaaaaatttggtaacacttaatattgtcaagagtgtgacgaaatctcaatactgggagtatgaactttttcaaatttggaggagagcaacgcccaaaattcaaaaagatcaggaatcctacttgtaaggatctactgtataca

SEQ ID NO: 798391 - DNA, 503 bp, Homo sapiens
ctaaagaagagttgataacaacttttcacaaactcttccaaaaatacaggagagaacacttcccagcttattctacgaggccagtattactccaacactgaaaccaaagacatcacaagaaaactacaaatgagtatcgtctttaaatacggacacaaaatcctcaacaaaatattagcaaactgaatcyggtaacatctgcaaaaattatacatcatgaccaagtgggatttatcccagggatagaaggttagtttaacatctgaaaaccaattaaggtagcatcagtagaaaataaaccaaaactaatgtgataatctcaatagacatgggaaaggcatatggcaaaattcagtattctttcaacaaacaaggaatagaagggaacttcctcaacctgatagaggacatctgtgagaaaacttcagctaacatcatgtttagtggtgacagactgaatgctttcacctttagattaggaataatacaaagatgtccactct

SEQ ID NO: 798392 - DNA, 518 bp, Homo sapiens
tctactaaaatttaaaacaattagccaggagtggtggcacacgcctgtagtcccagctactccggaggttgaggcacaagaattgcttgaacccggtagacagaggttgcagtgaaccaagactgcacccctgcactcagcctgggtgacagagtgagactccatctcaaaaaaaaaaaaaagagctaaagctaattaaagataaagtaaaaaaaaattaaaaaawatatatatatatgtatatatagagagagtatatatagggttcaatattacccacagtttcaggtattcagtgggggtcttggaaaatatgccctgcagataaaaggggactactataatatgaaagattaggaatggattcccctttaaattttcttgtatgttccttctagaaataaaagaccaatcaaatgagaaaagtaaaatctacttggcccgagtttgctatagcaagggagtcagacaccctcacttgtgtattgacagagactcaaagccaggcagaggagtgg

SEQ ID NO: 798393 - DNA, 518 bp, Homo sapiens
tctactaaaatttaaaacaattagccaggagtggtggcacacgcctgtagtcccagctactccggaggttgaggcacaagaattgcttgaacccggtagacagaggttgcagtgaaccaagactgcacccctgcactcagcctgggtgacagagtgagactccatctcaaaaaaaaaaaaaagagctaaagctaattaaagataaagtaaaaaaaaattaaaaaatatatatatatatgyatatatagagagagtatatatagggttcaatattacccacagtttcaggtattcagtgggggtcttggaaaatatgccctgcagataaaaggggactactataatatgaaagattaggaatggattcccctttaaattttcttgtatgttccttctagaaataaaagaccaatcaaatgagaaaagtaaaatctacttggcccgagtttgctatagcaagggagtcagacaccctcacttgtgtattgacagagactcaaagccaggcagaggagtgg

SEQ ID NO: 798394 - DNA, 566 bp, Homo sapiens
agtatttatttattttaggctgtggctttcctatcataaaatccaagtatgtggtcagaataacctaagggtatctcaaacattagcccttaataatcatgatttgaatcttcaaaccttcatataaggaaaatagccttcccaaggataggttctaattaaaatcctggagactagattttctttaattttttttttttttttgcttctctatttcctaggcaaagaaaaggatacccctggacttcgtaaacttctcaagagtattctsttgctcaagaacaaaacactctccagaataatctaaaatctacatggaataatacaaaaactatggggggggagttgaatttcaaggcccttacagtccttgataaacaatgatggaataaataatggaaaacataatctgtggctgctcaactagacagttctgctaatgaccataaagagaacccaaactctaaaacttacctctgtatttcccctttacattgagttaggctgaagcaatagctcaaataatccaagttaacaaaagccgacagagaagtgattcagaggta

SEQ ID NO: 798395 - DNA, 683 bp, Homo sapiens
ggacgtagtaactgacaacactttgtaggcaaagaaaattggaattagtattaaaattgaatgggtagaaaataagatatagctaaaacctgagatttcaagtatgtgaacaagaagaaaggagacaccagaggaaagttaaagtgttctaaatttctagttagattggggaagtaacagtcagattcagaatttcataagataacattgagttaaatacatagcaagaaatatatgaagtccaggaaaattactaagattcaaagaaataaggaggccaaagtaaatgaatggaagtcctaacttagaaattagtggaattatcattttatttcctgatggaatcattgctccctttgaaactaagcagggcataagatcctggagaaaggaagcaacatttttcaataatcaccaatggtaatggtgtttaatctccacatgttaatttttatgcctatgaatctgggctttaggagtaacagcrccatgtatgggaagttgatttatagcatataaaggttcctggaggacattattacagcactatacagtattaccacctaaatggcaactggtgagtcttccaaagaatattctatcattctctcaagccagctgtttcagtatgttgggtaacaaaatgagatcaataaataccaggatcctaggcctattgccac

SEQ ID NO: 798396 - DNA, 522 bp, Homo sapiens
ttttcttaattttaaaactgtttatttattgtgaatacatagtagatgtaagaatgtatagggtacatagatattttgatacaggcatacaatttgtaataatcacattcagggtaggtatccatcacttcaagcgttaatcttttctttgtgttacaaataatccaattatactcttatttgttataaaaagtacaataaattattgttgattgtggtcaccctgttctatcaaataatagatcttactgaactctttaaagkcgtccatgagtcttggaatctactttttctaaactcctgttaacgttgatattttgaacaactcctgagaatcacaaaacttcttaatggcatctataaacctttccagaagatttcaattttcttttcccagaggaattactatatatgaaatccctagtattaaaagttatttattaaatgataagtcttgaaagctaaaattcttgatccatggcagcaaatagatattggttaaaaggcacgaaaacaacatta

SEQ ID NO: 798397 - DNA, 624 bp, Homo sapiens
caggttacttaaatttcttgaatttcactttcttgatttgtaaagtgggaacaataatatacagctttgtgagtttatgtgaaaattatgtgtacaaatcttagaatagctcctggcacatgagaactcaagtgttagccattcctcccatctccaaacctagaatactccattctctactacactgcaagcaatatgagaacagaaatttttgtattcaagtcctgggaacaatgactgacacataatagttgtccaataaatgcacagtgaatagaagattgaataagttttgtgcatgtagttaccctcttttagacttatttcatatttatatttgataatttattttactttcatttacctttstatttccttcaagattgacttcaattttcctagcaaggcttcagttgtatttttctttcttgtggaggcttcataatggctgtaagttaataaaattgcatttatatgtttgtttcctagattctctttgcttggtagctctactttcatctttttttaataaaaccatcttgccattagtttctttgagaatctatagaattatttcttgacaattttccgtttcttgggatagttttctgatatccctaaata

SEQ ID NO: 798398 - DNA, 623 bp, Homo sapiens
aatagattgcaaggagtatgctgtattaggaaggaagtttgtacactttcgtggcttatgggtatcttagtataaccttttctggttgagtgaactgtgtcatttcaaaagcctgaagacattgtgatgactgctgcctccataatggctacattctaggggctttgccctgaatcgcatatattaactcaaaaaacaaacagtacccagtttttattgggaaaattacagtaccrgaagttatgtttctcagtcattgagaccttatgaagccttaataatatttagaagattctggttccttgtcttccttttttgagtcagcagttggtcacagttcagaaatgaattacaaattacaatttattagtaatgataatatttaagtagtaatgatgatgataaatagtaacagcttattttttaaaaagataccaagctaaatgctttcatggattatctcatttaattgtctcaacaaccttttaagtcttatatttttatcattgccgttttatagatgaagaaagtcaattttcagagaacttaaataacttctcatagatgtctagagcaaataagagacaccaggaaatattacacccaattaaacatgttttctc

SEQ ID NO: 798399 - DNA, 592 bp, Homo sapiens
aaaaagtcaaaaaataacatgctggtgaggctgtggaggaaagggagtgcttatacattgctggtgggagtgaaattagttcagccaccgtggaaggcagtgtggagatttctcaaagagcttaaaacagaactaccatttgactcagtaatgccattattgggtatatacccaagggaatatagatcattataccgagaagacacatgcacttctatgttcatcwccgtgctatccacaaagacatggaatcaacctaggtgtccgtcaatggtggactggataaagaaaatgtggtacatgttcaccatggaattctataaagccataaaaaagaatgaaatcatttctttggcagcaacatggatggagctgaataccattttcctagcaaattaatgcagaaatagaaaacccaataccacatgttctcacttacaagtgggggctaaacatggagcacacatggatgtaaacatgggaacaaaatacactggggactactagagtggggatggaggtgggatgtgggttaaaaaactacctattgggtactatgctcattatctggatccagtatacccatgcaaca

SEQ ID NO: 798400 - DNA, 544 bp, Homo sapiens
atgcaagagtttggagaattccaactatatcatcaggtctatatctatttaatgttgtatcattattatttcctgccatatatagatgttatgttactttaaaaagttacatttattacagatataatattatgtatgcctcctactttcaccttcacaaatacataaatgatgatcttgaaggtggtaaccaatatctaaaattcacttggaaaggcatatttttaattcaatgtattaaaaattagaaaacatctacagggaacrtttgtcatgctttcaatcatttatatctttttttgtttttaaaatttgtttgaatttagcagtaatatgcttaactgagtattatataaggaccctcattggaagttgaaatgccagtcttagtgttgctcaccaaaaaataaaaaataataatcagaaaataccaaaagctagtttacaagattttctaacaccatccctcaaactcaaaatagtacaaaaaacataaataaatgtcatccaaatgactttaacctgggaatctggtatcatttta

SEQ ID NO: 798401 - DNA, 705 bp, Homo sapiens
agggatcctctctgtttccctttgattgtggatgtcagagcaggttatggggtatgtttgcaggggatcttgtgatgtggtgactcaatgactgaggttctacaggcacagcagtggcccactatgtgtacacaactagtacggcacttgacatctcagttcaggcctgagaagagtgtgggcacccctgtgtgagttaacaacatggatttctgtctttgggaattttccaaattgccacggacatcattgcccaggattgtgagggtagaaggactctctaataattcgatggttagcaggttkttgccagggtgaggggaacagagaagcacccccacctatacttttttggggtctctaagttccttgggggtcaatctctgccagactcttcctgctttctttttctgtaccctagcttcttcttgtgggttctctgacaggtcctggctctcatctgactgtgtttcattcagatcattaccattcacctgtaactttgatctttccgagaactagcatcccaagtcagtcaaccatgttggaaaaacaaagaaataaacaaaaaccttgactgtatgtttattctgagaagttaaattcaagttttaatagtaactacattgttttcgttagatggcaaaatccagagattttgtcttttttattggaagctttgtaagctattacatgtatatgtac

SEQ ID NO: 798402 - DNA, 550 bp, Homo sapiens
cagaaataaagctacacatttataaccatctaatctgggacaaagtcaactaaaacaaccaatgggaaacaactccctattcaataaatgaagctgcagcaactggctagccctatgcagaagactgacactggatcctttcctttcaccacatataaaaatggatttaagacttaaatgaaaaacttaaaactatgaaaattcttgaagaaaatctagaaaatactagacattgtccctggcaaggattttatgactacgactacaaaagcaattgcaataaaaacaaaaattgacaagtgggrcctaattataccaaatggcttctgcacagcaaaagaaactatcaacagtgtaaatagagaacctacaaaatgggataaaatatttgtaaactagacttctaacaatggtctaatatccagaacctataaggaattcaaacaattgaacaaccataaaacaaacaaccccattagaaaataagcaaaagaaatgaacagacatttctcaaaagaagacatatatgcagtaaacaacctataaaaac

SEQ ID NO: 798403 - DNA, 550 bp, Homo sapiens
cagaaataaagctacacatttataaccatctaatctgggacaaagtcaactaaaacaaccaatgggaaacaactccctattcaataaatgaagctgcagcaactggctagccctatgcagaagactgacactggatcctttcctttcaccacatataaaaatggatttaagacttaaatgaaaaacttaaaactatgaaaattcttgaagaaaatctagaaaatactagacattgtccctggcaaggattttatgactacgactacaaaagcaattgcaataaaaacaaaaattgacaagtgggacctaattataccaaatggcttctgcacagcaaaagaaactatcaacagtgtaaatagagaacctacaaaatgggataaaatatttgtaaactagacttctracaatggtctaatatccagaacctataaggaattcaaacaattgaacaaccataaaacaaacaaccccattagaaaataagcaaaagaaatgaacagacatttctcaaaagaagacatatatgcagtaaacaacctataaaaac

SEQ ID NO: 798404 - DNA, 605 bp, Homo sapiens
caactgctgttggacacttaggttgattccattactttcctattatgagtagtattgtgttgaacatacaaatgcagatgcctttttcctacagtgatttctttacctttgtgtagatactcagggatgagattgctgggttgaacggtagttctacttttacttctttgagaaatctacatactgtttttaatagaagatgaactgattaacattctcaccaacagtgtataaacaattgccgtttcttgacatccacaccaacatctcttgttttttgacttttaatattaaccattctgactgggtragattatatctcattgtgattttaacttgcatttctctgatgattactgatgtttagcaattttttatgtggttgttggctgtatgtatttcttcttttaagaaatgtccgtgtttttgcccactcttcagtggaattattttttttcttgttgagttgttcgagtttcttgtagattctggatattagtcttctgtcagaagcatgatttgaaaatattttctcccattgtttaggttatctgtttaatctgttaattatttattttgttgtgcaaaagctgtttagtttaatt

SEQ ID NO: 798405 - DNA, 605 bp, Homo sapiens
caactgctgttggacacttaggttgattccattactttcctattatgagtagtattgtgttgaacatacaaatgcagatgcctttttcctacagtgatttctttacctttgtgtagatactcagggatgagattgctgggttgaacggtagttctacttttacttctttgagaaatctacatactgtttttaatagaagatgaactgattaacattctcaccaacagtgtataaacaattgccgtttcttgacatccacaccaacatctcttgttttttgacttttaatattaaccattctgactgggtgagattatatctcattgtgattttaacttgcatttctctgatgattactgatgtttagcaattttttatgtggttgttggctgtatgtatttcttcttttaagaaatgtccgtgtttttgcccactmttcagtggaattattttttttcttgttgagttgttcgagtttcttgtagattctggatattagtcttctgtcagaagcatgatttgaaaatattttctcccattgtttaggttatctgtttaatctgttaattatttattttgttgtgcaaaagctgtttagtttaatt

SEQ ID NO: 798406 - DNA, 622 bp, Homo sapiens
agttctgcaaaaatgcatgctggaattttgataggaattgcatggaaactattcagtttgggaagaatagtcatcttgtcaacactgaattttccgatccatgaacatgaaatgtctctaaaattatatagatttttaaaatttccctcagcaatgttttataattttcagtgtaaaaatcttatacttcttttgttmaatttattcctaagtattttattttttgttgctgttgtgcaaggaattgtatccttaatatctttttcagattgttcattgtttatacatagaagtgcaattgatttttgtatactgatcctgtatcctgagacttactgtgcttacgatatggtttggctgtgtccccacccaaatctcatcttgaatgttagctcccataattcccatgtgttctgggagggacccagtgggagataattgaatcgtgggagcaggtctttcctgtgctgttttcatggtagtgaataagtctcacgtgatctatggttttataaaggggagtttccctgatcattctctctcttgtctgccactgtgtaagatgtgcctttcaccttctgccacgattgtgaggcttcctcaggtatgtggaactgtgagt

SEQ ID NO: 798407 - DNA, 622 bp, Homo sapiens
agttctgcaaaaatgcatgctggaattttgataggaattgcatggaaactattcagtttgggaagaatagtcatcttgtcaacactgaattttccgatccatgaacatgaaatgtctctaaaattatatagatttttaaaatttccctcagcaatgttttataattttcagtgtaaaaatcttatacttcttttgttaaatttattcctaagtattttattttttgttgctgttgtgcaaggaattgtatccttaatatctttttcagattgttcattgtttatacatagaagtgcaattgatttttgtatactgatcctgtatcctgagacttactgtgcttacgatatggtttggctgtgtccccacccaaatctcatcttgaatgttagctcccataattcccatgtgttctgggagggacccartgggagataattgaatcgtgggagcaggtctttcctgtgctgttttcatggtagtgaataagtctcacgtgatctatggttttataaaggggagtttccctgatcattctctctcttgtctgccactgtgtaagatgtgcctttcaccttctgccacgattgtgaggcttcctcaggtatgtggaactgtgagt

SEQ ID NO: 798408 - DNA, 587 bp, Homo sapiens
aattaccgagttttgggtatgtcttgatcagcagcatgaaaacagattaatacagtaaattggtactgagagtgggatgctgccgtaaagatatctgaaaatgtgcaagcaactttggaactgagtaacaggcagaacttggaacagtttggagggctcagaagaaggcaggaaaatgtgggraagtttggaacttcctagagacttggagggctcagaagacaggaagatgtggggaagtttggaacttcctagagacttgttgaatggctttgaccaaattgcttacggtgatatggacaataaggtccaggctgaggtggtctcagatggagatgaggaacttgttgggaagtggagtaaaggccactcttgctatgcaaagagattggcagcattttgcccctgccctagagatatgtggaactttgaatttgagagagatgatttagggtatctggtggaagaaatttctttcttttttttttgagacggagtttcactcctgttactcaggctggagtgcaatggtgcaatctcggctcaccacaaactccgcctctcgggtacaagcgattctcctgcct

SEQ ID NO: 798409 - DNA, 514 bp, Homo sapiens
atataacctaaaaatatgattatttttgtgtttattctgcctgtgattcattgagtttcttggatctgtgaccttctaatttttattaaatttggcaagttttgtcaattatttctttgaatactttcttctgtcctttctatttacccttctctgtgcctccaattgtttttctattagcatgtttaacatttccccacacgtaattgatactcagctcatttttcttscattatttttatttatcccctctgtatttaattttggattatttctttgcctaggtcttcaaatttagtattgtttttcttattatgtctctgatctcccataaatcataactagggtagtttcttatcagttatattaccagctctagaatgtctactatagacccttcaaccttccattcttttcctcctcatgttaacattttgctctactttttgaatatactgtttatttataatagctgtattcattattttgtgtgttaattttgccatttatgaca

SEQ ID NO: 798410 - DNA, 560 bp, Homo sapiens
ggtagtataataaaagtagcactgaatctgtaaattgcattgaccatatagccattgaaatattaattcttcctatccatgagtatggaatgtttttacatttgtttgtgtcatctctgatttccttgagcagtgttttgtagttctcactatagagatatttcacctttctggttagctctattcctaggtattttattctttttgtcacaattgtgatggggttatgttcctagtttggmctttgtttggctgttcttggtttattggaatgctagtgatttttgtaccttgattttgtatcctgaaactttgctgaagttgttttccagcttaaggagctttggggctgaaactatggggtttgctagatatagaatcatgtcatctgcaaacagggatagtttgacttcctctcttcctatttggatgccctttctttcttttggctgattgctctggtaaggatttccaatattattttgaaaaggggtggtgagagagagaatccttgtcttgtacttgtgttcaaggggaatgcctctagcttttgcctattc

SEQ ID NO: 798411 - DNA, 443 bp, Homo sapiens
cctttgttcggggattttatattataaatttgtttttatttattctacacatggttggttgtagtttgtcctccaaaatgaaatgaaattggtattattacagaaagatgactgagtcatattatgatagagactaatttctctgacctagtagactaaaagttttctgtagtctcttaatgagactccttttatagcatttgtatctttgtgcttaattattcttagtataaatatttagaaattgatgcatcrttttacttctatggcatgtcataaagctattttttcaaaaaaattgttttgtgtataatgtcatgcgaaaaagaattcttaaaatgatttaaaagatttagacccccctccgaaaatatcaacaaaacgaattttctaagataataagaaaatgaataaaatccccccgtagcagcaaataattgggc

SEQ ID NO: 798412 - DNA, 613 bp, Homo sapiens
tagaattgaccacataattggaagtaaaatactcctcagcaaattcaaaagaatggaaatcataataaacagtatctcaggccacagtgcaatcaaattggaattcaggattaagaaactcactcaaaactgcacaactacatggaaactgaacaacctgctcctgaatgacaactgggtaaataacgaaatgaaggcagaaataaagatgttctttgaaaccaatgaggacaaagacacaacataccagaatctctgggacacagctaaaggagtgcttagagggaaatttatagcactaaatgcccactggagaaagcgggaaagatctaaaatggacacactaacatcacaattaaaggaactagagaagtaagagaaaacaaattcaaaagctagcagaagacaagaaataackaagatcagagcagaactgtaggagatagagacatgaaaaacacttcaaaactcaatgaatccaggagctggttttttgaaaagattaacaaaatagacagatacactgctagacagactaacaagaaaagagagaagaatcaaatggagacaataaaatattgtaaaggagagatcaccattgataccacagaaa

SEQ ID NO: 798413 - DNA, 628 bp, Homo sapiens
gtgtgtatgtgtattgtataataatagaaaattttctggtctttgtcccagattcctgggatagaacttctaaaccccagacatttcttaagggagaggagtatttgtgttgttcatgatagtctctgggtttatgcttataaggtcacttatggtggacttttagatagcttatgttaacaagatagctcagcatgaaggcagactatgccagaaaaaccaaccatgtaattagaaggttggtgctttgaaccagatgatatcagttcaacctctgggcaagagagatggattggagattgagttaaatcctgtgcaatcgcactgcatagcaagactccagtaaaaactytggacactggggctcagatgagcttcttggttggggacacatcaatgtgctgggagggtgacatggtcctgattccatggagagagggccttcaagaccctcctagacctcttcctctggcatctaaaatgagagcagtcttgttggggactatgcccttgatctgtgggatctgcactaactctgggaagttactgacatagttgacttgcagtattagataatctgtgttaaatatgtgtgttaaaatatatgaatatttctatcttagagtcg

SEQ ID NO: 798414 - DNA, 603 bp, Homo sapiens
cagacttcatgactaaaacaccaaaaacaattacaccaaaagccaaaattgacaaataggatctaattaaactaaagagcttctgcacagcaaaaaaaaactatcttcagagtgaacgggcaaccaacagaatgggagaaagcttttgtaatctacccatctgacaaaggttaatatccataatctacaaggaacttaaactaatttacaagaaaaaggcaaacaaccccatcaaaaagtgggcaaagtatatgaacagacacttctcaaaagaagacatttatgyggccaacaaacatatgaaaaaaagctcatcatcacggatcattagagaaacgcaaatcaaacgcacaatgagataccatctccaccagtcagaatggtgattattaaaaagtcaggaaacagtagatgctggtgaggctgtggagaaataggaatgcttttacactgttggtgggcgtgtaaattagttcaaccattgtggaagacagtatggtgattccttaaggatgatgtagaaccagaaataccatttgacccagcaatcccattactgggtatacaaccaaaggattataatcattcttctataaggacata

SEQ ID NO: 798415 - DNA, 642 bp, Homo sapiens
taagtcattgagcacagacactggatccgtcttattttcctctgcatcctccagcacagggaattccccaaacacaagaattcatgaattgccaacaagcgaattttgaaatgtgggttcttgagtagtacatgttttttttttgtgtgtgtgtrtatcagctctatagtttagaatcaatttctttttaatgctgaaattctagcatatggggtaaaaactaattttccacacaaaattgatttaagccctgtatcatttctgctctttttaagagacagaaaatcagtttgaatagacagattaacagctaatcactaggtaattgctaccttactttaaggggcatgctaactacatacttgtgacttcaagtatagttgtatcttacaaatggatttttatatctttgcactagtaagagcaaacagtgagatctttgagctgatgaacaaagttactattccttttagctaaggcatacaaagagagaatccttcctattgctgcacaatcgtatgcttttatgttcagtctagagagcagcctcagctagtttattttctaatttacaaaacacacacaagtgccattaaacagaaaaaataattaaaacaaatctctatctctagcttgttttct

SEQ ID NO: 798416 - DNA, 399 bp, Homo sapiens
tgctgaagaaagtatttccaagaaggtgagaaaagtcaaaatatagtggtacagacaaggcccagactgtgtgagactaagatgaggtttgttggtagatcattggtaaggttaggaggagacagcttatgaaagtggggctggtgaaggttgaattaactgctaaaccctccaccaagcaaagaggacacaaattgaaaacattgcctatgtgttttaatgggaacatggartaaataaatgaatatatatttacatatactcagagggagaggactatcttaaacaattcaaggtcatgaagagtatatgtgggaaaagaaaaggaagatgactgaggagtgtggattctaggatccagtcctgctgacacctccaccagctctgtctccttagaca

SEQ ID NO: 798417 - DNA, 553 bp, Homo sapiens
ccccaggactcttatgaggaatgttgactactattttactactagtatggggagaaaagcagaataaagaatacattttttaacataagggaaaactaccttcttcacttttcaggtgtattatctatctataacgctaacaatgctgctattattgttttattaaaaactagcacttactgcatgattactttttcaaaggcacaatggcaaactacttgatttttccttaaacacccatacgaggtatatacttttagtattctatttttcaaatttaaaagctgaatcaaagagagataaatgtcttcggagcataaagctggaaactaagacagctgaaactgaaatctaggtatcattccaaagcttgtatctttaatgattttactttctcttccttattttctctttaagataaatttaataaaattgagaaaatcaaaatatgkggtatatatttgtgttactttttaagtgatttaaataaattttaaaatagttttaaagtaatgttaactaacatgaagctcttaatttttatgaaggcagg

SEQ ID NO: 798418 - DNA, 528 bp, Homo sapiens
atgattgtaagtttcctgaggcctcccaagccatgtggaactgtgagtccattaaacctctttcctttctaagttactgactctcagggggttctttatagcagtgtgagaatgaactaatacagaaaactggtactgggagtgaggcactgctataaagataacatgaaaatgtggaagcaactttggatgtgggtaatgagcagagattggaacagtttgagggctcaaaagaagacrggaagatgtgggaatgtttggaacttcttaaagacttgttgaatcgttttgaccaatatgctgataacgacatggacaatgaagtccaggctgaggtggtgtcagatggagatgaggaacttattgagaattggagcaaaggtcactttgctatgccttagcaaaaagactggcagcattttgcctctaccctagagatctgtgaaactttgaacttgagaaagataatttaggatatctggcagaagaaatttctaagcagcaaagcatttaagaggtgacctggct

SEQ ID NO: 798419 - DNA, 627 bp, Homo sapiens
tattaatttactagagcataataaatataatttaaaataaaacatatatttaagcatgagaagaaaatgaaaaatacagtatcacaatgcttttgttatgccttcagtttcatcgcctttattgaatatttaaatccattaatcttgttcccttgtttctatagattttagtaatgactttccctgttctattgcagtatagtctggtttccagatattttatcttgattgtctcttactcatcctattaatggtatactgccagatattacaaaattgcataaaattctgaaagcatgtaagatctatatgccaacaaactctttgagtttatggataatacagagacaaagtagttaacaaagaaataagtaaaaatcacttccctctgatgaagttgaaaatactcaaaatatcagagtatttgaaaaagkctaaagacttaaatgacatagaaaaaatgactttgaataaaatatttttaaacatatttaaagtaaaagcacatgaatatcaagtaaattaaaaatataatgaattatttatggatgactttgatttataatttaaatcataaaccttgattttccaagttttcctgcttaataatttgactatttgattatt

SEQ ID NO: 798420 - DNA, 580 bp, Homo sapiens
tcatctgtatgccttctttgttgaagtctctggtaaggtctttggcccacttttaatcaggtttgttgtgttcttattgtagattctcaagagttctttgtatattttggataacagtcctttatcagatgtgtcttttgcaaatattcaaatattttctcccagtctgaggcttgttttctcattctcttgacatcatctttttcagagaagggcttttaaattgtagtgaagtctaggttatcagttatgtttttcatwtattgtgcctttggtgtaccatctaaaaagtcataaccacacccatagttatctagatcttctcctgtattatgtactatgagtttcatagtttttgcctttttttttttaatggaatcttgctcttgttgcccaggctggaatacaatggcatgattttggctcactgcaatctccacctcctgggttcaagagattctcctgcctcagcctcacgagtagttgggattacaggagcctgccaccatacccagccaatttttctatttttagtagagacagcatttcaccatattggccaggctggtctcgaactctt

SEQ ID NO: 798421 - DNA, 601 bp, Homo sapiens
ggatttggcttcaactttctgctgaatcttgatcatcttcatttttttttcatattctgaattccatttctgtaatttctgccatttcagcctggctaagaagcatttctggagaactaactagtgcaggcattcattgttaagacactctggctttttgatttgccagagttctggcttattctttctcatctgtgtgtgccaatattccttaagtctttaaagktgttgtcttttttgcttttatcttgtttttatgctcttcggggtttcattgtggtataaggtggcttcagtcagctggcttcatttctggaagattttagggagccaaggctcagctcagcactcttgggatttatgccataactctggaaggttggtatcaggcccctggctttgtcaactggccacttgagtttaggaacctgctgtgctagatgggtcacagcagctggtcacaatacttcaacagatggtgccagccaaagtgcttcactgcagcagtggcaatgggaactgtgctcatgtgcatgtaccaatagcaggcagtatggcagggtgcactctcgccagctcgagtggggcaccggtggttgcc

SEQ ID NO: 798422 - DNA, 630 bp, Homo sapiens
catagatctgtttctcggatgtgatgcaaaccttaataaatgcagctatggaaaaattccccaatcgccaaatgccctttctctcatgtttgacagagctctttattgtatcttactacagaacaagtccaaggatgagatctatcttatatttagtgtcatcagttgcaagaatcacttrgtcatgtcatttgtcattactgtgtttgctgtgaatgttataggttaactttaaacatggtttttaataattgatttttatgaaacttgatttcatctaataaggatgcaaaatttttactgccttcattaaccactaaagcagcaattgcttctctttcttcataataatttatgagttctttgtcaatgtgttatttttgtgctatgatcagcatttctttaagatgaaaaacatttgtcaattatttttagtcttgaaatcacaaaatgcagttttattatttgatctctgtgtggaaaaagtcatatcctaatatttcagctaaaaacagattcctgagttgttaattgacatatttgtatgatacaacatttcactggtaacaacatttcagttattatcttacatttttctgtatatgaaataaaaataaataattcactctg

SEQ ID NO: 798423 - DNA, 635 bp, Homo sapiens
gcctacatgctaaggtaacacagagtaaagggcctaatcaagaatcacttatttaaacaggtgcatttttaacatttttttattggcccttagtagaaacagaaaatgcctgagcttcatacagcaatctctgttctctgatttgaaagtattaaattggtcttaaggaccaactctggacacattactgactgtttcaacatagcacaaaacaaatggaaccaaataaaatcttactgcaagcaaaaatctaatttttaaagagtatatgttcattcaatgaagaaaaccattttgtagygtttccccactgaaaaaatcacttctttcagatcattgcttacttttgtgcacatctagcatgaaaccatgaaaatgaacccgttttttcctcttcatttccacataagcataaaacatgtccatcaccattgtttttcctgtaccttaaaaataaaaaaaattttaagaatactattaaatagtatgtactgattgctgtaatgattgttcattagctttgagataatgaaaccatactcttccgctaggaagctgaagactatgtcacttctttagaagggggagcttactttgtatgttaaactagctaaaaataaaatgttaatattact

SEQ ID NO: 798424 - DNA, 488 bp, Homo sapiens
ctattatactgtattattactgcaccttctctgtttagatatgtttagataaacaaataccacagcgttacaactgcctacagtattcaatacagtaacatgctgcacaggtttgtagcacaggaggaataggttytataatacagcctaggtgtgtagtaggcacatgtatccctacatccaagccagggagaactatgcttcctaactcctaaccttaaaaccagcctacctttcacctggtgaaactagaatctgaatcaatgtgaaacaggtgaggtgaaaccaggaggcagcaggaaaggggctgataagcaaaatgtacttttattctcttctagtgtaccagagaaatcattaactctgccatcaccaccgcagtcagctggtcaagagctgaggctctgttgtgagaaagccagctgtagggtatgaatgaagtcacaaaatactactaccacagcttttggcttctatatgagatgtga

SEQ ID NO: 798425 - DNA, 488 bp, Homo sapiens
ctattatactgtattattactgcaccttctctgtttagatatgtttagataaacaaataccacagcgttacaactgcctacagtattcaatacagtaacatgctgcacaggtttgtagcacaggaggaataggttctataatacagcctaggtgtgtagtaggcacatgtatccctacatccaagccagggagaactatgcttcctaactcctaaccttaaaaccagcctacctttcacctggtgaaactagaatctgaatcaatgtgaaacaggtgaggtgaaaccaggaggcagcaggaaaggggctgataagcaaartgtacttttattctcttctagtgtaccagagaaatcattaactctgccatcaccaccgcagtcagctggtcaagagctgaggctctgttgtgagaaagccagctgtagggtatgaatgaagtcacaaaatactactaccacagcttttggcttctatatgagatgtga

SEQ ID NO: 798426 - DNA, 621 bp, Homo sapiens
acaagttatctgggcatatcacaagacatccttttccttcccttgttggaggagtactccattccacagctataccctagcatttggcagctcatgataaggagtccatgcaactccccctgagacacattttgtcccaaactcaattccaagctttggttcaaagccctagaaagaaaaaatggatctgagggatccagaggcaaatgataacagaagttaaagggcggccgggcatggtggctcacgcctgtaatcccagcastttgggaggccgaggagggcggaccacgaggtcaggagatcaagaccatcctggctaacatggtgaaatcctgtctctactaaaaatacaaaaaattagccaggtgtggtggtgggcacctgtagtcccagctactcgggaggctgaggcaggagaatggcgtgaaaccaggaggcggagcttgcagtgagccgagattgcgccactgcactccagcctgggtgacagagtgagactctgtctcaaaaaaaaaaaaaaaaaaaagttaaaaggcatagtgcaggtgagcatgactaattcctgccaattaggccaagctttctatttcatggataaaggtcattctagtatccatg

SEQ ID NO: 798427 - DNA, 619 bp, Homo sapiens
ttgaagtcacttgtctctgatttgggttttatcccagttaaatctgttcttcaaaatacctttggattggttgatctgaaatgcaaatattatcttgtcagttctctgctttaaatctttcaagatttcttaatagccttacctcttactttgagaagaggcatgcttctcaaactttagagtgtataaaatgattcgggaatcttgttaaaatgcagattctattagaataacgtttggagtgtggctcctaactttgcatttaaaaaaaaaamaactctgaggtgatactgatgccaaaaacatagagaagttttgactccttagctgtgctatatgaagacctagtctatgtctctgatttcatctcttatccatggccacaattcatgctttcttagcattatgttacctttaaaaatcatgctgtttcatgtcttgtgatggtttcttttttccttttctttctttttttttttaattgatgacttacatgtagtagtaactggctgagatctttttttcccttcaaggtttcttcagctcagaaggcagtacctgtattcacaagctgagctgactgttttatatttgtttcttttagcatcagtagcaaatt

SEQ ID NO: 798428 - DNA, 479 bp, Homo sapiens
aaagagtcaaaaagttaaaaaaatttaagtttataacataaaaaagttacagtaatctaaggttaatctactatttcgaaaagaaaactattttgcataaatttaatatatcctaagtgtacagtgtttataaagcctgcagtagttatggtcacgacctgggccttcagattcacgctccacacacwcactgactcacccagagcaacttcccgttctacaagccccattcatgctaagtgccctaaacaggtgcagcatttttaatctttgatactgtattttctattgtccctttcttatgtttagatacacgaatacttaccattgtatttcagttgcccacagtattccccacagtcacatagggcacaggtctgcagccctggagcaacaggctccaccacgcagcccaggtgtgtagcaggctgctccgcccaggtgtgtgtcggtgcactctgatgaaattgcctaatgat

SEQ ID NO: 798429 - DNA, 479 bp, Homo sapiens
aaagagtcaaaaagttaaaaaaatttaagtttataacataaaaaagttacagtaatctaaggttaatctactatttcgaaaagaaaactattttgcataaatttaatatatcctaagtgtacagtgtttataaagcctgcagtagttatggtcacgacctgggccttcagattcacgctccacacactcactgactcacccagagcaacttcccgttctacaagccccattcatgctaagtgccctaaacaggtgcagcatttttaatctttgatactgtattttctattgtccctttcttatgtttagatacasgaatacttaccattgtatttcagttgcccacagtattccccacagtcacatagggcacaggtctgcagccctggagcaacaggctccaccacgcagcccaggtgtgtagcaggctgctccgcccaggtgtgtgtcggtgcactctgatgaaattgcctaatgat

SEQ ID NO: 798430 - DNA, 554 bp, Homo sapiens
catccctcatggctttgcgtttccctacgcttttctgaagccaaacaccaatggcgtctcctcatgggatggtgataaaggcaagaatctcaaaatgggacccgtagccgcagcctctgctgaacaagtcccaccccggcgcttctgtctctacctggcctcacctcccccsgccccgagcgggcgtctcggacgaagacggaccctgccactgtagagtggcaatgtgtgtgccgtgccacacctcctttctcaaaactggcacaagccaggggaggctggaaagatggcagagccgttttaacctgactcgaagagactccaggttgtttagattattttaataattggattttataagacttgtgctctggggcttttttagtgaagaacaataatttttaaatgaaccttgaaaacttctataataggtggaaagaaaagagtcagctctccaagtacgttccttttcctgcctcatcctgtacaacctaatcctgctgctgtgcttcctcctcgagtccttccaagaacacatgacaagatgtttatcc

SEQ ID NO: 798431 - DNA, 554 bp, Homo sapiens
catccctcatggctttgcgtttccctacgcttttctgaagccaaacaccaatggcgtctcctcatgggatggtgataaaggcaagaatctcaaaatgggacccgtagccgcagcctctgctgaacaagtcccaccccggcgcttctgtctctacctggcctcacctcccccggccccgagcgggcgtctcrgacgaagacggaccctgccactgtagagtggcaatgtgtgtgccgtgccacacctcctttctcaaaactggcacaagccaggggaggctggaaagatggcagagccgttttaacctgactcgaagagactccaggttgtttagattattttaataattggattttataagacttgtgctctggggcttttttagtgaagaacaataatttttaaatgaaccttgaaaacttctataataggtggaaagaaaagagtcagctctccaagtacgttccttttcctgcctcatcctgtacaacctaatcctgctgctgtgcttcctcctcgagtccttccaagaacacatgacaagatgtttatcc

SEQ ID NO: 798432 - DNA, 532 bp, Homo sapiens
ggaaactaaaggttgtcagttaccttttcagggaaatacacgtccccatttgttttctagaatgaaaagaacagcttcaaggtgtttagaggctcctgtcaacgcccctcatgcttggaaatgaatgcaagctgcagattcgggttgccttctccacttgctgcaaatgcacctttaattgcttgtacacatcacrttttcccggggagctgatgagtcacctgcctttccactcataggctcacgcccacctcaatccatccttctttatgtccctacaggtaaagaaaattgcctgcattagctgccctgacagccacccactactcccgagggtgaacatccagaagagagaaggtgaacctctcagagtcggtctggaccgtaacaatgggaacggttatgctctttcaaaaggctctttctcttttatgcccacagataaaagttagggacttcttgctgaatcccaggaggtagtaaaaaaaccacgaatctccatccaaggatccctgcacctagtcggtgcctc

SEQ ID NO: 798433 - DNA, 664 bp, Homo sapiens
acccatgctgatggttgacgaaccttactaggagccacaaagcccttttccactcttggtacttctctgatctgtcctctagaacatcttctacaactttcctgattacacgaatgaatctaccttttcatttttgtgattcagttttgtatgagtcaggattctccagagaagcagagccaacaggagatatatagatacagagatagagagagagagtgggaggaatcggggctcatgtgattcggggaactggcaagtctggagtccacagggcaggtcagctgcctggagatggagatgacagttgatatttcagtctggagtccgaaggccaactggagacagaattccttcwccctctggaaacttcagtcccagtgaagcctcttcaggccctcagtgggccagaggagggaaaatacccttttctgtctacacacctgctctccatgtccacagcagcgctctatgacaggagaatgtttgtgcagtcacttgggacttgcctccctcctgtgtctagtccatggtgcagaaaggtttgcctgcactttggtcttctaccagccactgacttaagaacttttgaaattattctaattggcatttttaacatttcatctttgaatgtttaaaaatattcattgtaatgtaattgtca

SEQ ID NO: 798434 - DNA, 671 bp, Homo sapiens
acaacagggttttgagctgtgcggatccacttatatgtggattttcttccccctctgccaccctcctcttcctcctcctccacagcctccccagcgtgaagacgacgcggatgaagagctcatgacgatccatccccaattcatgaatagtaaatgtcttttctctttctcactattttcttaataacgttttctttcctctagctcactttattataagaacacagtatatgatataaatcacgtataaaataggtattaatcaactgtgtatgttatcaacaaggcttttgctcaacagtaggctatgaggagttacgtttttgaggagtcaaaagttaagctgattttttttttattgcatggggsgtcgacactgctaccccacgagctgttcaagggtccgccgtcactcttgggtgtcttttccctcaggaggagccggtacctgacctggaatgcctggtgtgagcgtagctgggcaggggacacctctgcctcgtaggaggcttttccccagcctggacactcacatgacattttctcaccctggagactcagtgaccccactcgggcgtgtctcggtgaggaatggttgtgagccggttgttcctagaacaggggaaaaatgtccctttaatctgcagatgcagacttggcttgttgaggaa

SEQ ID NO: 798435 - DNA, 615 bp, Homo sapiens
catagtagatgtcctaccttgtatacaatatggtgtcctgtttttagaaactagtaatacaccactaaaactgtttctaggccaggcgcggtggctcacgcctgtaatcctagcactttgggaggccaaggcaggcagattgcctgagctcagragttcgagaccagcctgggcaaccacggtgaaaccccgtctcttctaaaatacaaaaaaatagcctggcatggcggtgtgcacctgtagtcccagctactcagtaggctgaggcaggagaatcgcttgaacccaagaggcggaggttgcagtgagccgagatcacgccactgtactccagcctgggcaacagagcgagactccatctccaaaaaataaaaataaatatatatataaaaactgtatctaaacatcatataaatgtgtatgtctaatatgattttatgttaagtatatatacacacagagacacacaactattttatagtattggaggtcatatagccttgattagagcatgggctcaagtcagactgctggtattcaaatcccagcactgtaaccgaccatctgtgtgaatttgggaaagctacctgtccaatctatttctcagtttcccat

SEQ ID NO: 798436 - DNA, 624 bp, Homo sapiens
cgcaggcccaaaaccacatgtaagctgccaaggcatggggcttgcaccctgtgaagcaatggcctgagctatacactgtccccttttagccatagctgggacccagggcaccaagtccagggactgcgcaaagcagcaagggactgygcaaagcagcaaggccctgggcccagcccacaacatcatttttccttgtacgcctccaggcctgtgatgggaggtgctgctacaaaggtctctggcatgtcctggagacattttccccattgtcttggaaattagcatttggctcctccttatctacgcaaatttctgctgtcagcttgaatttctctgcagaaaatgagtctttcttttctactgcattgtcaggctgcaaatttttcaaacttttatgctctgcttcctcttgaacactttgccacttagaaatttcttccacctaaatcatctctctcaagttcaaagttccacagatctctagggcaggggcaaaatgccaccagtctctttgcatagcaagggtgacctttatataagttcccaacaagttcctcatctccatctgagaccacctcagtctggacttcactgtccatatcactatcagcattttggtcaaag

SEQ ID NO: 798437 - DNA, 598 bp, Homo sapiens
cacaggcgtgcaccaccaggcctggctaatttttgtattttttgtacagacaggatttctgccatgttgcccaggctcacacagtcttattatgtgtatttcatggagggacattacattgttttcagtctttttgctcttataaacattgttacaaggaaacgtccttgtttgtctgactctgtgttctcatatggcaagatcagtaggacccactcctagaaatggaggtggtaagtcaaagaaaagatgcattttacattatgatgcctattgcctagttgctgtttagaaaagctgttccatcttcacagtatacaagaagctctgtttctccacrcctccagtattgaacattcttgacatttttcactttgccagtttgatgggctgaaatacatcttgttttaacttgtatttatttaattatgagtgtggttaagcatcccattttaatgcttttaaggccatttgtgttccttttctgttaaactacctgtttgaatcctttgcctatttctctattccatcttcattttattaagagtacactgaagctcagaaaggttaagcaacgtacgttgggtcgcacagcggg

SEQ ID NO: 798438 - DNA, 637 bp, Homo sapiens
gtttgcaggtgacatgatcgtatatttagaaaaccccatcatctcagccccaaatgtccttaagctgacaagcaacttaagcaaagtctcaggatacaaaatcaatgtgcaaaaatcacaagcattcccatatatcaataagacagagagccaaatcatgagtgacctgccattcacaaatgctgcaaagaaaataaaaaaaataggaacccaccccacaagggatgtgaaagacctacccgagcagaactacaaaccactgctcaatgaaataagagaggaaacaarcaaatggtaaaacattccatgctcatggataggaagaatcaatatcatgaaaatggccatatggcccaaaataatttatggattaaatgctatcctcatcaagctaccattgactttcttcacagacttagaaaaaactactttaaatttcataaggaaccaaaaaagagcctgcatagccaagacaatcctaagcaaaaagaacaaagctggaggcatccactacctgatttcaaactgtactacaaggctacagtgaccaaaacagcatggtactagtaccaaaacagatattatagaccaatataacagaacagaggcctcagaaataatgtcacacatctacaat

SEQ ID NO: 798439 - DNA, 645 bp, Homo sapiens
atgttgtaaaatgtaaaactataaaacttttagaaaaaacagagaagaaaatatgcaaaatctaacgctaggcaaagtgttcttaggcttgacacaaaaagcacaatctataaaaggaaaaaattgatatataaatttttttgaaaattagatagagctgtaaaaaccttgcctcttgtgatactgattgttgctctttttagactttatacattttccaagtcatatcgtaataccacctagatttatttacrtgtgaagttattaaaaactgttattttgctcaattaaaagctcattttaaagatttcaaaaaaaattcaaagcaactcaacatgcaacagataaaataatttgctgttaattggaggaattaattaactgttaattgaagaaattttttagaaactttattatctttagacagataatattgctaattttccactattaatagatgctgtggctaatgatttctacagtggtgtacatagtcaatgtgtgaaacgtgctcaaatgtgtatttgattattttagttgatgttaagaatcttctagaatttgcataactcactgtggttgatctgcaaccaaccctagaaactactatttcaaatagattgcatttttaggagctggcatatt

SEQ ID NO: 798440 - DNA, 645 bp, Homo sapiens
atgttgtaaaatgtaaaactataaaacttttagaaaaaacagagaagaaaatatgcaaaatctaacgctaggcaaagtgttcttaggcttgacacaaaaagcacaatctataaaaggaaaaaattgatatataaatttttttgaaaattagatagagctgtaaaaaccttgcctcttgtgatactgattgttgctctttttagactttatacattttccaagtcatatcgtaataccacctagatttatttacgtgtgaagttattaaaaactgttattttgctcaattaaaagctcattttaaagatttcaaaaaaaattcaaagcaactcaacatgcaacagataaaataatttgctgttaattggaggaattaattaactgttaattgaagaaattttttagaaactttattatctttagacagataatattgctaattttccactattaayagatgctgtggctaatgatttctacagtggtgtacatagtcaatgtgtgaaacgtgctcaaatgtgtatttgattattttagttgatgttaagaatcttctagaatttgcataactcactgtggttgatctgcaaccaaccctagaaactactatttcaaatagattgcatttttaggagctggcatatt

SEQ ID NO: 798441 - DNA, 483 bp, Homo sapiens
acttgagcatggttaataaccatttatggggaactagtgtggttgtttggggatacgaatattctggctttttgagttgcaagagttctgttctgtttttttctcatctgtgtgggctgatatttcttcagtctttgaagttgctgtcctttgaatggtatatatatatttttttgcttgtatcttctttgatgcccttgggtttaatagtggtatgatgtgggttcagccaactggcttcctttttggaagattttatggggctaagactcagcttaaccatcttgggctgcatgctctatttctggayggttgatattgggactctggctttgttctctggcccctcaaggttaggaacctgctgcactggagggaatgaggtgttcctgaatgactgtccacaacactccaattggtggtgctgaccaagtcacttcatcagggtggtggcattgggatccattcttgttcacacatgcc

SEQ ID NO: 798442 - DNA, 655 bp, Homo sapiens
aggatggtggttatagtcgctgcagattgagagaaatggggaaatgatggccgaagggtaaaaaatctcagaaacgaggaatatattttttagttctattacacagcatggtaaatatggttaataatagagtactatacatttcaaaattgctgagaataaatttctaatcctcccacggcaaaaaaaagttaagtatttgagataatggatttgctaaccaacttgacataataattcacattgtatttacgaamcatagcatcactttgtaccccataaatgtatatcattataaattaccaatttataatttaaaaaataaaattataaaattgtaaaagcaaatataagaaaaagaagtcaaagacctgattgctgtagcatccagcatttagaggtgagaaaaattaaaaaaggaaaagcagagtaaagtgagaagaagctgccagtaaagcaggaaagaaaccagtgtcatttttcggaaagagatgaggaataaaagaaggtacaatcactataatatgtcaagaaaaagacataaatttatgaagattgaaaatgacaaaaaaaaagctgttgtattcacaaagtatgttactatccgtatagaaaacccaatggaatctaaaatttttataaataatgcagaaat

SEQ ID NO: 798443 - DNA, 655 bp, Homo sapiens
aggatggtggttatagtcgctgcagattgagagaaatggggaaatgatggccgaagggtaaaaaatctcagaaacgaggaatatattttttagttctattacacagcatggtaaatatggttaataatagagtactatacatttcaaaattgctgagaataaatttctaatcctcccacggcaaaaaaaagttaagtatttgagataatggatttgctaaccaacttgacataataattcacattgtatttacgaaacatagcatcactttgtaccccataaatgtayatcattataaattaccaatttataatttaaaaaataaaattataaaattgtaaaagcaaatataagaaaaagaagtcaaagacctgattgctgtagcatccagcatttagaggtgagaaaaattaaaaaaggaaaagcagagtaaagtgagaagaagctgccagtaaagcaggaaagaaaccagtgtcatttttcggaaagagatgaggaataaaagaaggtacaatcactataatatgtcaagaaaaagacataaatttatgaagattgaaaatgacaaaaaaaaagctgttgtattcacaaagtatgttactatccgtatagaaaacccaatggaatctaaaatttttataaataatgcagaaat

SEQ ID NO: 798444 - DNA, 596 bp, Homo sapiens
ggtcttgactctttatccaatttgccttttaatttgtctttcaatgggaggatttagtctatttacatttaaagttaatattgttatgtgtgaatttgatcctgtcattatgatgttagctggttcttttgctggttagttgatgcagtttcttcctagtctcaatggtctttacaatttgacatgattttgcagtggctggtaccagttgttcctttccatgtttagtgcttccttcaggagctcttttagggcaggcctggtggtgacaaaatctctcagcatttgcttgtgtgtaaagtattttatttcttcttcacttatgaagcttagtttggctggatatgaaattatgggttgaaaattcttttctttaagaatgttgaatattggcccccactctcttctgccttgtagagtttctgccgagagatccgctgttagtctgaygggcttccctttgagggtaacccgacctttctctctggctgctcttaacattttttccttcattgggggcgggggggaatttgacaattatgtgttttggagttgcttttctcgaggagtagctttgtggcgttctctgtatttcc

SEQ ID NO: 798445 - DNA, 621 bp, Homo sapiens
ttgtacccagggatcctttggggaaattttaactggctctgaaagatttagaggcactgccattaattattggaagcataggactgttctaccatctacttcaaacttcattcttagcaaccccttcttttgtctttagtttagggcagtcagatctccagtggcctccttctttacaataggcacattggttgctacccaaggccatgctctgaccacctcatctcccctcttttggctggcatgagtttttctccaaagttttcaaatatattgtggctggctttagccttttagtttccctggcattgtgtacgctgaaggcaatatcaagtagctgggagagtgatatggcttggatgtcccctccaaatctcatagagagatgtaatccacagtgttggaagtggggcctattgggaggtgcttgggtcatgggagygaatccttcatggcttggtgctgtccttgtggtagagaatgagctctcacataatctggttgtttaaagtgtgtggcacttaccacctctctcttgatcctgctttcactgtgttgatgtgcctgctgctgcttcaccttgtgccgtgagtaaaagctccctggggcctccccagaagc

SEQ ID NO: 798446 - DNA, 603 bp, Homo sapiens
cataatatcttttgatttgatggtcagggagaacaactttccaagacatgatattcagcttgagatgataaaatgaggtaggttgttcaagtgggggtggaagaaggaagaaagtgagagagagagagagagagagartttgtgaggtgtgctggaagaggtagagagagaagagcttagatttagagggtttccacattataataaagaattagatatttattataagtgcaatgggaaaccaatggagagtttggtgcacgacagtgacataacttgatttctattttcttttactttttagacggagtctcactttgttacccaggctggagtgcagtggcatgatcttggctcactgcaacctctgtctcctgggttcaagcgattctcctccctcagcctcctgaagagttgggattacaggtgtgtgccaccatgcccggctaatttgggtatttttagtagagacagggttttgccatgttggccaagctggtcttgaactcctgacctcaagtaatccccctgcctcgacctcccaaagtgctgggattacagaagtgagctacaatgccagaccttgatttccattttataaaa

SEQ ID NO: 798447 - DNA, 473 bp, Homo sapiens
cacaataaagatagctatttgttacttggtaggttagcacctgtcatcaatatttggagcactgcctataaaaccagacttagataagggtcaaggaagctatctacacttggtgcctacaatattaagtttttctgtatcaatctaatttccagattacatttctttttttttcatacagtttaacgtctgatgcccgctatctgtgttattgagagtgtgcgtgtgtgtgtgtgtgygtgtgtgtgtgtgtgtgtgtgtgtgttgccaggaagtagaataaaggactatattcgtatcagagcacttaggacatcactgtggagattggtttattccttcagcctcagtatccttatccgaaaaatgtacataattacacatagggttgtcataagggttaaagtcactctttttcaacaaatttttattgagcacctccttaatatcagacactattctaagtactggaa

SEQ ID NO: 798448 - DNA, 473 bp, Homo sapiens
cacaataaagatagctatttgttacttggtaggttagcacctgtcatcaatatttggagcactgcctataaaaccagacttagataagggtcaaggaagctatctacacttggtgcctacaatattaagtttttctgtatcaatctaatttccagattacatttctttttttttcatacagtttaacgtctgatgcccgctatctgtgttattgagagtgtgcgtgtgtgtgtgtgtgcgtgtgtgtgtgtgtgtgtgtgtgtgttgccaggaagtagaakaaaggactatattcgtatcagagcacttaggacatcactgtggagattggtttattccttcagcctcagtatccttatccgaaaaatgtacataattacacatagggttgtcataagggttaaagtcactctttttcaacaaatttttattgagcacctccttaatatcagacactattctaagtactggaa

SEQ ID NO: 798449 - DNA, 456 bp, Homo sapiens
tgcggctgatcaggcccctgtcgaatggccagagagaagccatctgggatcccttcagtgcccctgtgtgtgggcttggctggcctcatgaaccacacaggggtaggagcacctgatttgccggctgggcattggcctctctgtggctgaagatacaatgcattggtagaaaatgtgaggttcggtaaggccaaagttcatgaaaagaccatagaaagatagtgtgttacagatcccaggaggagggggcacgccatgccaagggggccgcgtggggaagaacggttgggtcaggaggygggggactgaggagctgtgcaagggcctttactgcggtttctgtggaacaggcaagggagggcacgcagggttaggattgtctcgtttggatagtttcagcaggttcggggatgtgagacctgtccctagttatctgttacctggccctgggggatt

SEQ ID NO: 798450 - DNA, 651 bp, Homo sapiens
aacctttcctatttcaactgggggcttgtccgggatcctggaaggtgagtgtgaatgaatgcaaagctgttgggcctgcctctcttccaaaaccctgccatctctctctccgtgggtaagaggctgtgttttccttcaaaaactctgccctaactggccagtcaaaacccccagactttgtctcttttctctctctcacatggtttgaaatggctcttgtgtctttatagcgttaagagtttcactacaggctacagcaatgtcactaagtaaagtaagcatttgactcagctgtcaaaggtgcaaatcagaccaactgttcctagaagtgccatgtatgcctccatctctacagccacaggcactcatggctcagtgcacctctccttatcctttcttctcccagctcgggcacttaggtttgcccacggtagacaaaggctgatcccaacatccacaagtggttgygggagaaagctgtgacagtagccacaaccccacagggccaatggacagggtgcttctcacctgccatgccaatggaaccttttctcccttgtccaaggaattcaacctggtctgaactaggggaaagatataaggattagggggcccacttgcactaagcaagggattcttcccccagaatct

SEQ ID NO: 798451 - DNA, 661 bp, Homo sapiens
gggcaggaccaattcccgctgactaaatctcccaccccatggaaggaggctatgcttcatggaataaacagacccagggaaatcagtgtgccaacagcagggagaaagtgaagcataggtgagggtggttaattcctactctccaggtttccttgcttcaggggtacatactgcagtggtacctatgtccagctcagggataaaggatggggagtggagggaggatgctcactttctccgtcacgcctgggttttcactgaaagaaggaaggaaatgagggacacctctattccctgtctttcagaaggacaaccagttctcttcaccactcccagcttatactcctctggagtgtgtcctgaaccactgctttgaccctccaaatctggaggaaaaktgccttatagcgctctgcacaaaggcttggcctcaagaaggaacaattcattttgatacaatctggcaattggaacttttctgtagatgtgaggacagatggccccatatgtgcaggctttgtataacttgcaagtcaatccagacctttgccgacagtgcaggattgatccagccctcctgtttgctgtctcagggaaggctgcaaggggcaggcccagggaagtaaagatacgagtcccagaggcacctccaggagaggat

SEQ ID NO: 798452 - DNA, 661 bp, Homo sapiens
gggcaggaccaattcccgctgactaaatctcccaccccatggaaggaggctatgcttcatggaataaacagacccagggaaatcagtgtgccaacagcagggagaaagtgaagcataggtgagggtggttaattcctactctccaggtttccttgcttcaggggtacatactgcagtggtacctatgtccagctcagggataaaggatggggagtggagggaggatgctcactttctccgtcacgcctgggttttcactgaaagaaggaaggaaatgagggacacctctattccctgtctttcagaaggacaaccagttctcttcaccactcccagcttatactcctctggagtgtgtcctgaaccactgctttgaccctccaaatctggaggaaaattgcctyatagcgctctgcacaaaggcttggcctcaagaaggaacaattcattttgatacaatctggcaattggaacttttctgtagatgtgaggacagatggccccatatgtgcaggctttgtataacttgcaagtcaatccagacctttgccgacagtgcaggattgatccagccctcctgtttgctgtctcagggaaggctgcaaggggcaggcccagggaagtaaagatacgagtcccagaggcacctccaggagaggat

SEQ ID NO: 798453 - DNA, 414 bp, Homo sapiens
cttacggctggttgggaactgacatacatcacgtccttctgctcacactctgctttcgtctcacgtggccccacacaaagtgcaggaggcctgggcaggagaatttacctgtgagtacctgagaagaggcgaaggccaggcgggatcagccacactcactgtgtgcccaacacatgccgaatgtcargcaggttgcagagatgaacgacgtgggctttctgtgaagatacatctaaaatcaggagccttcatctgagaacaggaattaggttctgtctcttgtcatccttggtttctcaccctcaagaaacctttccgtaaagaattttgaagtttactgttgggaaggaggccacgttgccatgaagtgataagtattctcttgtttttctttagatcttgatggatattgta

SEQ ID NO: 798454 - DNA, 563 bp, Homo sapiens
tcaagggatcccaaataaatatatttatttctaaattcattctaaatgtttgcaatgttaagtatgtgtggcaaaagaacagatacctttcattttttcaatcacctttcaaatattgttacaaaagcacatattactgtgaaatagtcgtaatttcagaaagaaattattcttcattcaacttctcttaagatttttaattaaactttttattttgaaaacattcagaacctacagcaaagttgcaagaatattacaagttaatgattatatgctcttcccctctattctcccaccattgakacttagccatgccaactctctccatctctatattctacacatttacagtgcaattatcaaatttagaaaacttaacattgacacaatgctattatctaatatgtggtgaatattcaaattttgttgatggttacaaaattgccttaaaagcaactttttcccctcaacacaaaatccaatctagggtgatgcgtcgcatttaggtgtcatgtccccttagacttccttaatcaggagcagtccttagcctttctttgttc

SEQ ID NO: 798455 - DNA, 591 bp, Homo sapiens
aagcacaggcacaggccatgcctggatcctaagagttcatgtttctctgtggccagcttagggttagggcttcatgaaagggtacaccaaaagctcctctcaggtttccccttgaagaaatatataaattaagaaactgagaaagcctcacaatgggaaaattgtgactcttccatcacgaatttttcagatctgttgaactgcatgacttccactcagccctgacgttcgtggatgctgacatcgtttttacaagcatttgctgcctggacatagagacaatcattgacatctacatggcatagcccatttttgttccagaaagagccaaagttacgatgttttactcatccatatgtaacctatgtgaaaatagagtatcctaagactgatggagtggactctgtggcaataagatrccaaattataaataagatccaaggccatgcacacgcctctacacttaaacagtaagctctgttctgactgccacaaggttcttcttcttctctagcagctaaacagcactggccacgagataagcaatatcgaaacaattgcagctcatctgctgccggacgctgactagtt

SEQ ID NO: 798456 - DNA, 569 bp, Homo sapiens
ttgttgtgttttttgatcaagatacataattaaattgattacttaagttaaaattaaactcttaaattttaatgtggtctaatttatcaagtgttttctttaatatttgtacatccttgtcttgtataatgaatgtctgtgttctaaatttgtaaagatattttcttacataaacttctaaacattttatgaatttgtcttttatagtcatttattctatctgaaattgatttttaagactggtgtaatatagaaattcacgttcattcttttccatttggataagcagcaacattaattttttaaagttttttgaattgataatacattcacacgcagcaaagtatcaaagcaatgtcaaatggcttacagtgaaaagtcttacttcccctccctcacaacccagttytccacctgtgcacctacagacaacgacttttagtcattattttataaatttccttggcatctctgtgtaagtgcaagaaaacatgaaattatatttccattttccttctttgctagactcctaagaaacttgttttttcacaattcgcagtagaccttgg

SEQ ID NO: 798457 - DNA, 635 bp, Homo sapiens
ggattcgtccttcatccttgacctttgggagtttaattattaaatgccttcaggtagtttgtttgggttaaatctgcttggtgttctatcaatttcttaaacttggatattgatatctttcaatatgtcagttgggaaggtttgggaagttctctgttattatctttttgaataaactttctacctcaatctctttctctgcctcatctttaagccaataactcttaaatttgcctttttgaggctattatatctgatcctgtacatgtgctttattgttttttatttttttttcttttggctcctctaatttttcttttggctcactaattatttcttctgctagatcmatcctattaaaagactgacacattcttcaacattctaattgcattttccaggtccagaatttttgcttgattttttaaaaatatctctgatagaattcttaattccttcttgtgttatcttgaatttctttgagttttctcaacacagctattttgaattgtctttcttaaaggtcacatgtgtctatttctctaggattggtccctggtaccttatttagttcatttgctgaggtcacgttttcctggatggtgttgatgttagtagatgttctttggtgtcta

SEQ ID NO: 798458 - DNA, 582 bp, Homo sapiens
ttgggcctcaccctaaaaaaagggcatgacacacacatctacatgcacacttaaccactcatacagttgtttctaagctgtctcttggctagcttgcttatagaaacctatgccaaatgattggggaaaagtttcttacttcttttgctttatatatataaccttcattccaggctccatgagatatcccatggctggggacagattaggatgaattacagaaagaattcaaatattaccattaagtaatattcagtttctgacattccaaaaatataacttatcaataaaacaatacattatatgcaaaactcttatcttgataaggattctataaattattttaactccattttaagggacagttgtagcagttgacaccttatagttttagataaaataggtacagatgagargaagaaggaaaagtcttgtctttatgaccctgagaaaattgtgagcagaggagaaagagtgattagcagtgcaaaatgagttaatgtgtaaaactttgcttctccaagctttgttcctcaatagaagatactttttgtcctcatgttccctatttgggacactaag

SEQ ID NO: 798459 - DNA, 608 bp, Homo sapiens
tctggttgctccagggttgggtgcagagatgtttaggatagttaagtcttcttgttgaattgagccttttatcactatgtaatgcccttctttgtcttttttgatcattggtgacttaaagtctttttttttttctgaaataaaaacagcaatcccttctcttttttaatttcccatttgcttggtagcttttttctccatccgtttactttgaacctatagatgtctgttcatatgagatgggtatcttgaagacagtgctactgggtcttgcttctttatccaacatgccactctactttttaagtggagcatttagcctgtttatggtcaaggttaatattgatgtgtggattttgttctgtcatcatgttgttaggtggtttttatgcacatttgattttgtasttgctttatagtgttgatgatctatgcacttaagtgtgttgtgtggtagccagtaacagtcttttgtttccatggttagcactctcttaaggacctctggtatgtcagatctgcttcttttagcatttgcttgcctgaaaaggattttatttatctttcacttatgaagcttagtttgactggatataaaattcttgact

SEQ ID NO: 798460 - DNA, 582 bp, Homo sapiens
ctattatctgtttcaaaattccaaggcaggacgcctaacaattgcaccttgtggaagatgtgctgatgtgaaatcctgcaggattccagggctactatctgtcaatgcttgggtttaagtcagcagcagcttcttcccttgagcattagcacaagaatgacttgtcttatgtattttcaatggatgcaaatgtcaaccttatcaccaaggaagacatatggtacccagttctggaaagtgaattctatttcataatgagttcaaatctccctctgagatcagaacttggtgcagggaaaagcagaggtaaacatgctgagagggctgtctcaatgccctgtgcagtgcctggacctgcttgaaaatgtcagttttcagaacrtttctgcaagtagcttttacaaaaatgtgttgctaaaataaaagatatgggagaaaataatctttatttttggcaaagaaaatcatataattaaggatcatccatttattctgaaagtgtcttttgttttcttcccacatttctttgaaatgtgcaggagaaaattgccagtagaaaaagtttagctaatataattacca

SEQ ID NO: 798461 - DNA, 546 bp, Homo sapiens
tatgaaacaagcagactgagaaagtgttacacacacaagggtaaataaaatccttgacctgaaggttagttggagtggtgatgggagtcctttccaaagagaatgggaacttccaatttgaatccatgcagtaagttggcatataaaaagwtaagacttcccagtctaccaagttcagggtctgagaaacatccttggatctttcattgttctcattaaacatccaaatgaagaaagaattcatttctctcaaggttacatgtaagagcctagttccccttctcctttaccttgacaggctgcatggcttcattaagtaatacaactctgcttgcaactgcattgacttcagcatatcagataagcatgtttctaataatgagaaatatcatccctttcattaattctttcattcattcagcaaagatgtattgaacacttgctatgagccatataggttgtgctctcttattcctattatcaccccttaaagatgaagatggtttaaaaatgctgatcactggtccttcctgccatctgtgttgc

SEQ ID NO: 798462 - DNA, 631 bp, Homo sapiens
cttgacttcggtggggaaattgtttctccaagccataatgtcttggatctgttgagcatttccccataccatttccccaactaggccaaggtctggctttcctattcattctcaggaattacctgttgccctttacctctgaataaggcaacttttggggtcaagaagactcatcctctgccttcargaagcttccaatccagttgaggaggctagacctagtgaagagaagatgaggaggtgctaagtgggtgctaaagacatgttaccgcttcagttatttcgggaaccattactgagcacttcacttaactcaggatcatactctgccacgcttcaattccttactctcaaacatttcctttcttaccatgattttataaaagatatctcctattttaatgcatagttgcttcactctcctctttagtagattctgtatctactgcagatctcttaaatctgcacaacaacctaactaaactgccgcatctccaagagaaagccctatgactagttagttcctctatgctttctgccacttgtggaactattcaggcagatggttgagattcaggtccaaggaatttttccatcatgtgagacttttttgtgcccgagaaaaattcag

SEQ ID NO: 798463 - DNA, 575 bp, Homo sapiens
aaatggttcccatgtttcagcatgctacacatgtgaaggcaggtagggaaaacactgcagggcttggcctccattgcacagaaggaatctgaaattcaaagaagatgccatttctccagcttgggtccagatgaggattcagaatataactcaaggctttcaaaagatgattcatgggttggaggaattacagtgtgrtatttttgaagcgggtggagaagcagtaaattcccatcatctcattgattccaaactagtattctcatggttggaacctagaaacatgatagcaggtaaattattctctttttagatgatagggaagaaagccttctgaaaatattagttttcaatattttcaataaaagacaattatttatttcacagtaggaaaacaaatatagcaattgctcagtataaatttttagtagagcctatgttatactctgatttttatagtaccatttccctttctgtaaaactggaataaggttatttgccttacctcctttgcaagattcctagtaggatcaaataggataacagatgaggaattacttaagaaactataaaga

SEQ ID NO: 798464 - DNA, 575 bp, Homo sapiens
aaatggttcccatgtttcagcatgctacacatgtgaaggcaggtagggaaaacactgcagggcttggcctccattgcacagaaggaatctgaaattcaaagaagatgccatttctccagcttgggtccagatgaggattcagaatataactcaaggctttcaaaagatgattcatgggttggaggaattacagtgtggtatttttgaagcgggtggagaagcmgtaaattcccatcatctcattgattccaaactagtattctcatggttggaacctagaaacatgatagcaggtaaattattctctttttagatgatagggaagaaagccttctgaaaatattagttttcaatattttcaataaaagacaattatttatttcacagtaggaaaacaaatatagcaattgctcagtataaatttttagtagagcctatgttatactctgatttttatagtaccatttccctttctgtaaaactggaataaggttatttgccttacctcctttgcaagattcctagtaggatcaaataggataacagatgaggaattacttaagaaactataaaga

SEQ ID NO: 798465 - DNA, 621 bp, Homo sapiens
gcatgttaattacatgaggtcaccaaaatattggaggcatgagatcctattctaaaagtaaagactctaacatagtaactgaaataatgaattgaggcacagtttttattaaacaatgataggagatacacctgttaacaaaaaaaaataaaagaaattctaagactatattttatgactgggtgatctaatttgaatatatgtccctgccaaatctcatggtgaattgtaatccccagtgttggagctggggccttgtgggaggtgtttgggtcayggagatgaatccctcgtggcttggtgctgttctcatgatagtgaaagagttctcacaagatctggttgtttaagtgtatggttccttcccctgctcccaacacacacacacacacacacacacacacacacacacacacacacacacacacactctttctcgctcctgcttttgctgtgtgacatgcctgctcctgctttgcctttttccatgagtaaaagttccctgaggcctctgtagaagctgagcagatgcggggccatgcttgtatagcctgcagaaatgtgagccaattaaacctctattctttataaattatccagtctcaagtatttctttatagg

SEQ ID NO: 798466 - DNA, 576 bp, Homo sapiens
tgtacagtggagataataaaacattaacttgaagggctgttgtgagcatttagaaatatacataaagatgcctaactgtatattgcacacagaaaccattcatgtttgttaaataaatgggtaactattcttatgagcaaatacatatattttatgaagcactgtttatcataatatgcctttatcacacaccttgccccatttatgattttgattatggaaagttttgacattattgtcagttggtgagcaatcaaastggagcgataatcttaatatgtagtacaaggcaccatgaaaaggaaatgcaaattacaaaaattggttttagccacaatttcaggaatgtataccgtatttgtttgttttcatgctgctgataaagacatacacgagactgggtaatttttaaagaaaaagaggtttaatggactcacagttccaagtggctgggtaggcctcccaatcatggcagaagatgaaaggcatgtcttacatggtggcaggcaagacagaatgagaatcaagtgaaaggggaaaccccttataaaaccatcagatctcgtgagacttatt

SEQ ID NO: 798467 - DNA, 560 bp, Homo sapiens
aatttgggtggggacacagccaaaccatatcacataccttgtctaaaaagaggctcgctgaccaaagaagatattaaaatggtgagtaagcatattagaaggagtccaacattataygtcattaggaagttgcaaattaaaataacaatgaagtatctcattgttgcaaattaaactacacacctttgaacaaagtcccaaacactgacaacatcaaatgctgatgaggatatggagcagcaggaatgctcattcattgctgatgggaatgcaaaatggatagccacttatgcagtttggcaatttcttacaaaactaaacatgcccttactatatgatccatctagcatgctctttggcatttactcaaatgaaaacttatgtccatacagaaacctgcatatagatgtttatagcagctttctcataactgccaaaacttggaagcaaccacatgtccttcagtagttggatggataaataaacggtggtatgtccagacaatggaatattattcagcactaaaaagaaatgagctatcaagccatgaagagacaggg

SEQ ID NO: 798468 - DNA, 514 bp, Homo sapiens
cgtttatattaactaaggagattaggttttgaattattaaatttgttcatgtaacagttcttaggaagtgatccaaaacatagcatacatattatgatacaagtgagatgatctggaaaagggttttagatgttatttttcatcttcaaagaaaaagttacatttcaaaatgtctttgaagaagacttattgtggttttaaaaatccaagaatttttagagttgggaaggtcaataatgcttatcaacttcaatgttcctccccacccatatatcacccccaccttatgatgcctgagtttctcctatgcactcyttctgtcttcaagccagtcaaggaacaagcattttgtctccatttaaaagtgttttagaaatcttaagccccacctcagacctactgattgagaatcggcattcaatcaggtccctaggtaattcaaacatacatgagagctaaagcagtgcactggcttctcagccttaatcacacatttgaatcaccagagaagctt

SEQ ID NO: 798469 - DNA, 446 bp, Homo sapiens
ttctatcagcacctactatatgtcaggcacataaaaacaaatggcatagacactgttgtcaagaagcctgcaatacagtgaagaatattatgcactttgtaatattcaatgtgacatggaattaaagagaatggagctcaggctgggtgcggtggctcactccagtagtcccagcaktttgggaggctgagatgggcagatcacttgagcccaggagttcgagaccagcctgggtaacacggcaagacccgatctccacagaaaatataaaaattagcatgcacctgtagtcccagctactcaagaggctgaggtgggaggattgcttgagcctaggaggttgaggctgcaataaaccaagatggcaccactgcactccagcctgggtaacatagtaagactttgtctttaaaaaaaaaaaaaaaaaaaaaaaaaaaaacccagct

SEQ ID NO: 798470 - DNA, 446 bp, Homo sapiens
ttctatcagcacctactatatgtcaggcacataaaaacaaatggcatagacactgttgtcaagaagcctgcaatacagtgaagaatattatgcactttgtaatattcaatgtgacatggaattaaagagaatggagctcaggctgggtgcggtggctcactccagtagtcccagcattttgggaggctgagatgggcagatcacttgagcccaggagttcgagaccagcctgggtaacayggcaagacccgatctccacagaaaatataaaaattagcatgcacctgtagtcccagctactcaagaggctgaggtgggaggattgcttgagcctaggaggttgaggctgcaataaaccaagatggcaccactgcactccagcctgggtaacatagtaagactttgtctttaaaaaaaaaaaaaaaaaaaaaaaaaaaaacccagct

SEQ ID NO: 798471 - DNA, 582 bp, Homo sapiens
ctccacagaaaatataaaaattagcatgcacctgtagtcccagctactcaagaggctgaggtgggaggattgcttgagcctaggaggttgaggctgcaataaaccaagatggcaccactgcactccagcctgggtaacatagtaagactttgtctttaaaaaaaaaaaaaaaaaaaaaaaaaaaaacccagctcattggacttaaaggggagagaaggaaaaaaaaaaaaaaacaacaccaacaacaacaaaaaacttcactgagagagaatgctggagccgaccctgaggaagagtagttagttgaccagtagacagcaggacaagaaggtagcccgttccaataataagagcctggagcaaaagcttcatgaaagctggtgaggactggaactgtgagaattgccagaaaatacagcaagcataawagtgtggaagttgggagtggtttgtgaagagaaaaatcctagtcaggcaagctggcagaagagtccaaaacaaaggaaaaactaagctcttttaagtggtaagaaaatgttttttaaaagggggagagaagaaattcatttcttgtctgtgagc

SEQ ID NO: 798472 - DNA, 621 bp, Homo sapiens
ctctaaaaacaaaaaatttttttttttttttttttttttttgaggcagagtctcgctctgtcgcccaggctggaatgcagtggcgtgatctcggctcactgcaagctctgcctcccgggctcacgccattctcctgcctcagcctgccgagtagctgggactacaggcgcctgctaccacgcccggctaatttttttgtatttttagtagagacagggttttaccatgttagccaggatgatctcgatctcctgaccttgtgatttgcccccctcggccttccatattgctgggattacaggcgtgagccactgcgcctggccaacaaaaataattttttattttaaattattttttaattttaattttaatttattttgagacggagtctcggtctgtcaccaggctggagtgcagtggtgtgatcttgtgatctcggctcactatagcctctgccrggactgcctcccgggttgaagcgattctcctgcctcagcctccagagtagctgggattacaggtgcccaccaccatgcgcagcttttttatggtttttttttttttagacagagtcttgctctttcaccaggctggagtgcagtggcgtgatcttggctcact

SEQ ID NO: 798473 - DNA, 463 bp, Homo sapiens
atagggcatttttaagaacataacttgccactgataatatcacacttaaggaaattagtaatttcataatatctaatatctagtccatatttcaaatttcctcattgctctaagaatgccttttataacttgctttaaaaagatctaaataatcaaggtttgtgtactgtatctatgaatagtttagatatatgcttctttgacttcttaatctagaatagtctttcatattttaaaactatcagtgactttttgaaatgtttagggcactccascatgtgaagcacctcacattttgtgtttgtaaaatatttttctacaaccctttagtattggttatctattgctgcttaataaatgaccccagaactttgtggattaaaatagcacatattatctcaaatgttctgtggttcaggaatcctaacacagcttaggtggatcctcttgaggctgtaaagta

SEQ ID NO: 798474 - DNA, 610 bp, Homo sapiens
aaaaagaaaaaaagattttcctgtacttgctttatcacattatctatattatctattcattcatccattcctctatctacctatcaatccatcttacttcttggtgcatttcaaggtaaattgtgacacctgtacacttccccctaaatatttcagcactcatatcattaactagagttcaatatttcttaatagttttctcttttaatgtaaaatacaatratgtttacaaatctgggtgtacattcactcagtttgacaaatgcatacacctgtgtaacccaagcctctatcacaataattattcagcattgccattaccccactaacttacctcatgtcccttcccagtccttttctgctcctacccaccccccttcttccaggaaacaattcttctatcttttccccctatattagttatgcctgtcctagaactgaatataaatggaatcaaataatatgtgctttcttgagtaaagcttctttcattcagtataatttttaaatattttctgaaaagttgagtgaacagtttcttaggaaaaatgtataatcaaaaattttaaaaattttcaaatatttaccttaaaaaggcatggagtctaga

SEQ ID NO: 798475 - DNA, 537 bp, Homo sapiens
ggcagctccagaattattaggaacccagacctcttatgtgttgcactgccgtcctcaacacccagctttcaactcatggtacaagatgggctgctgtggctccagctatcatgtccaacatccagccagcaggaaggagaatgggagagaagagggacacaattaaaccttcttttaagggatgctctctagaagttgcgcatgcaactgacatttacatcccattgaccagaccttagtcacctgagtacacctagctatgagaacagctgggaaaggtgggcaaccatgtattttggctgaaaatgagcagtctcaatactgcagaggaaatggagatgggctattaggagacaagtagcaggctgtgctacatcartttgtaattcagattattttatgggtctttgcaaatcactttaagttctgtccacactggggaaagggtggttataagtaaatgaatgaataaataagtttaaattccttaggaggaggatggatcctgttactccttctgtttaacgtgagtctgca

SEQ ID NO: 798476 - DNA, 692 bp, Homo sapiens
gaagcctggaccacttctaattttctgagactttaaaaatggagaaagccaacacaaggttaccaaaatagcagtatatataatatatattgtttgcatttaaatatttagtgcttttaacacaaaaattcaaggtaattttgaattcatcaaatagtaagatttctttacaataataattcatgatagaagatatagtccagaaatggaacagagctttaaaattgtatgatgggcctaaagttccagccctgttggtgtatctatctctaaatgtacattaacatcatttggagatgatgtcaaagatctaaatttgagattcttcctgagagtgaagtctgagccagacagctctcctagtctacactagaataaactctgttgttaaatatagtcatatgtcacttcatgatggggatatatggtgcatagtcaggcgattgtgttgtttaggagcatcatagaaagaacttayacaaacctagctggtagagcctactacacacttaggctgtatggtacagcctattgagcctaggctgcaaacctgtacagcatgttacatactgattactacaggcacctgtaactcaatggttaagtatttgtatgtctaaacacagaaaagatccagtaaaaatctggtataaaagataaaaaatggtacacctgtataaggcacttatcat

SEQ ID NO: 798477 - DNA, 622 bp, Homo sapiens
cattcttcactgagaggtggaacttattccaccaccttaatgaatctaggctggcccgtgacttgctcttgaccaatagaatatggtggaactgacatagtttaacctccaaatcataagaagccttgcagcttctgttgggtctcctggaatattccctcttggggaaatgcacggaccacctactaccagtccaactactttgagaccaccatactgcataggaaacccagcctagccatgtggagaggatgcttgaggatagatgctcaagcagcccscagcttttccagcctatacatgagacatgagagtggagaaaccttctgatatggtttggatatttgcctcctcaaaatctcatgttgaaatgtgatcccaatgttgaatgtgggagatgttgggtcatgggggtggatccctcatgaatggctatgaatattatatataatatataattatgtaatatatataatatatattatatactctattttatatatactatatataaatactccaatctattttttatacatataaaaatatatatatataaaatatatatatatacaatagattggagaaatcaaggtaggcttcaagttcacaaggggctgtt

SEQ ID NO: 798478 - DNA, 612 bp, Homo sapiens
ctgtgacttggctggcgaaggttctccatgtgggtacagggatggaaggggcagtatgggggattttgcaaagacaaaactgacctggcggatagaagctgtttagtttactaacttctttccccctactggtgtgacatgtgcagcaagtcaggtgactgagagtgtctgtgggaagagggtattagtgtcctagagtgaagagtcactgcagtaggaagatggaaaatgcagcaagggattgggaaatagagggagaaaacttctcctgaggctaatggtttctctagtgctgtgcaaatgtcctttcaagactctggaaaaatgcggccaggcgtggtggctcatgcctgtaatcccagcactttgggagactgaggtgggcrgatcacctgaggtcaggagtttgagaccagcctggccaacatggtgaaaccctgtctctgctaaaaatacaaaaattagccaggcgtggtggcggatgcctgtaatcccagctactcgggaggctgaggcaggagaatcgcttgaacccgggaggtggaggttgcagtgagcctatattgcgccactgcaataaaggcaggggtaaatttcaggaaagcagaaatt

SEQ ID NO: 798479 - DNA, 621 bp, Homo sapiens
gtgagccagtgaaagcttttgaatatgagagtggcatgctaactgctgtattttaggaagcctaacctaaaagcaccccatagtgtgtgttgcagagagaaaatattggaagcaagagactgatacagaacttactgaagtaatccataggaaaatggaggtgcatctctgacaatggagggaagagcttaatggtgattgaaaactgggaaggcagagcacttctttggaggttgtgttcccatagcatacacaagaatataacttagattttatgcttttgtgggggtggttttgagcatactaacagataaccaagtagaggtttcagatcaattgaaggagtaataaagaggagtttgtctaagaaagtagcaacaaaactgaaagactttgtaagtstgaagttgaaatcaccaattcatctgttttctgcctttgaatgccatctttctttactgtttgctacttggccacgtccaaaatttcttacctgatctctggtatgtctattcaagaaaggttttcatcacatcgtttttcttctgtgacattgaggatgaatggatccagttcagctagcaaagaaaaagaagtgctctgtcttttacagggctgttg

SEQ ID NO: 798480 - DNA, 503 bp, Homo sapiens
agtttatgcattaaacagtagatataaaagacttctactacctacctacatatgtctgcaagataaaggttgtccaggctcagaagagagctcaagaggcagcaatatctaaaatattagcatggcctttaatatggsttctatacactgtgtcacttatccaataaaagcctcagatgggtttggaacacagagaggacctctgactaaaggggagtctgggaggcagcaagcctcacagagttgtccacaccactctgtgtgaggcgcaatcctgtagaagtatctataggatgtttcactgcactagcaagagtgaagcaagtctggcagagaaaactgcacacacaattgctttcacaggaaggcagggaggatgcagtagcttcaacatagaccagtgctggccaggatgcagatgttgtcagtggacacaataacatggaaaggtgagaagatcagctgctccctgccaccagtgcctccagaacttaaatccaagc

SEQ ID NO: 798481 - DNA, 520 bp, Homo sapiens
ttctagtgcctacatttcctatgagccccagttgtgcatagcagaaaatacggaagcatctaggaaaacctaggggcaggaggggctgggagggaataaggcctttcaaggtgtttaaagaagagacaaagatgaagaagcaggcatagtttctgaagasgttttttggtgtttgttgttgtttgcatttacctaattagttctcaactgcagaggcacattagaatattctggggaatttttaaaatacgactgcatgggccacctgtcatatacactgatgtaattggcttgagttggggcctaggtctctctctctctctctctctctctctctgtttctctctctctctctctctctctatatatatatatatatcctgttttgtatatatctaagtatctgtagatatatacagaacaggggataccagtgtgtacctaccattgaaatcaattgttttcaagtctttttaggtcttattctcagatggtcttgggtaaatggtggctgattgcc

SEQ ID NO: 798482 - DNA, 520 bp, Homo sapiens
ttctagtgcctacatttcctatgagccccagttgtgcatagcagaaaatacggaagcatctaggaaaacctaggggcaggaggggctgggagggaataaggcctttcaaggtgtttaaagaagagacaaagatgaagaagcaggcatagtttctgaagagrttttttggtgtttgttgttgtttgcatttacctaattagttctcaactgcagaggcacattagaatattctggggaatttttaaaatacgactgcatgggccacctgtcatatacactgatgtaattggcttgagttggggcctaggtctctctctctctctctctctctctctctgtttctctctctctctctctctctctatatatatatatatatcctgttttgtatatatctaagtatctgtagatatatacagaacaggggataccagtgtgtacctaccattgaaatcaattgttttcaagtctttttaggtcttattctcagatggtcttgggtaaatggtggctgattgcc

SEQ ID NO: 798483 - DNA, 625 bp, Homo sapiens
ttgagattttgtttttggtttattgctcaaccagtatctgagggaagtattatttaattgtggcaaaatacaacataaaatgacaattttaaccatttttaaatacaattcagtagtgttaagtgtattcgcattcagaacacaaccagtctccacaactttttcatcttgtgaaacagaaactacatccattaaataacttgtcccctccccacagtgagagaggtattttaaactgtctctctggaatatctgttcacttatcatgattttgtcaacttttacatcatatggattgaggctttttatatgcataaaggtgaaytttattattacttcttactttataataatgtattattttaagcattttaagtacttacaaagctgattatgtatatttagtctctaaatacctgcaaggaataagtatagtgctttatttctaaggagaaatttctgttttcacctagagaatagcaaagttccctatcctttctctctttaaaaaaatcagtctactgtttgaatgtgccctattttctatgtgctggctgggtgcaggcatctctattcccattcattatatcacaaaggtcaaaggctttatctctgatatgtgcaa

SEQ ID NO: 798484 - DNA, 565 bp, Homo sapiens
aaacaagtaatttgccaagagtcagttttccttggattcgtacattccaattcccctgccaccaccccacacagacatgttcacatttgccaccactctctcactgcctgcaatgagatctagttagccagagatgtttttcaggctttttcagatattatgttcatgttttgacttgccatgtagcatagttaaggaggcctggctttgttttcctactgtgaaaggtttggagagtttgatgtcccactgggctgaatgaatgacagtcaattcaactttcttcctcatgtaggtatgcataagtgacttctcaactattagaaagttacttttaagtaggattcacttgagtaataaccaccttaatatttctcttcttctcttaaaaggaagagaaayatttgccatataaaatactgtatatcttatttcaatataaatagcaaattgatttttattattcatatgcaatactaaagacccccagcaacatttcgaatcagagtttcacatgaaatatgtaaaattgccaaacttgaactgaaaggcatcttaatttcat

SEQ ID NO: 798485 - DNA, 552 bp, Homo sapiens
tcatgtaggtatgcataagtgacttctcaactattagaaagttacttttaagtaggattcacttgagtaataaccaccttaatatttctcttcttctcttaaaaggaagagaaacatttgccatataaaatactgtatatcttatttcaatataaatagcaaattgatttttattattcatatgcaatactaaagacccccagcaacatttcgaatcagagtttcacatgaaatatgtaaaattgccaaacttgaactgaaaggcatcttaatttcatcattgaaatggtaacttttgcaataaatattttgaatattactgaaaaataagagaatgaaaggcggagggcatgtcatttttttatgtgtagcttgaacactgcsatgatccacctcattgccataatatttttataatttaattttctcattaactctcattcactatgaaaaatatttgccatgttgcacaaggataaccaaaagatattcctcagagaaggcacacagataaatcagtaagcttggagctcatgtctgttatgtagattt

SEQ ID NO: 798486 - DNA, 629 bp, Homo sapiens
gctctaaagctaaattttcaccaaaatctcagttgagataagtaacatttaaggattatttggaagaataggctccactgatttctgtaataaccagagatttaatactggattaatccagaccatcatataactccatactcaagccatattgtcttgattgcccaagaaattgcttttaagaaactgttatatatttattgtccaaaacgtgtttattatagggttattgttgaaracaatgtcccctttatcgcttggtgactccaattaaaggccccaataaacattgctctcagacttgattttgacaacaaaacctgtcacataaaatactgaaagtatgaatgttagaattcttttttatttccgggaagctgagatacaaatacagaaccaaaattcagtgacatagatctttatcatatcttgcatggtcctctgaaataggaagaaaacattaaattttaacttttgactttagggtaaaaaaatcacttttatacaaatcaaaaacaaacaagaaaagaaccccatacaaattataaagataaaggccgacaaaattgaccataataaaataaaatttctgtgcaacaagacactaggaataaaagtttgtaagaaaa

SEQ ID NO: 798487 - DNA, 620 bp, Homo sapiens
tttttatgccagtaccgtactattttaattactatagctttataatttagtttggaataaggtaatgtgatgcttccacttttgttttttctgctcaatgatgttttgactgtttggggtctgttgcacacagattttagaattgcttttttccatttctttgaaaaatgccactgaaattttgataggggttgcattatatctgtagatcacactgagtaatagagattcttttatcttcaaattctttcatcagtgttttatagtttttggtatatagaaattttactttctgatttaaatttattcctaagttaattttttgatgctattgtaaatgagattgtgttctttcagatggactctcgctctgtcacctaggctggagtgcagtggcrtgatctcagctcactgcaagctctgcctcccaggttcacaccattctcctgcctcagcctcccaagtacaggtggctgccaccatgcccggctaattttttgtatttttagtagagatggggtttcactgtgttagccaggatggtctcgatctcctaacctcatgatccacctgcctcagcttcccaaattgctgggattacaggcgtgagccaccgcgca

SEQ ID NO: 798488 - DNA, 599 bp, Homo sapiens
caggtcacctcttgaatgctttgctgcttagaaattttttctgccatataccctgaatcatctttcaagttcaaagttccacagatctctagggcagggtcaaaatgccaccaatctctgctaaagcatagtaagagtttccaataagttcttcatctccatctgagaccacctcagtctgcatttcgttgtccatatcactatcagcattttggtcaaaaccattcaacaaatctctaggaagttctaaacttttctatrtcttcctgtcttcttctaagtctcccagctgttccaacctctgccccttacccagttccaaaattgcttccacattttcagatatcttcatagcagtgccccactctcgtggtaccaatgttctgtattagtctgttttcacattgctataacgaactacctgaggatgggtaatttgtgaagaaaagaggtttaattgacttgcagttctgcaggctttacagaaagcatgactggtatgcctcaggaaacttacaatcatggaggaaggtgaaggggaagcaagtatttcttaccatggtggagcatgagagagagggaatgaagggggaagtgct

SEQ ID NO: 798489 - DNA, 398 bp, Homo sapiens
aaaatgtattttaaaatatgtaagaataaatttaaccaaagaggtaaaaactcctctacaaggaaaactacaaaacagtgatgagaaggcagagccaagatggccaactagattcaaccaggaagagcttcttgcaccaagagagactagaccatcaaatagaccagcacactcgaacagttctttggaaagaaggcagtgagagttgacagaggaaggacacagaccctggggctgaaagaggaggaagctsgaacaatgcatggggttgctgagcaccaggacttgctcctggccccaaacagctcctagggaaggggtaagttttataggtgtgaagtggcccactctcaccatggacctctgggatcctcactgtgggagaccccatgatctcc

SEQ ID NO: 798490 - DNA, 577 bp, Homo sapiens
aggcatgagcaaaagtaggaggaacctctgacccaggctcctgctaggggccaactgagttagaaaattagacaggcagagaatgctttccttctgagatgggggcaggggatggaagggcatgccggcagcagaaagtgtggccaaaggagaggtctttagaggttaccaattgtgcaggccaagttgctgggggaaggtgaatgagctgacacacgagggagatgatgggaagctgtgagctgctcctgcaaaagtgaccataactggatctgtgctgcagcaggaaagagctggaactagccaactccagactggagaccctgctctgccccctcaactgggtctgtgagttgaagcaktgccttgtggaggggaaagtgggctttggtcacacagagttggacgcaattcttggttctgccactgaatagctgtgtgattacagacaggtgactttgctttccccaagtcccacataaattcaggtatagtaatattataaaccccatatggttgtttttaggatgaaattaattcattctgcaaaatgactataattttacacagttaagag

SEQ ID NO: 798491 - DNA, 577 bp, Homo sapiens
aggcatgagcaaaagtaggaggaacctctgacccaggctcctgctaggggccaactgagttagaaaattagacaggcagagaatgctttccttctgagatgggggcaggggatggaagggcatgccggcagcagaaagtgtggccaaaggagaggtctttagaggttaccaattgtgcaggccaagttgctgggggaaggtgaatgagctgacacacgagggagatgatgggaagctgtgagctgctcctgcaaaagtgaccataactggatctgtgctgcagcaggaaagagctggaactagccaactccagactggagaccctgctctgccccctcaactgggtctgtgagttgaagcattgccttgtggaggggaaagtgggctttggtcacacagagttggacgcaattcttggttctgccactgaatagcygtgtgattacagacaggtgactttgctttccccaagtcccacataaattcaggtatagtaatattataaaccccatatggttgtttttaggatgaaattaattcattctgcaaaatgactataattttacacagttaagag

SEQ ID NO: 798492 - DNA, 663 bp, Homo sapiens
agtgggcagtaggccacatggtatggtccattagttgtggccccctactctgatgctgaccaaagctggaacaaccagtttctttttcttcagtatttgtaatttggactaaaaaattccaatgtctgttggatgacaatattgakccaggggtcaaggacaccatattggactatctattttctgctgtgtacatagagaagcagacaggggagggagatgatgaatcagcaaacatggagaaaagcagagggaaacggagaaggagagacagatggtgagaaagataaaaagatggggagatcaagaaagcataactaactccattgataacagcgtctcagttcctgattccagcccttgtgagagctggcagtacttcctgcccttgaaacacatatcactacatctttccaacagtttctggcttaatgaagtcagcttacctgagttactattaccacccaccacatacacctggttatgacacactgtgagaaacattacctttccatttcacagattaaataactgatccttggtgagttccactatcttttagtcaaagattggaactagaaattgaaagcagacctttggattctaatatactgccctatgcttaaaacctaacccagagctaaacccctagtaggtcttcaa

SEQ ID NO: 798493 - DNA, 668 bp, Homo sapiens
cattaatctatccatgagggatccacccctatgactttaacacttcccgctaggccctacctcccaacactgccacatcaaaactcgaattacaacatgagttttggcaggaacaaactacatccaaactatagcaattatgtagactaaatgatttacagtaaaggttttgatttctgtaagtctgttgaaagtgtacctactagtatctctaactattattaggtctaattgtgtgcttggatttttctatttagacaatcctatcatgtcgaatgttgaaaattttgtgaccagatgtggtggctcacgcctgtaatcccagcactttgggagacgagggcaggtgaatcacatgaggccaggagttcaagacagcctggccaacatggtgaaaccgtatctctactaaaaatacaaaaattagccaagcgtggtggtgcacgtctgtaatcccaactgtttgggaagctgaagcataagaatcacttgaactggggaggcagaggttccagtgagccaagatcrcaccactgtactccagcttggttgacagaataagactctgtctcagaaaaaaaaaaaaaaagaaaagaaaattatgcctcttctttttcattcctatgcctttttgttttccttgtcttactgcattagctagaacttct

SEQ ID NO: 798494 - DNA, 639 bp, Homo sapiens
ataagaaagttatgttttagggggctttaagatggctggctagaggcatctggcactcacctcccccacaaaacaaaccccaaaatagtaagtaggtaatcacacttcacatagatcacctaaggcagaacagtggaattcagcagagaagtgacaggaaacactaaggcatagaaggagagagaagcaaggcagccagctgggccaggattgggtgggagactggagaggctcctygatgcaaggaaagggtgagtaaaagattcacagtgatccaaattcccaccacagactcatgcctggagtttgggcgatggcattgctccagagagggagctcatgctagggggagctcatgctaggtcccacatccccctaccaaacccaagcagctgtatagcgccatcctgacagtccagaccctacaacattgcatcttgccctggggtctaacagcccctgcacctctatatccctgaatccccactgatataccctccacatccacctggaggactacagtggtgccattgcccattggacccagcagtgtggcagggacctcaacactgcagcccacacaatgtcctactgggaacaggtggtgcagcacaccagggaggctgctccagacaaagg

SEQ ID NO: 798495 - DNA, 639 bp, Homo sapiens
ataagaaagttatgttttagggggctttaagatggctggctagaggcatctggcactcacctcccccacaaaacaaaccccaaaatagtaagtaggtaatcacacttcacatagatcacctaaggcagaacagtggaattcagcagagaagtgacaggaaacactaaggcatagaaggagagagaagcaaggcagccagctgggccaggattgggtgggagactggagaggctccttgatgcaaggaaagggtgagtaaaagattcacagtgatccaaattcccaccacagactcatgcctggagtttgggcgatggcattgctccagagagggagctcatgctagggggagctcatgctaggtcccacatycccctaccaaacccaagcagctgtatagcgccatcctgacagtccagaccctacaacattgcatcttgccctggggtctaacagcccctgcacctctatatccctgaatccccactgatataccctccacatccacctggaggactacagtggtgccattgcccattggacccagcagtgtggcagggacctcaacactgcagcccacacaatgtcctactgggaacaggtggtgcagcacaccagggaggctgctccagacaaagg

SEQ ID NO: 798496 - DNA, 662 bp, Homo sapiens
aatattttaaacctttttgtaattattatatctgttttggtcatctgtggtcggtgatcttttttgttaccattgtaattgtttgggggcaccacaaaaatatgcataaaaatggcaaacttaatcataaatgttgatttattttatgttcagttttttctgacagctccatcaactggctgtttcccatcactctctctcttctcagacctccctatttcctgagaagcaacaatattcaaatcaggccaattaataaccccaaaataacctctaagtgttcaagttaaagaaagagtcacacatctctcactttagcagaaaatctagaaatgattaagcttagtgaggaaagcatgttgaatgctgagataggctgaaagctgggcctcttgcaccaaaygcttagctaagttgtgaatgcaaagaaaaggttcttgaaggaaatcagatgtgctattccactgaatacaagagtgataagaaagtaaaacagacttattgctggtatggagaaagtttgagtggtctggatagagaccctagggcctatttctttagagaattagcaaggccctaactctcttcataggaaacttgagagaggtgaggaagctgcagaagaaaagctagaagctaacagaagatggtttatgatgttt

SEQ ID NO: 798497 - DNA, 499 bp, Homo sapiens
cagttttttctgacagctccatcaactggctgtttcccatcactctctctcttctcagacctccctatttcctgagaagcaacaatattcaaatcaggccaattaataaccccaaaataacctctaagtgttcaagttaaagaaagagtcacacatctctcactttagcagaaaatctagaaatgattaagcttagtgaggaaagcatgttgaatgctgagataggctgaaagctgggcctcttgcaccaaacgcttagctaagttgtgaatgcaaagaaaaggttcttgaargaaatcagatgtgctattccactgaatacaagagtgataagaaagtaaaacagacttattgctggtatggagaaagtttgagtggtctggatagagaccctagggcctatttctttagagaattagcaaggccctaactctcttcataggaaacttgagagaggtgaggaagctgcagaagaaaagctagaagctaacagaagatg

SEQ ID NO: 798498 - DNA, 662 bp, Homo sapiens
aatattttaaacctttttgtaattattatatctgttttggtcatctgtggtcggtgatcttttttgttaccattgtaattgtttgggggcaccacaaaaatatgcataaaaatggcaaacttaatcataaatgttgatttattttatgttcagttttttctgacagctccatcaactggctgtttcccatcactctctctcttctcagacctccctatttcctgagaagcaacaatattcaaatcaggccaattaataaccccaaaataacctctaagtgttcaagttaaagaaagagtcacacatctctcactttagcagaaaatctagaaatgattaagcttagtgaggaaagcatgttgaatgctgagataggctgaaagctgggcctcttgcaccaaacgcttagctaagttgtgaatgcaaagaaaaggttcttgaaggaartcagatgtgctattccactgaatacaagagtgataagaaagtaaaacagacttattgctggtatggagaaagtttgagtggtctggatagagaccctagggcctatttctttagagaattagcaaggccctaactctcttcataggaaacttgagagaggtgaggaagctgcagaagaaaagctagaagctaacagaagatggtttatgatgttt

SEQ ID NO: 798499 - DNA, 563 bp, Homo sapiens
agagaggtgaggaagctgcagaagaaaagctagaagctaacagaagatggtttatgatgtttgaggagagaagccatttccataacataaaagttcaaggtgaatcagtaagtgcttctgtggaagctgcagtaaattatccagaagatctggctaaggtaatggatgaaggtggctacacaaaacagcagattttcaatgtacacaaaacagccttctactggaagaagatgccatgtaggactttcatagctagagaagagaaatcwctgactagtttcaaagcttcaaaggactttctgactttcttgttaggggctaatgcagccggtgactttaagttgaatcaatgctcatctaccattctgatgatctaagggcctttaagaaatatgctaaatgtactctgcatgagatctatacatgaaacaacatagcctgggggatggcacatctgtttatagcctggtttactgaatattttatgcctgctattaagacctactgctcagaaaaaaaaacttttaaaaaatattactgctctttgacaacacatctggtta

SEQ ID NO: 798500 - DNA, 590 bp, Homo sapiens
atacaacaaatagccctagtcccatatatttgataacatatggataaatttcttgaaagatacaagttaccaaacctattcaagaagaaatgtattttctgaatgccactatgtctaattaaaaatatattggtagctaaaaactcctcaaaaaatactgaggtcggatgatttcaataatgaattatattgtacatttgagaaagwtataaagccaattgtacacaatatctttcaaaaaattgaagaggagaaaacatattctaactcattttatgagggcaacattaccctaaaaacaaatttaaaaaaaaaaacatttcactagaaaaggaaaccacggatgagtattattccttgacattgatgcaaaaatcctttacaaaactgagtccagcagtgtattacacaggataatacaccatgaccaagtgtttttcattctaggaatgtaagtttgatcccacctttataaataagtcaacgcaattcatcatattaacagattaaattataaaaaacgtattatcccattaataaatgaagaaaaagcatccaaccatgttcaacatacattcataattttttaa

SEQ ID NO: 798501 - DNA, 590 bp, Homo sapiens
atacaacaaatagccctagtcccatatatttgataacatatggataaatttcttgaaagatacaagttaccaaacctattcaagaagaaatgtattttctgaatgccactatgtctaattaaaaatatattggtagctaaaaactcctcaaaaaatactgaggtcggatgatttcaataatgaattatattgtacatttgagaaagttataaagccaattgtacacaatatctttcaaaaaattgaagaggagaaaacatattctaactcattttatgagggcaacattaccctaaaaacaaatttaaaaaaaaaaacatttcactagaaaaggaaaccacggatgagtattattccttgacattgatgcaaaaatcctttacaaaactgartccagcagtgtattacacaggataatacaccatgaccaagtgtttttcattctaggaatgtaagtttgatcccacctttataaataagtcaacgcaattcatcatattaacagattaaattataaaaaacgtattatcccattaataaatgaagaaaaagcatccaaccatgttcaacatacattcataattttttaa

SEQ ID NO: 798502 - DNA, 590 bp, Homo sapiens
atacaacaaatagccctagtcccatatatttgataacatatggataaatttcttgaaagatacaagttaccaaacctattcaagaagaaatgtattttctgaatgccactatgtctaattaaaaatatattggtagctaaaaactcctcaaaaaatactgaggtcggatgatttcaataatgaattatattgtacatttgagaaagttataaagccaattgtacacaatatctttcaaaaaattgaagaggagaaaacatattctaactcattttatgagggcaacattaccctaaaaacaaatttaaaaaaaaaaacatttcactagaaaaggaaaccacggatgagtattattccttgacattgatgcaaaaatcctttacaaaactgagtccagcagtgtattacayaggataatacaccatgaccaagtgtttttcattctaggaatgtaagtttgatcccacctttataaataagtcaacgcaattcatcatattaacagattaaattataaaaaacgtattatcccattaataaatgaagaaaaagcatccaaccatgttcaacatacattcataattttttaa

SEQ ID NO: 798503 - DNA, 498 bp, Homo sapiens
tttgattaataaaatttgaggagaaatgacatatttcacttctggggagatgttttaaaagccagtgcctatgccatgcatttttttcccttccccttgccactaaaaatgtttgaaaaagtgactgctctgttagtctgggttccaaaaagaggacattgataatacagatgagggctcccagcctacttttgatcaactacatcatgatctggaartaagcatttctaagtcactgagatttgggagattctctattaatagagcttaacctaccctctcatgactccagactagagtaagcacttcattttgagtaagcttcagccttttttttttaattgaatatgcttttcataaaccttcctaataccatagtcatttgatttaactagaacagttttatacatttcgacttcacattaagagagtatagctgggccaagctcagtggctcatgcctcatcccaacagtttgggaggccaaggcaggctggt

SEQ ID NO: 798504 - DNA, 596 bp, Homo sapiens
gtgtcaggctttctgggaaagggctctctaacaaccccccaaatctttggagttgggagcattggtttgcctggaaccagcttccacttttcctatacttctaggctgagccgagggttgacaggaaagccattcagctccgggatcctgacaataagttggttgaccctgcggccatgagcagaaccctcaaagtcatgtcacccaagtgagactcgcccatctatcctatctatcctgacccttgcctcctgggtcctaatgcctgtctgataaacttcctctcrcttctcttctctgaggctagtctcacttctaaaaaccactccctgtctctggtgcttttctagtttctcctataagaatgatttctagtataaacttcaggactctgttactttctttagacacctgggctcaccaatcagaaagacataatttttgcccaaagccccatcataggggggactatctggaattttaggatccctcctcagacaagcaggcctaccaaaaactattcctgatgctaggatatggggagcctcagaaattgtatccttcctattcatataagtgaggaaaaaggcatcacc

SEQ ID NO: 798505 - DNA, 454 bp, Homo sapiens
gggactgcagagattagcaccaccatcaaggacttgaaagactcaggggtggtgattcccaccacatccccattcaactctttaatttggcctgtgcagaagacaggtggatcttggagaaagacagtggaggatggtaagcttaaccaagtggtgactccaattgcagctgctgtaccagatgtggtttcattgcttgagmaaattaacacatctggtagctggtatgcagccattgacttggcaaatagctttttctccattgctgtccataaggcccaccagaagcaatttgccttcagctggcaaggccagcaatatacctttactgttctacctcaggggtatatcaaccctccggctttgtgtcataatcttatttggatagaccttgatcacttttcgcttcctcaagatatcacactgttctattacattgatggcattatgctga

SEQ ID NO: 798506 - DNA, 661 bp, Homo sapiens
ttctgtctaaaaattggctaatttgttcattttgtggtttaacattttctaagactctaggagagaggacacatgactcactctttgttaaatacattttgtgctattatctttctctgttttggattccaaaatgttttcagcataactttgtggcgtattttttttgtatcagcagatcagctatggttcttatgtctcttctttggtctcactaaatacatgtgggttaatagatgttcatgataactgtagattttataattcagaaactataaacttaaattgattggctgttggttgaccaaacaatataaaataatgaatagagtatgaaaatatatggatttgacctcttaactgtcacttacaagctatgaatgatccaacaaatatttattcagcatgtattaagtactgggcaccgtgctaagctcggcaaacacaaaagtgtacaagacaacatggccctagtctttgatggaacttacatcccatggtgtggaaaagasctttattttttgaggaactaaagcaaatcaaatgggctggagtgtcatgaaaaggttggagagtggcacaagatgcagtcatattggagtaagggcgggagatgctttcagactatggcaaagactttggattctatgttgggtgccgt

SEQ ID NO: 798507 - DNA, 646 bp, Homo sapiens
ctgctaaaacattatttatctcagctttttatttacaatattgcttttagggaatattgcttccaatattgcttttggaaaccactgatttccaaatgcattcttttatggttctctttctaccttccgagttatcctttgcctgatcattcttcttctggtccctgaccctgactgcactgccctttacacaaaccttcatttctaatggcatatgggccactttcccctgggatagccatgcatctccaaaaacctcttaacatctcacagtatctctccaaactgcttctcccatttccttccatggtgtcrtcttcctctagtgctctggatcattttggtcttttctttcccttccttctctgaaatccaaattagatattgtgctctactcactgcaaaatgagtcagatttgtttcttcctcattaatataaccaccactataaccatcaaaattagcttctttgtaatctgtcacctatattacttcaagcacctcctaaaagatatcctcttccccaatcagatttttttctgcatatcatcatcagctttatttttctaacatgccaattgtatcaagttattttctggccaaagatcctacaaccattccgtgaaaagcaaaaatgcagggctgg

SEQ ID NO: 798508 - DNA, 670 bp, Homo sapiens
gagatgaggatccagtttcattgtgctacatgtggctagccaattatcccagcaccatttgttgaaaacggtgtcctttccccagcaaaatgtttttgaagtgcattgtttatcacatgtaccagtagtttgttcctttttttattgctgaataatatgtcactgtatggatgtaccacmtgcatttatcaataaatcagttgtggtacattaagattgtgctacattggggctattataaacaatatggctatcaccatctgtgtgcaagcgtttatgtggacaaatgtttttatttctcttagagatacacctaggagtagcattgctagaccatatggaaattttgtgtttaacttttgatgaactgcaaggttgttttcctaagtggctacaacattttacattcacaccaacaacatgtaagagttcagtttttccatatcctcaccaacacttggtgttgactgtatttttttattacagcctttttagaaggggtatagtagtatctcattgtaattttaatttgcattttcgtaatgactaatgatggtgagcatcttttcatatgcttattagccatttgcatatcttcagtgaaacattaaatagaattatcttaattttaccttgtgagaacttttatatattccgaatacatttatca

SEQ ID NO: 798509 - DNA, 670 bp, Homo sapiens
gagatgaggatccagtttcattgtgctacatgtggctagccaattatcccagcaccatttgttgaaaacggtgtcctttccccagcaaaatgtttttgaagtgcattgtttatcacatgtaccagtagtttgttcctttttttattgctgaataatatgtcactgtatggatgtaccacatgcatttatcaataaatcagttgtggtacattaagattgtgctacattggggctattataaacaatatggctatcaccatctgtgtgcaagcgtttatgtggacaaatgtttttatttctcttagagatacacctaggagtagcattgctagaccatatggaaattttgtgtttaacttttgatgaactgcaaggttgttttcctaagtggctacaacattttacattcacaccaacaacatgtaagagttcagtttttccatatcctcaccaacacttggtgttgactgtatttttttattacagcctttttagaaggggtatartagtatctcattgtaattttaatttgcattttcgtaatgactaatgatggtgagcatcttttcatatgcttattagccatttgcatatcttcagtgaaacattaaatagaattatcttaattttaccttgtgagaacttttatatattccgaatacatttatca

SEQ ID NO: 798510 - DNA, 633 bp, Homo sapiens
cttacattgaaaggactttttgaggcccaaatatgctaaattatctattataaaaggctgttgaaattatcaagtgcttttttgataaccattaaaattttcatatatttctattctctgtgatctgttaatgttttgactgatattaattagtttccaatcttaaacaaaccttgcattctgggtataaacttatcttagaaactcatttttcatatactgctaaatggcacattgctaatattttgtttargaatattcatatatatatatccatgagtaaaaatttaatgtattttttgcatatcttgtatatttttaaatttttgtgacaggttatgatagtgtcatggattgagttttggaatgttttctcttgatctatttattgaaggaatttgtttgatatggagaatcatctttgaaaaattggcaaaatttgctaaggaaactatctgagacctaagtttttatttaaaaaatacttcacttctttctcaatgcagttaatgataatatgatgatttcttttttatttattcttgagttaatatttatcttgtatacatgcatagttaaccataaatttttaccttattagcataatatatttatattatcttaatttctaaa

SEQ ID NO: 798511 - DNA, 546 bp, Homo sapiens
gagtccttcctggctaccaaccactgtcccagaatatgtccagaggtgaaaatacaattgtctgtagtttttccttactaaatacatgaagtgtatgcttttctagatatctagttatttctccagctgatgcagtattgtaaaatggcaattaaacaataactatcaaataaagtgagtgatattaaaaagtaaagcactcccttaaaagggataggtccattctgttttcyggatgagttatttaacacttttaatgctgtttataattggaaggccatattaaaataagaaactttacaaagaatattacaaggttaacatatgactggtaaagatagcatgaaaaaagaaaactacaaatatacaccttataaacacagaggcaaaattttaaaaatatattactaaatagaatccatttcaaggatgcaaaaatggatcaaagttagaaataattgcaataaactttaatagatgatagcaaacatttaaaagaggaaaacattttatcaccaagaaaaattccaaaataatgatatttag

SEQ ID NO: 798512 - DNA, 540 bp, Homo sapiens
tatgttctctaggccttttagaaaacatggagttgttcctttggccatgtatatgcgaatctataagaaaggtgatattgtagacatcaagagaatggatattgtttaaaaaggaatgcccacaggtgttaccacggcaaaactggaagagtctacaatgtwacccaacatgctgttggcattgttgtaaacaaagaagggcaagattcttgccaagagaattaatgtgtgtattgagcacataagtgctctaagagctgagatagcttcccgaaacacgtgaaggaaaatgatcagaaaaagaagccagagagaaaggtacctgggttcaactgaagtgccagcctgcttcacccagagaagcaccctttgtgagacccaatgggaaggagcctgagctgctggaacctactccctataaagtcatggcataattggtgttaaaaaaaaaaaaaaaaaaaagacctctggactgtaaaaatgtttctcttcattgagaagaagtgtggtgtcctctctctcaaataaatatttaaagca

SEQ ID NO: 798513 - DNA, 570 bp, Homo sapiens
tgctatgcaacaattacaaggtttagagttggtcttgatgctcagtggataaaagtcatgtggtattcagaagaaagatagaaatattgggtaatcacatgttggctcacacctgtaatcccagcacttagggaggcccaggcgggtggattacttgaggttaggagttcaaccatcctggcccatgtggtgaaaccccgtctctactgaaaatacaaaaattagccaggcgtggtggcacacacctgtaatcccagctacttgggaagckgaggcggtagaatcacttgaacccaggaggcagaggttgcagtgagccgagatcaagccactgtattccagcctgggcaacagagcgagacactctcaaaaaaaaaaataaaataataaaataaaaattgagtaattacagacattgttagaaaaatttatatgtagttatgtacatcaaatattaagggttcctgttaaaagaacagaaatgtattctatagcttctaagccaagagaggaatcaaaaggcaatacattttgtttctcaatccaatctaaggaaggaaaaaataaaga

SEQ ID NO: 798514 - DNA, 573 bp, Homo sapiens
tagaacactgaaggcaagttcagaaaaaaagacacaggagtaaagttctatgatggagatgtgagtctgttaggatttttctggggctctttatataacttactaacagataatactaaaagtctaaattcaaggccttttcatggatgtgaggtcagaactaaatggtcctcttatcctagttgtgccaagttctgaggccaatctgaaattcaaccragcaaaaacatgtaactcaccctgtgtatattattttcttttctatttctattgtatataaaaatgtttctttgtttttattacaatcctcttaaatcctgtgtcaaaagaggtatggatttttcacagataaattttgaaacagcatttaaaattatagagaaaaatagcagtatcaaaagtattttctagaaattgatttttactttttaatcatacacagattttcttagtgacaattaattaattacctcaatcctcttcttactgaagaggagattattgttcctattaatattaccacagctaatattcactgaatgtttactatgtaccagacaccatattaagcat

SEQ ID NO: 798515 - DNA, 620 bp, Homo sapiens
gtccttctggtagaattcagtcataaatacatctggtccagagtttttgttggttgctaggatttttattcatgattcaattgcagaactcattattagtctgttcaggttttccctttcttccttgaaagcctgtgtgtttccaaatggtcagttgttgagttcaagtccagaatttctttgttagtcttcagccttgatgatctgtctaatgctgtcagtagggtgttgaagcctccccctattattgttgtttggctaagacttttttgggttcaagaagaatttgttttatgaatccagrtgctctagtgttgggtgcatatatatttaggatagttaagtcttcttgttgaagtgaggcctttatcattacataatgcctttctttgtccttgattgttgttggcttaaagtctactttatctgatataagaatagcagcccctgctcttttctgttttccatttgcataatatatatatctttcttcgtccctttattttaagcctgtgggtggcattacatgtgagatgggtctcttgaagacagcatttggcttgtctttctatacagcttgccactctgtgttttttaagtggggtgtttagaccatttac

SEQ ID NO: 798516 - DNA, 580 bp, Homo sapiens
cattaagcaacgactccccatattgccccttcacccatcccctgataacctctaacctactttttccactatgcattttcttattctagatatttcacataagggaactgctattgtttgcatacttgaccctccaaacttcatgttaaaattttaccccccagtgttggaggtggggcctaatgggaggtgtttgggtcatggctgaagatccctcatgaatggcttggtgctgcgcttgatataagtaagttcttgctgcaatggttcctgtgacagctgtgagagctgattattagaaagagcctagaacctcctccgatcctccgtgtgatctttatatgccagctcctctttcccttctaccaagaatggaagctttytgaggccctcaccagatgcagatgctggtgccatgcttcttgcagaactctgcagaactctgagccaaatacatctcttctttataaattacccagcagccgcaagtattcccttatggcaacacagatggactgacagaaaccataaactatttgttctttcatgtcaggcttatttcagttagcgtcgtgtttca

SEQ ID NO: 798517 - DNA, 569 bp, Homo sapiens
agtttatgagaatgtagcttcatagcaagttgagaagaatctgtgggtgtatttatcttgttatttgttaagaagaggcataatatacataccttcttgcccattgtttttgtctgttttgtattgctataaaggaatacctgaggctgggtaatttataaagtaaagagaataatttagcttatggttctgcaggtygtacaaaaagtgtgggaccgacatttgcttggtgagggcttttgtttgtgtcaaaatacgtcagagaaggtcaaaagggaagtgggcatatgtgaaaagagaccaaacccgaggggcgtcttggctctcaaaggaactgatcaattcccctgagaacaaatcctgtctcacaagagctaaaacttactcactacttcaagacaggcaccaagtcattcagagggctctgcccccttgcctccacttccctccaggccccatctcccaataccaccacactggggatcagtcttctacatgacatttggtggggacaaacaaccatatccacaccattgcacccatttctcttggttcacttcaaactgtat

SEQ ID NO: 798518 - DNA, 621 bp, Homo sapiens
atactactcagccataaaaggaaagaactatccatatatgcaaagacttgcatgatcttaagaaaattgtgctggatgagaaaagccaatctcagaagcttgcataccatatgattccatttgtatgacattcttgcagtgataaaattatagagatgaaagaatagagggataaaattgtaggcatggaaaaccgattggtggttgcctgggggtagagatggaatgggaaaagatgtaaatgtgcttataaaagtgccacaccaagtttctcatggtgatggaaccgttctgtatcttgactatagcagaggataaacaaacctacaagtgtrataaaattgtgtagaaccaaatgcatacatacacgagtacaaggaaaaactggtgaaatctcagcaaaattaggggtgtatcaatgtcagtatcatggttgtgatattgttctacagttttgcaaaatgttaccattgggggaaactggatcaatggtacatgagacctctctgtattacttctttgactgcatgtgaatctacagttatctcagtaaaagcctctattaaaaaaaaaaagacagaggggaggtagaaattgtaggagagcacagaggtagtggca

SEQ ID NO: 798519 - DNA, 563 bp, Homo sapiens
aatgattagtttgttaatttgaaccagccttccattgctggatttaatgccacttagttgcaatgagttatccttttcagatattgcttaacaaactttctaatattttgttaaagatttttgcagccwtgttcttaagacatattggtctgtagttttgtaacatttttctatggttttagtattagggtaatgctggcctcaaaagagttgattaggaaatgctccctctgcttctaaaaaaattgtgaagaattgatattatttcttctttagttatttggtagaatttatgagtgcaaccactggtgtttgttatctgggcctggttctttctttccttcttttttttttctcttagaatatttttaatcattaatttatttattaaattagagccatttgggttatctatttctctttgaatgagttctggaagtttgtgtctttcaggaaattgtccatttcattgtagttattaaatttgtggataaagtgtcatttatggtattctgttattatctatttaagatcagtagtgataacctccctttaatttctta

SEQ ID NO: 798520 - DNA, 616 bp, Homo sapiens
aataagttattttaagttcagtgccagcttaagcccaatactttgcataaattcccttatttaattccatcaacaaacctttaaaattagtgatgctattcccattttatgaatgaggaaactgagactttgagagactaaacaacttgcctaggctcccatggctaagacttgagtacagtcagtctgattctacaccctattggtaagcactgtgctattttttctttttaaaggaagaaatgcagttgaaggagaaggaggacagtagaaagtacagctattttgacctcaacgattttttttctttttttgagacggagtttcactcttgtttcccaggctggagtgcaatggcacaatctcagctcaccgcagcctccgcctcctgggttcaagcaattctcccacttcagcctctcgagyagttgggattataagcatgagccacaacgcctagctaattttgtatttttagtagagatgggtttctccatgttggtcaggtcaatctttatttagtgcaacactcacagtccttttgagggctgatgagcaaaagtaaaggactgtgagattttagaatgtgctctttttccatgtcagtatggatcca

SEQ ID NO: 798521 - DNA, 639 bp, Homo sapiens
cccccggcctcaaccagtggcaatgttttgcatgatatcccagttagtacactgtactaactgggatattaatattggtacaatccagaaaacattcacatctcatcagttttataaacacttgtttgtgcgtgtatagcttttgccattttatctcatatgtagatttgtgtaaccaccacaacaaccaagatacagaatctttccaccaccacaaggctctcctgtgctggctaccactttatagccacacgcatctctcctctctccccacccsctacccctaactcttggcaaccaataggctattttgatattttctatttctataatttttttcaagaatgttatgtaaagaaaatcatggagtatgtaaccatttgagcttggctttgtctttcagaatagttctcctgggatccatctaaagtgttggaaggtatatcaatagttgtttccattttattgctgatgagtattccatggtatgtatatatcacggcttgttcaggcatctccccattgaaagacatttgggatatttccagtgttccaatatgtgtacaggtttttgtgtggacaaaagttttcatttctctagaacaaatgctcagaagtgcaattgctgagtagtatggt

SEQ ID NO: 798522 - DNA, 479 bp, Homo sapiens
aggaaccaaggctccatgtatcctgacccctgaccttgtaacagaagacgtaattgtttacatataaaatcccagattctacaaataaaattaaaaactagaactaagaagtaagtccaacaaggttgaataagacaaaaatcaatacaaaagtatccattggatttgtatatactaaaaatgaacttgtggaaacagaaatttaaattttaataccatttacaattgccccaaagaaaatgaaataggtgtaaatctaacaaaatatgtgtrgtatctgaatgctaaaaattacaaagtgctgattgaaagaaatcgaagaagacaaaaagagacacatgatgtccatgtgttggacaactaaaccaaacaacgatgttaatccttctcaaattaatttagtccgatttgtaacaaaattcctgcaaagtcttttttggtaaatgtcgaaaagcttatcctaaaatttaaatgggcag

SEQ ID NO: 798523 - DNA, 652 bp, Homo sapiens
gagacttgaaagtatggggcaggcggatcctctctacatttaggagggaaggctctgactgagccggcctcagtgaaaggagactcagtgcggtgggaggcatagaccaaaggaagcgaggggagcccttccagctcctccagctagagggaagttggctgtggggtggcaactagtgtcttcttcagtgaggggattaggggaatctaaggctcattctgggtttgccctcaacacgtcaacttcaatttctgctatgaagatgataacgagcactaggcagggtttccaaatgctttctgcttgagactttactttgggaaatgcactggccgcaggctcggagagcattgccaggtggtgggaactcccagtggaaggaggtgggtgagaaggaaggtcagccctccaggacaatgtcactgtccctcaggtagacagatgcagagccagacagtatcagrccagcactggaattaaggtaggacccctgaatccacaggaagagcaaagtctgaggctacactctggattttgtaccaaataggaactcctgctcttgaagacaccatctcatgaatctgggctccatctgccttgtgcaccactatgaggggttaagagttctcagagttggaagtgaccctgaaga

SEQ ID NO: 798524 - DNA, 569 bp, Homo sapiens
cattcctattcaatatagtgttggaagttctggccagggaagtcaggcaagagaaagaaagaaagggtattcaattaggaaatgaggaggtcaaattgtccctgtttgcagaagacatgattgtatattaggaaaccccatcatctcagcccaaaatctccttaagctgataagcaacttcagcaaagtctcaggacacaaaatcaatgtgcagaaatcacaagcattcctatacacmattaacagacaaacagagagccaaatcatgagtgaactcccattcacaattgctacaaagagaataaaatacctaagaatcaaacttacaagggatgtgaaggacctcttcaaagtgaactacaaatcactgctcaaggaaacaaaagaggacacaaacaaatggaagaatatgccatgctcatggataggaagaatcaatattgtgaaaatggccacactgcccaaggtaatttacagattcaatgccatccccatcaagctaccaatgactttcttcacagaattggaaaaaactgctttaaagttcatatggaaccgaaaaagatccc

SEQ ID NO: 798525 - DNA, 582 bp, Homo sapiens
ccctgaaacagatacatagataacaagcatatgaaaagaaattcaacattgttagccattagggaaatacaaattaaaaccacaatgagatatcactacacacctgacagaatgaggatgtagccgagaaactgaatcactcctacatcactggcaggaatgtaaactggtacaaccaccctggaagagtttagcagtttcttataaaactaaacacagaactaccmtatgacccagcagttgcactcttgtgtacttatcccagaaaaaatgaaaacacacaaaaacctataaaaggaatgttcagtagctttactttgtaacaacccaaaactggaaacaacccaggcatcttttaatgggtcaatggttaaacaagctgtggtacatgcataccatggaatactagtgagcaataaaaagtaacaaactattgacacatataacaagctcagtgaatctccaaggaattaccataagtgaaaaaagctaatcccaaaatgttacatactttacattttcatttatgtaacattcttaaaatggtaaaattatacaaatggaggacaaaatcgtagctgc

SEQ ID NO: 798526 - DNA, 770 bp, Homo sapiens
acaggaagtttaagaattcttatttaatggagaaacatgagagttgtttcttctaaggtcaggaacaagtcaaagatgacattatctccatcactacttaacagtgtattggaaatattaactagtgtaattggacaagataaaacaattaaaattaagaagtggaaaatacccttcaccactaaaagaaaccaaggctctttggaaaaatagttaattccaggtcttgaaagggaaagtattggatgactgtgagatcttatgccaaaactcacagaagcactcaaacactgatggtgccacattaaaaagaaacaagaacaatttgaagagggtctcaccaaattcgggacaatttgagtaagagaaaaaataataattagagctaataaaggagtttgacaaggtgtcagaatataagatcaatatacaaaaatcactgtatttctacrtacgagcaataaataatctcaaaatgagtgtgaaaattccattcacaactgcatcaaaaaaataaagtacttaagaataaacgttttcaaaataaattttaagacttgtacactgaaaattataaaacatcattgaaataaatcaaagagctaaataaatggaaagacatcacaaattcatatattggaagacttaatattgttaagatggcaatactccccagatggatctacagatttaacaaaatccctatcaaaatcctagctatttttctgaaatcaacaatctgatcccaaaattcgtatagaaatgcaagg

SEQ ID NO: 798527 - DNA, 330 bp, Homo sapiens
catgctgtttgcctgggcaggcaacttactcacaaatgggctaccttacgagatataaaacaggctgactcgtcctttttatgtccctgtacatatttgttttaaaggtagagatcatttcctgtttcagtgcacatttgaaatgggcattccctgggggtgggtggagtagcractggaagataataggagggacttctggtaatattccatttcttgacctgggagctgctttcatgaatgcactcagtttgagcctacacctatgctcagtgtgctttttatatatgtatataatacttcaataaaatgttttaaaaagtatacatt

SEQ ID NO: 798528 - DNA, 611 bp, Homo sapiens
atactaatttctatatatttattttctccttttgtatacaaaatgaaaacactgattatgtgggctcaaaaacaagaggacactgggataggtgagtagaggtaacctagagaaagatctgttcatgtggttttccatctaagaaaagacaacacctgaaacttagggatattgtttaatccctatttataaaaataatttccattatatgaaggagaaacctcctccccaaaaccctaatcctaaaagggcrggactatggaagtcattgccctcaactaatcagctgggtatttccttatttgcattttcttaaaaatggtcaatcttaaacattgttttataggaatagtaaatttgtccagacacttaccatcaatgagctcttcttttagctttgttaattcttttctcatttcatctaaaatgtcctaaaatattagagaaaaataccagaaatacagaacaaaattaccactaaagagattcttactcataaaattttaagaatgtcatgaaatatgatgtgtagttttttttgtttccagagccacaattctatttcttggaagactagccttggtgaattttgttttaatattctgcccttc

SEQ ID NO: 798529 - DNA, 481 bp, Homo sapiens
aaggataaatacaaatggtaaacatattagaaatactagactgggaatctaaggccacatgtattatctaggccatttgtagcttaagcgttttcttttaaaggctgttcgccttatgattataagacaaggtttcaaaaaagttgaataraagatccttttccatctgttactggaacatggactaatattaaagccatggttgtggataattgattatttgaggaaaatctctgtttcctagatactttgtagtaaattatcttggacagtttaacatctaacaccctgagtagattgttttctaggatgagccctattataccattttttaattaagaagacttaagaactagttttttcttaattaaaaaaattgacagctaaaaataatcctgcaatgcttttcagttacttacacaattaatttgacagaatagggacttaaatatagtagtacagtcattttataggcagatgt

SEQ ID NO: 798530 - DNA, 481 bp, Homo sapiens
aaggataaatacaaatggtaaacatattagaaatactagactgggaatctaaggccacatgtattatctaggccatttgtagcttaagcgttttcttttaaaggctgttcgccttatgattataagacaaggtttcaaaaaagttgaatagaaratccttttccatctgttactggaacatggactaatattaaagccatggttgtggataattgattatttgaggaaaatctctgtttcctagatactttgtagtaaattatcttggacagtttaacatctaacaccctgagtagattgttttctaggatgagccctattataccattttttaattaagaagacttaagaactagttttttcttaattaaaaaaattgacagctaaaaataatcctgcaatgcttttcagttacttacacaattaatttgacagaatagggacttaaatatagtagtacagtcattttataggcagatgt

SEQ ID NO: 798531 - DNA, 481 bp, Homo sapiens
aaggataaatacaaatggtaaacatattagaaatactagactgggaatctaaggccacatgtattatctaggccatttgtagcttaagcgttttcttttaaaggctgttcgccttatgattataagacaaggtttcaaaaaagttgaatagaagatccttttccatctgttactggaacatggactaatattaaagccatggttgtggataattgattatttgaggaaaatctctgtttcctaratactttgtagtaaattatcttggacagtttaacatctaacaccctgagtagattgttttctaggatgagccctattataccattttttaattaagaagacttaagaactagttttttcttaattaaaaaaattgacagctaaaaataatcctgcaatgcttttcagttacttacacaattaatttgacagaatagggacttaaatatagtagtacagtcattttataggcagatgt

SEQ ID NO: 798532 - DNA, 506 bp, Homo sapiens
agaggagttgcccaagggtagtagaattgagtaatttttttgttctgactcatattttttggtacttcccagataattttacagtgagcatgcataaccagaagaaaagttttttaaaaggctatgtagcctgggcacggtggcamatgcctataatctcagttactcgagaggctgagatgggaggactgcttgaactgaagagtttgaggctgcagtgagccatgatcacaccactgcattccaattccagcctgggtgatagagtgaaaccccatctctaaaaaaaaaaagctttgtagaaagaaacttatacacatgtacatgctttcttagagcatatgggataaaatatattacgaaaatgttttagatttatttttgaaagattaaggaatgcagatttcttttttagtattctgaaatgtttctgtcttccttaggaacaacagcaatagcaataacaaaaacatacttaactaaaatagatcctttggttagcaata

SEQ ID NO: 798533 - DNA, 648 bp, Homo sapiens
ctattttgagagagtcattaaattactcataaagagtatgttcaaatttaatgagtcttgatttaaaggtgtctaaaagattcgctagtctcctttcagacaaggtggataagtatgggttaaatattatgtttattgtgtttgtatctggttggacygatggtctcgaaaactggcaattttgctccctgttcactcggtttccaccagcatgatgcatgagttggccctgggtagcttaccatgttcacccatgaccttaatgaaagcataaaagcagtgctttgcaaatgcaaatgacaaaaaaattgtaaatgatagcaaacagactacacaagtgttgtcaaggccaccatacatcttattccctttacaaataccttaaatttctttcccagtcctgaagccctgatcataaggtatgcacagatttactaagaagctttgatgacccattgtgtttttgcattgactgaagccagtccatggatcccaggttaaggcccctggtcctttatgctaggagtgagaaatataccacaggagtttataagtagctcacagtggagtgggagaggcaagacatgaaaacagttttagaacacagtagtctataatgaggagttcaaaagggaagaaaccaatgtt

SEQ ID NO: 798534 - DNA, 635 bp, Homo sapiens
ttcattcaagcaaccttactaaaaacaccccatgaaaataaaagtctatatcttcccttcaaaaaaaaatggcaatacaatatttaacatttgatgcattttttttttcttgttatttttaaatgaaaaagaattattgtcccggtttggctctacaccctcggactccggctcccacgccaccctggcaggtgccggcctcaacatttgattcagaccaagaatttctttcagcagatgctatcttgtttgtttaagtaacacaggcacaccagatggatttayagtaaacagaagaaacttatgttagtcttgcctcagtttcatcatctggactcagtgtcttcgtggatttagcaaagggatttggcccagtgtttctcaatggaggtgctattggctttgttggataagacaactctgtgcaagacagtacctttcaggagatctttggtccccaggccctgccagtaatatctcctagttgctgtagcagtcaaaaaacccctataaagtgatggataaatttagtatcatgattgtggtgatggtttcacaggtgtatatacacatgtgtaaaagtaacaaatggtatactttcttgtatgtcaattaaacttcaataaatcagtcaa

SEQ ID NO: 798535 - DNA, 570 bp, Homo sapiens
gctttttatggataccacacaaaaaggactgggcaaatgacaaaggctttcagcacagaataaacactttggatctactatagtttaagttgttcagatcaatcagattcttgcatcaatgcctggcacatagcagacactcaataagtatttgttgagtgaaggaatgagtcttcaacataatgttaacagagaagatttgattattacatggaatttacattagaaaatcaatatgtaaggcagaaattcagcatagtcacaggtcacccttgaaaactatttaggaagtatctattcaatataaccaacgcaactagtttttcctcctgcacgattayagatgactgtgtttttttttttttttttttttttttttttgctgagtaccagaggatggagctggcttgtgttgttaggggtcagcaccatataataaatggttatcttgaaaggctaggattacactcaggcagcagcccggctacacactaggagagtgacacagggactaagactgcctgagagaagagcagtcacatagtaaggaatgacccccaaatcatccac

SEQ ID NO: 798536 - DNA, 608 bp, Homo sapiens
aaaagtaaatagtggcaggacgatgaggggaaatgaccagaattggaagctccaccaaattgacaaaagagaggtaaatctggttcctgttacttcactatggctagaagtggaagtctctacaaaggctttgaaaactaaactgatgttggaaacgtaacccacrgaaagaggtttagaacttgaagcctgaagctattcacgacaattgcctgctaagacaaaaatagcaacattctcagtaggattgaaacaaaactcagaatcttgtaatagagtgttccaaatgtctaggatacaaccgagaattacttggcatatgaagaaccaggaaaattatccatttttatgaggaaagacaattgacagaggccaatactgaaatggtaaagatgttggaattatctgacagacttttaaagcagctcttacaaaaatgctcaacaagtaaaaacaatcacttctgaaacaaaaagaaattctcagcaaatgaatacatgatataaagaagaaccaaattaaaattttagaattcaaaaatgcagtaaccacaattcttaaaactcactaagtaggctcaataactgaacagaggtgaaagagaggaa

SEQ ID NO: 798537 - DNA, 608 bp, Homo sapiens
aaaagtaaatagtggcaggacgatgaggggaaatgaccagaattggaagctccaccaaattgacaaaagagaggtaaatctggttcctgttacttcactatggctagaagtggaagtctctacaaaggctttgaaaactaaactgatgttggaaacgtaacccacggaaagrggtttagaacttgaagcctgaagctattcacgacaattgcctgctaagacaaaaatagcaacattctcagtaggattgaaacaaaactcagaatcttgtaatagagtgttccaaatgtctaggatacaaccgagaattacttggcatatgaagaaccaggaaaattatccatttttatgaggaaagacaattgacagaggccaatactgaaatggtaaagatgttggaattatctgacagacttttaaagcagctcttacaaaaatgctcaacaagtaaaaacaatcacttctgaaacaaaaagaaattctcagcaaatgaatacatgatataaagaagaaccaaattaaaattttagaattcaaaaatgcagtaaccacaattcttaaaactcactaagtaggctcaataactgaacagaggtgaaagagaggaa

SEQ ID NO: 798538 - DNA, 635 bp, Homo sapiens
gcagaaggcaagagcctgaggggtatccatagaggattaaagttcagccgttgcctataaagagaagttacattgttgttcgctttggcatgaataaacattgtttaagtaagagccatgtctgaaaacaaacaaaaataggttcatgatatataaccagcacagaaattttcattaaaaagaaaagaaaagcagatgataggtatattttttaatttatttattatttatttatgacatggagtctcgctctgtcgcccaggctggagtgcagtagcacgatcttggctcactgcaacgtctgcctcctgggttcaagcgattctcctgcctcagcctcccgaatagctgggattacaggcatgtgccaccacgtctggctaatttttgtatttttagtagagacagggtttcaccatgttagccaggctggtctcgaactcctgacctcaagtgatccgcccgctttggtctccccccaaagtgttgggttttmaatagagaaaggtggggggcccttagatgcacctggttggtacaagactagacgattcagatccatctggtaacaggaaattgaaatggtctcagaaaacaggaggggaatggaatgagggtattcactctctcccctt

SEQ ID NO: 798539 - DNA, 602 bp, Homo sapiens
ggccaacatggcgaaatcctgtctctactaaaagtacaaaaattagccaggcgtcgtggcacgcacctgttgtcccagctactcaggagggtgaggtaagagaattgcttgaccctgggaggcagaggttgcagtgagctgagattgcaccactgcactccagcctgggtgacagagcaagactccatctcaaaaaaaaaaaaaaaaaaaaaaaaaagacawcctcaggcagccagcatgtataaatgttgatgtagaaatccataccaattaaaaagttttcactttctctgtgtatttgttaggcattgtgttgaacactgaaatgcatttttttgtcccatgttcacaccaagcaggtgtcattactatccccctggtacaggtgagaaacaagggtaagaggccaaataaccagcattgtgcctggtcacatggctagttcagcagtgaatgcagagttcaaatccaggctgttcaccatcagagtcaggactcacacttactgtagcttggttgtgtgagaacttcatttcaaatgccctactgatcatccctacaaaaaaagacctctctcaaagttaggtcctttggatttcaca

SEQ ID NO: 798540 - DNA, 563 bp, Homo sapiens
ttcatttttagtacagtttagtacatttacaatgttatgcaaccactacctctatgcagttccaaaacatctgcatcaccccaaaaggaaactcagtgcagtcagcccttggtatctgcgggagattgattctaggacctgtggataccaaaatatactcaagtcccttatctaaaatgacacagtatttgcttttgtttctctttttgagacaggctcttcctttattgcccaggctggagtgcagtggtgcgatcatggctcactgcagcctcaaactcctggsctcaagcaatcctcccacctcagcctcctgtgtagctgggaaaataggtgcaagacattgaacctggctaattttttattttttatagagatgagttctcactgtttttcccaggctggtctcatactactggcctaaagcaatcatcccatcctggcgtcccaaagtgctgtgattacgggtgtgagccacaatgcccaacgtaattatataatgttttttaaaacaatgttttgaattcatacttaccttgacttcattagttacagatgatgtg

SEQ ID NO: 798541 - DNA, 563 bp, Homo sapiens
ttcatttttagtacagtttagtacatttacaatgttatgcaaccactacctctatgcagttccaaaacatctgcatcaccccaaaaggaaactcagtgcagtcagcccttggtatctgcgggagattgattctaggacctgtggataccaaaatatactcaagtcccttatctaaaatgacacagtatttgcttttgtttctctttttgagacaggctcttcctttattgcccaggctggagtgcagtggtgcgatcatggctcactgcagcctcaaactcctgggctcaagcaatcctcccacctcagcctcctgtgtagctgggaaaataggtgcaagacattgaacctggctaattttttattttttatagagatgagktctcactgtttttcccaggctggtctcatactactggcctaaagcaatcatcccatcctggcgtcccaaagtgctgtgattacgggtgtgagccacaatgcccaacgtaattatataatgttttttaaaacaatgttttgaattcatacttaccttgacttcattagttacagatgatgtg

SEQ ID NO: 798542 - DNA, 608 bp, Homo sapiens
cttcttttttttccataaaagcttttttacaataaattaataagcttctcccctgaaagttctaaatctgtaggtttggataggaaaccctaagaatatgtgccactgtaggtgattcacattttcagggaagtttgggaatcacagcagcagggcatgaaccaaagctcatgtaggctctcaggcaaatagtttctatgggctggataaggcygaactcttgacaaagagatcccagaacatcaaagaattattggtcttggctttctccagcctcccaattctatttacttcttcctcaaggatatttctattacccccaatgaccttgctttcttcctcccaggaaaactgctttctgatctagcattcttaccaagcgttaaacaactaatatgaattatcactcatagcaagatctgggccacttaacctcaaacttgaaccaaagacatgtgaccagaacttcacatttttcttcctatacatcaaaaattccagaaattctagtattctgtgtctctaaattaaatcccctaggtaagaaggaggatgtctccttcataggcagaatctcagtcattaacttgaacatactcaccttaata

SEQ ID NO: 798543 - DNA, 583 bp, Homo sapiens
aggaatcttgtggcgcctagtactagcccctgtagtactcctaaccttcctataaagacatctcatggacatggatggagatttatacaagacctatgaaacattaataatattgtcactctttgacaccctgtcattccaaatctccatactctcatgacttccatcctcacagaatgtaaattttatagtgacatacttttatattacttttttaaaaaaagcattcatgtggacactgggagtcaaattttatttgtcttcacrtaggaaagtcaacaatatacctagatagtaatgtcttgagggtataccaaaagccctccctacttttcagatactgaagacatatttaacagacatgtctttcccccaaggattgactctcttgcagtatgttgatgacctccttctttgttccttgtgaacatgattatgttcatctccttaaacttctagcagacaaaatccacaaagtttccagggaaagactataatttacccaggaccatgtgaaacatttgggatacatgatataaaaccaaggacttctcttggatcctgacagacttaatggtattta

SEQ ID NO: 798544 - DNA, 628 bp, Homo sapiens
ggtgaagattttggggaaatgaagagtgtctgtaatggatacagggtttctttttggaatgatgaaatattctagaattagattgttaatggttgcacaacacttacaatataataaaaactactgaattgaacacttctctgagtgaattgtatgatatgtaaattatatttccaaaaagcgtttaagagtctaataaaatatttagaagataaaagataaagctcctatacaccaagctttatacagagacagagaaatattattgatatagagaatcaattaaggatatccaacagctggcttataggacagccagatcccaaaacaagaaagagaactatagttacagaaagaatgaaaactttgccaaccttggcaatataaaagtaaagggacagttgatagaaatagaaggtagaaatggagagaagaaataccatatgtgaggggtgatatccttacataatatatgatgattcagaaaatrttgtctaaactattagaataataaatggagaggtaaaggagaagggacccagtaaaccaagcacatggaatttgcttgactcttggttagaatgacttatggcagcactttcttaagtatgctctggagaatatcact

SEQ ID NO: 798545 - DNA, 570 bp, Homo sapiens
aacaccaccctgaaatctggagagacaggtgaatccacagttaccaccaaaatttgcttaataagagcagaaactgctgaagccataagctggtatcagcacttaagtggtaattcccatgaattgctggagaattcgtatgaactaatttgagcttaaaaacctgggagctgcagtctttggctccacacttttgtgggatccaaaaaagrtttcctagtaactgtgtcagagagagagagtaaatcattgtgaaatatgaccatagcattttccataaaaaaaaaaagccaactctccaagccttatcccagatgagaaagggcattccccacactctagccccctctagcctttccgtcttacatacagggggaaagctatgctactgggaaaaaaaggtgaagatcatagcccagggacacaggtccactaaaagactgagatttaaccataaagttacagaacacttcccttctcccacaacttactgccacaccagcagcacagtaacagtgaatacaactgatagagttcaccagacacaaattctctctgaagaggagtaac

SEQ ID NO: 798546 - DNA, 570 bp, Homo sapiens
agaaaggtttataaattagataaaatatattcatattattttccgatttcaataactgtactatggttataacaatgaaaatttcctcattttggtaactgtactttcataactgtccttgatcccaggaaaaatacactaaaatatttaggagttagaaaaaactttacagtttttgagatccctcatgtataactccttcatgatctagsagctccaacttgcctcttggatttctcagaactcatatcctacctgccacttccttttattagtattcaacaaccttggctttctttttgctcctcaaagattccaagcttgttctattttcaaacctttgtacttgctgttttctctgcttacagcattctcctcccagacctgtacatgctggcttcttgtcatcattgggccctaactcaaaagtgacactttaacacctcatctcacagcagcagttttttattattcagacaaaagtagttctccatacattatcaattacattaacctgttttcttatcttcatgtgacttatcactatcttaatatatgttgtttaagtat

SEQ ID NO: 798547 - DNA, 583 bp, Homo sapiens
acagaagtctctgagtaactcttgatcaccttcctctttgggaatacacaccccttggagatgtgtgtgcctgtccctcatgtctgccaagcccataaaaagcatcaccctgggccagaaacccacaccttggcaccatgttcttagtccccacataggcattttagaattcaactttatttcttggcgagtctaaaaaattgaccctgtctgtgtttcatgccaagccatcaattaaagccatggagcagcttacaaggtgacacttgccaggataaataggcattggcggccacggaagtgatgccaggactggggatagagcttaggccactggcatggtggcctgccatttgtccctgatccttgccaccagcatggaggcctggattcatggtgctgaccatgagaggatgtgggggtggagaagctccccctgggaggggaaaggagggatggctgggcttgggtgtggagctrgttctcagaaaaggtgcccaaaaggctctggagagggcattgcaggctccctgcccgccccacccagcctcccctccctgacaagacagtcaagcagctgcct

SEQ ID NO: 798548 - DNA, 551 bp, Homo sapiens
tggtaaattttatgttatatatatataaccacaatttttaaaaataaatcctttttaaaaaacatgtatgattattctggtagcagcatcagagtcactttcttccttctagtttgctgacttcagtttgaagaatttgccttctttggtttgctgactaatgacctgaaaggggcctggtcactggagggagtagggagagctgacttgagactgaacaggggcttgggaagagccgtcaaagggatgatccccccrcagataaacagagtgtggagaaagcgccagaattactgtcatcttttatggctcactcggatagcttggagccgattatgtcacccagtggggaaagatcagcttttctgctggcccagtgctgggagctcttgggaggtgggaaagtaaattgcagtgggccgaggctgatgggtgggcaggggtgtcgcagtgtggagggaagcgctgaagctatccctacagggaacagtcctacccctttaatgactagaaaaacagttttttaagaaataggacattttctaaattat

SEQ ID NO: 798549 - DNA, 532 bp, Homo sapiens
ggtgggaaagtaaattgcagtgggccgaggctgatgggtgggcaggggtgtcgcagtgtggagggaagcgctgaagctatccctacagggaacagtcctacccctttaatgactagaaaaacagttttttaagaaataggacattttctaaattataacatctagatggaaaccacagtggggatgagaagaccaacaggaggctgagsaacgacagctcaggtttgcatgttcacttaaagagtcgctggaatccaggttgccctgttactaattaaaacaacaacaacacttaaccatgaaaacccataatcgaggagtgactgtttacattaaattactggggattataagttgattcccttcaactctgacttctcagatggccatgtttacagtcccagcagggaagttaacaaactcgtgttaagggttactgctaactgaaggttgaccataaaaaatgcatgtgaaatgatcttgtaaactagcatcacagtttacaggaaggtccactttatggatattgcca

SEQ ID NO: 798550 - DNA, 532 bp, Homo sapiens
ggtgggaaagtaaattgcagtgggccgaggctgatgggtgggcaggggtgtcgcagtgtggagggaagcgctgaagctatccctacagggaacagtcctacccctttaatgactagaaaaacagttttttaagaaataggacattttctaaattataacatctagatggaaaccacagtggggatgagaagaccaacaggaggctgagcaacgacagctcaggtttgcatgttcacttaaagagtcgctggaatccaggttgccctgttactaattaaaacaacaacaacacttaaccatgaaaacmcataatcgaggagtgactgtttacattaaattactggggattataagttgattcccttcaactctgacttctcagatggccatgtttacagtcccagcagggaagttaacaaactcgtgttaagggttactgctaactgaaggttgaccataaaaaatgcatgtgaaatgatcttgtaaactagcatcacagtttacaggaaggtccactttatggatattgcca

SEQ ID NO: 798551 - DNA, 532 bp, Homo sapiens
ggtgggaaagtaaattgcagtgggccgaggctgatgggtgggcaggggtgtcgcagtgtggagggaagcgctgaagctatccctacagggaacagtcctacccctttaatgactagaaaaacagttttttaagaaataggacattttctaaattataacatctagatggaaaccacagtggggatgagaagaccaacaggaggctgagcaacgacagctcaggtttgcatgttcacttaaagagtcgctggaatccaggttgccctgttactaattaaaacaacaacaacacttaaccatgaaaacccataatcgaggagtgactgtttacattaaattactggggattataagttgattcccttcaactctgwcttctcagatggccatgtttacagtcccagcagggaagttaacaaactcgtgttaagggttactgctaactgaaggttgaccataaaaaatgcatgtgaaatgatcttgtaaactagcatcacagtttacaggaaggtccactttatggatattgcca

SEQ ID NO: 798552 - DNA, 607 bp, Homo sapiens
acctctgtcatggatttatttcatttatacacctttctccatccttgggttatacgctcattctggatagccacttattttgaatgcccatagcaactgataccatgcattataaatactaggagcttgggccgggcrcagtggctcatgcctataatcccagcactttgggaggccaaggcgggtggatcacgaggtcaggagatcgagaccatcctggctaacacggtgaaaccccgtctctactaaaaatacaaaaaattggccgggcgtggtggcgggtgcttgtagtcctagctacttgggaggctgaggcaggagaatggcatgaacctgggaggcggagcttgcagtgagccgagatcgtgccactgtactccagcctgggcgacagagcaagattccatctcaaaaaaaaaaaaaaaaatactaggagcttgatgactgtttgctcaattgaagttgaatttaaccctaggcagagtttatagggattaaactcaggtagtctggctccaacatctgtgctcttaatcactatactacattaatgatggctcatgaataatcttgataaatgggctgtagaatgttttttaaaaaatac

SEQ ID NO: 798553 - DNA, 581 bp, Homo sapiens
caaattacaaggaagtttaagtcacactttgagttgctgacaaacctaggacaaacccccaggttttctccttttggctagcctatatactggtgcagagccattcttgcatcaatgtgaaacatttattttttgcctgggcttctgttttaacsattgaccttcatctctcctgtcctgtagctgggatgaaagcagctccatcagtagtggactcagcgatgcctcagacaatctcagttcagaagaattcaatgccagctcctcactcaactccctcccaagtactcccactgcttctcgcaggaactcaacaatagtggtacgtgagtttgcaaacacccaagctgccatctcaagatgaaccacagggcaaatggcattatctgtgtatggggttgcacgtacacacccactccatgggattggttctcataggcctttggccaggtcattttagagttgcccccaccccctcccaaaaaaagctaaggctactcacccaagacattagatgttgtcatattgtgtatacttagtgcctacaccaatctagagtgatacatgtaagagctattcca

SEQ ID NO: 798554 - DNA, 638 bp, Homo sapiens
catgtaacacactgagcacagtgcctagcaaatgaaaagcgccccaaaattgattgttttatattactatctcattgttatctacccactccactatgtgggtttatagaggaaggagtcatggcctctgcccttggsagctccctgtcctgatggaggagacacagtgctgcactcgacaacccactggttggttggaggaaacatgggtcttgcctcagggagctcccattttagtggaggagatgagccccagcctgttcttcctgagtcctctattttcctggatccttgctcatgagccgtggtatgccctcagcctgcccctctgccaccagtccacccatctcctcccttttcccctgcagccaggcctgccatctctagaaagcccccatctctcctttctgtgtccttgggcccaggtgtccttgggttactgggtgacttgcttttcaggtcctgcctgtgtgtgccaagcttgttctcaagaagcatctccccaggatgctagttcctctctaaacaccgcccagattgcagacacaaaaattagacctgtcggtttgcacgctgtctgccttaaatttgcatttgattaagaagcaccagcgtcctcccacccatggttcttcctt

SEQ ID NO: 798555 - DNA, 505 bp, Homo sapiens
ctccttcctgaaagctgcacttatttcagccaggctgggctcaggtttcagggctcagggactctttctctccctttctccttcccaagactgaaatgcagctgcccagaagtgctgaggaggacacagagtcggcttcctaggcacaggcccagctctgtcccctttccttgtgctgggaccttcagtggaggggaggagtcatggagcctcagggaggcaaagcaggccacacakcgagggaagcggctggggagagctgactcgcaggaaatagtttcaccccagtggtccaggctggggttcccggtagctcctccaccattctccccgcaacacccaaccagctctgcttttaaaaggtgaacacaatctttcagaagctgcagcccaagccctttctggccctggcgaaccttccccattcccctcttgccaaacatttttataccaaaataattagataattaataatcatgtcaaatactgtgtttctggcactcca

SEQ ID NO: 798556 - DNA, 633 bp, Homo sapiens
tctctctctctctctctctccccattctgactagtggcgacaatattggactatgcgctctagagtcagactatctggatttgaattctggctttgccatttgctgttatatgtccttggacagcttactcaacctccccaggcttccgtttttctcaactgtaaaatggggataataactgggctctctcaaagagttgtcctgaagattaaatgggctaatatacataaagctgctagaatagtgcctggtacccagccctgtagaagagttagccaatactaatcttactagtgtcacaaccagaaatcccccagggcctcctccaattgtcatccacacctggactcagcccctccccactcccrtccccatttgcctgcagatggttctctctgctgtgtaaactgttgccataacaaccactcccagctcccagcagcagtgacttctttggagcagggtgtcacatgaagggtctgggcaggatcactaatggaaaaaattttcagtaaaccttgaggttcactgggcaggaaagtcaaggcctgttggggaacagagggccacgtctccaggctgagacaggcaggccaccttctgcaggaggccagccctctgagcccagcccg

SEQ ID NO: 798557 - DNA, 499 bp, Homo sapiens
cgcaatcttggctcactgtaacttccacctcccaggttcaaacaattctcgtgcctcagcctcctgcgtagctgggattacaggaacatgctaccacgcctggctaaatttttttgtattcttagtagagatgggtytttgccatgttggccgggctggtctgtaactgcctgcctcagtctaccaaattgctggggttacaggcatgagccactacaactgacccatattttggtattttgaagatgtatcttcatgatatattcctggaattaggactccttaattgaagagtaaatgtctgtgtggttttgttagatattgacaaatcccccttcatgaggctataccattttgcatttccatgatcagtgtttgagagtgtgtatttccctagagtctcttcaatggaatgtattatcaagcttttgaatagttgctaatctggtgaatgagaagagtctctgtgtagtttcaattttaatttcacgagtgaaat

SEQ ID NO: 798558 - DNA, 613 bp, Homo sapiens
tataatgaaagtctgtttcccaatagcgctgaacatctattcatttatttctcttcttgttaccatttgcagctccagaggcacttatgattttagggtggcattcataatagttaacatgtagcagctgagaaacattttggaatgttaagcaattcagattgctttgaaatttgtatatatataggtctataatatcacttaaacatagtgttaattcttttcattgtcaactagttggacattaaatggtaaaattacaaacagtattgtttttatgaaacaacaaaattttattaaaattataaaaattttaaaattcagcttgatttaactaattttgaataaaattatacaatccatcaattacaatttgtgttttactgcttaattgtaagaaatrattttaaatattttagaagaaaacacttcctttggaaaactacatttaatttttaaaattgtatatatattctaagttgcaattttgaatgaacacgtggtaaaattacatttaattttttaatcttttagatccttaggaatgactacagtcaaaatcacaaaagaagtagaaaatgtaaaagtaaccccaaaatagaaagaagaaata

SEQ ID NO: 798559 - DNA, 657 bp, Homo sapiens
acttatacaaattttgaaaatgccaaccctgcattttaaaaaactgaacatctggggcacagtggctcatgcctgcaatcccagtactttgggaggctgaggcaggtcaatcatttgaagtcaggagtttgggaccagcctaacatggtgaaaccctgtctccaccaaaacaaaaaccagccaggtgtggtgatgtgcacctgtagtcccagctactcaggaggctgaggcatgagaatctcttgaaccctggaggtggaagttgcagtgagtcaagatcgtgccactgcactccagcctgggcgacagagtgagaccctgtctcaaaaaaataaacaaatacaccaataaataaataaataaatgaacatctggcaaatacagagagagagagacttgtagagctgtaaatataataaaaatatataaggtaacttttgaagtattctatttgctgtatacaaaaaggcagattattgggwttaaattcaaactcctctgcctatttgttgtctatgtaactgttttgagcctcagttccttatccgcagaatggggacactaatatcttcctcagagagtgtaatttcattcataaagcatctggttctgtgttgaatccacacaagcacttggtatgtgatcattcatcatttg

SEQ ID NO: 798560 - DNA, 601 bp, Homo sapiens
tagctctagtaattcaaagctacataaaacgtggttattaagtgaaatcattagaaatgtgtccagaaaaaaattgcattttctgaaggacagaaaatacacgtatatctctcttggagagtttcaagtaagggctgccttagggtcccctattaatgaggccatctctgaccccttaggtgtggatgttcagttgttacaatgtttctaacactaytctattaaaaaggccaaaaactaactgcacaacagatgggcaagtgcccattatgggcctgccctgtcagtgcactctgctgcagctgtggttggacttgctcccttggcaattcctgggctcacagtggtcagtgaaatacttaggcaggacgtggaaggtcctaaggtgctgtgacaatgctccagcctctactcttgtgtctggatgtgagaggatatggcatagacagctgaaagcctcagaagacaggtggagtccaggaaattccatttgcagctatctttatcagggtgagctgcaattgtttgctgtgatagtgagctgaaagcaacagttctatcagattattttttagagatgactaaagtacactatagaaag

SEQ ID NO: 798561 - DNA, 446 bp, Homo sapiens
aaagctcaacatcactgatcattagagaatgcaaatcaaaaccaccacaatgagatactatctcaagccagtcagaatggcgattattaaaaagtcaaggaacaacaggtgctggtgaggctgtggagaaataggaatgcttttrtactgttaaagggaatgtaaattagttcaaccactgtggaagacagtgtggtgattcctcaaagacctacagaaccaaaaataacatttgactcggcaatcccattactgagtatatacccaaaggaatataaatcattttattataaagatgcatgcatgcatgcgtattttcattgcagcattattcacaatagcaaagacatggaatcaacccaaatgcccatcagtgatagactggataaagaaaatgtggtacatatacaccgtggaatactatgcagcaataaaaggaacaagat

SEQ ID NO: 798562 - DNA, 594 bp, Homo sapiens
atctcaagccagtcagaatggcgattattaaaaagtcaaggaacaacaggtgctggtgaggctgtggagaaataggaatgcttttatactgttaaagggaatgtaaattagttcaaccactgtggaagacagtgtggtgattcctcaaagacctacagaaccaaaaataacatttgactcggcaatcccattactgagtatatacccaaaggaatataaatcattttattataaagatgcatgcatgcatgygtattttcattgcagcattattcacaatagcaaagacatggaatcaacccaaatgcccatcagtgatagactggataaagaaaatgtggtacatatacaccgtggaatactatgcagcaataaaaggaacaagatcatgtcctttgcagggatatggatggatctggaaggcattatcctcagcaaactaacatgggaacagaaaaccaaacactgcatgttctcacttataagtgggagctgaacaatgagaacacatggacacagggaagggaacaacacacattggggtctgttgggggagctgtgggaggtagagcatcaggataaatagctaatgca

SEQ ID NO: 798563 - DNA, 576 bp, Homo sapiens
caagcaaacaaaaatgtaaaaagaaaactaataaacactctacactttaacttcatccccatgctttttacctttttcttgtttcccttcacatcttattattctgtgtcttgaaaagctgttgtagctattatttttgattgcttcatcatttagtctatttaagtcaagagaagtttacaccccccaattacagtgttataatattctgtgtttttctgtgtgcttactataaccagtgagttttgtactttcaaatgattttcttyttgcttattaacatccttttctttcagattgaagagcttccttgaacatttcttagaggacacgtctggtgttgatgaaatccctcagcttttgtttgtctaggaagctctttatttctccttcattgttaaaggatattttcagcagatatactattctagagtaaaagggttttttttttctttagcactttaaatatgtcctgccactctctcatggcctgtaaggtttccactgaaaagtctgctgccagacacattggagcgccattctatgctgtttgttttttgctgctcttaggatcct

SEQ ID NO: 798564 - DNA, 506 bp, Homo sapiens
gaaatctcagatcagacaaacaaaatcttgtagtactttggcatgaaataatcacccagataccctaaaagctacagattttttttttaactagcgatggccaagcaacactgacagatactacacaatacaaaataaaacaagttggacttgtcaggtttcatatagccaagtagtttagaaaggaaaatgttaacaacttatctcatactcatcagctggtagacaataccatatatattatcataaaatctatttatcaagtggtatcttttgggcactatatgtcattatatatcatttcatttaatgctcacaaccatattaaagggtcattaaacctattttacagatgaraagacaggttcaacaatttttccatcatcacccagccacgccagtaactggcaggatcagtatttgtatacagatcgctgatttcagaccatattctcagctaccatgtgtatattgtcctcattccccagcccaagctgtgccttttg

SEQ ID NO: 798565 - DNA, 520 bp, Homo sapiens
atagcgcttgatgtttttgttttaaccacagatagagataggaagtctaagaaactgactggggtacagagaacctaggtccagctcatgtggaggaaggccactgtgattccacagacagcaaccagtcagcactcagctcacaagattccatccccgccttgggactgccactcccgtggagtaactggaggtggatgagacactcctaggctgtttataatcttgaaaggcactaaaccrggacacttgccaaccctgacaaaccaaaatcccacctagaaaagtttccatgactctttgctgctcatagctccatgaggaagaaaggacaagatttagcaatgactttatttattcatttgtatacactccactgcttttcaaatgaattggcagtttaaaattaaaaacccagaatcaatgaaaaaattattaatgataacagctaacatttattgagcatagactatgtatgtataagcattaacatgtaatactgtttcatccttctatcctc

SEQ ID NO: 798566 - DNA, 567 bp, Homo sapiens
ctcagcctcctgagtagctgggactgcaggtgtctgccaccacgccatgttggccaggctggtctcgaactcctgacctctggtgatctgcctgccttggcctcccaaagtgctgggattacagacatgagtcaccgtgcccggccacaactgattcttaaaaagtaagtttatcaattcaacccaaagttyggaaaaaacaatagagacatgcctaaaactattattttaaaatcatagttttaaatcaatcattacaacatcatgaacaaaatgtggattatttccaaacactgcccggcctcaaacatgtcttcacttagctcactccagtagaaagaacattaagagccatcaaacacacgagcttgtttttttaatgttgtaggggagagagttgggagtggggtttacaaagagcattaactgaccctaactgactctacaagatttcttttttattaaaattcagcccaaattgagaacaaattctgtcttttcttcctttccaactcatcaaagcccagttcctcaaagcttaatgtcccacaagtagttgttaatggg

SEQ ID NO: 798567 - DNA, 580 bp, Homo sapiens
agagcagtgtgtggagacccatatagtgaactttttctccaagaactaccacaggaacataccaggaaagctgagagaatctacagacctttgaaggaggtggattgccactgcaggctccatgggacagcagaggaactgtgagtgtgcttgctttctcagctgggaggcttgtagcctggggcaagtactcagtcctgctcaagggctgtctggaaataaactcagtgctgttggggggagacagtgggagtgagactggcctttctggctatgggctctgtgggagctggtaaggcctatggttgctgcctttacccccttccttggcgacctgtgtgacgcagcagagacagccataatccycctgggaatataactccattggcctgagaaccacatccccttatcccacaatggccacaacaaaccctgcccaaggagagtctgagctcagacatgcataatcctgcccccacctgatggtttttctctacctaccctggtaaccaaagacagaggacataatctcttgggagctctgtgaccctgcccaatgcccaagaaacctgaatactca

SEQ ID NO: 798568 - DNA, 636 bp, Homo sapiens
gaatgaaagttggaaaatcagtcgcctgtagcaaaaccaacaaagttaataccactaacaaagcttcacatgtcttagctcaaaatatcatcagtgacaattgtgaagagttgatcatcttgtcccaacactaatgatatttcaggcatgtatctacaagttcaaatgatagtaagttcatagcttattatacttgaaaacaagcatatattacaataaaatatcactgtgggtagtaatttctttactttggaataaatttcacatgtaaaaaccatgtctgtaagttgtgctgagaatrtttattctcccacaatgaagataactttcctgaacaatgtatcatgatagttattgcattatcctctatgtctacttgacccataagtttctcaattatctattattcaagattctatttttaacatcttgccagagaacagcattggcatgtgagtatgcctgtgcttccatgctgtgtatgtgtatgtgtgttataaaatgatggttcgttagttctgttaggtgacaaatgttgagatgagtgaagactgtccacttttccttccaaattttgcttctaggtaagaatgaaagaaatgtcaaaccaaattctggcttacatatagatatttt

SEQ ID NO: 798569 - DNA, 610 bp, Homo sapiens
aaggccacacatcaagcctttcattctctcctatgctacatttgccagttgtgttcattagtttactttcctttctttttaaaatctcactttattgaggtatgattgatatacaaaaaggtacacctatttaatgtatacaacttgatgagtttgagataagaatgcacctgtgaaactaccactgtawtctatgctgtgaacatatccatcacttccaaaaatttcctcccaaattgtgtgtgtgtgtgtgtgaacataatataaatctactctcttagtgaattttaaagtatacaatattagtgcctatattgttgctataggcactgttctgtacagtggatttctgggaacgacccaccttgcataagtaaaactttgtacccttgactaatatctcccatttaaaactaagagtggaaattaaagttctgtggaacaattttcaaagaagaacctactagttacttttataatacatcagtcattaaaggaatcctttaaactagactactgaagtaaccagtttttaccaagcactagtaacatttaaactccatgtaagcaaaataaatagtagttttgaaaaaattatccagatatctct

SEQ ID NO: 798570 - DNA, 626 bp, Homo sapiens
aaaaacaccaccgtaaatctagaactctctgcctacttatactcctgaattcaaatgtgtactgctggctgggcatggtggctcatgcgtgtaatcccagcactttgagaggctgaggcaggcagatcacctgaggccaggggttcgagagcagcctggccaacatggtgagaccctgtctctactaaaaatgcaaaaattagccaggcgtggtggcacgctcctgtagtcccagctacttgggaggctgagtcacaacagtcacttgaacccacgaggcagaggtcrcagtgagctgagattatgccactgcactacaacctgggcgacagagcaggacttcatctcaaagacacaaaacaaacaaaaaaaccgaatgtgtactgcatcaactttcagtgtgcttgataatccaccatatcctatataccctcccttcccttttcatatgcagtttaaaattgtgcttttcttcgaaatgatgctttcctagttttggagtattttaaatcaatatctcactgaaactgtcacattatatacatgtgttattattattttctgacttttaagaatgaaaaaaacatacctttgatctgtgtctctgtttatatatgcataaaact

SEQ ID NO: 798571 - DNA, 599 bp, Homo sapiens
gtatccttcaatccaatcaagttgacattcagtattaaccatcacaagtccaccccttgtcaacttgaacccatgtgcatctcgtgagattatacatcatcttcaaataaagacaataataaggtcataattatacctaacataatacagctgtcctttgtataaccggaaatgcaccaatccccaacccaaatactattacataaagttaacaatatttaaatgcygatatgaagtcaataaatcttatgtcacatgataaaggaaaaggaaataaaggtattttcttagtacaagtgtatacatgcacaaacatgtttttaacaaaagaaggaggaaatactcatgacaattacagtccccgtttctgcagtggtctcgtggtcgtagatgctattgatgactaacttcttctactacccattctgtattccctttgccttcagcaagcacctcaacaggtcatgtttttttttccttgtggagtgacccaaaccttcattcctgggggatctgggccatttctagtcctgcctggattgggctgttgtagtttcccattgaccttaatcatagggcgtggtaatactaagagacac

SEQ ID NO: 798572 - DNA, 471 bp, Homo sapiens
ctgtgaatgtaggttatacctagcaatagctcccttcatactgtgaaatatattgtatttttgtattcaagcagagaatgagcaatatttattatttttatagcttctataatatctttatagattgaggtgttttataatcctattttggtggtccgggatattacttcagattttttctcatccaaaacattcatatcaacatgagatggagtytggcctaaattaatgatcaagccagcaggtttgaaaagaaatatattttattaatgttaagtattgtatgttataaagtaaaacattcgtgaatattaagtaaaactaagtaaaatgaataagttacagcaggattgctttccctaaatgttatgcattacgggcctgaacattcatatgtatttccacattgttactaaatcaattcacttatattgttggtggcatgattttattagtgacatctaaattaac

SEQ ID NO: 798573 - DNA, 587 bp, Homo sapiens
tgaaacaaacaggttatgttttgttttgttcttaaagaccctctgtctgctttcctgttactttggccctaaccctgatttccttggcttcaaagaacaagactcaagcctcctctttatggccatcttccattcaggcaactaagggaaaggagaagccacaagaattgggcgacatggccagagtctccaggaaggcttctgtttggtgaccacgcagagagctagtacttccgggraactgttgagttcccactgaattataagtaagtccactgatttgccgtctccttattacccatataaccctggtcggaggcagtgaccccactggggcagatctggggtgaggtcaggaactgacagaccatccacacaagagcacaataacatacctatagctgataccaaaatgtgactgcattacctatttttggcctctaaaaggcgacatttttgtccctgaattaggaatttacccccaaattactctgaaaaagcattttctattcttgacatccttgaaatatttttaaaatcaaaaattgcttcaacaatttggaatccaaatctgaaggtattggtca

SEQ ID NO: 798574 - DNA, 587 bp, Homo sapiens
tgaaacaaacaggttatgttttgttttgttcttaaagaccctctgtctgctttcctgttactttggccctaaccctgatttccttggcttcaaagaacaagactcaagcctcctctttatggccatcttccattcaggcaactaagggaaaggagaagccacaagaattgggcgacatggccagagtctccaggaaggcttctgtttggtgaccacgcagagagctagtacttccgggamactgttgagttcccactgaattataagtaagtccactgatttgccgtctccttattacccatataaccctggtcggaggcagtgaccccactggggcagatctggggtgaggtcaggaactgacagaccatccacacaagagcacaataacatacctatagctgataccaaaatgtgactgcattacctatttttggcctctaaaaggcgacatttttgtccctgaattaggaatttacccccaaattactctgaaaaagcattttctattcttgacatccttgaaatatttttaaaatcaaaaattgcttcaacaatttggaatccaaatctgaaggtattggtca

SEQ ID NO: 798575 - DNA, 605 bp, Homo sapiens
tatagaaatgaaatattgattacttgtcttaatccatccacaacttgtgcgagatcacactggccccctcctgccccacacagctgcagagacccaggcagatgggggatgtgaatgctttcaggaactgaacccccttgaatggctatttagctaaaattcgtcttcaaaaaaccttttctcacttcactatttcaagaaccagaagtaaggcctgggataaactttttcccatgaaaatgagtgcgctgtcakcctgcagctttttccttcccacccacagagctggtcagtctccattcattctggtaccacaggcatgcagaatgactggtggcccgggtcgcggctggcagaggctcactgccacccaggtttggacctgactctcagctgggaatagcaagcacaaaacagcagaagaataaccaaggcttgttttgattccaggcagattgcaaataatgcattccctagatgttaggtcaaaacaaccaccaacctaaactaagcaagaaaaaaatgtttcacaagaccaagcagccacagttgccctaaacttgttcttgggcagaaacactattagtttttaattggttactctg

SEQ ID NO: 798576 - DNA, 361 bp, Homo sapiens
caaagaaaggggtgacagacggcacctggaagatcgggtcactcccaccccaatactgcgcttttccgatgggcttaaaaaacggcgcaccacgagattatatcccgcacctggctcggagggtcccacgcccacrgagtctcgctgattgctagcacagcagtctgagatcaaactgcaaggcggcagcgaggctcggggaggggcgctggccattgcccaggcttgattaggtaaacaaagcagccgggaagctcgaactgggtggagcccaccacagctcaaggaagcctgcctgcctctgtaggctccacctctgggggcagggcacagacacacaaaaagacagcagtaacctctg

SEQ ID NO: 798577 - DNA, 591 bp, Homo sapiens
tccatttgagtgagcaccaagtatgcatcacgacttgagattataaagttggcttaatgatgagacaggtttctcagtcgggttttccattggctcgaagttcacaaggcagttgttgcttgtctcagagtgtccttaggtggactacatctgaacccttggcgttattataatgcagattctagctgtgctcaaaccaatgaatcagaatctcaggagggtggcgctcagaaatctgcatggttgatcagttctttagcagattcttatttttgtaygctaaagtttgagggtcaccactggagagattccagaacagggcctgcaagggaattgttcaaagtttgctcaagttaactttgttgttacagcattagcttgaatatcaggaggttttgtatttaagttctctaaaaaaagaaaaagaaaaaaagagaacagtctcaatatataaaaggaaaggttttcatatatgtgcccaattataagtatcttgagtattctaggagtctaaacagaatgtctttagatcatccttataacgatcctgagactcttttgactgttttgagttgaagacaggtaataaga

SEQ ID NO: 798578 - DNA, 610 bp, Homo sapiens
caaatactaatgtgggaaatttgaattttaattaactgtttgtttcaatgttaggataaattaatgttagataaattctttggtaatttttccccctaaaattggatttttcaagaaacatcactggttcagtatattgttatttggggtagcataattttaggcgataacttaatatttgcatatatttgtcactactttgagttggtttttgtcccctgacccccagccaggatgttagatcacacagatttttttttctttgagcccttagggagagtccaaaacagtcacttcatgtactaggaaagtttacccagtcagcacacacagatatgttgttgcctacatttatatttgtgagagtgactgttaagaaactagcaggtttatraaatccgtgtgagaatttctctcaaataactgttaatggacaatccagcaatcctcccatctcaggctcccaagtagctgagactacaggcaggtggcaccatactcggctaattttttgtgttttttgtagagatgcggtttcaccatgtcacccaggctggtctcaaactcctgggctcaagtggtgctcccgccttggcctcccagagtgctg

SEQ ID NO: 798579 - DNA, 507 bp, Homo sapiens
atatgtcaatctccagtagaaaaaaaatagtcttgtgaaccgtacacactaaaattcatagaggaaaaaaagaaaatcctaactgcatagtattgtagttcaattgtatgactatatcatttctttatcttttttttttgttggacatttggtttgtttccagtgttttactattacagtgctgctaaaaacttttacatgtaggctatacatgtcttctgaaatacattaagttttctagtatataactagatcttcctataactaggaagattttacggagtattagggtattaatatcttttaggtcatattcctttcaaagctttttaasagatgaaggcttatatttagagtactttaggaagctcaacatcacaaaaatatgaagtatagaatggaagagagagacttagggcaatgaggaaaatcttaaaaccagtccaagcctgagacagaggccctgaacatgagtgtttcacagggcagtgatgtgaaaactgaaag

SEQ ID NO: 798580 - DNA, 538 bp, Homo sapiens
cgatgaatttcccagatgttctttgtgcttcttgtatttggatctaggtctctagcaaagctggggaagttttcctcaattattcccccaaatatgtttaacaaacgtttagatttctcttcttcctcaggaatgccggttattcttaggtttggtcatttaacataattccagatttcttgaaggctttcttcatattttcttattcttttttctttgtctttattggattcggttaattaggagaccttgtcttcaggctctgaatttccttcttctacttgttcaattctattgctaagactttccagagcattttatatttctataagtatgtccattatttcctaaagttttgattgttttttatttatgctatctagttcattgaatatttctccctttacttcttgtatctttttttttwtatatctttacattgggcttcacctttctctggtgccttagcttaataaccaacctagtgaattctttttcaagtaagtcagggatttcttcttagtttggatccattgct

SEQ ID NO: 798581 - DNA, 601 bp, Homo sapiens
agaagagagaataaagttacataaagatagcatttaagaacaaccacaggctgggcatggtggctcacacctgtaaccctagcactttgggaggcctaagctggtagatggctcgagcccaggagttcgagaccagcctgggcaacatagcaaaaccctgtctctacaaaaaatacaaaaattagccagctgtggtggcttgcacctgtagtcccagctacttggaaggctgagatgggaggatcactcgaacccaggaagttgaagctgctgtgagcagtgattgcgccactgcactgcagcctgagtgacagagcgagactctatttmaaaaaaaaaggaacaaacccaataattttgggcataacgaccagagcacaatgagctacagagagctttctgagaagtatttgctaattttatctgcaaagataatacaagcataaaaatatatgtattcaaatgtatagatgtgtatctgcagtgagagcagagctgttcctcagtagtgggggtggctggcagagtgaggtagtgtgctttcaggaattgctttatttgtctgatgtgttctagaccaaagaccaacagaggggcttgg

SEQ ID NO: 798582 - DNA, 628 bp, Homo sapiens
tttattaagctatttatagattttaacatataatttactgttctaaacactcatttcttgatctttgctctttataccagacatccatttagtatagcatatattattcaattgtcataataagagaaaaaaatgaaaacwctctgttttaatttagtacagaattaggttttagtaactcctttcctgctttttggttatactatttatatgtataaattaaataaatcgttttcataagagttttagcaaaatttgaatgggctttttgtaatggtttccacctcctgcaagtttaatgataccatattggaagaattatataatcactgaaaagattccagaaggtagcacagtagtcacactgcacctattcaaaagtgatatgaaaggtcaattccatttaagatttcaaatatacactctaattttaaagctgccgaatatctcacatatactcttgaacactttacacgtaatagtggcagtgttagtttaagaaaaatgtgtatttaacttaacactaaatatatttaatatttaaatatatattttaaaaggtttaggaaacttaagatgaccaaaaaatgtatttccaatatttctacaacgcccaagattcatggcc

SEQ ID NO: 798583 - DNA, 628 bp, Homo sapiens
tttattaagctatttatagattttaacatataatttactgttctaaacactcatttcttgatctttgctctttataccagacatccatttagtatagcatatattattcaattgtcataataagagaaaaaaatgaaaactctctgttttaatttagtacagaattaggttttagtaactcctttcctgctttttggttatactatttatatgtataaattaaataaatcgttttcataagagttttagcaaaatttgaatgggctttttgtaatggtttccacctcctrcaagtttaatgataccatattggaagaattatataatcactgaaaagattccagaaggtagcacagtagtcacactgcacctattcaaaagtgatatgaaaggtcaattccatttaagatttcaaatatacactctaattttaaagctgccgaatatctcacatatactcttgaacactttacacgtaatagtggcagtgttagtttaagaaaaatgtgtatttaacttaacactaaatatatttaatatttaaatatatattttaaaaggtttaggaaacttaagatgaccaaaaaatgtatttccaatatttctacaacgcccaagattcatggcc

SEQ ID NO: 798584 - DNA, 612 bp, Homo sapiens
tttacatatacaaccctatatgtatttcatatgtatgtatatatgtatatcatataggtatataatataaagaaaaacaaagtaatgatgaatatcaaattcagagttttgtttacacctaaccagaaggaaaaagaattcactcaagagagacaaagacaacttccatactattcaaccactttatgcaatgagttatttttataggttatgatatacataaatatgtcacattattttgtatatcaaatatcatataataatattatttaagaattattggtaggaaaagaagaaraaatgcaaccatatagtaactcagtttaaagaaatgtcaaaaataaaaaagtaaaagcttaaatttttttttgctaacttggttgccaaacttcttcaaataattgcatgattttcctcactgcattgaattgattgatcaagtttctagaagtaacagtattgttatggattgaattttgtcctccccccaacatccccaaaaaggtatgttgaagttctaacccccaatacatcgaaatgtgactttatttggaaacagggttcatatagaagtaatcaaattttgttttttgttctttttgttgttgttgg

SEQ ID NO: 798585 - DNA, 661 bp, Homo sapiens
gggatttcactggagaatattacagttaaggtactcttataaaatttacattgtagtggtagtaatggattacataaaatagtaaacagataaccttagattgtgatacatgctaaacagaaacgataatgtgatagcaaggctgggcaggagcattgttaggaaagagctctccaaagagttggtatctgaactgaaacctaactgatgagaaggagccaaagagttggtatctgaacttaaacctaaatgatgagaagatacacctaaagagcatttaggctaaaggaacagcaagtacaaagtctctgaggaggcaatgaccttgtgtttagaggtgagaagatcrctgtggttggtgctcagtagaaaggggagcaggagacattattcagagatgaggctgggaagcaggcagtgaccataccatgcaggactacatagggcatgaggagaatactgcattttatttttgttatgatgggatacctaagaggttccattgtaggtcattaaatttatgactaaccaaactataacaaatatctctttagcatgttctctgattataccttattatactttaattcaaacacccattataccttgcctggactactgatctctacactggtttctctaacaccagggcaatccctac

SEQ ID NO: 798586 - DNA, 624 bp, Homo sapiens
ctaaccaatttgataccatgtgagtactcaagtgtctagtttatagttacttctagtttttgagatctagattgtgaatggactttcttccttttaccacactgccaaatgaggtaaaggagttctagatcctgactttggagcttcttccctcagtgtaagataatcagtgtcgccgtgaatcttcccatgtttctatacctttaaaataagacacacagtgataatcaaccccgtctctgtcattgccctgttagctacagggtagttctgccagtcacttgccaatcaatttcacagaatgtaggttgtgcctcacccaattcatctcctaattaatgaagtgacaaaattttracattttgttggcttctctggctctcgtgggaatttggggaaaaggattgaaggaggctgagaaggagaagagtgaacaagaagagaagaagatgcacttaacgggtttttgctaatttttagttaataaaaattttgtaaataaataatattttctgattatgaaagcaatatacgttcagtgagaaaatcttttttaaatactggaaaacataaataataaaataaaaaccactttatttaagtttcatcagtttcattttgata

SEQ ID NO: 798587 - DNA, 552 bp, Homo sapiens
acagccgaatttgaacaaaggtacaaagaggagctggcaccattccttctgaaactactccaaaaaacagaaaaagaaggaatcctccctaactcattttaagaggctgccatcatcctaataccataacctagcagagacacaatacaaaaagaaaatttcaggccaatatccctgatgaacgttaatgtaaaactcctcagtaaaatactggcaaaccgaatccagcagcatatcaaaaagcttatacaccacgatcaagttggcttcatcccyggaatgcaaggctggttcaacacatgcaaatcaataaacataatccatcacataaacagaaccaatgacaaaaaccacatgattaccttaatagatatagaaaaggcctttgacaaaattcaacagcccttcatgctaaaaactcacaataaactaagtattgatggaacatatctcaaaataataagagctattcatgacaaacccacagccaatatcatactgaatggcaaaaactggaaacattctctttgaaaaccggcacaagacaaggat

SEQ ID NO: 798588 - DNA, 552 bp, Homo sapiens
acagccgaatttgaacaaaggtacaaagaggagctggcaccattccttctgaaactactccaaaaaacagaaaaagaaggaatcctccctaactcattttaagaggctgccatcatcctaataccataacctagcagagacacaatacaaaaagaaaatttcaggccaatatccctgatgaacgttaatgtaaaactcctcagtaaaatactggcaaaccgaatccagcagcatatcaaaaagcttatacaccacgatcaagttggcttcatccccggaatgcaaggctggttcaacacatgcaaatcaataaacataatccatcacataaacagaaccaatgacaaaaaccacatgattaccttaatagatayagaaaaggcctttgacaaaattcaacagcccttcatgctaaaaactcacaataaactaagtattgatggaacatatctcaaaataataagagctattcatgacaaacccacagccaatatcatactgaatggcaaaaactggaaacattctctttgaaaaccggcacaagacaaggat

SEQ ID NO: 798589 - DNA, 329 bp, Homo sapiens
tctcatggataggaagaatcaatatcgtgaaaatggccgtactgctcaaagtaatttatagattcagtgctattcccatcaaactgcagttcacattgttcacagaattagaaaaaaaactactttaaatttcatatggaatcaaagaagaccccatatagtcaagacaagcctaaraaaaaagaacaaagctggagacatcaaactacctgatttcaaactattagaaggctacattaactaaaatagcatggtactcataccaaaacagacatatagaccaatggaacagaagagacctcagaaataacaccacacatctacaactg

SEQ ID NO: 798590 - DNA, 664 bp, Homo sapiens
gtttggatccattgctggggagttggtatgatcttttgggcatgttatagaactctgttttttcatattactagaattactagttccttctcatttgggtacagtatttcagtggagatgtctgaaactcagggctgctgtttcagctgctgcttgtcatgctgacaagattctcttgtcccatgggggtgattccttgatgtcatgctctcaaccttacccttggattggggcctcctgaktgctgaactgcaatgattcttattgctcttcttggtctagctacttattgggctcccaagctctgggctggtgctcggggatgtctgcaatgagtcttgtgatgtgatccattttcaggtctctcacccatggataccaacacctactctggtagaggtggcagggaagtgaagtagactgtgaaagtccttggatatgtctagtgtgctggctttcatcaattctggttgtgctagcaatgaagttgtcatatggacacactcaggttctctggttagccacaatgctgcaggcagtagaattaggtgttgacatctccttcctggaatcaggtttattctgtcatgagttgctgtaatggcctaagttgatttgtctcaagtcaggaggtggcattttcaaaagagcaccagttacagta

SEQ ID NO: 798591 - DNA, 664 bp, Homo sapiens
gtttggatccattgctggggagttggtatgatcttttgggcatgttatagaactctgttttttcatattactagaattactagttccttctcatttgggtacagtatttcagtggagatgtctgaaactcagggctgctgtttcagctgctgcttgtcatgctgacaagattctcttgtcccatgggggtgattccttgatgtcatgctctcaaccttacccttggattggggcctcctgatwgctgaactgcaatgattcttattgctcttcttggtctagctacttattgggctcccaagctctgggctggtgctcggggatgtctgcaatgagtcttgtgatgtgatccattttcaggtctctcacccatggataccaacacctactctggtagaggtggcagggaagtgaagtagactgtgaaagtccttggatatgtctagtgtgctggctttcatcaattctggttgtgctagcaatgaagttgtcatatggacacactcaggttctctggttagccacaatgctgcaggcagtagaattaggtgttgacatctccttcctggaatcaggtttattctgtcatgagttgctgtaatggcctaagttgatttgtctcaagtcaggaggtggcattttcaaaagagcaccagttacagta

SEQ ID NO: 798592 - DNA, 664 bp, Homo sapiens
gtttggatccattgctggggagttggtatgatcttttgggcatgttatagaactctgttttttcatattactagaattactagttccttctcatttgggtacagtatttcagtggagatgtctgaaactcagggctgctgtttcagctgctgcttgtcatgctgacaagattctcttgtcccatgggggtgattccttgatgtcatgctctcaaccttacccttggattggggcctcctgattgctgaactgcaatgattcttattgctcttcttggtctagctacttattgggctcccaagctctgggctggtgctcggggatgtctgcaatgagtcttgtgatgtgatccattttcaggtctctcacccatggataccaacacctactctggtagaggtggcagggaagtgaagtagactgtgaaagtccttggatatgtctagwgtgctggctttcatcaattctggttgtgctagcaatgaagttgtcatatggacacactcaggttctctggttagccacaatgctgcaggcagtagaattaggtgttgacatctccttcctggaatcaggtttattctgtcatgagttgctgtaatggcctaagttgatttgtctcaagtcaggaggtggcattttcaaaagagcaccagttacagta

SEQ ID NO: 798593 - DNA, 646 bp, Homo sapiens
ttggaaccttggcggtgcccagattgtaaaagtcatcaactcagaatcataaaattcaaaagacatttcttgaacttgtctgaagaatcatgatcaaaggaaaaatgtgtttcttagctggtataatatgaataataaataaaatttacattgcaacaatgaaggggaggctaaaattaacacaagtttacctacataacaaacctgtacatgtacccctgaatttaaaatttcaataaaattaaaaataaataaaaakaaataaatgtaaatttataataatacattttattgttttaaactttaaaaaggtatatattatagtatttgttttactaataaaaatattcatagtctaacatgccatttttatcagtttatatatttactggaggtgtgtattcacttccaatctcagtgtagcaatctaaatattttagaaagttttgaatttctcaattttatcatttcatgggcatttttaaggaaaataatctttgtaccaattgcagagtatagtgtagaaaatgcaaaatatataacgcgtaataattctattcatagaactcaaaatatggttggaaataacagcatttcaaaatgcaacaattaggtgaggatagaaactaaaccaaaaatccataaa

SEQ ID NO: 798594 - DNA, 329 bp, Homo sapiens; identical to SEQ ID NO: 798589

SEQ ID NO: 798595 - DNA, 579 bp, Homo sapiens
gtataactattgttttatagagttactaattaagttggctaagtgtataagaagaagaaatatgcatttttactatcattcatacttacataattatttttacctgtgctctgtttttttcatgtggattctaattacattatggggtcacttgctttcaccataaaraacttccattattatttcttgtcaaacagttttgcttgcaaataacttctatggtttatttgggcatttctttatttcacctttatatttgaaaacatgtgctctcagtataagattcttggttgatatttttttctctcagtgctttgagtatgtcttctcacttcctctcctcaattgttactggtcagaaattagctgtttctcatactggggcttttttgaatgtgatgaaatgttttttcttgctgctttaaagatttgttctctgtcattgtcttgaagtatttttactatgatgtatgtgggtatgaatctctctgcacttattctacttagagttcattgagcttattggtttaaggattaatgtcttttataaaattgttaagtaattacttgaaatattta

SEQ ID NO: 798596 - DNA, 656 bp, Homo sapiens
aattcttttcctagatatgctgttcttggaattccaccatttattggtttatgtggcgtggagttaataaaaagttcttcaccacctccgggcatatactttttcgtaccatttctttggtcctaatggaaaaagtatttattttatatgttgttcattatttgttggctcatttgtctattctttgtcataaatgggctggaatcaagcagaggtaatgggctgctgtgtggatatctcttttgctttactcagagcttaattcagctccagatgcccatatcacaggtgcataataaatgcttttcataatgataatgacaacagcaaagaaaaacagcaacagcagcaattaggcactccagttatctactgctacccactttattcaaacagaaatatttctctctataaacagaataaaagtctatttgcaaacctctgatctcaaaattaaaatcaaattaagcaaaaygtaatcagagaaagtaagtcatctgctgaccaatgagggtggaaaagctacctattctcaatgagggctgagtacttatccttcccagatgagctgagggaaagagcaattaagtgcttatcaattggcaactatttggaggacagtgttagggaaagttgaacaggatcccagaatgaac

SEQ ID NO: 798597 - DNA, 656 bp, Homo sapiens
aattcttttcctagatatgctgttcttggaattccaccatttattggtttatgtggcgtggagttaataaaaagttcttcaccacctccgggcatatactttttcgtaccatttctttggtcctaatggaaaaagtatttattttatatgttgttcattatttgttggctcatttgtctattctttgtcataaatgggctggaatcaagcagaggtaatgggctgctgtgtggatatctcttttgctttactcagagcttaattcagctccagatgcccatatcacaggtgcataataaatgcttttcataatgataatgacaacagcaaagaaaaacagcaacagcagcaattaggcactccagttatctactgctacccactttattcaaacagaaatatttctctctataaacagaataaaagtctatttgcaaacctctgatctcaaaattaaaatcaaattaagcaaaatgtaatcagagaaagtaagtcatctgctgaccaaygagggtggaaaagctacctattctcaatgagggctgagtacttatccttcccagatgagctgagggaaagagcaattaagtgcttatcaattggcaactatttggaggacagtgttagggaaagttgaacaggatcccagaatgaac

SEQ ID NO: 798598 - DNA, 586 bp, Homo sapiens
gtgcctaatccttaagtaagtgttgaagattaaaataactatcgtcattttggcaaactgtagctatttaataaatacctattcttttgtctgctctctgttagaaacaaaagctccaaaggtgacaaatatattccaaattgactaatcccactcctggtctttaaccttttcagagaaaaaagcttgcatcccattattttttaaaggccagaaaaggaaattcattaacatctcttagtcatttgttccagtaacatcatttataccagaaatgccttcttcaaatcccacctaataaaactggaacctattatytatctacaacatgtactcatgaagtagagaagaaattaaaatgagacagctaatgtcactagagaccaacgggcttaacagcaagagctaagaagattcaaatttgttgccaccttactaagccaccatttttagaatagatttcttacccgatatcctatttatcccctgtgaattggtaataattatggtaacaatccccctttgatatgcttgtattcattcaaccaacatgtactgaacattctattgtatgccataggccctg

SEQ ID NO: 798599 - DNA, 630 bp, Homo sapiens
agtgttctgagcaacacacttggggaagcataagatcaaagacaaagaaaaaaaaagaaaggtatggatcttaatttcgtaagaaagaggaactataaaattatcttaaatgaaaattgcaaacagaaatgccagcctggactaaccataaagtgactactgttgtaatagaaaaacaaaaaacaaaaaaaggaaaggatcttaaaatgtgtatcttaaatagtcataattaagatgcgacatatgcagccttgaattcttcacttgtaccatttttaaaaaatcatttcaaagcaagcatttttattttcaggctttgtttacaggttgacttatctataaatgaaaaagagagcttctgtcaacacctatactgtgccagaagaagctaaaagcttaacaaaataagcattccatgaaaataaatctgcaagtgattaaatcaaggcttactttcttctgcttttgatctttaatccttacactacrtttttacaaatatatcttagtagcttttagaacatttgaaagtatgtctctatttaagtatttactgtatacacagagctgaaataagtcgctctgtggagttcagaaaccaccatctgaggcatcccacccgccttccaa

SEQ ID NO: 798600 - DNA, 631 bp, Homo sapiens
tcaaaatgagaatcacctgaaggcaaaagaagaaatcatggttagtctcaaacaattacaatctcttagaactgaaatggcccaagggagggcttaggattcctttaatagtcacttaacataattgaatgaattgttacagcatttgccgcactgactggggaaaggttggcttgtctttctgccttccactgaattgcttaggcctatcctctccccagctttctccctgtcaccctgcagcaagggttacctgctcctgcaggcatttctttccctagtgggtttagcgcttttagggaaggctggcagagctgccaaatatgcacacaactcaggtactcactgagcagatgcctgggagaaaggaaggtcaatgattagtttccagccctagtagctgggtgcattgagcagattacccaatgtgcctagctaccatctttttgggagacagcaaasaattatttgaaagaatgtcagtatgctcatttattaagggggatgaacagtaatgctatctcccaaaagaattgctgtttgaagttaaattaggaaataaatacaaattacatatctattagcatgtggtttttttttttgtttttttttttgtttttttttttggaga

SEQ ID NO: 798601 - DNA, 656 bp, Homo sapiens
aattcttttcctagatatgctgttcttggaattccaccatttattggtttatgtggcgtggagttaataaaaagttcttcaccacctccgggcatatactttttcgtaccatttctttggtcctaatggaaaaagtatttattttatatgttgttcattatttgttggctcatttgtctattctttgtcataaatgggctggaatcaagcagaggtaatgggctgctgtgtggatatctcttttgctttactcagagcttaattcagctccagatgcccatatcacaggtgcataataaatgcttttcataatgataatgacaacagcaaagaaaaacagcaacagcagcaattaggcactccagttatctactgctacccacttyattcaaacagaaatatttctctctataaacagaataaaagtctatttgcaaacctctgatctcaaaattaaaatcaaattaagcaaaatgtaatcagagaaagtaagtcatctgctgaccaatgagggtggaaaagctacctattctcaatgagggctgagtacttatccttcccagatgagctgagggaaagagcaattaagtgcttatcaattggcaactatttggaggacagtgttagggaaagttgaacaggatcccagaatgaac

SEQ ID NO: 798602 - DNA, 656 bp, Homo sapiens
aattcttttcctagatatgctgttcttggaattccaccatttattggtttatgtggcgtggagttaataaaaagttcttcaccacctccgggcatatactttttcgtaccatttctttggtcctaatggaaaaagtatttattttatatgttgttcattatttgttggctcatttgtctattctttgtcataaatgggctggaatcaagcagaggtaatgggctgctgtgtggatatctcttttgctttactcagagcttaattcagctccagatgcccatatcacaggtgcataataaatgcttttcataatgataatgacaacagcaaagaaaaacagcaacagcagcaattaggcactccagttatctactgctacccactttattcaaacagaaatatttctctctataaacagaataaaagtctatttgcaaacctctgayctcaaaattaaaatcaaattaagcaaaatgtaatcagagaaagtaagtcatctgctgaccaatgagggtggaaaagctacctattctcaatgagggctgagtacttatccttcccagatgagctgagggaaagagcaattaagtgcttatcaattggcaactatttggaggacagtgttagggaaagttgaacaggatcccagaatgaac

SEQ ID NO: 798603 - DNA, 554 bp, Homo sapiens
agcccccagccttcaggccatccctggcctaaaggtagggccttactagggatccactcccttcaatccaggagcctgtctgcctcctgctgccatccatggtgcctatggtgcccaggctgcttgcaccaaaaggcacctgcaggccagtgccaagccaccctcagccctccccctcagtttctcctctcatgctcattttgcccaaattctggaggaggccgaggtagcagggtactggcatgtcagcactgccccaagcatgtgcacacctggccaggctgtgccagtgcccaggataggccccaacctggctccaagattggagtagggtgccaggagtggagaggycaggcagcaggagcagacactctagagcctgtggggccagggggttgggggggacttctgaggcccccaagagtgaagactgcagagactctcgggtcctgcgcttgggagggtggccacagctgcacctagggaactcccgccttgccaactcaaaaggggtggggctcccacttgtcaccagctcctgcctgcctcacgga

SEQ ID NO: 798604 - DNA, 567 bp, Homo sapiens
ggctggggtggaacctactgatacatatgttgggattctagctgtggccacaagagtgcgctgtgctccctctgcaacggtgcttccagccttcgtaattggacttcaccctgagtacacacacaatcactgccactctcactatagacaaaccacactccctcctctgtcacccagtcactgccatctcaacacacatccccaccctgtgtacacacaatctctgttattcatactctcactccttatgcgcactctcaacagggcatgtagtctgcactcragcatgccatcccagcctcaccctgcattttattcggctcatcccattttccctgaacattttcgctgaactagggccctggcaggatgctgggactgtgcaaggaggtaggacctatgcccacggagctaagagacaggaacacaggctcatctcccgcactaaccaacccctgggatggctcacagccctgctcccagtgctgtgtcatgacctgaaatttaggggacaccaacacccaaggccagacccaaatggaaagcaaaagaggatgcaaggctata

SEQ ID NO: 798605 - DNA, 582 bp, Homo sapiens
taataataataataataataataataatgcacttcaacctaagtctcacaccttatacacagtggatcatggacttaaatgtaaaatcataaaattttataaatgaaatccagggctaggcaaaaaatgttcttaggcttcacactaaaagcaaaaggaaaaactgatgaatcaaacttcatcaaaattaaaaaatgtgtgctttgtgaaagaccctgttaaaaggataaaaagayaagctgcggagagaacaaaatatttgcaaaccatatatccaccaaaggactagtatctagaatatataaagaaccctcaaaactcaacagtaggccaggtgcagtggctcatgcctgtaatcactgcacttgggagactgaggtgggaggatcacttgagcccaggactttgaggctgcagtgagccatgatcaccccaatgcactccagcctaggcaacacagtgagatcctgtcttgaaaaagaaaaaaactcaacagtaaaaaaaatccaaacaatccaattaatacatgggcaaaagatgtgaagagacattttactgaagaagatatacagatggcaaata

SEQ ID NO: 798606 - DNA, 515 bp, Homo sapiens
ttcaacctaagtctcacaccttatacacagtggatcatggacttaaatgtaaaatcataaaattttataaatgaaatccagggctaggcaaaaaatgttcttaggcttcacactaaaagcaaaaggaaaaactgatgaatcaaacttcatcaaaattaaaaaatgtgtgctttgtgaaagaccctgttaaaaggataaaaagataagctgcggagagaacaaaatatttgcaaaccatatatccaccaaaggactagtatctagaatatataaagaaccctcaaaactcaacagtaggccaggtgcagtggctcatgcctgtaatcactgcacttgggagactgaggtgggagratcacttgagcccaggactttgaggctgcagtgagccatgatcaccccaatgcactccagcctaggcaacacagtgagatcctgtcttgaaaaagaaaaaaactcaacagtaaaaaaaatccaaacaatccaattaatacatgggcaaaagatgtgaagag

SEQ ID NO: 798607 - DNA, 623 bp, Homo sapiens
cccagggaagggcgctgcctcctgagctcgggctttgtaaagatagcaatactgcccttgcggggtctgaggaaggagtcaatgagataatgcgggtacagctcctgaacaggacaccggaagtcgaagaagttctcagagactatttaacagtggttctaacgaaaacaggctgcatgggccaagcgcggtgactcacacctgtaattccagcactttgggaggccaaggcgggtggatcacttgaggtcaggaatttgagaccagtctggccaacatggtgaaaccctgtctctactaaaaatacaaaaattacccrggtgtggtggtgggcattggtaatcccagttgcttgggaggctgaggcaggagaattgcttgaaccccagaggcagaggttgcagtgagctgaaatcacaccactgcactccagcctgggtgacagagtgacactcagtctcaaaaaaagaaaagaaaagaaaagaaaaaaaaagaagaagaaaaaagaaaacagacacagacagcatggccttcacctctgggagcatgccagttcagggaccagccctcggaggcagaacctccctcatttgccctctaacaggtggcttgagcttggtggc

SEQ ID NO: 798608 - DNA, 601 bp, Homo sapiens
caaccacacatgcacacagcctcccacaccaccccagccacctccaccatcacacacgttcacaaccacacatgcacacagcctcccacaccaccccagccatctctgccatcacacacgttcacaaccacacatgcacacagcctcccacaccaccccagccatctccaccatcacacacactcacaacaacgcacatcaaagcctacacacacgtggcccacataccacccttaacacacagctctccaggcttacacacacagaaacagttctcgcacataaccttatgtgcacccagtgtttacaaatagtgactgagagtctgtacatkccaggccctggtaatgtggcaggaacgtgaccagggagctccctgctctcctggagataatttcagagacggctgtgaagagtgtctgctgaggaagtggagcaaggaacatttggggtgggggtgggggaaccagggaacacctctgtaagaaggtgagacctgaataaggaggaggaagcttccaagtaaagagtcaggagaaggcagtccaggcagagagaacagcaaaggcaaaaaccagaaggctgacctgaatgtggcttg

SEQ ID NO: 798609 - DNA, 607 bp, Homo sapiens
ccctctgctacaccaccacccaggccttggcattccagcccaaagaatggagtcctttgctcttccatcaaccatacatgcccgggcaggggaggtatagaagcagtcagctgctaccagctcttccaaaactcccaggaaggaatatcacagtttgcctttgcactgagcctgttcctgaatccagggttcttcccttgccttaacarccaggccaccatcctgcttcaaccagcatcacagagatgccttgctgaatcgcagtggtgatcctgccactttcttgctcagaggtttgccttgcctccctacttcctcactccctaacctgacattctaaatactggtaatcagactgtaaactacctctttctctgaatatcagcttgctgccacctgtggactccagctcaatcccacctccagatctttgtccatgctgttccaaccaccttatactttcactgagtcccagaaagtgaaactaggacacatgaaagtcattcttccatgctctgggatgaagccaaccccatgggtatggtcaagagacttcagttagaagaaaaggggctcttggggctggagccaggtcaaacagcagaaa

SEQ ID NO: 798610 - DNA, 634 bp, Homo sapiens
ttgtctttctcttggaccctctgtgaggctctgcccgggaattgccctcctgtctgcagagtcctgtatctggagctacccagaagccactccactccttccacagctgatgctggaacaaaatggggtttccccaaaaagaatggcaaagggatgccactgctgaggacagtcgcctcagcaccccttcctaggccggggttcagggcgttcargaggcactttccctccaggcagccacacccagggcacctcttggcctgggctgggctttcccacctctgctgatgtcttgggccttgttattgccccatcgtggaagcttgcctgctccttctcctttcccgtgcattcagacatctcgctggtgacaggttgtgagctgttcaggggaaggcgggcggcggggggcaaggccaagattcgaggtcagggcttttgtctccaaacctagggctcttcccatttcactctggcaccctgctccaggtcttccacagaaaccactgtatttctatgtttatttttgtgtcagtttaaatttatatttctaaaattaatttaattttagattcaggaagtacgtgtgtgtgtttgttacatggatatattgtatagtggtggggattgggct

SEQ ID NO: 798611 - DNA, 608 bp, Homo sapiens
tcagaagaggagagagaaaagaggcaaaaagcttatataaagaaataatggctgaaaacttccaaaatcttgagagggaaatcaacatccagattcataaagctcaaaagttcccaaataggataaaccaaaagaggacctcattttaagatatacaattataagtgcatcatataatgaaacacattacaatcaaattatcaaagccaaggacaaggagagaattttgcaagcagcaacagaaaagtggcttatctcatgtaagagaacctcaataaggctaccagtagattcctaaccagaaacttttcaagccaggtgagagtgggatgatatagttaaacttctgaaagaaaaaaaaaaaaaactgtcagccaagaattctacacctggtaaaattatcttctgtgaatgaaggaaagataaattcttcctgtgatggttaatacygagtgtcaacttgattggattgaagaatacaaagtattgatcctgggtgtgtctgtgtggatgttgccaaaagagattaacatttgagtcagtgggcttgggaaggcagatccaccttaatctggtgggcacaatcagcttccagcgaatataaagca

SEQ ID NO: 798612 - DNA, 426 bp, Homo sapiens
tagaaataataaagattagagtgggaataaatcaaatacagaattaaaagaaagaacagaaaaatcatcaaagctgaactgagttttcgaaaaaaataaacaaaatttgcaaacccttaactagacaaaatcagaagtgaaagagaaaacattacartggatgcctgagaaataaaaaggatcatgagggacttttatgagcaattgcacaccaataaattggatagcctagcagaaatggatgtgctgcaataaatatgtaacctattaagacttaatcaagaggaaatagaaagcctgaagagaccaataagatataagaaaattaaatcagtaaacaacaaccttctaacaaagaacagctcaggacctgatggctttactgattaattctatcaaacagtcaaagaataattaatagcaatc

SEQ ID NO: 798613 - DNA, 655 bp, Homo sapiens
tattgaagagatagctacactcccatgttcattgcagcattattcacactaaccaagatgtggaaacaatctgtgtctgtcaacaggtaaatggataaagaaattgctagatagatagatagatagatagatagatagatagatagatagatagaatagatggatagatagataatacatagatgcatatgtgtgtgatacacacacacacacacacacayacactggaatattattcagctttaaaaaagaaggaaattctaaatcctgtcatttgcgaaaacatggatctctacagcttctaggggctgagagctgggagaaatggagacgttagtcaaaaggtataaactttcatttatttgagatgaagtagcttctagaaatctaatgtacatcatggtgactatagctaataatgctgcattgtatactcgaaatttgctaagacagtgaatcttaagtgttctcattacaaaaataaggtaattatgtgaggtaatggatatgttaattagcctgactatagtaatcatttcccaatacatatgcatatcaaaacatcaaattatatctcaataaaagcagttatttaattttttaaaaccatgaattttgggggacacattcagtgtattgcagttactttttatgg

SEQ ID NO: 798614 - DNA, 531 bp, Homo sapiens
ttctacttttctatcatttttataatgttgtaatagttacatttattgataaatgatccatcaagtcattgtactaagcacttctacatacatcaataaactcatttaccacaactctgaaaaggagagtttacaaatagaagcaagctgcaagattttccccaggtcttctgattctacttctggtgctcctccccaaaatcactgttccttctgtggtgtaaatatgtaaatacaaaagaagcttatttctccaagacaccaatggtaaatagatgaattttacagagctcttcttagaaaatcatgagattacttgctgtttcaataacttttgyttccttcacaatgttagaaacagtattaaatgtgagataggagaaaacactaaactagctcactaggaacaaaatactacttatcaataaattaccactaagtatacattatggtatcttactgttttgaaaagctttttgtactgaaataagataccacttggagaaaactgctattctcaaaagtgaggag

SEQ ID NO: 798615 - DNA, 617 bp, Homo sapiens
aaaagctcttctgtggggatctaacatgcagccagtgtggagaactactgtgttaggtgagggtaagacttgcctttgtaagccactgtgaaaattccctgtgcctgacatgcccccttcttgtatcccttgtgtttgggtagaccttgtcataaatacttatctcaatgactcctgsgccacagaaccttgggcatctctttatggctaagtggtgtctaaaaatgggctttggatcattaaatcacaaaatcacaccttcttcccatggcaggcgttctcattggttaccggctaaagaaaattaccatgcaagcagggagatgctgcctgtctcaatattatagatctttcctttatttgctttcgatcagtactttttttggcctacttcctcagttttatgttttcctaaatatccatttcttctgtcctgtcattgatggtattttagcagtaggctagctgttactagcaacgttccaaactctgtttgaggagggggagataagcacaccattaccccacaaggtagggcatcagattcagtgcttctgcagttaacagaataaaagggacagtgagccaacagctccaatgccatctttgcttcatca

SEQ ID NO: 798616 - DNA, 622 bp, Homo sapiens
atacatgggaatctctttgtaatacagattttgagacagaaattttaaatttctgaatttccacattaaaagaaaaactagaggtgaggtcttcttatgttgcccaggctggtctggaactcctggactcaagtgatcctactgcctcagccttccaaggagctgggactacaggcacgtgccagcatgcccagctacatgtccacaatgttattggagtctaattacagaaccaaggacggaaagagagaaaaagtttcctactaaaaactgtgtcatcccacaataagcatccaagaaagtaaaaggaaaccatatgatatgtgctttacagttttggaactgaaagacaccggggacattctatggttactataatgagtaattgaacccattaaaaggtattcaggcacaaggattataaagatcactatagtatgactgaaaagttccagtaagaatayttaccaaataaacccggagcaaatttcaagtttcctctactgtgggaaagcttttccatgcagttttcctatcactatgtattttccagttcatgccatttttcagccccaattcctcaaagtatttaccaccctttcccattttccaaagaaaaaat

SEQ ID NO: 798617 - DNA, 646 bp, Homo sapiens
gaactgaaggagatagagacatgaaaaaccctttaaaacatcaatgaatcctggagctggttttttgaaaagattaacaaaatagatggaccactagctagtgtaataaagaagaaaagagagaagaatcaaatagacatgataaaaatgacaaaggggatattaccactgatcccacagaaatacaaactaccatctgagaatactataaacacatctacacaaataaactagaaaatctagaagaaatggataaagtcctggacacatacaccctcctaagactaaagcaggaagaagtcgaatccctgaatagaccaataacaagttctgaaattgaggcagtaattaatagcccaccaaccaaaaaaagcccaggaccagacagattcacagcggaattctactaggattacaaagaggagttggtaccattccttctgaaactattctaaacaatakaaaaaggactcctccctactcattttatgaggccaccatcaaactgataccaaaacctggcagagacacaacaaaaaaagaaaatttcaggctgatatccctgatgaacattgatgcaaaaatcctcaataaaatactggcaaaccgaatccagcagcaaatcagaaagcttatccaccacaat

SEQ ID NO: 798618 - DNA, 540 bp, Homo sapiens
ggccgcctctccttccgcaggggcagcggggtctcctggaagccccggagcctcatggaagcccgggagggcggcggagcggggcccgcagcgcggggcccggaggggcagccggcgcccgaagccagggtgcacttccgagtggcgaggttcatcatgsaggcaagtgtcaagctagggatgcggtccattcccattgccactgcttgcaccatttaccataagttcttctgcgagaccagcctggacgcctgtgacccttacctgattgccatgtcttccatttacttggccggcaaagtggaagagcagcacctgcagactcgtgacatcatcaatgtgtccaacaggtactttaacccaagcggtgagcccctggaattggactcccgcttctgggagctccgggacagcattgtgcagtgtcagcttctcatgctgagagttctgcgcttccaggtctccttccagcatccacacaagtacctgctccactacctgctttccctcaagaagtggctgaaccgccacagctggcag

SEQ ID NO: 798619 - DNA, 606 bp, Homo sapiens
attgtatgaaataaaccatgcatccatgttgatctaagtaaatgaataaattgaagattttatgaggaacagagatatttacatagtcttaaattacctccccacaatatatgaattaattacaagatgaaaaagtaacactgcagaaaagaaatccagcagataccatcattaattgtcaatgctaatatcaccagtaataagacaaatcaaaattataggttatatggtaggatgcaatgagaagatcccaggatcacctctgagatactcttgctgaaaataacacaatctaaatctaatcataatgaaacatcaggaaaaaacaactgagagacattctatactctgaactttactcttcaaaagattcaaagccatgaagtcaaggaaacctgaggaactgctccagactgaaggagtgtaagagacacaacatctacatgcaacccatggctctgaatgggatcygtctgctataaaggacatgacagacaattaataaaagctcaaaagaagctgaagattgaatgacatgatgtattaaagttaacttactgattatcaaggttgttatgtagagtgtcctgacttgtgggaatacct

SEQ ID NO: 798620 - DNA, 617 bp, Homo sapiens
cacattaggcatttcatcagtttattatttattatattattcttggagttgtatgttgctattattaatattgcttaaaaattagtctaacattttgtaaataatacccaaaaaataagccacaaaagaatccagcaaattaaactgcttttgtctccattgattttcttttgtgggacaatgtattagttttcttattttgtttttaaaaatttattcaatccctttttcctctattaagaacattatattatttaataaaagccctcttatgagcagttttggctacctcaatgatgtaaaattaatggtgtatatgcagatatgtgcatactctgccaggtccttttgtctttactcaaaaaaaagtaattgcatattcttaattataagacaaagatttggttttttttttttcttccctaaaaccattttttggctrtgtgctgtggctcatgcctataatctcaacactttgggaggccaaagtaggaggatcacttgagtccaggagttggaggctacagtgagttctgatcacacccactgcactccaacgtgacagagtgagcccgtctctcaaaaaaaaaaaaaaaatgaagcttgtatttttaaaa

SEQ ID NO: 798621 - DNA, 527 bp, Homo sapiens
atttccaagggaacacaatcatatgtgactaaagattatttttcttttttataatacaatttaaatttactggtttgggataatgtctcacttatataagaccaatgattttgtcattgcaactagaaaaactcacataaattacaaaaatgacactttcaaggacatcagagagctatgtaagtagtgagaatgagatgaactaaatttccagaaagtagagatcttttctgaggtaagccaaatatttaattcatttctttttctcctgcgaaagtttcttaattctgggtaagaattgagggtcaagcacgggtgaggcagagcacctctcgggtagaaarataaatgaatataatttggttggccagagatggaaaaatatagtgaaaatttgaggggccctaaaaatcctgctgagattttttttctcgtgaaacatttgctgagcttctgccctgtgtaaaaagctgaggagataggatgaagacttcttaaatgcagaattgcaattttccctttccttt

SEQ ID NO: 798622 - DNA, 618 bp, Homo sapiens
  misc_feature 1, 2, 3, 4, 5, 6, 7, 8, 9, 10, 11, 12, 13, 14, 15, 16, 17,18, 19, 20, 21, 22, 23, 24, 25, 26, 27, 28, 29, 30, 31,32, 33, 34, 35: n = A,T,C or G
nnnnnnnnnnnnnnnnnnnnnnnnnnnnnnnnnnncatgcttcagtcttggtgtgttatattttttcttaaaatctgtctatttcttttaggttatcttgtatgttgacatataattaattgttcatagctgtctcttatgatactatttacttcagtgccatcagttgtgatgtctcctcctttttttctggtttttgttatttgagtcttctctctttcttttyacttactctttttaaaaagggtttgtcaattttgtatattttttctccaaaaatcaactcttagttttgttgatttttacatgggtttgctattttctattctgtatatttcagctctaatctttattattatctttcttcattaactttgggtttagtttatgcctctttttcaagttctctgaagtataaagtcaggttttgatttgagatctttcttcttttttaatgtaggtgtttactgctataaacttccctcttagtacctttttgctgcctcacatatgttatgtggtatgttgtattttcattttcacttgtctcatgatattttccaatatttcttgtgatttcttctttgatccgctggttgttcaaaagtgtgctgtttg

SEQ ID NO: 798623 - DNA, 611 bp, Homo sapiens
atttctttggacttcaacttgcaaggaaatttaatttggggactttaattcctctctgggaaattcatcatggaaaggggtttatattcaagtcaggagcatctctaagtggttggccttttttattgaatggtctcaacgctatcatttaacttcgttgcagagcctctgatgagctgtgctggataaaatgactggatggaatttggaatgggaaacagagtggggaatgagtcttcagcagtgggtacagaggagccttgagacaaatgcattartctgatccattttacagccttctggggacatcagttggactgtctaccaaaggcctcaggaggactgaaaaaggaaaggtggttggcttagttgaagtgattcaggaaggttggaaccgccctggtggtgaccagccccctcccccaaagacaaaggccacacccctggttggccataaacgtaatgatgaaggccagtgagttgagaaaaccaaaccctggaaatgctgtaggagcacagccttccctggcttcacacctctatgcaaaggaacttcctgtggcctctctctgcccagcccccatgcctctcagggcaagagcagctcaact

SEQ ID NO: 798624 - DNA, 601 bp, Homo sapiens
gagcaaatctgcaacacagggcagctgccaactcaaaggacaacagtgacggcagagtccttgacactgctgtcagcgtcgtccagagtcgggtgaagcgcctgcctcctcttcctgcaggggggcagccgctctcagctgtccagcccctcccagtacctcccagtcctggcagggcygtagcccttcagctcccctggaaatccactcaagggaccttggccttctctgcctgccacctgggaacacctgatggggacgtgctgggatggtttctgcagttcaaaggatttacctccacataattaagtgcctcgtttgtaaaaacacaagctgtgtcctcatcggtggtgtgggcatcacgtacggttcaggggctgggacagagccctcagtacagatgacaggcatcagggagtctgtggccatcagccaccgatgccagctcaggccacagctgccgtggcaggcacctggctttgtctcaacctcagctgcaggaggtgcatccccgcctcctgccagctctggctgagtgccaggccccagaggccacggctgtctctggcctcccttgggcactgcctgttgttcagggtgc

SEQ ID NO: 798625 - DNA, 571 bp, Homo sapiens
tttcattacatttaactttaaaactaagtagacaaattaaaagtaaatatagcaccatattgtcagtgtattaatgaaatgcctatgctttgaaaaataaacacagataaagagtcagaaccatttttaatcaaagataaatatagctgctcctcaacttataatggggttatgtcccaataaacctattgtaaactgaaaataytgtaagtcaaaaatccatttaatacacctaacctactaatcatctttaccttagcccagtctaccttaaacatgttcagaacacatattagcctacagttgggcaaaatcatctaacacaaagcctattttataatgaagtgttgaataccttatgcaatttattgaatattgtacttaaagtaaaaaacaggatggttgtatgggcagtctgaatgcatattgctttcataccactgtaaagttgagtaatagtaagtcaaaccattctaagtcagcaaccatctgtacataaaaattgctcactccattatctacaaatagtctagtgtttgctgtggtctaaatgtctgcgttcccccaaaat

SEQ ID NO: 798626 - DNA, 600 bp, Homo sapiens
gctgagattacaggtgcctgccatcatgcctggctaattttgtatttttttagtggagatggggtttcatcatgttggtaaggttggtctcgaactcctgacctcaattgatcaactcacctcagcctcccaaagtgctgggattacaggcgtgagctactgcgcccagcctttgagaaatatttttaacagaatctgagcttatattcttggccmcctataaagaagcctatacttttgaacacacatacccaaacaaaacaatattgtgatgaagagatggcaaaataaatcactatttcacttatgtaaatttggttagaaagttaaaagaaaaatactcaaagaattattttacaaaagtggaaagatcttcaattaagctaccaaaaaatcacctggagaatacaagatgtttctaacaatagcaatgattaattgattcaaaattttaaacatttcaggtttatagttaagctttagatgagttgtataatataaaatgctgcccatttaacactttggctatgctttgtctcaaatatttcagtttttttaaagaaatttcaatgtgcattctaaaaaatttaactcctgtca

SEQ ID NO: 798627 - DNA, 604 bp, Homo sapiens
ttccattctgccttgagaagcaatgtgacatagtggataacaatctagggtttgaattcagatggccctaggctgtacatcccattgcttactaattatatgacctgggatgggttactaatcttttctaaacttcaattatatagttatttatagttagttatacatttatatagtatatggaattatgtagttatagaacatatttataatagccatatggtttatttagctatatagtatttcattttatgaatatacctatttacaatgtctttaaattaggtctactttatcctaccattcaatttttgaatcctgaagctgaattttttatttttgtgcttgttaaattttattttattgatttcaaccaaaatacttcaggatttgggatratttaaagatacttttcaatctttatcttttgaatctgtgtgttactacacatttgataatcagaaatttaatccaaatgatagacaaaaatgttaaatgtagtagagaactatatattccatcattgttaccattatagtaactctccccattgttgtcctagggatatgaatacactaataaccagtacactttgattaatgtt

SEQ ID NO: 798628 - DNA, 606 bp, Homo sapiens
gtatttcagagaaaaaaatagtgatagcgattaggaagaaggctagtaactcaaggctacagtccctggctttgattttgctttgaccgttctgtaaatgtgcatgtacacagcatgcttgcatgtactgcgtctggtgtaatactaagacaatgaaattaaatgtgactggaggttaaatagcaaagccaccttagtttatgayattatttggatataatcactataatcactatgaacatatctgtttcctagtaactacttaaaaggtagacatgcaatttaggggataattctttctgaaaacatctctattaaggccatgcctttttttcttctcctctgcaaaatgttttcgacttgtgttttatttaaatttcagaccagaatagtacagcagattacatagtaacttatatctccacaatgagaaaataccttagttgatcaaatttctaatactgaatgtttaatttttaaatgttcttgtttttaatctgaaaggctgaagaagagctaataaaatatatcacatgaaattttaaaagtgagagataaaatgtatgcagacaatattattccatttacttccatgctaaacccctt

SEQ ID NO: 798629 - DNA, 539 bp, Homo sapiens
gctaagttttatatttttagtagagatggggtttcaccatgttggccaggctggtctcaaactcctaacctcaagtgatccgcctgccttggcctcccaacatgctgggattacaggcatgagccaccactcctcaccctcttttctcatttttaaaagcttgtatccttcaacatttttctctatattctgtgaatttgtcaggtttctttttttttttcaattggagtaccaataaatgccaaggttagccartgaaagcctgggcattataggatgtcactaaattgatttattgaccctttgccttacaacaccttcaacatcagagaagtagggattcagtcagaaactcctcaacacttagtattactagaattatgttaccaattaaaatttgttcatcactccttgagtgtggtctcttgtgagccctgtaaagaattaaacaaaaagtgatgaaggttttaattccaccatgggtctgcttgccatcactatatttctagatctcattgtacacattcatacattgatac

SEQ ID NO: 798630 - DNA, 623 bp, Homo sapiens
cgtccctctatattttttgacctttgagccttgaaaagataaatgacctacaataatcaatattctatcaatcattaagaacaaattggaattaagttaacctcctagtagcaataaaatctcatactcataggagatttgaattcaggttctgagattaatttgctgctctcccacttgyaatgtacaactaaaggaaacaaatttagttcaggtcagtgattatttcattaagccttcaaaccactgcttaacagaatgttatatatcagatgactctttaaaggatcccaacgtgcagtatgtgtgtgtgtgtgtgtgtgtgtgtgtgtgtgtgtgtgtgtgtgtgtgttgctgtacatgtgctgttgtatgtgagcacaggcacacatctggaggcattatcatatatatccttgtctgattttatgggaaaaagaaagctatgataatatttttacactcaaggacaataatcatagctataaaattcagtgtgcctaatgccatatcctaactctaagataaaagtggaaagaagcggctgtgggcttaaggaatggagggagagaaccctctttctagtgccctccctacaacactaataagagcctcatatgtgt

SEQ ID NO: 798631 - DNA, 615 bp, Homo sapiens
ctgttctttcaccccctccccttttgaaacccttaataaaaacttgctggtctgagactcaggcagacatcacagtcctaccaatatgtgatgtcactcttggtggcccagctgtaaaattcctctctttatactgtctctctttatttctcagctggctgacacttatggaaaatagaaagarcctacatggaaatattgggggtgggttcccccaatagcacattttattgattatttattgaaccagtcattgaaatcacctttacatcgagatgacatttttaataataatgtgtcaatattttgattacaatgtattgttcagtaaagttggattttattcaaaagcatagagaatatttctacattcaaattttaagaaaaacaaagcaatattattaatacattactaagattttgatgattttagtaaatcgcatcatctctacaccagggaattattttaaagctgttacactcttcttctttattatggcaagcctatcaatgcacttacaagcctctccaaccccttagaactaccataaacacacactctctctctctgtcacacacacacacacacacaccaacaactataccaccaccacc

SEQ ID NO: 798632 - DNA, 623 bp, Homo sapiens
tgatataaaattgaatcaggtaacctattacatgattccaatgtatttcaactgaagctaactttactatcagctgacacgtagatattagacccagatctggcctactggatacatatccttatccataagtttcaggtccaatgtgagccaacatcaaagtttgagtttgagtctgtgtagagtggagttcttgttactttttcatctcctgaatgtgaagatgcaaccttagaccttctggaaaccatactgcaatatcaaatatagagaagaggtctaactggctccttaagacataattagttaagacatagtttaatcctgtggaactagcattcagcaaatatcacctgtcacctctcagttatgtgaacctatgtatataatgtgtcattggttcaggtgagtaacrttggtcaatggataaaaaataaaacacagaatctgaccaacatggccataacattccatctatctatctatctatctatctatctgttaaacttaagcattttgcaagtgacatttctgttacagtaaagatagagacaaaagtttgttatgtaaaattgcaatctgttaaagtgaatgtaggaaaagtcaggagttacgaaaacaca

SEQ ID NO: 798633 - DNA, 603 bp, Homo sapiens
gaactggtttacattcccaccagcagtgtataagtatttccttttctctgcaacagccagtatctgttattttttgactttttaatattagccattctgactggcatgagacggtatctcactgtggttttgatttgcatttctctacaaaacttttaaataataattagaaactattctcaaactattctaaaacgtgaaggggaggaaatgcttccaaacttattctgggaggctattataaccctgaaaacaaaaccaaataagaacaaaaaaaaggaagctacaggctaacatccccagtaaacgtgatgcaaaaatccttaacaaagtactasaaaactaaatccaacaccacatcaaaaggattatatgttataatcaagtttgatttatcccagggatgcaagaatggtttaacatatgcaaatcaataaacataaaacataacatcaaaagaataaagaagaaaaaccatatgattatctcaatagacatggaaaaagcatttgatgaaattcagcatccttcaaattaggcatagaaggaatgaatctcatgaatattgcaacaatacatggcaaacccacagctatcatcctt

SEQ ID NO: 798634 - DNA, 603 bp, Homo sapiens
gaactggtttacattcccaccagcagtgtataagtatttccttttctctgcaacagccagtatctgttattttttgactttttaatattagccattctgactggcatgagacggtatctcactgtggttttgatttgcatttctctacaaaacttttaaataataattagaaactattctcaaactattctaaaacgtgaaggggaggaaatgcttccaaacttattctgggaggctattataaccctgaaaacaaaaccaaataagaacaaaaaaaaggaagctacaggctaacatccccagtaaacgtgatgcaaaaatccttaacaaagtactagaaaactaaatccaacaccacatcaaaaggattatatgttataatcaagtttgatttatcccagggatgcaagaatggtttaacatatgcaaatcaataaacataaaacataacatcaaaagaataaasaagaaaaaccatatgattatctcaatagacatggaaaaagcatttgatgaaattcagcatccttcaaattaggcatagaaggaatgaatctcatgaatattgcaacaatacatggcaaacccacagctatcatcctt

SEQ ID NO: 798635 - DNA, 595 bp, Homo sapiens
aacagattgctgattcaggtaagttaattaacagagcttataattttctaattccccatcagtacctaattccaccatgtggtcacaagtctctttcttttcaatacagcacttataaatatgcaattttatttaatattgttgtcatccggctggtttctagagatagaaaaagaaaacaaggatatctctcttaactacatttcttctataaaactcagactcatcattttagacttaattcattgattgcatctgataaagattaaaatattcaattacaagttccctgctctgaagaaggtgttgctcattctttatcttatttaatagtagagagcaaacttgtgttgggaaagtrtctattataattattatctgtaggtctttattaatgaacaacaatataggctatgatgtaatccagagcagaaacagagttttatttagattttaaattgttcggttttatggtagagaagatggtaggtaatcaaagagatagcatgtattgactacttacgaagttctaggaaatctgctaaatgttttacatgtattagttcattgctgttctatagaatataacaaaatg

SEQ ID NO: 798636 - DNA, 610 bp, Homo sapiens
atgcaacctcatgggaacaaaagttcagtttcatttatgaatgttctagataaagcagtacttttaaaaaatttattaaatctctactcttaatgtcttttttaatattctgtatcacaaaatgagaaatacacataaagtccttcagttgcatgcataagtatgaggctatcttgagtgagatcacttgaacaattgtttgagttacgaaatgaacttgcagctttttgtttttggaatatcattttacttgaaagaaagcctgaatataaattatggtttcatatgtttgtggatgtccagacattttctcaaaataaaggaagcctagtaattctgatayacaattaatgttacttgttgatctagaacataatgtgttctaaacactctttacttcctcatttccaggtatgcccaggacaagagagttcaagcaatttacccaaatttatacaactagcacacctttgttagatttttagtatattgcattttgttaaaatttctaatatcagaagagaaaattggtatactattctttctataatttccaggagaaatatataggtatcagctttcaagtgacagaaataagaatgaaaaaata

SEQ ID NO: 798637 - DNA, 643 bp, Homo sapiens
ttttattttgattgatttaaatttaacatggttctaaggtattgattttttataggaagatattaagaattttatacttaccggaaggtgtgagaaatagaaatagaggacatcaactgaagtagttaatattgattaggtattctttataaaaacaaacttgtaaatgttttacttctcgaaaaatttgccactctgaattaaaagctcatgaaataaacaaatgcattcttctttcaaagaaatttcaggtctcaaagtttccaaaatatgtacatattaaaaacaatgtaacagcaaggaaaactggctagcttaacagactttagaataattgcttaatataatgaattacgtgttttaaatgattaggaatgtaatttctgttttcatctagataccgcttattttgttttttaaattccttggattttaaataaacttcaatttttaaacttagcyaaataatccataagtattttaggaatgatatttaaaatgaagaataaacactgaaagagactgttggacaaacttccactatcaattatatcagtaaatatcattggcaatacggggcacagctaatcttctggggctgtttttaggggcaaaacaatatacttaattgctttccagccta

SEQ ID NO: 798638 - DNA, 576 bp, Homo sapiens
gatcaggatcagggaagaaaatttgtttattttttaatcccttatttcttagcttgtaaaacatattttctagagaaaaatgtgtctcttcaaggcaactggatattttgatgcaagatccctgactttaaaactttgggattgtcagaggcactgaaaccagagtgactctatcttgaataggtgctgggtaaaatgaggctgagacctgctgggctgcattcccaggtgaggcatttttaggcacaggatgtttacaattcagggaacagattcgtaatatttacccaatagacccaggacttgtaacagacccagcaaaagtcctgatgtcccaatatcttaacagtaaaagcattcatagtttaagaattagttttgctttaaagatagtaacataaattcttgtggaagayaatagttacacaaagcttggcaatcctttgtcaggaacctttgtagtagagcacaccttccccatgactttttgctctgttgtcttatacgtaaacaagcttcaaacctaaggtgagtgcgtccctcctcttgctttggggaatgccctgctctgtctat

SEQ ID NO: 798639 - DNA, 607 bp, Homo sapiens
ttccattctgccttgagaagcaatgtgacatagtggataacaatctagggtttgaattcagatggccctaggctgtacatcccattgcttactaattatatgacctgggatgggttactaatcttttctaaacttcaattatatagttatttatagttagttatacatttatatagtatatggaattatgtagttatagaacatatttataatagccatatggtttatttagctatatagtatttcattttatgaatatacctatttacaatgtctttaaattaggtctactttatcctaccattcaatttttgaatcctgaagctgaattttttatttttgtgcttgttaaattttattttattgatttcaaccaaaatacttcaggatttgggatratttaaagatacttttcaatctttatcttttgaatctgtgtgttactacacatttgataatcagaaatttaatccaaatgatagacaaaaatgttaaatgtagtagagaactatatattccatcattgttaccattatagtaactctccccattgttgtcctagggatatgaatacactaataaccagtacactttgattaatgttatt

SEQ ID NO: 798640 - DNA, 540 bp, Homo sapiens
gtatcaatgtatgaatgtgtacaatgagatctagaaatatagtgatggcaagcagacccatggtggaattaaaaccttcatcactttttgtttaattctttacagggctcacaagagaccacactcaaggagtgatgaacaaattttaattggtaacataattctagtaatactaagtgttgaggagtttctgactgaatccctacttctctgatgttgaaggtgttgtaaggcaaagggtcaataaatcaatttagtgacatcctataatgcccaggctttcaytggctaaccttggcatttattggtactccaattgaaaaaaaaaaagaaacctgacaaattcacagaatatagagaaaaatgttgaaggatacaagcttttaaaaatgagaaaagagggtgaggagtggtggctcatgcctgtaatcccagcatgttgggaggccaaggcaggcggatcacttgaggttaggagtttgagaccagcctggccaacatggtgaaaccccatctctactaaaaatataaaacttagct

SEQ ID NO: 798641 - DNA, 631 bp, Homo sapiens
cacaacacatatgaggctcttattagtgttgtagggagggcactagaaagagggttctctccctccattccttaagcccacagccgcttctttccacttttatcttagagttaggatatggcattaggcacactgaattttatagctatgattattgtccttgagtgtaaaaatattatcatagctttctttttcccataaaatcagacaaggatatatatgataatgcctccagatgtgtgcctgtgctcacatacaacagcacatgtacagcaacacacacacacacacacacacacacacacacacacacacacacacacatactgcacgttgggatcctttaaagagtcatctgatatataacattctgttaagcagtggtttgaaggcttaatgaaataatcactgacctgaactaaatttgtttcctttagttgtacattrcaagtgggagagcagcaaattaatctcagaacctgaattcaaatctcctatgagtatgagattttattgctactaggaggttaacttaattccaatttgttcttaatgattgatagaatattgattattgtaggtcatttatcttttcaaggctcaaaggtcaaaaaatatagagggacgtctg

SEQ ID NO: 798642 - DNA, 591 bp, Homo sapiens
ggaaaatggatgttatttcattgagcaaaaatatgatttattttttcaacatattttcaattcatgaccaattattttaactcaaactacttagatttaatttataaacctgatattgcataacatataacttaaagtcaaactgttctacatggactaattttattgtattatcagcatcgactcttaattttaaatcaagcaatgtcacccatttgttaagcttcccttatgttctagcatgarcaattactagtaagttatataataatttaggacagatcttgtggaggaagtaagttctgcttaaaatgtgggaaattccagaagatgtgttaactctttagagcgtctgattcagtagttcccaagggaagtttgagaaatgttccaacaaaatttgacaagttgctaggcgcctctgttttaacttgtacattagctacttttttcttccttttttttgagacagggtctcgctctgtcacccaggctggagtgcagtggcgtgatcacagctcactgcaacttcgacctcccgggctcaagtgatcttcccacctcaccgtgctgagtacctgggactacaat

SEQ ID NO: 798643 - DNA, 575 bp, Homo sapiens
caaaaccttacatggaaaatgtggtgaatgaattgtccatagggtctgtgtgcttgggctgccacaacaaaataccagagactgatcatttgaacaacataaatttattttctcacagtcctggaggctagaatggtccagcatggtgaagtttttgtaaagcctctttttcaggcttctttctcactgtgagctcctttggttaacatgcagagacagagcaacatctctggtatctcttcttttaagggcactaatcccatcatgagttcccattcacatgatctcatctaaccttatttatccacccgaaagcctcatctctgaatatcatcatattaacatawaactttgagtggcacacatatattcagttcatacattctgccctagacccccaagatgtccttctcacatgcaaaatacattaattttatcccaaaagcctcaaaagtcttaacagattccagcatcaattctaaagtacaaagtctcatttaaatagtatctaaatcaaatataagtaagccttatccccaaaatcaaaattattctccagctgtaaacctgtaaaa

SEQ ID NO: 798644 - DNA, 665 bp, Homo sapiens
cttttcttttcttttttttttttttttgtcttttttgagacggaatctcgttctgttgcccaggctggagtgcagtggcgcaatctcggctcactgcaagctccgcctcctgggttcacgccattctcctgcctcagcctcccgagtagctgggactacaggcgcccatcaccacgccctgctaattttttgtatttttagtagagaccgggtttcaccgtgttagccaggatggtctcgatctsctgacctcgtgatctgcccacctcggcctcccaaagtgcagggattataggcgtgagccaccgtaaacataatatctcttttttccaaatgtgagtggcttgcttacaaacatgtctcacattaagtgaaaattgctacgacacaaaggtaatggctatacccaaatgcaagtttgagagaaagcctgtttagctttttcaaattacctaaataaaaacaggggtgtttgtgataagacattggaatgaaggataagaaaaatgggaaagaactgtagtgagccggaattggagaaacagaagtgttttgtgcatttgctgttcttgtgttctaaatgctttgtgagtgtaaaaatcagaaattaaattttggcaacctctatacaaaaaactaaggatcccttccggattctataccca

SEQ ID NO: 798645 - DNA, 639 bp, Homo sapiens
agtctcaattgcactttctttgcagaaatttaaaaaaaaattactctaaaattgatgtggaacctcaagcaaccccaaatagacaaaataatcttgaaaaaggacaatcagaacaatcatgttttctgattttgagacttactttaaagctacagatatcaaaacagtgtcatattagcataaaaagacaggcatatagaccaatggaacaagatagcccagaaataagccctcacatatgtgttcaaatgatttttaacagggtaccaagatgactcagtgtgcaaaaaacagtattttcaacaaatggtattggraaaactggatagtcatatgcaaaagagtaaagttggactcaggttactccatatataaaaactaactcatatgcatcaaagccctaaacatacaaactaaaactataacattctcagaagaaaatatgggaaaagttttgtgacactgaatttgccaattattttttagatatgacaccatgaacacaggcaacataataaaacaataataaattagactatatcaaaatttaaaactcttgtatatcaaaggatgctaacagcataaagtaaacacaacctatggtttgggagaaaatatttccaaatcatgtatctagta

SEQ ID NO: 798646 - DNA, 644 bp, Homo sapiens
cctattcctctgtcttctctgacttagccctccccaatcaaagtctcaatcttccatgcatctgagaggagccacatccatctgtgcttcctggggacaggcctgcctacagttgacctgacaaaataaaatcagtggtggcarcagtttggggaaaggaggctcttgtacgctgttttgtagaaatgtaaattgatacagccctatagaaaacaatatggaatttcctcaagaaattaaaaatagaaccacctgtgattcagcaatctcatttctgagtatatggcaaaagaaaataaaatcagtatcttgaagagatatctgtgtttccttgttcattgcagtattattcacaatagccaagatatggacacaacctaaatgtttatctacagatgaacaaataggatatgagatatacatttatatcgaatattattcaaccttaaaaaagaaggcagcttggtgtggtggcatgcaactctagtaccagctaatcaggaggtggaggcagaaggatcaggagcccaggagttagaggaggctacaatgagctatgattgctcttctccactctagcctggatgacacagtgagagcccaactctcaaaaaataaaaggaaatgttgccatttgaggtaat

SEQ ID NO: 798647 - DNA, 644 bp, Homo sapiens
cctattcctctgtcttctctgacttagccctccccaatcaaagtctcaatcttccatgcatctgagaggagccacatccatctgtgcttcctggggacaggcctgcctacagttgacctgacaaaataaaatcagtggtggcaacagtttggggaaaggaggctcttgtacgctgttttgtagaaatgtaaattgatacagccctatagaaaacaatatggaatttcctcaagaaattaaaaatagaaccacctgtgattcagcaatctcatttctgagtatatggcaaaagaaaataaaatcagtatcttgaagagatatctgtgtttccttgttcattgcagtattattcacaatagccaagatatggacacaacctaaatgtttatctacagatgaacaaataggatatgagatatacatttatatcgaatattattcaaccttaaaaaagaaggcagcttggtgtggtggcatgcaactstagtaccagctaatcaggaggtggaggcagaaggatcaggagcccaggagttagaggaggctacaatgagctatgattgctcttctccactctagcctggatgacacagtgagagcccaactctcaaaaaataaaaggaaatgttgccatttgaggtaat

SEQ ID NO: 798648 - DNA, 553 bp, Homo sapiens
actcacaaatgattaaaatgtatcaaatatcatataatttgtgtggtttaatatataaaatgcacaggtagtattatttacattataccttatgacccaacttataatgtgtgttggttttgtgtatgcataaaatcattataattatactatttaataaattttttgaagagtacaaccattaattttaatatatttggacattttrtttgtgaataaaattttaataaacgtgagatgatgagaatgagaattttaggaaaatggaatttacttattaagttgtaagaatagcattaattgtgacctaacatatgtccattaataatgtatataacatggtatataaagtatatcatttagagtcagaaatatgccaaatagtttacaaagactggattatgcatctaatatgctttgcaataataatgattaaatgttgctaagtgcatttggtagatatttcattttatgtattaaaacatattagtcctatcatttaaatcatgactagaaatcactttgagacactttattttcttttctcttatat

SEQ ID NO: 798649 - DNA, 614 bp, Homo sapiens
aataaagaatgaagatagtgcatattttggatgaaaatcaatatttttggattttgtagaaagtctcaggaatgtaacacaccaaaaatttttcttattattactgttttataagtgactatatatgatgggaccctttactgagatcaggagagaattcccgacataaaaattatataaatataaaaaccatctcttttcacaatctttcagctgaaccaagcaatagaagtaaagaaacttacaatatatataaagtttcaatcattctagtaaatctcttgtttcccgtargaaagtgatggaggggaccctaaaaatactcactcagagagtaagggatgaaagtgagtaaacttcaggaggagttcttgaatcacaacagtctcctcatctgggaatattaatgcatttgaatcccagaatggtataggagcttacttgtttagataacagaaccaaggctagacaaaaaaactctgttgaagggaaaaaaactttgcaataacttgctatgaccagttacaacttttgtaaagagaatatagttggatcatattttcatatccattctgccaagcttgtctttttttacgtgtttagatcaattatat

SEQ ID NO: 798650 - DNA, 475 bp, Homo sapiens
gcaattcatatatctctatttctttggggtcagccactggagctttattattattattttggtggtatatttccttgattttttatgttctttgaagccttgccttgttgccttctcatttgaagaaggagtaaacttctcaagtcttcgattactggcattgcgagagaacaatcttcaccattcagcctggctagagatctggaggtgtctcagatcatttcagttgatgtatccccttactgttcttattccctcttgggggatagtgtcaggattgtatgccttcccttgatcccataaaaccaggccaggtagtgagaactktccatttacttctcctagtgtaatgccaaaggttcttgccttagccatgccaaagaattggtgtggcagctgcccgcagcgagtgatagagacatggaccgaaagagagaaaaagacataggctttattgggcagagtgaaaatacaa

SEQ ID NO: 798651 - DNA, 547 bp, Homo sapiens
cttcccagagaaattcaccacctgttcaaagcccagctcagaattcagctagttttgcatgcttcctttccctggctctatacaactctagtaaaactaatggcttcctctgctcacatagaactttatttttctatattcctcctgttatgtaggaatgctatctgattatgttatttcatcaacagttttatttgtctctccagccaactggactccaagtgccacgagaacagagattgggtctggtccccagcttcagtgcctccaaggcagaaactcaagagacgttgttgaactgtcagcctttacatttatgcattactattgaaggcctggaataaatggatcgtgttttacctgttatcttgctcatctctattactgcttcawcagcagctcttcccaaagcaataaaatgaacaatggccccactttgtttcacttcatcaatacaagaacttgcagtgttatcctccccatcagtcagcagcagtacttcggatccatcgagttgggaatgtagctctccaatcacctgcaaaca

SEQ ID NO: 798652 - DNA, 594 bp, Homo sapiens
aattatttgatggctaacagattagcataaaatttaaaactttttcctaaagaatttgaaacaaggaattaaaattctttgggaagtacacattttgagagctttgctagatttaattttttaaattgagtctatccacaatttaaatcagactaaattctagtaaatgtgtcctctttaaggggtgtgagttatacgtctgaaacatatttaactgtatttaaaagagtagcattatayagtgtcaaatcctcataagcatctagaattataggtaatgagcactaggacaaacaaaaataccaagggctctagtcctctattgcagtcaatgttaaaagtgtacaagtgtctcacacatcaaaattcatttcacaccctcaatcactcattcttcttgcaccttgtctttgaactattagaagctagtgaatttaaatcaaaacattattttaactataaaggctcaacgtctacaatatatcatattttagggaaggaagggaagaaaagggttaaggcagctagcttattactcaccatgcagattttagaacttagaaatcaaaagctagaaggaatttaccatctcta

SEQ ID NO: 798653 - DNA, 556 bp, Homo sapiens
attctcctgcctcagcctcatgaatagctgggactacagatgcccaccaccatgcccggctaatttttttgtattttttagtagagacggggtttcaccatgttggccaggatggtctcgatctcctgacctcatgatscgcccttcgtggcttcccaaagtgctgggattacaggcgtgagccactgcacccggcctttttttttttttttttttcttcattaaaagagacagggtctctctgttgcccaggctggagtgcagtggcgtgatcatagctcactgtaccctcaaactcccgggctcaagtgatccttccacctcagcctcctgagtagctaggactacaagtgcatgccaccacacctggctaatttttaaaatattctgtagaaacggggtcttggtatgttgcccatgctattcttgaactcctggcctcaaacaatcctcctgccttggcctccttaggtgctgggattacaggcatgccacttgggcccagccagggccaacttttagcatccataggttctatgggtcacactgcagaact

SEQ ID NO: 798654 - DNA, 610 bp, Homo sapiens
aatactatgcaactgtaaaaacaatgtggagctttcaatgtgctaatatggaatactgattggataataaaaagaatggaaacaagagaagaaagaaagctacattttcatgattacaaggatgtgaggagatggagagagaagactgtatctccattatccatacacttttttttgttgttgttgttgagggagtctcactctctctgttgcccaggctggggtgcagtggcgtgatctcagctcactgcaacctccgcctcctgggttcaagtgattctcctgcctcagtctcccaagtagctgagattacaggtgcccacgaccatgcctggctaatttttttgtattttagtasagacggggtttcaccatgttggtcaggctggtctctaactcctgacctcaaatgatccaccctccttggcctcccaaagtgctgggattacaggcatgagccacagtgcccggcatccataatgctttttaaagtatattctagataacttaaatttttagctgtgtgaaaagtaaggctacaattttcatccagaatgttcaagataaatagtgaagctatagagagcaaaaagtaattttaaaacaataa

SEQ ID NO: 798655 - DNA, 567 bp, Homo sapiens
tttttagtagagatggggtttatccatgttggtcaggctggtcttgaactcccgacctcaagtgatctgcccacctcggcctcccaaattgctgggattacaggcatgagccaccatggctggcctccacttctaattctcgttctcttgctttttccacatctgcagtcacttccttcactgaagtcttgaacccctcaaagtcatttgtgggagttggatcaacttcttccaaactcctgttaatgttgatattttgwcctcctcccatgaatcacatatttttttagagatagggtctcactaggtttcccaggctggagtacggcggctattcacaggcacaatcatggcacactgcagccttgaactcctggcttaaactaatcctcctgctttagcctcctgagtagctaggtgcatgccaccggatctgacttatgaatgttcctaatggcatctagaatggtgaatcccttccagaaggttttctatttacttgtccaaatctgtcagaggaatcaccatctacggcagctattgccttaagaaatgtatttcttaaat

SEQ ID NO: 798656 - DNA, 567 bp, Homo sapiens
tttttagtagagatggggtttatccatgttggtcaggctggtcttgaactcccgacctcaagtgatctgcccacctcggcctcccaaattgctgggattacaggcatgagccaccatggctggcctccacttctaattctcgttctcttgctttttccacatctgcagtcacttccttcactgaagtcttgaacccctcaaagtcatttgtgggagttggatcaacttcttccaaactcctgttaatgttgatattttgacctcctcccatgaatcacatatttttttagagatagggtctcactaggtttcccaggctggagtacrgcggctattcacaggcacaatcatggcacactgcagccttgaactcctggcttaaactaatcctcctgctttagcctcctgagtagctaggtgcatgccaccggatctgacttatgaatgttcctaatggcatctagaatggtgaatcccttccagaaggttttctatttacttgtccaaatctgtcagaggaatcaccatctacggcagctattgccttaagaaatgtatttcttaaat

SEQ ID NO: 798657 - DNA, 645 bp, Homo sapiens
aataataaatctagagatgttaatttttttctacatactctttagatcctgtacctgaaaccaccatggactctactacatttactacagtgctttaaaaaacattggttggctgtatttggattagttatggaaaagaacttgcttttaactattgagagcctatacaaaaatctccgtaaaggtatgaatcttttatttttctctttagcagtgttgtattaagtcagactagcagatatatttcctgggatgtgaagataaattaatgaagaatttgttaattagttcttaatcatttatrcttctaatttataaaggtatttgtggaaactggatgaacagatgcagctcatagagctatgtatttgtggaaactggatgaatagatgcagctcatagagcttgtgactgtaaatggtattgttgatatttcaaaatattgtgaatatataatttttgatgatgtctactttgaaaacttttaaaaccatgttttacattctgttcagatacaccaatagaattaattagacttttttcgtttcttacagtgtttaacacaaactttgagcacatttcatgtactaattttcagaatagtgtgtcaaggtttctatttaaactatatagataaggaacagg

SEQ ID NO: 798658 - DNA, 602 bp, Homo sapiens
tacttccaaattgtttctgatatgtacataaggtatgattataaaagtgactgtctgcaataaaagagaacttgttcaggatattcactagttggtgtagaacctgttaagctttgggtttgccagattagggaaccacaccaccagccgcacagatggggctcaaagtgctgtcagagattatgagcttctgggcaaatggggaagctttaagagggcatctctgctctctgcctctttccttttctttcctgagaagccaaataaatatacattcatctgttgcctgctgacccccatgaaaagaagttttttcagacccttatccttcaacttctagttgttattgttgggtttttgtttttccttgttctggtaactcctctttttttttttttwatcgctttaatataggttaatcctttccttaaaatttcttttcagtcttatcacatatttacccttatgcctacttcagtcttatataaaaaactttttcaatattattgagatgtgaagatgtccttttttaactttctagtcttttttattcaaaaacattgttttaaaatttttgttttagcttttatttcttccatttg

SEQ ID NO: 798659 - DNA, 737 bp, Homo sapiens
aatatctatcgacttttgctttctggtaactaagaatatggcagaatgggaaaaaaaaaaaaccttatcaaatgagcacacactgaagtgtcattgatttggtatctcccaaccttaaatattccagcagctgtttttattttaaaacaaaattgttttttcaaccaaaaaattacttactattgggccatctgcccattatcaagatatagcaaagaagatattgggagcagagctgctttcctaagttaggacatctagcaacctgtatcactccagctccagaaaccatgatatttaaaggaaacttggggcagctttgtgccctccctggtcctttatagcagtagaaatcagctccagaaatgttattttcttcccagcctttacaactcctgtactgtctccacacctcctgcctcaggmtcatttcattattttcccaagagttagatacacttgggtagctttggtcctatcctggcctcctgaattactgcctaggattagtcagtcacacctgtttcccaggtcctgatctgggagaaccatcttagatcttgccctggctgaaactcacctgtgggaatagaatgtgaatttaagtcagagaagagaagatctcagaacgatggattccttacagaaccaacaaccaacaacaacaacatatttcctgagaatttcactatttacaaagtaccatcccatacattatcttatttgctctttctaat

SEQ ID NO: 798660 - DNA, 555 bp, Homo sapiens
tagtgtaagttgcctttacatcattactctgtaacccactctgggggaaggtgtgctttccattcccacaactttaagctttggtctcgaggtctaggttcccaagggacaaattaattgtttctgtaaatataagattatagcagtagcctggtcattttggacttcttacactaatagactagaaggtaaagaaggattagtatattgaaaagaataattggctttgatgatcataaagagaaagattgctgctacataataatgacaggaagaagtatgtttgaaactcaggagattcactgggtacctctttataacttcaartccaatgattaccataagtggaaactgctggaacaacatcctgacaaagttaaggtaactggaggggcagacctcttaggcacaaaggtctgtgctatcttgttgaacgacagacctgcacgagcagaagtgctatccaagagggagaagaatctagaatgtgtgttagatgtgggagagggtgaatatcagttgtgcgcttgggatcaactgcaacagctaatagaa

SEQ ID NO: 798661 - DNA, 540 bp, Homo sapiens
aggtaaaaaaccccctcaaatctggcatggtgaacctccaccttagggatccctctcatgagccagacttgggctgcagggatcatgctgggtggcttccaggtgcatccctcccaccttccacctcacctggcaatgctccactctggctcgatgcgctggacccgagggtcatctatgtactcaaactgcaggttgctatccacatgggctcggtcgacactcacagaaacagggaccgggccaaggccattggatgatgggggtgagacacacacgatctcactcattgacctcctgacagggagacagcaggagggttgagaagaaaggcatgggcaacaagaggtgcccactggcttgacaaggggctttccttggtctgcgggtaaggccacagaagtgttctctcatccttttatattctacaacaatggaacacatcccgcatcagtatagatcagtgccccagtggattagggaggyagcaaattggagacgggggtttgaaaatgaggggcagggatagggtttcatggg

SEQ ID NO: 798662 - DNA, 609 bp, Homo sapiens
tacttaacaaattataacaatttttcgtgggatttttaaaacatacattgatataatgcctatacatccatcctataaatgattggacacttatgggatataaatgaaaggataggacaaccatcttataaatgattgaaggggtggacatatatatacctatcaatttcaagattctacattttcagtggagaggcagagtatcaattttaagtaggccatgaaagattaagaatgtatattgtaacctctagatcaacctttgaaaacartacaaggatgtattactaaaaagaaaacagatacattaagatggaatactaaaatttcaaatgattcgaaagagaaaaaggagaaaaaatgaacaaaaaatggtggagcaaatggaaaataaaaattttttaaattcaaccatattaataattaccttaactatgaatagtataagaattttaactgaaggaaaagattatctaaatagattttaaaaagtaaggccaaagtatatgatgcttacaagaagctcacttgaaaaataaaaacacaaacagattgaaagtaaaaaagatggaaaatgatatgttatttaaacagtaaacataagagagc

SEQ ID NO: 798663 - DNA, 486 bp, Homo sapiens
tgagaaaccttattcacgagaataggtagattggaataaaatgactttttacttaaaaaaaataaaaatttcacacaatttttctaaggatcattaatgtgtctttatcacttaaagacaccttgtttaatccaagtatacaggaaacattgagaaaaataagaataccccaacctgcttgactgtcctccttaaaagctcatttaaacagtgatctcctttaactggccgttggtcctgtccagtgatggctgtaggtaggcaccatggycatgccttcggtgttctgatagctgctggctctagggttaattgtagggatgaggttaccccatttttttgataatcccatgggacatcccaactttcagtcctggatgcttagagaatgtcatatctccttgtaaggcgacatgattaccatttttcattttagccattctgatagatgtgtaatgatatctcattgttattttaatttatatt

SEQ ID NO: 798664 - DNA, 643 bp, Homo sapiens
ttctctcccatacagaaatttaaccactcatttcaagaagttagttaacttttatcaaacatgtcttgagtataaataatttgtgttagcaccactacagcatctaggatggagaaacggactttttacatgaagatgtgttgatttaaaaccatttggtaattattgccatgtctgtgatagtcttgaatatattatgtgttgtgtttaaacactctgtttctctaacaaatgatactctatagacttcctgacctgtgacattcacagtgawgctaagcgctatagttcaaaagctgtgattaaaacaaagcaataaaaactataatttgtactttttttattgggatataaattggaaaatatataatggggacgacatgagatcatactttttcctatgaacaacacaggaaaatcagaatagtgaatattcaaacctctgaagatatttgattttcccaatggcatttcatgttactctgtctaacccatatgtctaaaggataaagaaatgctgatgttattaaagaatgttacttttcaagcaaaatcatgtaacaaactataagagtttttttaactatatgttttaataaaatatttaataatgctgaaatttaaattcaatataattttttcc

SEQ ID NO: 798665 - DNA, 643 bp, Homo sapiens
ttctctcccatacagaaatttaaccactcatttcaagaagttagttaacttttatcaaacatgtcttgagtataaataatttgtgttagcaccactacagcatctaggatggagaaacggactttttacatgaagatgtgttgatttaaaaccatttggtaattattgccatgtctgtgatagtcttgaatatattatgtgttgtgtttaaacactctgtttctctaacaaatgatactctatagacttcctgacctgtgacattcacagtgaagctaagcgctatagttcaawagctgtgattaaaacaaagcaataaaaactataatttgtactttttttattgggatataaattggaaaatatataatggggacgacatgagatcatactttttcctatgaacaacacaggaaaatcagaatagtgaatattcaaacctctgaagatatttgattttcccaatggcatttcatgttactctgtctaacccatatgtctaaaggataaagaaatgctgatgttattaaagaatgttacttttcaagcaaaatcatgtaacaaactataagagtttttttaactatatgttttaataaaatatttaataatgctgaaatttaaattcaatataattttttcc

SEQ ID NO: 798666 - DNA, 576 bp, Homo sapiens
tggactgggtcccactgtaccctctcccgacctgtgacccaagcagcttcagtgtagagctattttgaaagctgagcccccagcaaactacatcttaccctaggacccaatcatctttgcaccttcatatccctggaaccctgttgatatccccccacatccactcaggaggctgcagtgtcatgacgctagctagatcattggtgtgacctgatccctagcattctaacccacagtttcctgtaccccatggaacaggcagtacagtggaccaagggggctgcccccaracaaagggaactgaagtatgcgctctccagagcctgacagcagcctgcccagaacccctgccacatctcatcaagcgatttcataacagtttaccctgcctgttgctgctgccagcactcatgcacaccaacaaggcctaaagacagccctgccttgcctgctgctgctgccagaacctaagcatatcatctgaggaactgcaaatcagcctgacatgcccaccaccactggtgcccaagagtaccatccagtggcctgagaattatcaccactaccagcacctgt

SEQ ID NO: 798667 - DNA, 610 bp, Homo sapiens
ttgtgcatgcttcacgaagttctcaagctgtgtttttcagctccatcaggtagtttatgttcctctctaaactggttattctagttagcaattcctttaaccttttataaaagttcttagcttgtttgcattgggttagaacatgctcctttagctcagcatagttttttattacccatcttctaaagcctacttctgtcaatttgtccatctgatcctccatccagttctgtgcccttgatggagagacactgtgrtcatttggaggaggagaggcactctggccttttgggttttcagcatttttttccaattctttctcatcttcatgagtttgtctagttttggtcttcaaggctgttgacccttagatggggttttttgggggcttttgttgttgttgttattgttgatgctgtagttgttgctttctgcttgtttttctttcaatggttaggttcctcttctgtagggctgctgtggtttgctgggggttcacttcaggccctattcatctgatttgctcctgcacctggagatgtcactcagagaggctggagaacagcaaaaatgggtgtctgccccttcttctgggaccactgacctcaag

SEQ ID NO: 798668 - DNA, 533 bp, Homo sapiens
aatcccagcactttgggaggctgaggcaggcaaatcacttgagctcaggagttcaagactagcctgggcaacagggcgaatccctctctctacaaaaaatacaaaaattagccaggcatagtggtgtgcctattgtcccagctacttgggaggctgaggtgggaggatcacttgaacccaagaggttgaggccacagtgagctgttatcacaccagtgcattccagcctggacagcaaaatgaaaccctgtctcaaaaaaaataaaataaattagagattcagaaaggttaaataacttgccaaggtcgcacagtagaactcarggcttttggctctcaaagatcccaaaacatcgtgctgcaaatattaaaagcagttcttgtggaaagtggcttgtcataattagaaaagacactcataattaccatattcttgctttgtgtgcaaagagcacttcctgagatttatgcaaagaataattaaatatggcctgcatttgccatcttgtctcgcaattagtttattctccttt

SEQ ID NO: 798669 - DNA, 618 bp, Homo sapiens
tattggaagcataaataaatagtgggtctctggtcatgtctagtagcttcaagtcacagcaaacccaactcaaagggactagaacattaacgcagttctttgtgtccaccaataagcatagagagaaaggttccagagacggctaatttagcagctcactgataacactgtggacccagttttttccatctttctgttcagacattctcagcattttttrttttgtcctcagacctgtccccttatggtcacaaggcagctatggtggcttcaagcattacatcctcaactagcaatccccatcatccagagactatttaagagagagcattcctttcccagcaccactttaagagtgaggggagctctccagaaatcacagagcagatttctccttccataccattggcagagtttaatcccatgcccattcctaaccagtgcctggcaagggaatgggaaagctgtgacaatcttggcttaatcaagatttatacaagggctgggaaggaccactgtcccctgaaaccagtgtcttaggatgcctgagccaaattagggttctgttaggaaggaagaggggaagaagagctattgtctgtttgtgacagaatgaat

SEQ ID NO: 798670 - DNA, 632 bp, Homo sapiens
tttaagttccttatcgactctccaaaggacatgaatatgcatttctcaaaagaagaaatggccaataaacaaatgaaaaaaatgttcaacatcaataatcatcagggaaatgcaaattaaagccacaatgagataccatcttactcctgcaaaaatgaccataactaaaatgtcaaaaaataatagatgttggcaaaaggggacacttayacaccgctggtgggaatgtaaattagtacaacctctatgaaaaacagtatgaagattccttaaagagctaaaagtagaactaccatttgatccagcaatcccactactgggtatcggcccaaaaggaaagaagtcattacttgaaaaatacacttgcacaagtatgtttatagcagcacaattcacaattgcaaaacgtggaaccaacctaagtgcccatcgactaatgagtacataaagaaaatgcggtatacgtatacgatggaatacactcagccattaaaatgaacaaaataatgtcttttgcagcaacttggatgaagccggagtccattattctaagtgaagtacacaggagtggaaaaccgaaaaccatatgttctcacttataagtggggagctatgagtatgtgaagacacac

SEQ ID NO: 798671 - DNA, 605 bp, Homo sapiens
ttaaaaggtgctaatacagcttcatattattaaacacaacctggtcagtttaaattcaggaaagcaggtgcatgtgccatgttaatgttatttaaattgtattatttaactggaactttctggcatttttactacgtaaagtaaaatgaataataaatttattcctaatctttataaatkattgttgcatatctttgtacgtgtatattttattacataaatcgatataagcaaatactatgcatacttttattattattattattattattattattattattacctatgttttaaatggattatttggtaactcttgcatgagaaatcctgctctaggctttaaaacttttcaaataaaaaccagagtaagtaataaaagtaatatatttaccacaagcatatacatacacattcatacaaacactgaaaattttgcaagtttttcatttgcagtgtaacataaaaattataaagttcaatctgatgtattttattctcttccatttcaattataaatctgttcatagcccattgaattaattgaacagcctaatagtagtgaagccacacaatttgtaaaccactgcttgggagatcttgcc

SEQ ID NO: 798672 - DNA, 530 bp, Homo sapiens
tagattctggatattagccctttgtcagatgggtagattgcaaaaattttctcccattctgtaggttgcctgttcactctgatggtagtttcttttgctgtgcagaagctctttagtttaattagatcccgtttgtcaattttggcttttgttgccattgcttttggtgttttagtcatgaagtccttgcccatgcctatgtcctgaatggaatggcctaggttttcttctagggtttttatggttttagatctaatatttaagtctggaatccatcttgaattaatttttgtataaggtgtaaggaagggatccagtttcagctttctacrtatgcctagccagttttcccagcaccatttattaaatagggaatcctttccccacttcttgtttttgtcaagtttgtcaaagatcagatggttgtagatgtgtgatgttatttctgagggctctgttctgttccattggtctatatctctcttttggtaccagtaccatgctgttttggatactgtagccttgtagca

SEQ ID NO: 798673 - DNA, 615 bp, Homo sapiens
tctcaagaagttaatgatagattgttgcacataaaagctgaaagagaaactaatttgtaattatatataatgttacatttaatttgtaaatggaaaatttaagttcagtaaacaagatgatcaaagtcatttgtaaattatagtaacatatttaaaatagatactgtatttagtaatctatcaaattttgcattttatatttcattcctagaacttattatataccacatttaaagccttttttgttagtgaaaaagagtagagatattttttatwaaaaactttttaaaaatatttaagtctagtaaataaaattaagttagagatagaaaacacctatagaaatccctttcctaatgatacagatccttgacagactaaaggacttatataataaaaagtcatcaatattgttctgatttctaatcttgtagtatttcaaaacagaggagatagcgatttactgcagacagcgaggagagactatgcattagaaataagcaaattatcagaataggtcgcaagataaccaatatgttttcatgactgaaagatataacttatgaagttattcaggacactggacatgaagttttcacaagaggtaagttacac

SEQ ID NO: 798674 - DNA, 411 bp, Homo sapiens
ggaatgaatgctcattggtaagtggttgtatcatctcctgctatatatattttatttatcttagtagtttcattatttttagataatatttttagaaaaaagattttgtcttggatatgtttataactctatatctcctttataaacatatgcaakacatatacacatatgcatgtcttacatatatttataatactacatctctttttcttatttcatcccagagagatgcaaaaaatctatttactagcattgattctattagtcattatatataccatctactcacaaaaaatgtttctgttgctttaaaatagataattgagctttaaaataaaattgtattcagtactaggtaactaacactaaagattaaataactctgagctttaaaatataattgtattcagt

SEQ ID NO: 798675 - DNA, 646 bp, Homo sapiens
aatttatagattcagtgtcgttcctacaaaactaccaatgacattcttcacagagctggagaaaaaactattttaaaattcatacggaaccaaataagagcttgaatagccaagggaatcataagcaaaacgaacaaagctgaaggtgttatgctacctgacctcaaactacactacagggttacagtaaccaaaacagcatgatactagtacaaaaaaagacataccaaagaaacagaatagagaacccagaaataaggctgcacacttacaactwtctgatctttgacaacaagcaatggggaaaggactccctattgaataaatggcactgggataactgtctagcaatatgcagaagaatgaaactgcaccccttccttacatcacatataaaaattaactcaagattcattaaagacttaaatgtacagctccaagccataaaaaccctggaagacaacctaggcaatatcattctggacagaggaactggcaacgatttcatgatgaagacaccaaaagcaattgcaacaaaagcaaaaattgacaaattggatctaattaaattaaagagcttctgcacagtgaaatagattattaacagagtgaacagacaaccttcaaaatgggagaaaatatttgc

SEQ ID NO: 798676 - DNA, 646 bp, Homo sapiens
aatttatagattcagtgtcgttcctacaaaactaccaatgacattcttcacagagctggagaaaaaactattttaaaattcatacggaaccaaataagagcttgaatagccaagggaatcataagcaaaacgaacaaagctgaaggtgttatgctacctgacctcaaactacactacagggttacagtaaccaaaacagcatgatactagtacaaaaaaagacataccaaagaaacagaatagagaacccagaaataaggctgcacacttacaactttctgatctttgacaacaagcaatggggaaaggactccctattgaataaatggcactgggataactgtctagcaatatgcagaagaatgaaactgcaccccttccttacatcacatataaaaattaactcaagattcattaaagacttaaatgtacagctccaagcyataaaaaccctggaagacaacctaggcaatatcattctggacagaggaactggcaacgatttcatgatgaagacaccaaaagcaattgcaacaaaagcaaaaattgacaaattggatctaattaaattaaagagcttctgcacagtgaaatagattattaacagagtgaacagacaaccttcaaaatgggagaaaatatttgc

SEQ ID NO: 798677 - DNA, 645 bp, Homo sapiens
tagagaagatcactaaagaaataaaggacttcatcaacactgtagttcaaattgaagtaaaagatagatatataaaggacattctactcaacaacagtataatatatggttttcttaagtatacacatggaacatccttcaggataaaacatattaagccacaaagcacgtcttaatacatcttgaaagattaaaccatacgaagtattttttcctgattacaatggaatgaaactagaaataataccagaaaaattattggaaaatctataagtatctggaaattaaataacagctttaaataaacaatagatcaaagaaaaaatcacaagagaaattaaaaaatgttttcagacaaatgaaactaaaaacacaatataccaaacctgtgagatacagtgaaagtagtgctaattagaacatttatagcagtaaatgtttasattaaaaaggaaaaaagatctcaaatcaacaacctaactttacacctcaaggatctagacaggaataaactaaacccaatgctagcagaatgaagaaaatattaaacattagagcaggtatttaaaaaatagagactaaaaaatagagaacatcaatcaacccaagagttggttatttgaagagatcaatgaaattgacaaa

SEQ ID NO: 798678 - DNA, 645 bp, Homo sapiens
tagagaagatcactaaagaaataaaggacttcatcaacactgtagttcaaattgaagtaaaagatagatatataaaggacattctactcaacaacagtataatatatggttttcttaagtatacacatggaacatccttcaggataaaacatattaagccacaaagcacgtcttaatacatcttgaaagattaaaccatacgaagtattttttcctgattacaatggaatgaaactagaaataataccagaaaaattattggaaaatctataagtatctggaaattaaataacagctttaaataaacaatagatcaaagaaaaaatcacaagagaaattaaaaaatgttttcagacaaatgaaactaaaaacacaatataccaaacctgtgagatacagtgaaagtagtgctaattagaacatttatagcagtaaatgtttagattaaaaaggaaaaaagatctcaaatcaacarcctaactttacacctcaaggatctagacaggaataaactaaacccaatgctagcagaatgaagaaaatattaaacattagagcaggtatttaaaaaatagagactaaaaaatagagaacatcaatcaacccaagagttggttatttgaagagatcaatgaaattgacaaa

SEQ ID NO: 798679 - DNA, 580 bp, Homo sapiens
acaatggcatattattcagtcttaagagggaaggaaatccagtcacatattatgacgtggatgaaccttgagaatattatgctaaatgaaataggccagtcacaaaagaataaacactataagataccattcagtgaggtatcaagagtagtcagatttatggaagcaaagagaacggtggttacsaggaactgcagggaggagggaacaaggcattcatgttgagtgggtttacagtttccgttttactagatgaaaaagtgaaaatgctctaatactactgaactacacatttggaaatggttataatggtaaatgttgttatgttgttgtttttaaaatctcaaaagaagaaaaaaggaaggcaaataatattgcactagtgtgtgttccaggtactttatatggacagtgtcacttaatcctctctgtgccatcactgggcaggtgagaaaaaaaacaggtaagttcaatagtttcccaggttataggattcagaagctgaagatctggaatataaatccaaatatgtacctatttgtaaatagaaatgccatgggtacagagtagagattcatga

SEQ ID NO: 798680 - DNA, 580 bp, Homo sapiens
acaatggcatattattcagtcttaagagggaaggaaatccagtcacatattatgacgtggatgaaccttgagaatattatgctaaatgaaataggccagtcacaaaagaataaacactataagataccattcagtgaggtatcaagagtagtcagatttatggaagcaaagagaacggtggttaccaggaactgcagggaggagggaacaaggcattcatgttgagtgggtttacagtttccgttttactagatgaaaaagtgaaaatgctctaatactactgaactacacatttggaaatggttatartggtaaatgttgttatgttgttgtttttaaaatctcaaaagaagaaaaaaggaaggcaaataatattgcactagtgtgtgttccaggtactttatatggacagtgtcacttaatcctctctgtgccatcactgggcaggtgagaaaaaaaacaggtaagttcaatagtttcccaggttataggattcagaagctgaagatctggaatataaatccaaatatgtacctatttgtaaatagaaatgccatgggtacagagtagagattcatga

SEQ ID NO: 798681 - DNA, 517 bp, Homo sapiens
aggtcacgcattcatcaagaatgatgaattccttttgatctttcataacatctaatagtgcaaggcatgtggtcattgacggataaatattgttgccagccatggtaatactgtttcttaaaaaggtatctatgtgaaaatgataagaaaaacaaataacattctgataaaagggtaggcagtcattccatgtagtcatcaatgttaggcatagttctaggttctcaggatgaggtagaggaaatgtttgccaaaagctcagttggtatctgtagcctaaacttaaggttctctaaagcctgaatctgtgcaatacatggacatgttaactactcctactttcccttcttgtatctgtaaaaaagatrtggcagcaataatctcagatctctctgagctgttaggcaaatggtcgtagagtgagtagaaatgcagaatgataggaaataaaacacccagtgataaacttttaaggaaggcaggttaatggggcaagtatgtggagggcaacctgcct

SEQ ID NO: 798682 - DNA, 606 bp, Homo sapiens
attactgattaattcagataactaacctgtagcactaacaataacatagcagctgttattgatacaggagctagaaagaaattatttaggcagatagtgagggtaagagtcctcagcaaggctttccttttaatgaaaagcagcccccaaatcgtttgtttcctaacaaagagcagcctgtaaaattgagctgcagacatagacaagcaagctgaaagcttgcacagatgaatccctgcagctgtgctaataggagaaagctacctgggggcyaggcatgtgcaacatggaggatccatcttctcttttctttgtcaaccatgtgtgcagtaaagaagcaggcaacaacgtggtgctggccaggtagaaacctcatcttcatgataaaagattagggtgagatggtcagcttcttcacacactatgctgatttaaatgattcagagatcatttcaattttgcaaatggcacacctggttcaagcaatctcttgtgcttatgtttgtttgagacggagtctcgcttggtcgcccaggctcgagtgcagtggcgcgatctcggctcactgcaacctccacctcctgggttcaagcaattcttctgcct

SEQ ID NO: 798683 - DNA, 606 bp, Homo sapiens
attactgattaattcagataactaacctgtagcactaacaataacatagcagctgttattgatacaggagctagaaagaaattatttaggcagatagtgagggtaagagtcctcagcaaggctttccttttaatgaaaagcagcccccaaatcgtttgtttcctaacaaagagcagcctgtaaaattgagctgcagacatagacaagcaagctgaaagcttgcacagatgaatccctgcagctgtgctaataggagaaagctacctgggggccaggcatgtgcaacatggaggatccatcttctcttttctttgtcaaccatgtgtgcagtaaagaagcaggcaacaacgtggtgctggccaggtagaaacctcatctkcatgataaaagattagggtgagatggtcagcttcttcacacactatgctgatttaaatgattcagagatcatttcaattttgcaaatggcacacctggttcaagcaatctcttgtgcttatgtttgtttgagacggagtctcgcttggtcgcccaggctcgagtgcagtggcgcgatctcggctcactgcaacctccacctcctgggttcaagcaattcttctgcct

SEQ ID NO: 798684 - DNA, 478 bp, Homo sapiens
aacaaaaattaattaattaattaaattaagaaaaaacaaagactgagggagagaagaggatgagaggggccagttggctggcagaggaggctgcactgtctctggcgggatcctgtgcttgcttggaggattgccagcagggtggtcttcaaaagaatctctgacccaaaggcctagatttttttatgagaacacaggagccgaggagctggaatttccaaagggtgttccaaccccacccccacggaaaggcccctggaagaatgaggccctccgggcccaggsctcctctaaccgccccaccattgcgtgcccctcccctgagcgcggcgctcccggcgatcttgggcaggtggggccccaaggccttgtcaatgcggggcgaggcggggcggggcccgacaaccttgggctggtggggcagagccccgtgaccttgtccacacggggcgggggccgcagcgacattgtgcacgcc

SEQ ID NO: 798685 - DNA, 592 bp, Homo sapiens
tgaggataataatatttcctcccatagagttgttaggattagtgagattaccttccaacttccctcctccttcctgtctttcttctttctttcttgtgtatgtatctatctaaaataatgcctcgtatcctaaatgctcaataaatgttagttgctattaaatgcctctctcttttgtatgtggtaggccctaggaatttagagagaaataaagtcactggtgtcagagaaataataaaaggaagggtagggggcagcaaataaaggtttgtagtccattatgctaagttgggtaatagagatggacaagcaaygtgttatgtgagatgaaatagagatgttagttgtgcttggacaactggggaaaggtgagtgaaggttgatgaaggaagcagagacggaagcagatttttgaagggtaacttaagattgttgaagggtaaggagtttgacagtggggagttttatgggtcagtaccacttggggaactttgagggaaaaatgtgtatttttggttttgactcccagcctgttgaatcttttggggttggaaatctatttgccagttttaaaaggtttcccggactgtct

SEQ ID NO: 798686 - DNA, 626 bp, Homo sapiens
atcatcttcttcatttgacatcgaaatcaatttgtatattttaaaagcagagatcagccatagtaattccagttatattttatgagccaaaataatagcatgcctttaatctgccactttgtttggaagtcttattttcagaaactatgaataaatcttctacaccatcttcccgagagctttagtaagacctcagactggagtagagttgaaggagggaatgccagtctgaagaaggaaaggaagaggagagacagcaaggagaacttcagttgtcaaggtatcgggtgcaggggtcagaaagaaacatgactccatggaccactgcttggcccaagaccrgatgtcaaaaccacagagccctgctgtagagcattacaaatgtattccaccaaatgttgggatgcatcctagacctgtgctggccagcagtccccagctgtgaggagaagcccgccatttgagttgatcacttggcagagttgatcatcataaaattatccttgtagagctaaataaggtttgtctttgacattcagtctggtttataggatagcaaaagggaagtggcctcagctagtagatttgaaaagcaaaagtaggaataatgcttttcagatactaat

SEQ ID NO: 798687 - DNA, 626 bp, Homo sapiens
atcatcttcttcatttgacatcgaaatcaatttgtatattttaaaagcagagatcagccatagtaattccagttatattttatgagccaaaataatagcatgcctttaatctgccactttgtttggaagtcttattttcagaaactatgaataaatcttctacaccatcttcccgagagctttagtaagacctcagactggagtagagttgaaggagggaatgccagtctgaagaaggaaaggaagaggagagacagcaaggagaacttcagttgtcaaggtatcgggtgcaggggtcagaaagaaacatgactccatggaccactgcttggcccaagaccagaygtcaaaaccacagagccctgctgtagagcattacaaatgtattccaccaaatgttgggatgcatcctagacctgtgctggccagcagtccccagctgtgaggagaagcccgccatttgagttgatcacttggcagagttgatcatcataaaattatccttgtagagctaaataaggtttgtctttgacattcagtctggtttataggatagcaaaagggaagtggcctcagctagtagatttgaaaagcaaaagtaggaataatgcttttcagatactaat

SEQ ID NO: 798688 - DNA, 626 bp, Homo sapiens
atttgggtcaagatctccaagccataaatgcactaggattgccttctgttctgattgccccgttatcagcttttgcttttccgtgcatccgaccctgccagccactcctatttgtgcttctgtattagggtctctggaatatttggccctgacacttagagtcttttgtgattctctccatagaaattcttagaagggacatactgtatgcctagttactccatatttgttcactgtgtcaatgtgataacataggctgtctacaaacaaggtgactttccctccagccaatgagaagtaggaacaaaacataaagcaaatataggtttaccttgagatggtcacatagaacatgtttctgctgtaagttgaccttctgtacttcttcccagaagaattagaggacagtttttctgtctcctgaagatgctaacttaggatgatgtttggagggagmaaacttagtttttaatgtttgtcttctcaaaaactcatgctgaaatttaattgccattgtaacagtattaagaggtgggacctctaagaggtgattgggctgtaaacccacccatgagggtgagtttaatgcctttaagaaagggctttcagaagtaggtcatatcact

SEQ ID NO: 798689 - DNA, 605 bp, Homo sapiens
gctaaatgttatcttattgctgcttccctagttatttaaaatatatatcaatatccagtaataaaagattaaaagctaaccatttctctgttaataaatggtcaagagtatgggtcatcaggtacgtttatttaggtaattttagagtttttctctttgctttgtttttgtcaatatccagcaagagaaattaaacacttcacatagtgtagtaacattgtactagttttctatttctgtgtaacaaatttccaatgaatgatcactaactgcttaatgacaaaacacagcagttaaacaatatagatgctttttgatttatgaagagagctgaaaatgcatttaatacacctcacccatctaatgcatagcttggtttagcccaccttaaatatgctcagaaccsttacatcaacctacagttgggcaaaatcatcaaacacaaagcctattttacagtgttgagagtctataaaatgcaaatgggatttcagaaaataccactacaagggtgatattttaataaccctccatgaccactgtgcattcacagacagcctgtggtcacttgcatatctgcattctttcctaagttttaaaaatcc

SEQ ID NO: 798690 - DNA, 605 bp, Homo sapiens
gctaaatgttatcttattgctgcttccctagttatttaaaatatatatcaatatccagtaataaaagattaaaagctaaccatttctctgttaataaatggtcaagagtatgggtcatcaggtacgtttatttaggtaattttagagtttttctctttgctttgtttttgtcaatatccagcaagagaaattaaacacttcacatagtgtagtaacattgtactagttttctatttctgtgtaacaaatttccaatgaatgatcactaactgcttaatgacaaaacacagcagttaaacaatatagatgctttttgatttatgaagagagctgaaaatgcatttaatacacctcacccatctaatgcatagcttggtttagcccaccttaaatatgctcagaacccttacatcaacctacagttgggcaaaatcatcwaacacaaagcctattttacagtgttgagagtctataaaatgcaaatgggatttcagaaaataccactacaagggtgatattttaataaccctccatgaccactgtgcattcacagacagcctgtggtcacttgcatatctgcattctttcctaagttttaaaaatcc

SEQ ID NO: 798691 - DNA, 638 bp, Homo sapiens
ccttcaatatcctgcattatctctgcccccattacctatctgacctcatatcctaacaccctcctttgtgcactctactctagtcacacagacttccttgctgttcctaaacctgcaagacatgctcctaccttggaggcttagctctagttggtccctcttcctagaatgctctaacttcccctatgtccttccagtctcttctcaactcaacctccctaataaagagtaccttgacaaaccagcttgaaaaaaatgccacctgcccccaaattacttgattcccactctcctcacttwccttaatttttctttcttccatgttattttcaccatttagcccaccatacaacctatttattatgtttattttcacttatctgtttccctgtctgaaacatgaagatacaaatctttgtcagttttatacactaatacactccaactgcttcaaacattgcgcggcacatagcaggaatgcaataaatcattgatacttgaatgacagaaatacaccctagtaagtgtcttacaaactgtcaaggaaatatgaatgtgttagtgtttgtgtattccatgaaattaatattagagtcacatgctgaaagggacattatcacttacaggaatgactcccc

SEQ ID NO: 798692 - DNA, 434 bp, Homo sapiens
gaagctgacttattgcctcttgtttcagagttggggaatgttagccaggtatttttgatgttgaagctctggggcgtgatccagcaggtggcatgtaggcttattgatcagttggtagactctttcttggctgtgtgtctcccccacatttcctcacagttgcatcctgaatgtcacctcagatggaaagggagggtgttgcaacagcagaggagatgcaacaacaatggtttccctttcggcgcckgcaccttttgattagaagcagcgatgagtgatcaggcaacagatcaccaatatttagaggaaagggttctttttgcctgctgtggctgttgcaatctatgtgcgggctgctccaggagcacacacacaactgtctaccaagaggatagggatagggaatgggttgctgctgtgctaaaagctgaaat

SEQ ID NO: 798693 - DNA, 626 bp, Homo sapiens
agaccctaagagagatggagagatgcattgtttcccagaggactcggaaggtagaattgctgaatcctgtttcagttatctaattcctttaatgtcactatcttttttttattactccaatgtatctttgcattaacttaattgtcacttgcctaacattttcttgagtcagtttgagtgaggttctgctcgttgcaatcaaatcaaccagacataaacaccttttacaaaaacaacacccctccttccttcaaagaaacaacaacattcctcagcatggattgcaaatcagagttgcatttacctctacgtgagaaaaacatagacagttggcaagagccatcttgttttagtctaccaatttattrctgtttgatgccttttggtaactctggtatagatcagatcatctcaactcgtagtcctcaactagcctctattcaagtgagtaatctgcaaatgatgtttctgaaaaacctcaaaagtggagcctgaattgacagtgttgtctggggtcttagtggtttctaataatcctgtcaaatttccttgtaaaactaagagaactttattgattaggccactgctgtttgcaagaaggcaggaggatgggacaaaagaataag

SEQ ID NO: 798694 - DNA, 626 bp, Homo sapiens
agaccctaagagagatggagagatgcattgtttcccagaggactcggaaggtagaattgctgaatcctgtttcagttatctaattcctttaatgtcactatcttttttttattactccaatgtatctttgcattaacttaattgtcacttgcctaacattttcttgagtcagtttgagtgaggttctgctcgttgcaatcaaatcaaccagacataaacaccttttacaaaaacaacacccctccttccttcaaagaaacaacaacattcctcagcatggattgcaaatcagagttgcatttacctctacgtgagaaaaacatagacagttggcaagagccatcttgttttagtctaccaatttattgctgtttgatgccttttrgtaactctggtatagatcagatcatctcaactcgtagtcctcaactagcctctattcaagtgagtaatctgcaaatgatgtttctgaaaaacctcaaaagtggagcctgaattgacagtgttgtctggggtcttagtggtttctaataatcctgtcaaatttccttgtaaaactaagagaactttattgattaggccactgctgtttgcaagaaggcaggaggatgggacaaaagaataag

SEQ ID NO: 798695 - DNA, 637 bp, Homo sapiens
atctcaacagcgtattcaggccttcagtctctcctgccttagaacttgtctctctgctacaggataagattttcgaggatggagagcctttatttactgactttctcattgtccttagggcctttcccaataggagtactcagtttattaattcatttacttgagaatgtattagatgctggccataaagcaatgaataagataggagatatacatatgcacagatagtctatagtgaatatcagggaaatttaagtaaaaatgaaagattgagcttgaactaacccatccctagaagcttctcaaagtatctcttatttaagaataaaaacgtgttttcttgtattataaaatgtgcaayattctatggagtaggacatgaactactttcactcaactataaaaccagtgaaaagaaaatgaaattgtccagatttgggcacagaagaggcaatttagaagaatgacaatttagtattgaactatttttagaggtgagtgataccctatgctctgaaccttccctggtgtcctgcccaaataagagacttgcaaatctgatttataatttttacaaaagatgataaaggaatggtgcacaatgcctttcagattacatttgcattttaatagaaaa

SEQ ID NO: 798696 - DNA, 608 bp, Homo sapiens
ggaccttttaataagtgtcatctcaatgattaatttaatattgatattccctagcagaaaaacctcagaattgtggtggccgagagagtgatttgagagttgaaaaaagactaggaaaatgaaatattccaaaagtattattgtactgaagagagaaagtagtaaagaaaaacaacatccaggttggggraaattttaaattgcttttttgtataattataagtttgattttgagtcaaggaaaagttaaagtataagtaaggaatggaaaatctgtaatagaaatcacaaaaaaactccattaaaagtgtgcaaaagatgtgaacagacaattctgaaaagaggacatactattagccaacaaacataaaaaatgctcaacatcactagttatcagagaaatgcaaatgaaaattacaattagatattgtctcacaccagtcagaatgtctcttattaaaaagtcaaaaaataacagacactggtgaggctgcagagaaaagggattgcttatacactgttggtggaaatgcaaattagctcagccactatggaaagtagtttgaagatttctcaaataactcaaaatagagctaacatttgaccca

SEQ ID NO: 798697 - DNA, 643 bp, Homo sapiens
tatctaatggtaacatatatatatatatatatatatatatagacacacacatctatacatatatatgttatatatataagaatatatatatatgttcttacatgtttcaacagtgtttaatatgcttgtgaccttaaaaataattcaaaaatgtcaaaattatgggccctattcatttttgtgggcttcaaattgacacaatataggttatttatttctaaacaatagcaacaaatgtttttcttacatgaattttctatttctctgtaacatcagaaaactatttagaaaatgaaaagatattaccagaaataagacayaaagaatgttttgttattaagacatgccttcaagataatgagaattaaactgacaaaaggacatcttggcaaaatgctctccagtgcatttgattcatatgataaagataaaggaaatgaataagttattacaatcttggaagataatattacaatgctttgtatactcccttccatattaattctaatttctatcatctgttatacaacatgaatgtaacttggaatctctcaggaaacattttgcaatgattggaaggcactttatttatcaatattcacatgaaaattacaaaaactcccttgagcaagttacctttctt

SEQ ID NO: 798698 - DNA, 567 bp, Homo sapiens
ccaggctggagtgcaatggcgtgatcgtagctcactgcagcctcaaactcctgggctcaagcaaacctcccaccttagcctccaaatttgttgagattgcaggcataagccactaggctaggctgtttttaatatcaatattaggaatgagtgacactgaaatgcacatttgaccctttgagctctctgaaggtaaaagcaacggatatgaaaattttgtaaatattgtttgttttgacgatggatttgagtgtcagacttgaaaagggactatctgtgttctgttatggtgtgtgtaagtatttagattatgaatttatatatacacatatatttgacctcttttattttaattaagtgatatattgttgaakatgaatgtatctgatatatccatttaagttttgtgtggagttaattcatctttaccaaatattaattaattaataaaggtattcaggttcagtggatgaaagtcagccaaaaaatattgccagaaccactagaagcttaaacatttagaacagtttgactaaagatagatatactttactttcttttataatt

SEQ ID NO: 798699 - DNA, 595 bp, Homo sapiens
agtggggatccatactggggaataactaatatcaaaagcatacagacgacaaaattgaaattattcaaataagtggagcatagattcagaagcctgtttatttttttctgcctcttaagagtttattttcacctgaagactcagcctggaacttacaatgtgattaatatctcagatgatgttttagagatcctcaacagtgaactctgaacataactgacaacaggaaacatgaacaatattgtatggtgggaagtaaaatcaatttgttaatcccaagagaacacaaagaaggacatagagatacaagataaggaaattagtctcagctrttgaaaatggtgctttaattattatattgaagaaaaattaaggagaaatagtcattataatcatgccttccataaaatggtacaaaggtcaaattgaataataggaaaggcatgcctatagaaactcccttctttaaaaaatcagaacttattatttctatgctgtctgaaaaaaagcctcaaatataagatatccttattattaataagctgtgcttattaaaaatttattgaactaattgaaaccttactatattattcag

SEQ ID NO: 798700 - DNA, 627 bp, Homo sapiens
atgcagggatatagtatgtcagatcaggaacaaaaaggagcataacattgaatcaggatgaatttatccaaatgggtttacttacatagaaattctggactgtagattcattatgttatcttgataactagaaatgaagaataagtttggtttaacttaagcacagattcatacatggcctatattaaatgggtttgaagtagcacagctccatgtaatatatgggaaggaatcacaaagcttatggagataggactayccatgtgcctgcaaactgcttaacatccaaaaaagcattttacgtggattgaccaaaaaaatatttcttcaaaaggcattaggaaatgcattgaggatatggcacggtgtggggataatatctttgagaagttttgcaatgtctccccactactagcagaatataattgtgagagatgccactgttcaaatgggtttcccgatttcagtgacataaatttctgaagcgacaaaaggcaagctgcatatctttggcactggagacaacgtaggcaagcttactggaatgaaaagagggttgatttagtaagcagaatgttttaacctgcaaatgtttttgtcagtggctaatggatcatgatatgctga

SEQ ID NO: 798701 - DNA, 627 bp, Homo sapiens
atgcagggatatagtatgtcagatcaggaacaaaaaggagcataacattgaatcaggatgaatttatccaaatgggtttacttacatagaaattctggactgtagattcattatgttatcttgataactagaaatgaagaataagtttggtttaacttaagcacagattcatacatggcctatattaaatgggtttgaagtagcacagctccatgtaatatatgggaaggaatcacaaagcttatggagataggactacccatgtgcctgcaaactgcttaacatccaaaaaagcattttacgtggattgaccaaaaaaatattycttcaaaaggcattaggaaatgcattgaggatatggcacggtgtggggataatatctttgagaagttttgcaatgtctccccactactagcagaatataattgtgagagatgccactgttcaaatgggtttcccgatttcagtgacataaatttctgaagcgacaaaaggcaagctgcatatctttggcactggagacaacgtaggcaagcttactggaatgaaaagagggttgatttagtaagcagaatgttttaacctgcaaatgtttttgtcagtggctaatggatcatgatatgctga

SEQ ID NO: 798702 - DNA, 627 bp, Homo sapiens
aaaagtatttttatatgcaagcagcaaataatttgaaatgaaaaaaatttataaaacagagaaaagaaagagagatttgtagatatatttatacatagaaaacaacaaaacactgttgaaaaaattaaagaactaaagaaatggatagctctattgtattcattggtcagaacccttcttactattaaaatatcaattsttcccaaattgacctgtacattcgatgatatccaaccacaatcttagcaggcttttggatggaaatatacaaacttatttaaatgtttgtaaataacttaatctaacttatttatatttaaatgcacaggacctagaataatcaaaccacgttgaaaacaacaaaattggaggagtagcactacataacttatgaattactataaagctacagtaatcaataatgtctgctggtggtctcaagagaatgacaaatagatcaatggaacaaaatgaagaaccttgaggtatagcaacatatatatggtcattaattttgacaaaagttaaaagccattcaatggagaaaagctccattttcaacaaatggagccagaagaattagacatctatatgcaaaaaactaacctcttcatgtaagccacacaa

SEQ ID NO: 798703 - DNA, 606 bp, Homo sapiens
aataaaaaaaatagcgaattaccaagtgaaaaaatagactagaaatattaaacaacaattcacgggaaaggaagcatagaggtcaataaatacatacagggctgggtgcggtgtaatcccagcactttgtgaggccaaggcgggcagatcacaaggtcaggagttcaagaccatcctggataacacggtgaaaccccatctctactgaaaatacaaaaaattagccaggtgtggtggcgggcacctgtggtcccagctactcaggagcctgaggcaggagaatgscgtgaacctggtaggcggagcttgcagtgagccgagatcgtgccactgcactccagcctgggtgacagagcgagactccatctcaaaaaaaaaacttaattaaaaaaataaataaatacatacacaaaaactcctagccatgctaagaatcagaataatgcaaatttaaataaacatataccgtttctttcacatcaaattggcaaaagttaaaatagcctgataatgtcctatttgacaatgagatgaagaaatagaaattcatatccagagggcttgaatgtaaacaaacatgatgatactgagttgaatattcatgtg

SEQ ID NO: 798704 - DNA, 463 bp, Homo sapiens
taactaggtatgaattatatttttagggatgtttaatggcaattatgtgactattcggctctttgcttttggatcagagaagcacgctcttggctgcctaggaatatggagttttccccacccccactgagagataagactcccatgggagatgggctgattccatctttttgggacccagaatatggcataaaaatagggatgggaccattaattkctgatctgttttgcctttcagctgtgcctgcttattatattattccctagaaactgtatgctttcctggacatgttcctccaaggactctacccctagagccagaattccacttaaaaaacataaaaactggcaaacgaaaaatgttacaactactggagcttcttctgtctgtctgtgtagttatatgtgtgttgtgtgtgtgatgtttatataaaagaggtctaattaattggcttaaaaaata

SEQ ID NO: 798705 - DNA, 601 bp, Homo sapiens
aagattggaactgaggtgaaagactaaaatacagctattgtgtattgtgataaagtacaaatactgtaggagaagggaaaaaagtcgatatgcctatattgctgtataggtattaagtagattttaaaagatcaaaatcctgattttgtgaaaaagttaacaaaataagtaaaccattagctaacttgacccaaaaaggggaaaatgtacacatatataaaataagatatgaaaagaggaaaacakcattgaaagagaacaaattcttaaaatcataagagtctaatttgcagacttccatgcaaatacattcaaaaacctagttaaagtagataattttctagaaaaatacatattgatctcattagggttacaaatcagataaatttccatctaagaaatagaaaaagttattaagaaactccccctacaaaaacatcactaggcacagatgatttcacaagagaattctaccaaacctttaaataccagctagttccaatgctatataaattgctccaaagcattcagaataaaggaaaacttcctaatcctttttatgaaacaactataatgctcacacctaaacagataaagaaaa

SEQ ID NO: 798706 - DNA, 620 bp, Homo sapiens
tcttaatcttatatacagttcttaagttggctgcctatttttgtgtaattgaatactgaccctacatgaagaatacaagaattttgtttttaagtaaatgttgttagaaataaaatgtttttactggaaaaaatatatatatgttattagaagcgctgtgaattcttctccaatgcttgaagagcgactgctccagcaggcctggcttatgtttgtggcattccgccctgccgctacctccagcatatccacagacytttatttttattattttatgaccacatgcaggattctggctccaaggactccatttggacttaggaaaagtagaagagcactctgaaaactggacagcggaaagtgatgaactggcatcgtaccccaacacactctgcttgtgggccttcctctccagatacctgatgtattactggagaagcaaatgcaacaaggcaaagatgtcttcattttctgtcaaagcacggcctcaactacagtgtgattgaggccctgaatctccgcagccagccggtcagaccccatcaacagctgcagcaagcagggctgaggaggggaatgggaggcgatgggcgccaacgagggctgagcctgcagctctg

SEQ ID NO: 798707 - DNA, 631 bp, Homo sapiens
ttttagttatgtaaaactagtatgtatatgtacataaattattgaaattactaggatgtttttggcagagcacctcacaattctaccataatgattctctgtaattatctggagagtcattgttcttaaaaatgtttgcagtctgtgctttcattaatcttttctacatgaagttaattttagtttttaaaatatacttaatttttgtagagatttaaaatttkttgcaactttgtaattaatgttaatttatatttagaataatttatactgtactattagggcattttcttgcaataaattattagtggagatgagcgactgttgatggagatgagtacctttatcatgcagaatatcagcagccagatattggacttttctcactgccccttaatttacttttttaaatattgtcgttctatggcaatcaggcttttggatattgaggaggaagtaataactacataatgtgataatgatgtctttgaggacccttgtccataacaagccatttgaatcagaataatatcttgtgcaatatggtgttaaggcttttaggttacatctcatttctgaatgtattctggatgacttctattgactttatgatgtttacctttcatattta

SEQ ID NO: 798708 - DNA, 642 bp, Homo sapiens
gaaatatataagcaatccaactgcatctcaccaccttcatctaaactgtcacttctcaggctgggcgcggtggctcacagcctgtaatcccagcactttgggaggccaaggtgggcggatcacccgaggtcagaagttcgagagcagcctggccaacatggtgaaatcccatctctactaaaaatacaaaaattagttgggcgtggtggtgggcacttataatcccasctactcaggaggctgaggcaggagaattgcttgaacctgggaggcggaggtggcagtgagctaaaatagcaccactgcactccaacctgggtgagagggagactctgtctccaaaaaaaacaataaagaaataaatacactgccacttctcagttggacactgccacactctcttcactggtcccatgctctaacatgccattctccccacagcagccagaagagggaggctcttaaaaatttaagttacatcacctccatcattctactaaagtaaacaaaactaaacaagcaaaccctccaatggcttccctcaatcttcgggccctatctgcatgactgcctgcccctcctccatctctccactttccccactcactagctgttcaacacacaggcttcctgactgacttc

SEQ ID NO: 798709 - DNA, 569 bp, Homo sapiens
ttcggccagtgctgcctgtttctcccttctcgcacctcctcatattcataagcatttattcagtgccaggactgtgttcacaattaatatttcagtttccccttctataatatatagaatgctgaatatgatagtcctgaaakgtctttttaggacattgtgtggttctagttgccaacctggatcttaaaatgcaaacattgacaataaccccttaaacttcagcttcaaggatggctcctcatagcctctgtgtgagtgggcagggctgggatcatcagacagtgcattttacagaagagaaaactgagggatgagcacctgcctaaagtaccacagagtcaactgtggatgagagcctggggcctggagagctcatgcccatatagggagattgctgtgccggtgttcacttgctatgaaggagcccatcatggggagttgtggtctgagatcctggaccttgggggtaaaagcagagggtccagaaagggacaaagattggcatcacctccccatcatggtctgaggctgattgtgggtaattctctgccctggcctcagtgatt

SEQ ID NO: 798710 - DNA, 487 bp, Homo sapiens
cttcatttattttatttaatttatttattcattttattttattttatttttgagacggagtctccctctgtcacccaggctggagtgcagtggtacaatcttggctcactgcaacctctgcctccctggttcaagtgattctcctgcctcagcctcctgagtaactggaattacaggtgcccactgccacgctcagctaatttttgtatttttagtagagatggggtttcaccatgttggccaggctgctctcgaagttctgacctctggtgatcygcccaccttggcctcccaaagctctgggattacaggtgtgagccacctggcctttttttgtgtttgtttttttttggggggggacatggtttcactctgtggctggaagtgcagtggcatgatgatggctcactgcagcctccacgtcctaggttcaagcaatcctcctacctcagcacccccacccctgagtagctgggactacatgtgc

SEQ ID NO: 798711 - DNA, 605 bp, Homo sapiens
catgggctccccagcacctgggacagagatgacccggctgaggccaggccggctccagcactgaccttgagctcttgggagacccgggccttctgccggtacacggagtacagggcggcggtgaccacagaggtggtgcccaggaggatgaactggcacagcgagggccgccctccgctctccatgacggcggcgagccccggtggccgactgtggcgccaaggataggcctggtgacccccgactctccacctccttccgaccaggaccgcacccccccggcctaacctgaccggaaactcgaaatcagtcgcccagcgatgacgcacgacgccggaaccggaagcggggcaaggggttgtagagggaaccggaaggtggggttgcccgggtgacaatcaagctsctgcggcctccagggaggtcctgtctccccagccgggtgtcggagagcgattggggagctgagcgaccacccaccgctccatggccgtccccttcgaaacacggcgcactggccatgactgactcgcccatcgccctggtttccgtccctctggtttcctggggttactgggctgtttgatgggttattccatgtcttc

SEQ ID NO: 798712 - DNA, 655 bp, Homo sapiens
tttgtatttttagtagagacgggatttcactgtgttagccaggctggtcttgatctcctgaccttgtgatccacctgcctcagcctcccaaagtgctgggattacaggtgtgaggcaccacgcccagcctagtttwtgtatttttagtagagatgggtttcaccatgttggccaggcaggtctcgaactcctgacctcaattaatctgcctgcctcgacctcccaaagtgctgggattacaggcgtaagccactgcgcccagccaagcaaattaccatgcaataatcatttaattatgcagcagaagaacagagcactgtgagaagggctcctaatttaatcaggggggccaatagcaacctgcctgaagaagtcacttcatttgtaacttagaggtgttacctattaagaaaaaaaggaactggtatattacttgtctatgtggaacaaatcaccccataacgtagtgacttgaaacaacaataatcatttaatctcgtcattcctgtgggtcaggaactcaagggcagctcagctgcgtggttctggcttggggtgtcttgtgaggttgcattcacgatgctggcctggggggtcagctctgacacggtcacccacatgcctggcatgttggtgctggctgttttctttttta

SEQ ID NO: 798713 - DNA, 655 bp, Homo sapiens
tttgtatttttagtagagacgggatttcactgtgttagccaggctggtcttgatctcctgaccttgtgatccacctgcctcagcctcccaaagtgctgggattacaggtgtgaggcaccacgcccagcctagtttttgtatttttagtagagatgggtttcaccatgttggccaggcaggtctcgaactcctgacctcaattaatctgcctgcctcgacctcccaaagtgctgggattacaggcgtaagccactgcgcccagccaagcaaattaccatgcaataatcatttaattatgcagcagaagaacagagcactgtgagaagggctcctaatttaatcaggggggccaatagcaacctgcctgaagaagtcacttcatttgtaacttagaggtgttacctattaagaaaaaaaggaactggtatattacttgtctatgtggaacaaatcaccccataacgtagtracttgaaacaacaataatcatttaatctcgtcattcctgtgggtcaggaactcaagggcagctcagctgcgtggttctggcttggggtgtcttgtgaggttgcattcacgatgctggcctggggggtcagctctgacacggtcacccacatgcctggcatgttggtgctggctgttttctttttta

SEQ ID NO: 798714 - DNA, 579 bp, Homo sapiens
cagcctcctgagtagctgggactacaggcatgtatcaccatgcctgcctaagttttgtttgtttttgtttaacagatggtatctcactacgttgcctgggccggtctcaaactcccggcctcaaacaaccctcctgcctcggcttcccaaagtgttgggattacaggtgcgaaccactgtgctctgccagctrtgttccttctggaggctctaagggagaatctgtttctcccctagctgccttttccagcttctagaggccacctgcatttctgggctcatggtttcttcctctgtcttcagaaccagcagcttagcttcttttctctctgatttccagcctctctttttagagatagggtctcaggccaagcatggtggctcacactgtaatcccagcatttttggaggccaaggcagaaggatcactggagcccaggagttcgaggctgcagtgagctgtgatcgcaccactgcactccagcctgcgtgacagagtgagaccctgtcttgaataatatagatagatggatgaagagatagagggatagagatgaggtcttgctttgttacccagac

SEQ ID NO: 798715 - DNA, 584 bp, Homo sapiens
catgtcttcttttgaaaagtgttagtgtcctttgcccactttttatgaagttgtttttttcttgtaaatttgcttaagttccttatagatgctggatattagacctttgtcagatgcatagtttgcaaaaatgttctccctttctgtaggttgtctgtttactctgttgatagtttcttttgctgtgcagaagctctttagtttaattatatcccatttgtcaatttttgttgttgttgcaattgcttttggtgttttcgtcataaaatctttgcccatgcctatgccctgaatggtattgcctaggttgtcttccagggtttttatagtctggggttttacatttaagtctttaatccatctcgagtcaatttgtgtatatagcataaggaaggggtgcagttttaatcttcttcatatagctagasagttattccagcgccatttattgaatagggcatcctttctccattgcttgtttttgtcagctttgtcaaagatcagataattgtaggtatcttgtcttatttctgagttctgtcttcggttctgttggtctatgtgtctgtttttgtaccagtacc

SEQ ID NO: 798716 - DNA, 623 bp, Homo sapiens
agggaactttctagggtgccagatgtgttctatatcttgatctatataggggttacacaggcttatatccatatatccaattttatttagctttacacttaagattactgttctttatgcacttttatgtacttatatcttaattaaaaaattttaagctcctgaggtaattcttatattacatttctcctaactcctttgttttgagcctgctttaaaccatgaaattcaacaccatcctcagattcctagaggaacttcctctccttggggcccatattgtccctgtgtctttcctgttmtattgctgatcctttttccactttctttttcgcttaggccaatcttataggaatattccagtcactatgttccaagccataactatcggctcttaggatattctatttctgccctcttccctgttccatgatttagaattgttcatgttataaaggttcaagggctcaggggtacttactgaagattgttctttaacattcctcaataagttccactgaaatgtgaatgcaaatatgtagattatcattctaaatgaattaggcactctatgcttatatgctcatctttaaacttacggtaactacacccagttcaccaga

SEQ ID NO: 798717 - DNA, 618 bp, Homo sapiens
gttacagaaaaatctatgaatggatgctaaaattagtgggcacaagctcaagggaaaataagatactcatgtacttttaaagcatcttcccctctattcatttcatatgtaaaaataactttacagttgaaatgcagcaggtaacatctaaaccaagtaatctaaattaacatcaccaataataggacatctcactccctgatatgatgcactgaagaggacacagcatcacctatggtattctcaccagcattcccataaaaaatgcacaacctcaatctaatcatgggaaaacgccagacaagcccaaattttgagatagtctataaaaataactaagtggtactcatcaaaagtatcaagatcatgagacacaggaataatgtggaactatcacagtaggggaagactaacgagataagactaagttcaagggaagtcctagatagaatcttggaacagaaaaaggctgttrggggaaaaggaaaaaagaaaatgagtgaaatttgagcaaggcctgtagctgagttaatagaattgtaccaatgttaattccttttttttttttttgatggttcaaccaacatgttattatgtcttattttattagctttgacc

SEQ ID NO: 798718 - DNA, 507 bp, Homo sapiens
gccacatctataggtttagatttttcctttgagttctggtttatattccaaactacttacttgattgcttcatttcatagaagctttaattttaacatattataaactgaactcttgatttctctactctttccacctgcagtcctcttggtaaatggtaaggccatttttttttcatttattcgttggagtcttgatggttttcctatcaatttatacagatcytcatattttataaagactaacattttttacctgtcatataggctgaaaatctttttccctaggcttttgtttgtggttgttatttttgtgtttcaaattctagatttaaatcgttcattgaacaatgattatcattcacttaaggcagtagcattaataaataaaagaagaaaaagagcattattaacaataaaagtaaaatagatttttaaaattattaagtagcatgtcttgcttattagcaagatatttaaatgaatccaatgttgtagaacacaaagt

SEQ ID NO: 798719 - DNA, 570 bp, Homo sapiens
gctgttagaataggagttttcagccctcatcaccccttcttcccaccaacacacacaaattgatttcaacaaccacccatggatgagagtacctctgtgggaactcgggagtgtagcagagaggtctcagcacagaggtggaggagaaaatcccagaatatggcaccttaagtaggctaagatgtagagtttgactttacctgaatcacccctccctcgaggttgcacagctcagtgctaagagagacccctttggcccatgattcctctcacagaagacagtgagagcatagtgaccagaacactgcccaggaggcctacttctttctctcytcatccagatcactgaggggatcaaagcgaagaatagtctgtggacagataagagcagaggaaaggggagagggctcatagcaacacagacagagatttcagcaaagggctgcagtttctactaaccaactgtggactccaccagaaagcctgcccacaaagttcacagggcaaatctctctgacaacatacccagacagctcattgcacttccgcatttctcatattcctcccctg

SEQ ID NO: 798720 - DNA, 575 bp, Homo sapiens
aggatcatcttgaggaaataatatttttaaatatctaggaaaaacgacatttagaggaatgaagaatacacattgctataactgttttatactcaataaatctatattttatcaaaatttgagtttgactgtggttacatatatcaattaagcatttttccacaagataatgaaaaattatataataagtcacaatatggtaaaggattaaaataaccaattttakaatcaaataagcttgggcatgaattttgaattatgtttctgtaatttggaagttgcatagctttgaaaaggtatgtgatatttttgaacccagtgttctcatgtgtaaaatgttaaacatagtacttacctcatgggattgttgcagagattgaataagttgatgtatgtgaaatgcctaaaatagtgcctaaaacatagtcaccttcaataaatgtcattttattgttacactaacttaacatgctcataagggaatttgagagagaacactctatgagacagaaaattctgtaagacagctagaaagtcctaactgatagattcaacaaagtaaaacaaattgacag

SEQ ID NO: 798721 - DNA, 612 bp, Homo sapiens
gtttaatatttgcacgtgtgcatgttcaaactacagtccctgagaaatggtattgatctttaaaaactcagcaaattggcaagatctatgttcttgtagcagtggtattctttcgggggcaatcagctttttcttcaygttgcatatgtacaatctatgtatgtgactaaagcagcaaggcatgacacagaacagcatattgctaattaatgaggtgtgcattagacagaggtagtatcataagtcactttacatagactcagtcaagatcaataattttgtgttggccgggtgtggtggctcactcctgtaaccccagcactttgggaggccgaggtgggtggatcaccttaggtcaggagtttgagtccagcctggccaacatggtgaaacccatctctattaaaaatacaaaaattacccaggcatggtggtgcatgccagtaatcccggctgcttgggaggctgagacaggagaatcacttgaatccatgaggcagaggttgcagtgagccgagattgcgccactgcactccagcctgggaaacaaagtgagactccgtcaataaaaaaaaaaaatgttacacgtacctctgttctggcataattttt

SEQ ID NO: 798722 - DNA, 612 bp, Homo sapiens
gtttaatatttgcacgtgtgcatgttcaaactacagtccctgagaaatggtattgatctttaaaaactcagcaaattggcaagatctatgttcttgtagcagtggtattctttcgggggcaatcagctttttcttcatgttgcatatgtacaatctatgtatgtgactaaagcagcaaggcatgacacagaacagcatattgctaattaatgaggtrtgcattagacagaggtagtatcataagtcactttacatagactcagtcaagatcaataattttgtgttggccgggtgtggtggctcactcctgtaaccccagcactttgggaggccgaggtgggtggatcaccttaggtcaggagtttgagtccagcctggccaacatggtgaaacccatctctattaaaaatacaaaaattacccaggcatggtggtgcatgccagtaatcccggctgcttgggaggctgagacaggagaatcacttgaatccatgaggcagaggttgcagtgagccgagattgcgccactgcactccagcctgggaaacaaagtgagactccgtcaataaaaaaaaaaaatgttacacgtacctctgttctggcataattttt

SEQ ID NO: 798723 - DNA, 612 bp, Homo sapiens
gtttaatatttgcacgtgtgcatgttcaaactacagtccctgagaaatggtattgatctttaaaaactcagcaaattggcaagatctatgttcttgtagcagtggtattctttcgggggcaatcagctttttcttcatgttgcatatgtacaatctatgtatgtgactaaagcagcaaggcatgacacagaacagcatattgctaattaatgaggtgtgcattagacagaggtagtatcataagtcactttacatagactcagtcaagatcaataattttgtgttggccgggtgtggtggctcactcctgtaaccccagcactttgggaggccgaggtgggtggatcaccttaggtcaggagtttgagtccagcctggccaacatggtgaaacccatctctattaaaaatacaaaaattacccaggcatggtggtgcaygccagtaatcccggctgcttgggaggctgagacaggagaatcacttgaatccatgaggcagaggttgcagtgagccgagattgcgccactgcactccagcctgggaaacaaagtgagactccgtcaataaaaaaaaaaaatgttacacgtacctctgttctggcataattttt

SEQ ID NO: 798724 - DNA, 615 bp, Homo sapiens
cttagtgatttgggggttcagagatttattctccttttacaaacttttccatctcttttccagcttacaaaatgttgttgctcttgccttgattctgtgtttctcatctttgctgacactaaagtaggcattgtggaggctgagaccaaatctaaaacaaaatagacttttactgagaacgtatgcaactctaaatattcccacttgagcagttttcagattccttttattaaccattttcttcttaagtactttaaaatggagtgccctgtgtgaggctgtatgcattaaaacaaacaaacgaatgaacaaacaaaaactcttgatgatggyttttggaatgctacacacttattcaaatgagacttaagtaatctgaaagtacggatgcaatttataagaatcttaaatgcaaattagagaaaaattacaaagctagaatgggaattgtttctgcacactacccaatgctggaggaagacagtgtgtgaaatgctagctagcttgtgaagggcttatgaaaatgatgctatgccattcttcagactatatgctgaatggggaaaaaagatgtaagaaataataagcaacgtagtcatgggtctccaaaataaa

SEQ ID NO: 798725 - DNA, 661 bp, Homo sapiens
ctcaacatcattccagaagtccggaattctacaagaatcatgtaagtcatataaaggactgagaggtgacagcgtgctagcagtcctcacagccctggctccctctctgcgcctcctctgcctgggctcccactttggtggcacttgaggagcccttcagcctgcygctgcactgtgggagcccctttctgggctggccaaggccggagccggctgcctcagcttgctgggagatgtggagggagaagcgcgggcgggaacccgggctgcgcgtggtgcttgtgagccagcgcgagttccgggtggccgtgtgctgggcaggccccgcactcggagcggccggctggccccgccaccggggcagtgaggggcttagcgcctgggccagcagctgctgtgctcaatttctcaccgggccttagctgccttcccacagggcagggctcgggacctgcagcccgccatgcctgggcttccccccacccactctgtgggctcctgtgccgcccgagcctcccggaggagtgccgccccttgctccactgcacccagtcccatccaccacccaagggctgaggagtgcagacacaaggcacaggactggcaggcagctccacctgtggccctggtgtgggatccactgggtgaagccagctgggct

SEQ ID NO: 798726 - DNA, 661 bp, Homo sapiens
ctcaacatcattccagaagtccggaattctacaagaatcatgtaagtcatataaaggactgagaggtgacagcgtgctagcagtcctcacagccctggctccctctctgcgcctcctctgcctgggctcccactttggtggcacttgaggagcccttcagcctgccgctgcactgtgggagcccctttctgggctggccaaggccggagccggctgcctcagcttgctgggagrtgtggagggagaagcgcgggcgggaacccgggctgcgcgtggtgcttgtgagccagcgcgagttccgggtggccgtgtgctgggcaggccccgcactcggagcggccggctggccccgccaccggggcagtgaggggcttagcgcctgggccagcagctgctgtgctcaatttctcaccgggccttagctgccttcccacagggcagggctcgggacctgcagcccgccatgcctgggcttccccccacccactctgtgggctcctgtgccgcccgagcctcccggaggagtgccgccccttgctccactgcacccagtcccatccaccacccaagggctgaggagtgcagacacaaggcacaggactggcaggcagctccacctgtggccctggtgtgggatccactgggtgaagccagctgggct

SEQ ID NO: 798727 - DNA, 544 bp, Homo sapiens
ttagttgatctttttaaatgtatagttgtaaaaattactaaatttcgaacttctgacttcaagttacctgcccaccttggcctcccaaagtgctgggattacaggcgtgagccacgccaccacacctggcaaaaattatcaaatttcaatcttaatatgggggaattcattttaaaaacaataagaataactttctatgtaggaaagcattttataaaaaaaattacttgagttgattttatttcttacatctttcagagatgtttgccagttttcctttcatataattctgtcgttatacagaaaaaatwaaaacaaaagtctaggtaaaaccatcacctagccaattcaattgtaagtttcataattcaatcataaaacaataaaacctttttaatatttatttatttcagttctcttaatctcagcctacagcatcattcttgatttgacactaataaatattgaccatatatatatattccttgttgttatatatatatttattataaaaaagttataaaaaagtagaattgtgtttttg

SEQ ID NO: 798728 - DNA, 616 bp, Homo sapiens
agcatggtgctttgagccaggctgcttcagtgcgaatcccagtgccaccacttacttgatgtctaatcctgaacaagttatttaaccaatttgactgcaattcccttatctataaataggaatgataatatcacctaattcatggtattgatgggaaaattgcttgttattttcaccaatatatattactaatgcattttctctagctattctccagttttgaactctattctatacgttcctttctcccataatagataacaaaaattctgacactatatgtggttcttcagggatgtttacttttattcttgttagaatkctccaggaaaccacttagtttatgcttcacctacctgcctttcatcttgaaaaaaaaatttgttggacaattttgtctgctgttttctccctgctttcttttggattgacattcctctaccatgatttcgatgatatctggggagagagaaaagataaacatatatactcaatcttccatattctgaatgcaatataattaaaaattatttcatgcattcacataaatctaaaatcattgcgcatgatgcagatctataccatttttctcaagtgaaacaacattgaattgttt

SEQ ID NO: 798729 - DNA, 615 bp, Homo sapiens
accactactgaagcctctgcccacttcaaagactcttccttgcaagactgacagatcacctggcccagaccaggatatttgttttgctcagattgctttctgtggactggttcattaacgctttttcctatccttttcctcttgatgttaaatgttacttcatttgtgctggaatgcttaatctataatatttacatattgattaagtatactattatgttcgatttgcagtattgactaacttgtggaatggcttgagcctgtgtgcccacggctctgactactgagtaaatgggaagtacgaaggagaatttcctcctttggaagtccrtgtagcttatggcttttatgattgagatagcatcaataaaagtctgatgctgtggaaagacacaaatatatgtggacctgattacttctgaccttgtgtcgctcatgataaagatggagaaaatgaaggtataattttagcattttacaggagtcactctggaacaagttgttgtttcatccccatattaagtaagaaacaagttaaatgattttccaaaaagaatgttttgtatttgaatataggagagaataagaacttatgaggcaggtgagttacaaaaa

SEQ ID NO: 798730 - DNA, 628 bp, Homo sapiens
gagctgtaacactcaccagggaaggtctgctccattcttgaagtctgcgagaccaccaagccaccagcaggaaccaactctggacacagtttgtttagctaactggttattaatttatttatgtatatatttgcaaactggagttacataccaaatgccaaattttgtaatagtaaagcaattaagtaactctacttagtcagtgacatgtaggcagttaacctctgaattcattaaacttataaaagaaaatagcattccagttaacagctataggaccatgagaagaaaaagtgaaaacttaaaacatgacagattatggtaaaataattcaaaaagcaggtacagttttagttttataaarttgtgtaccatggcttcagcgaagttcacaggtagagtgagaaagttataaaaatgttaatttgtttcagtcaaaacaaatataaaatgaagagaaacatttgtgaacaactaaagtgtttaatactacctatagaacaataaaacgtgatgtcaacaggtggtaaccatgagtattttctgaataggaatgctcataaatctgagaaccatcagatttatgtacatatattccatacattttctttatagttgatacttttga

SEQ ID NO: 798731 - DNA, 628 bp, Homo sapiens
gagctgtaacactcaccagggaaggtctgctccattcttgaagtctgcgagaccaccaagccaccagcaggaaccaactctggacacagtttgtttagctaactggttattaatttatttatgtatatatttgcaaactggagttacataccaaatgccaaattttgtaatagtaaagcaattaagtaactctacttagtcagtgacatgtaggcagttaacctctgaattcattaaacttataaaagaaaatagcattccagttaacagctataggaccatgagaagaaaaagtgaaaacttaaaacatgacagattatggtaaaataattcaaaaagcaggtacagttttagttttataaagttgtgtaccatggcttcagcgaagttcacaggtagagtgagaaagttataaaaatgttaatttgtttcagtcaaaacaaatataaaaygaagagaaacatttgtgaacaactaaagtgtttaatactacctatagaacaataaaacgtgatgtcaacaggtggtaaccatgagtattttctgaataggaatgctcataaatctgagaaccatcagatttatgtacatatattccatacattttctttatagttgatacttttga

SEQ ID NO: 798732 - DNA, 628 bp, Homo sapiens
gagctgtaacactcaccagggaaggtctgctccattcttgaagtctgcgagaccaccaagccaccagcaggaaccaactctggacacagtttgtttagctaactggttattaatttatttatgtatatatttgcaaactggagttacataccaaatgccaaattttgtaatagtaaagcaattaagtaactctacttagtcagtgacatgtaggcagttaacctctgaattcattaaacttataaaagaaaatagcattccagttaacagctataggaccatgagaagaaaaagtgaaaacttaaaacatgacagattatggtaaaataattcaaaaagcaggtacagttttagttttataaagttgtgtaccatggcttcagcgaagttcacaggtagagtgagaaagttataaaaatgttaatttgtttcagtcaaaacaaatataaaatgaagagaaacatttgtgaacaactaaartgtttaatactacctatagaacaataaaacgtgatgtcaacaggtggtaaccatgagtattttctgaataggaatgctcataaatctgagaaccatcagatttatgtacatatattccatacattttctttatagttgatacttttga

SEQ ID NO: 798733 - DNA, 554 bp, Homo sapiens
tctaaatatcattattttggaatttttcttggtgataaaatgttttcctcttttaaatgtttgctatcatctattaaagtttattgcaattatttctaactttgatccatttttgcatccttgaaatggattctatttagtaatatatttttaaaattttgcctctgtgtttataaggtgtatatttgtagttttcttttttcatgctatctttaccagtcatatgttaaccttgtaatattctttgtaaagtttcttattttaatatggccttccaattataaacagcattaaaagtgttaaataactcatccrgaaaacagaatggacctatcccttttaagggagtgctttactttttaatatcactcactttatttgatagttattgtttaattgccattttacaatactgcatcagctggagaaataactagatatctagaaaagcatacacttcatgtatttagtaaggaaaaactacagacaattgtattttcacctctggacatattctgggacagtggttggtagccaggaaggactctagcttc

SEQ ID NO: 798734 - DNA, 599 bp, Homo sapiens
taataaggtaaaaatttatggttaactatgcatgtatacaagataaatattaactcaagaataaataaaaaagaaatcatcatattatcattaactgcattgagaaagaagtgaagtattttttaaataaaaacttaggtctcagatagtttccttagcaaattttgccaatttttcaaagatgattctccatatcaaacaaattccttcaataaatagatcaagagaaaacattccaaaactcaatccatgacactatcataacctgtcacaaaaatttaaaaatatacaagatatgcaaaaaatacattaaatttttactcatggatatatatatatgaatattcytaaacaaaatattagcaatgtgccatttagcagtatatgaaaaatgagtttctaagataagtttatacccagaatgcaaggtttgtttaagattggaaactaattaatatcagtcaaaacattaacagatcacagagaatagaaatatatgaaaattttaatggttatcaaaaaagcacttgataatttcaacagccttttataatagataatttagcatatttgggcctcaaaaagtcctttcaatgtaa

SEQ ID NO: 798735 - DNA, 640 bp, Homo sapiens
actgggatatatctgatcttcctgggactgaccatgccagagaacaaccgctcattcacgggctggaaagccccagttctcaaaacaccctcgcttagcgctgttagaagatgctggagagttcctgccctgaaacttgcatccacttggtccctaaagcagaggatacactaaagaacaccttatatactctccactgcagttctcccttgtggagaagaaggggttaggagctcygcatgaaattaaaataaaataaaataaaacgcctacatatatgggtcttcttaatacttctttgagccagtacataggtctggcaagtaaagggaaagtcacttgaggggatgtcagcttgcctggaaatttaaccctttcatctctgtattaggagaactttaacccctctgtttacctggtcttcagttccacacaccaatgcgaccaaggcaacaggaaatagggatttgactcctcagtttgaagctgtggcatttggagaggactctgatggtgttggtgggagagatggggaggttggtctcctagtaggtgatgttaactcttgggggaagtgggcagagaccagtttgcagcatctcccatgtccagaaaccctatttccccccaattctccatc

SEQ ID NO: 798736 - DNA, 518 bp, Homo sapiens
aggcaagtagaagtcagagtgaaaggaaggctgatctaaaggcaaacagagtgtattagggttctctacagggacagaactaataggatagatgtatatatgaaggaagtttattaaggagtattgactcacacgatcataaggtgaagtcccacaacaggccatctgcaaggtgaggagcaaggaagctagtcccagtcccaaaacgtcagaagtcgagaagccgacagtgcagccttcagtctgtggctgaaggcccgagtgcccctggcaaatcactggtatragtccaacagtccaaaagctgaagaactttgagtctgatgttcgagggcaggatgcacccagcatgggagaaagatggaggccggaagactcagccagtctactccttccatattcctctgcctgcttttatcctagccatgctggcagctgattagatgatgcccacccagattgagggtgggtctgcctctcccagtacactgactcaaatgttaatctcctttggcaac

SEQ ID NO: 798737 - DNA, 597 bp, Homo sapiens
aactgaagctcagaaaaatgaaataaactgcttgagattatagacactaagttgcatgttataaatttaaagacttcggctccaaagacacctgtgattttcactgtgccatgttaccttctaacatgaacctccttttcgaagtgctggtcgcttttctctttatcctctgcattttggcatatagaccctaagcaaagccatcctattcccatctccctcttctccttagcatagatcattttttcttgcttttttttcacttgagacctgaaacatagaacctagggatttcctcactgtggtctcccctatgaggagcatgttacaagaagggatgtagtatgggaattaaatgggtttgcttgaatgtggatagcctgctttccgcattttcagttgtagcagtttggtgccagtgatgcatggccggtttaagcagtcgtgctttgcctytcaagttagtcatctttggtttcatggaaagagtcctcccttagaggaataacaggtggaaagatctattaggttatcctgtgcattatgagattgcctacttctgtgaatttcctggtccttatttcaagtgatccatgt

SEQ ID NO: 798738 - DNA, 620 bp, Homo sapiens
ttcaatcaaatagagaatcttaaatcactgggaaatcctttctgttaagtattcttccaaactgacattaagaaactccaatttattattgcagttggaaaacatttctaaatattactgaaatcatatttctgtttcacaatatttttccttaagcactttgttctcactacaaataggctatgaaggtgaggtatataattgcaaaaaagggggaatgacagatataaactatagaataaaaattattcacctatgactttcaaaaaatggtttttaatcaaggctacagatcatacaacagatttagagcccaagacattttgattggcaataattaggtacaagaaatagaagtggcttttgtttagaatttttttwaaaaaggctccatatatcagtagttggtaatatcagagaggacactatgcattgagtagggaatgataaagatatagtttgccagaccaaaagcaaaagtagcatttgacttggtgggaggacccctaagaacgggagaagcaacatggttagatgttaagtatggtccctgacacagccagccccttcactctttgcagtgaaaaccttcatttgggaaagtaatagaagcgtcatag

SEQ ID NO: 798739 - DNA, 620 bp, Homo sapiens
ttcaatcaaatagagaatcttaaatcactgggaaatcctttctgttaagtattcttccaaactgacattaagaaactccaatttattattgcagttggaaaacatttctaaatattactgaaatcatatttctgtttcacaatatttttccttaagcactttgttctcactacaaataggctatgaaggtgaggtatataattgcaaaaaagggggaatgacagatataaactatagaataaaaattattcacctatgactttcaaaaaatggtttttaatcaaggctacagatcatacaacagatttagagcccaagacattttgattggcaataattaggtacaagaaatagaagtggcttttgtttagaatttttttaaaaaaggctccatatatcagtagttggtaatatcagagaggacactatgcattgagtagggaatgataargatatagtttgccagaccaaaagcaaaagtagcatttgacttggtgggaggacccctaagaacgggagaagcaacatggttagatgttaagtatggtccctgacacagccagccccttcactctttgcagtgaaaaccttcatttgggaaagtaatagaagcgtcatag

SEQ ID NO: 798740 - DNA, 595 bp, Homo sapiens
ctaatgttggtgatggagggaagaagggatcccaaaggtctaagaaaggggagagacttggccgcagtgtgggtaagggaaggagctgacatcgattaaaaaggggagggtgggctgagggcgcagctcagctctactctgggaggaatragcctgccacacatgcgatgtggaaatgagaaagggtttgcgagcctagtgcaagggcttctgactgtggaagaaactctggtgagagctgaagatctggttaaactcgtggggtgagggcatgagcagacggcacaggactcttgacactgcttcaggacgaagccggggcccatacgtagactcccaagaggaaaggaggttccagaattgtaagacgcttactttttcttttataaactgaagttaaacaggggcgctatcagcagcctgctgctggtgaagtaattactagatcagctgaagaaactcgaggggagcatggctcttgcacagaacaccctgcaatgcagatggacatggcctctaggaaggagatgcctcagaccccatatcccaggaggaaaaggaagctgcgcgttcaaggtggccaaagagtaactga

SEQ ID NO: 798741 - DNA, 595 bp, Homo sapiens
ctaatgttggtgatggagggaagaagggatcccaaaggtctaagaaaggggagagacttggccgcagtgtgggtaagggaaggagctgacatcgattaaaaaggggagggtgggctgagggcgcagctcagctctactctgggaggaataagcctgccacacatgcgatgtggaaatkagaaagggtttgcgagcctagtgcaagggcttctgactgtggaagaaactctggtgagagctgaagatctggttaaactcgtggggtgagggcatgagcagacggcacaggactcttgacactgcttcaggacgaagccggggcccatacgtagactcccaagaggaaaggaggttccagaattgtaagacgcttactttttcttttataaactgaagttaaacaggggcgctatcagcagcctgctgctggtgaagtaattactagatcagctgaagaaactcgaggggagcatggctcttgcacagaacaccctgcaatgcagatggacatggcctctaggaaggagatgcctcagaccccatatcccaggaggaaaaggaagctgcgcgttcaaggtggccaaagagtaactga

SEQ ID NO: 798742 - DNA, 533 bp, Homo sapiens
tgatgaagattataagagtgatgatgacaacaatgccagtgacatcatgctccccatatccccacccccaaaccactcctaccagtccaggcctctatcctgagctccatgagccccgtggcccagcttcctagacacccaaaatagaatctcccccttgagggcccctgggtcagagaatggcatcttcatcccccacggccccgccagcagcccaggcagctgtcttgcctcctctgccatttcttgtctgcactggggtcattctctctcactgttgcccatctcactccccccctccagcccgccctcctccagacgggcaatgccaccatccccaagcgtgaatctgaccctgttacccttccctgggtyctggtcacctctggaagttccgggctcctcggccgtcatctgaggctctgcccagcctcctgctgctgcctaggagtacacagccccatcgcctgcccatccctcgggtgcaccctgccccagccacaccaaactgctcacattgatggatggcattc

SEQ ID NO: 798743 - DNA, 619 bp, Homo sapiens
tgtacacttaccatatgacaatcgaagttaaaataaaattttattttaaaaatggcttactctccttactctcatgtccacttttcacccttttccacaagcttttttttttttttttgtcttttcccaaaagcaatttcccaagtatttgagggtccttttttttcacagtagcttagcctatggcctaatatacacagcttattgtataatacttgcctctatttcatgtccattatgcttattgatttatatatatatgtcccccttattagactatatattacttgtaagcaatgtrtgtttcttattcatccttctctctagcacttaaagttcacctagcatacgataaatgctgaataaatgccagttgaataaataaatgaaccaatcaccttcttcaattagcaaatggatatactatgtattaaggcaaatttagatacaatctctatgcctgcatatttctcagaaatttgaaagctttaaccatattatctggagttcaacttcaatgttgaacttcaagctttataacataaacttgatttgccccttataggtcaaatcaacttttactgaactattttttacctaccacattggccaagatggg

SEQ ID NO: 798744 - DNA, 619 bp, Homo sapiens
tgtacacttaccatatgacaatcgaagttaaaataaaattttattttaaaaatggcttactctccttactctcatgtccacttttcacccttttccacaagcttttttttttttttttgtcttttcccaaaagcaatttcccaagtatttgagggtccttttttttcacagtagcttagcctatggcctaatatacacagcttattgtataatacttgcctctatttcatgtccattatgcttattgatttatatatatatgtcccccttattagactatatattacttgtaagcaatgtatgtttcttattcatccttctctctagcacttaaagttcacctagcatacgataaatgctgaataaatgccagttgaataaataaatgaaccaatcaccttcttcaattagcaaatggatatactatgtattaaggcaaatttagayacaatctctatgcctgcatatttctcagaaatttgaaagctttaaccatattatctggagttcaacttcaatgttgaacttcaagctttataacataaacttgatttgccccttataggtcaaatcaacttttactgaactattttttacctaccacattggccaagatggg

SEQ ID NO: 798745 - DNA, 623 bp, Homo sapiens
tttgatgtaggcattttgggctatgaactttcctcttagcactgcctttgttgtatcccaaaggttttgataggttgtatcactattgtcgttcagttcaaacaattttttaatttccatcttgatttcgtttttgacccaatgatcattctggagcatgttatttaatttccatgtgtttgcatggttttgaaggctccttttagagttgatttcwgttttattcccctgtggtctgagagagtgtttgatataatttcaattttcttacatttattgaggctcattttgtggcctatcatatggtctgtcttggagcaagttccatgcactgttgaacagaatgtgtattctgtggttattggatggaatgttctgcatatatctgttaagtccatttgttccaaagtatagtttaaatccattgtttctttgtggactttctgtcttgatgacctgtcagtggagtattgaagtcccctactactatttcgttgctgtctatcccattccttaggtctattagtaatcattttataagttttggagctccagtgttaggtgcatatacgtttaagattgtgatattttcccgttggacaaggacttttagcattatataa

SEQ ID NO: 798746 - DNA, 632 bp, Homo sapiens
cagagtgaattatttatttttatttcatatacagaaaaatgtaagataataactgaaatgttgttaccagtgaaatgttgtatcatacaaatatgtcaattaacaactcaggaatctgtttttagctgaaatattaggatatgactttttccacacagagatcaaataataaaactgcattttgtgatttcaagactaaaaataattgacaaatgtttttcatcttaaagaaatgctgatcatagcacaaaaataacacattgacaaagaactcataaattattatgaagaaagagaagcaattgctgctttagtggttaatgaaggcagtaaaaattttgcatcacttattagatgaaatcaagtttcataaaaatcaattattaaaaaccatgtttaaagttaacctataacattcacagcaaacacagtaatgacaaatgacatgacyaagtgattcttgcaactgatgacactaaatataagatagatctcatccttggacttgttctgtagtaagatacaataaagagctctgtcaaacatgagagaaaggcatttggcgattggggaatttttccatagctgcatttattaaggtttgcatcacatccgagaaacagatctatgta

SEQ ID NO: 798747 - DNA, 637 bp, Homo sapiens
tttgactaaatctgtcttttataggtgttgagtgatatgtacaacagcacacttggcggtagagctggaaaaatgcctagcctctgacaccatggagtaatctttccctgagcatgccatggttgcctcatttaagaaaacaactacactgtttgccttttagactttgttgttgttgttagttttgtctttactattatagtggtgccctctatggtagtattgtagttaagggaaaatgagtgaattttgaaggaaacactaaattacaatcaattcatgaagactgtcttttcctatgtgaatattatgagatgytatgggaatgattgtatggacaaataaaagttagcacaggggcttaattttcccagttgaaaataaaggaagagaatttccttcccagtttcttagagcatttaagttagaaaactggtaactgtatatacgttctccttcctcaaatgtatataaatcctttcaaaaactagataggactttgtcagctttaaaacctaggaatgctgttcttaaggatttgagagtcacccatttgaaatgtaagcatcaaagtagatacacccatatatcccagttactgggggagggtaggagcataactttagtggataccttg

SEQ ID NO: 798748 - DNA, 607 bp, Homo sapiens
tcattttttttaatttcttttatgagatggaatcttgctctgtcacccagccggaagtgcaatggcacaatcttggctcattgcaacctccacctcccagggtgaagtgatcctcccacctcagcctcctgagtagttgggtctacaggtgccagctgtcatgtccagctaacttctgtaatttttgtagagatggggtttcaccatatttctcaggctgatctcacatccctggactgaagtgatctgcccacttcggcctcccaaaatagctctctcctcagacttttaacctaatcacrcctttcatcttacaagacacattcacaggttttatgaatttgatgtggatatctggggtaggggccatttttctttctgacacaggtaggataaaaacaaaatccacttactggaagaaacttagatgttactattttgacaagagaaaaaggaattatcttgataattttagttgatcaaaactcactacagttcaaaattactccctgtatcttccctcatcccagtttccctgtggcatagtggtgaagcaaaggctatagaagacattggggagtttttcagcagacaaactaccagtgtt

SEQ ID NO: 798749 - DNA, 535 bp, Homo sapiens
caccactgcaataaagcaaatatcacagtaaagtgtgtcacaatcttttttatttctagtccatataaaagttatgcctgcactatactgtagtgttttttgttgttgttgttgttgtttttgacagagtcttgctctgtcacccagactggagtgccgtggcaccatctcggctcactgcaagctctgcctcccgggttcacaccattctcctgcctcagcctcccgagtagctgggactacaggcgcccaccaccacgccaggctaattttttgtatttttagtagagacagggtttcaccgtgttagccaggatcctctcgatctcctgacctcatgatccgcccaccttggcctcccaaagtgctgggattacaggcaygagccaccgcgcccggccactatactgtagttttttaagagtacaatagcattatgtctaaaaaccaatataagtattttaatttagaaataaattattgcctgttgctaaagaatgctagcaattatgtgaaactctattgagtgggaatc

SEQ ID NO: 798750 - DNA, 616 bp, Homo sapiens
catcatactaccctatctctatgacttcaatgttttaaaaaaattttagcttgcacatatgagtgagaaccgcaaaattagtcttttggtgcctggcttattttacttaacataacctcctctaggtacatccacgttgttgcaaatgacaagagttcattctttttaatggctgaattatattccattgtgtatatgtattaatactatatatgggccacatttcctcattcacatctgggctgattccatatcttggctattgtgaagagtgctgcattaaatatgggaatgcacagatctcttttatatactgatttcmttttctttggacatatacccagtattgggattgatggattgtatggttactctatttgacagcttttaaggtgggagaatacaggagaaaaccttggctatttcaaaaactctactatttttatacagggttttatgtctggcaaatattgaactctgtgcctacacatagacagtatataaggcccaaagtatttttcctgtctacttacaaacatattttcttttgattgagagggtgtataggacaatcagtactattctgcatctgactttgttggctgtgtagtaggag

SEQ ID NO: 798751 - DNA, 597 bp, Homo sapiens
gatacccatatacattgtgtaatgatcaaatcaggacaattgggatatctataaccacaaacatgtatcttttctttgtgttgggaacattatagatcttcttctagctgtttcaaaatatacaataaattattgttagctacaatttcttttctgtactatcaaatactgtaacttaatctattagrtaagatctattagatagtatatattatcaaatactatagctttctatttgactgtatttttgtacctcttaaccaacttctcttcatcctccttccttccttcccttcccagcctctactaaccacccttcttctctacctccaggagattcacttttttagctccctcatgtgagcacgaacaggcaatatttgtccttctgtgcctggcttgtctcacgtaacacagtaaaatttaataccttccatgttgctgagtactaatagattttattaaaatcgtcctgtgtatgccagtatcttaaatggatttcacgttaaacagatgtttcactaaaagtgcaatcagataactaagaataaaacctatatgaaaaataaaaaatgttaagacatctttgttagattt

SEQ ID NO: 798752 - DNA, 406 bp, Homo sapiens
acagatgaggctaagagagattgagaaacttgtccaaagtcatgtcgcacagcgaatacgcagaggagtaagatttcaaatgcaaatatcctcacattactcctcttagctttgctgaagcatttgaatggcttccatttggttttaagatacacaccaaaattctcaacaaaacttgtatgatctaaactgcacttacctctaagttttatactatgyttccctctctctgtgctccagccacaatgatcttcttttacttcctgtaagtcaggttgcttgttctctcctcataaacggttgtgtagtactatctctgtgtcagtggcactcactgtcttacatattttcatccttccatgagaagagttcatcttttctttagggaagcttttgctaacttctc

SEQ ID NO: 798753 - DNA, 648 bp, Homo sapiens
tcactagtttcagaagttaatgccaaatcagaagggtggtttgtttcaagccactttaacacaaaaacaacgtaactatttaacatgaatgtctggtaatgattagttcatgaaattcgttacactttgatgtggctttkaaggggtcaactcacttcaataatatgacacccaattgcattactatactccttagcacttgaacggttgcccacctgacaacttgcctatttgtctaaccccagatctcagagtgattacaagaggtgataaatattatcacttcctacataagtaaggggattgaaacacagaggagtcaagtgctttcttactactacctgaaattatatgaaaagcactaagaaagtatcaaggatatctgtattctactgggaggccacagcccccaaaaaatcctgtatacaactaattttctgtcatttcacaactttccacaaagctggatcccacagaaaaggaaaaaaagaaaaagaaataaacatactaaaatgacacttaacatctgcataacattttacaatttacaaagtacattgtacatattattcctactgagatcctctcaaaaaccttcagaagtatgaaagtccagagaagttaagtaacttgcctgaggtcacacag

SEQ ID NO: 798754 - DNA, 633 bp, Homo sapiens
gttgaggatcctctttttatcccccccactccactacccttaccaacctttggtaaccatcattctactctctgtctccatgagttcattttttttttttttttgctcctacaacatgtgaatgagattatgcaatatttgtctttctatgctttgttcatttcacttaatataatgtcccccagttccatccatgttgttgcaaatgacaggattacatttttttgtgactgagttatattctattgtgcatatgtaccacagttttcttttctttctttttgagacaaggcctcactctgttgcccaaggtagagtgtagtggcatgaccatagctcagtgtagcctcaatctcttgggctcaagtggtcctcccatctcagcctcccatgtagctgggaccataagcacccacmcccatgcctggcgaatttgtttcattttttgtagagatgggattcttgaactcctgggctcaagcgatcctccctccttggcctctcaaagtgctgggattataggtgtgaaccaccacccctggccaatagtggctgtactaatttacattcctaccaattgtgtatgaagatttcattttctccatatcctcaccagtatccattattgccttt

SEQ ID NO: 798755 - DNA, 631 bp, Homo sapiens
ctccaaatgcttagttagtaccaacacgttctgcaataggaaaaaaggagacacttaaataaaagactcctagcagattcctaactaaactgtataccttcagattcccatttaagcactttgttagcaccctacttaccttccttaggatcaacaatatataagataagaagcatttgggataaagtagcatatatatgtctgaaatgcccttatgaatgggcaattcaacagatcagtttaaaatatagactacagagtcttagagactatccgtgtaaccttgcgcaaattacctaaccttcaaaactacaatatttcatctatacaatggatgctaaattgttagtttttaataaatggcagctacatattgtaactattatgactaatagtcataaaggtagtaatagtaatgtatgaaggacattttcatgatagagcaaagtttaagttttcaaatatctcatgaatatttttcattgtttcrtcaagaacacttaagcctgcagatttttattctcagaattggatatttgacagcaaatgtcaattgggaagagacaagttcagttgtgattcacaaagaagtgagattcctcatttaaatgtgcatgttaaacttctcctc

SEQ ID NO: 798756 - DNA, 600 bp, Homo sapiens
aaaaaacgcttttaccctaaaatagtatataccctagaagatatccttcaaacatgaaggagaaataaagaccttcccagacaaataaaagctgagagatttcatcaataccagacctatcctacaagaaatgctgaggggtgtacttcaatcagaaagaaaaggacgttaatgagcaataaattatcacccgaaggtacaaaagtcactggtartagtaaggacacagaagaacacagaatacaatgacactgtaactgtggtgtacaaactcgtgttaccctaagtagaaagactaaacgatgaaccaataaaaattaataactagaacaactttttgagacatagtcaatgcaatgatatagaaatagaaacaacaaaatattaaaacgtggggggatgaagttaaggcacagagttttcattagttttctttttgcttgcttgctttatgtttgtttgtttgtgcaaatagtgttcagttgctatcaggttaaaataatgggttataagatagtattattgagcctcatggtaacctcaaaccaaaaaaaaaaaaaaaaatacaatggatacacaaaaaataaaaagcaagaaact

SEQ ID NO: 798757 - DNA, 620 bp, Homo sapiens
tgtcttgttttgatcctctttaaatggtgttttataatcagctatagaactgacaggtgttcctgaatgcaagtttctggtaactttggagattgtgactgtcaggcctctgagcccaagctaagccatcatatcccctgtgacctgcacgtatacatccagatggcctgaagtaactgaagaatcacaaaagaagtgaaaatggcctgttcytgccttaactgatgacattgcaccacaaaagaagtgaaaatggccggtccctgccttaactgatgacattatcttatgaaattccttctcctggctcatcctggctcaaaagttcccccactgagcaccttgtaacccccgcccctgccagtcagagaacaaccccctttgactgtaattttcctttacctacccaaatcctataaaacggctccacccctatctcccttcgctgactctcttttcggactcagcccgcctgcacctaggtgaaataaacagccttgttgctcacacaaagcctgtttggtggtctcttcacacggatgcgagtgaaagtgacattaaaataaaggaaaaaatacgtttcaggactttcatggagagctgaaatgttcatgaatatc

SEQ ID NO: 798758 - DNA, 587 bp, Homo sapiens
agggatccctaggaaaagcagagaggcaagtaaaggttagccacctgcggtttccttattcctgtagctttttttctctgccttttttccacctggctactctgggacctctcccctgtagttgctccgcctggccgcccaccccccagcccctgcaggcagtggggctgttgacacatcccaccatcctgactccggaactacggagatcacagggctttattattaattggtgatgagaagaagtagggattttttttttttttttttttcctgatgagaaaccctgggctcaagggtggatagttgtctcggccagagtcacatgggccttttaaaagctcaagcttgtgtttcttttcactatggattctctttactcagataaggcaggaagcccactgatctacatatttacccagagaaaatgcasagagtggagattggcggctggtcaggtgtggtgccccgccaccagggcctcccatcagctaagccaaattaagaggctttatcctttttttctccctggacggtccataggcctgaaaagctgctgtgatcttcctgtcaagctggtgactgag

SEQ ID NO: 798759 - DNA, 611 bp, Homo sapiens
  misc_feature 591: n = A,T,C or G
accttcatgcttggatgtcctcctccatactgaaggctaaataatatacacctgtatttagttcttttgaagttttaaacatttattctctcagtttcatgttgagtgagactattttcccaatagttgtcccatttggaaactgatttcccagcaccactgactaaatagtacttgcccccgaccaatttgaaatgttggcttccgcaatattatatttgtatttatgtctgggattacttgtttccattctcttccactgatctgttatttttgttccagttttagatatgtggcattaccatgtttttctaaatagaaaatacttgccrggcgtggtggctcatgcctataatcccaccactttgggaggccaaggcgggtggatcatctgaggtcaagagaagagtttgagaacagcctggccaacatggcaaaaccgcgtctctactaaaaatacaaaaaaattagccaggcgtggtggcaggcgcctgtaatcccagcttggggaggatgaggcaggagaatcgcttgaacccgggaagtggagattgcaatgaggcgagaacacactactgcactccagcctgngtgacagagcaagacagact

SEQ ID NO: 798760 - DNA, 633 bp, Homo sapiens
ttctgggtctgagtggttagtatgtcgccatagatctttctctccctgaccaaattctgctacttttctgaaatgtcttttaaatgttgttcattgcaaggttattatctttaatgaaaaaatgcctgctgagcggactacaaaccatttggttccctcctgtcaggggaggaaaagaataacattgaacaaggctgaaggtttttattatcacatcgtaaatgagcaaatggcatctgtcaatacaaagtgactcagaggtgcatggaaaaagaagytgtatggggaggctgtcgagtgacaacacggatttttattaacctcctggtccagcatctcttttcctattttattttgcctcattcactttgcaacataataacgctataaaaacactcaaacaggaagctgatcaccattaaaaactgcaggaccgccttgctactgagcaacagcaaagagtttggatcatagactatcttcagggttttatacttaagtgtgccgacgtgggtgtattttcacatgcagcccctgcctgctttgggtctttttgagaagatatttctttccaagaataacacagcctgtttgcctaagtgttaattctcacaaagttttcatatttgggtc

SEQ ID NO: 798761 - DNA, 657 bp, Homo sapiens
tactgaatacatggtaggtattcaaagaattagaagaggttagataagattaagggagttggaggatcatgagcctagatctatatcataaaatacttggtcaaataacaccatacattaaaaaataaataaataaataaagaatccccatctcagtagctgttttcctgccccagaactacctttctttattatacctcttcaaattctaccccacttcaagacacagctcaaattgcattttcttccctgtgaagcactccctgactactccacaccatagcagtaccctgctcctctgaagaatgatgtacagcatttgttgaggccatttttatagtactaactcgggttatttcaatgttttcacttgcttctataacatagctttcactagactcccagaatctcaggattctaaattgtattatacacctaaatcatattcctctacaacactagacaacagttgtacatacacaggaaagtcaataaaaaataaattkttaacaaattttttaaatgcttaaaattcccactacaaaataatcaattacaatattccattcctaaacaaatttaagtaacatgggtgaatcaaatgaaacgtggtccactacatgcacaaagttcatttagatggaggcctttaatgtt

SEQ ID NO: 798762 - DNA, 648 bp, Homo sapiens
ccctaccctgagaaaagcactatcattaataggtgaatatccttccagttctttctctatatgtacatataagcttgtatgcatgctttgaaaatttttactttaaaaatatagattcctactttacatactatcatctcatttgcttccctatccatgccctaccttaayataccatgaatgcatttccatatatttaataccattttatgtattattttacaacatcattttaacttcaatggtcttttattatgtgaatatatcaaagtatttggaatgcttccaatattcagtcaatgtaaaaaaacagtgtaatgtatatagctagcttccaataagtatttgtgtacatttctaattttcttttaacccaaacataattatgacaacatcccacaaacaaaagcatttatatatttttcctcccttcaacctgaaaacatgcatttctacaaatcccacttttttctattaatagtttttaatatttaatttttgagtagataatacctttgtttgtcttataagttgtttttatataaacaaagtgtagacagtgaaaaatcttgctcccgtccatggtcttatttatccacttccacctcatctaccccacaggtaacattgttattaatatatataatc

SEQ ID NO: 798763 - DNA, 562 bp, Homo sapiens
atttgctacttatttcaataaatgtattctgccatctctgcacatcagctaccgtagctctgagattaacctttcctgtttgcttgtgcctgacctcagggcatcctaaattactcaaagccattctgatggctttaatttatgagaacacctccaaatattcatcttttaaatcctgaaaatgattatccctgtacaacagtggctctctttttaatcttagctgataactctgattaaacacatccaaaggctgattacccccmctgtggttaatgccagtgtcactgctaactacttatttcacagcaggaattgccttcaagagcccatttacattattacctagaattgatttacactgttatttcctattgatcacataggaaataggaggtatagacagcgtcctctaaaggcttgctatgatggcaaataatgcaaaacacagctgtttaattctacactcagccagtaatacaacagtgtaaacaccagttgcttccaaaaggtagatattttttaaaagacaacatttagtattagaatcattaagttattt

SEQ ID NO: 798764 - DNA, 638 bp, Homo sapiens
gagttgaatgttaatcaccaagacaatggggtaaacgtctccagggcatgtcacagaccttggcagcagacccttccatcacaggcccagaggcttgggaggataaaatggttttgtaggcaggccccagggtccccctgttgtgtgcagcctagggacttggtgctctgcatccagctgctctagccatagctaaaagggtccaaggtataaatcgggctgtggctctagaaggtgcaagtgccaagtcttggcagcttccacgtgatgttgagcttccagcrcacagaaggaagaattgaggtttgggaacctccgcctagatttcagaggatatatggaaatgcctggatctctaggaagaagtttgccacaggggcagggtcctcatagagaacctctgctagggcagtgcagaagggaaatatgggtttggagcccccacacagagtccctactggggcactgcctagtggagctgtgaaaagaaggccactgtcctccagccccagaatagtagatccactgatagcttgcaccatgcacctggaaaagccatagacactcaatgccagcccatgaaagcagctgggagggaggctgtaccctgcaaagccacaggggcagagctgctcaag

SEQ ID NO: 798765 - DNA, 531 bp, Homo sapiens
tttatttcacttggcataatgttttcaaggtttgtcaatattataacatggatcagcacttcctttttgtttctgagtagtattccattgtatgaatattggcacattctatttattcacacatgtgttgatggacatttccattattttcactttttggtgattataaataatgctactttgaacatttatgtctaagttttgatatgaacatctgtttttatttttcttgtgtatgtctaagggtggaattgcccttagatatagggcaattaacaattaacacccttgtgttataattgccctatatccakggcagttaaattgtcgtatatcccagggcaattaaattctatacacctagaagtactaggtctgattttgcattagtaccaaaaaaattttcattaagcctccaaatgttatttttctttcattggaataaatttttcagtttgattgcccttagatgtagggcaattataatacagaggtgttatatggtaatagtatgcttaacattttaaagaa

SEQ ID NO: 798766 - DNA, 590 bp, Homo sapiens
agattttcagtttgtatgcataatttccttctctggccttaaccatcagtctgtggacttgccaagcaacaaccacaagaacaacaagtctgaggtcaagagacactatttagatctcagaatcatttgttgtcctttatcctttgacaaagttttgcctttctttctttatgagattttttccctaatggtttctcaatctcttgagaagaagaaagttcttgactcttgcagtctttctcattagttgaattataccatcagtacagcttctgatcatgtcgagaaatccaccatgaagaaataaaacatttccgattacatggattacgtttcttggattcttataggcattaaacttcattctaggatacaacctcatgatcttgtcttattctcagaacaagaaatatattactatatacattacartatatatatattgcagtttccttgctatatatatatatatatgtatgtattatagtaaaccctgtaggcaagcaggaacacttcagaagtctcaatgaatccatcattagctgttagtaatgacaacactgttagaattatttcaataatcacacatt

SEQ ID NO: 798767 - DNA, 605 bp, Homo sapiens
ctgtaggcaagcaggaacacttcagaagtctcaatgaatccatcattagctgttagtaatgacaacactgttagaattatttcaataatcacacattgttatggtctgaatgtgcacccccaaatgtaatatgttgaaattttaayacctgagggcatagtattaggaacttgggagtggaactctttttagtgctattatgaataagatgcttgccttttccagcaaatgaggacacagccacaagctgccctctaggaactatgaagttagtcttcaccagacacaaaatctgcttgattttgaatttagcctcccgaactgtggaaaataaatttctgcttttataagccactcaatttatggtatttggttattgtatcccaaacagactaaaacacacattatttacctcctttttggactgtctggggttgttgctttaaacttgcttcagtgcctagaactgctccaagctccctgtcctctggcacacacgtataaataattctgctggaaaccgacatgtttcactcagtcatccaaatgtatttataatgttgtccaaatatatagcacttgttacaatgtttacattttagaca

SEQ ID NO: 798768 - DNA, 621 bp, Homo sapiens
atagtcacttcctctgactgagaatctgcactccagggaaaccaactataattttattagaaaggccacactagaaatgcaagcacttctattattcatatctagatcaatccctgaaactttgataattaacataataggctagattctccagtcagtatttagaatgataaatgttacaattgggactttattagtgaaatttaaatatattcaagatatacagattgaamaaatattttataaaattaaagatatttaagatacgtagattgaaaactggatgaaatactttggattcactcctcactctggtgaacagcctataaaaatctggccaggtccaaattagcccttaggttttgtttggtggtggggataaattttttaaaatcagtaaaattatgactctttataatataaaaacaacatgtatcaaagattttatttgcctcactaactaatgaggaaaccaggaaagaagtaacagtttattcagagaagacctctaagaccagacaaacatataagcccatgagtaatgctgaaacgaattttttaaataggtacaaaactggtttcttccactgtaagggaggggaagtccattgaacctccact

SEQ ID NO: 798769 - DNA, 621 bp, Homo sapiens
atagtcacttcctctgactgagaatctgcactccagggaaaccaactataattttattagaaaggccacactagaaatgcaagcacttctattattcatatctagatcaatccctgaaactttgataattaacataataggctagattctccagtcagtatttagaatgataaatgttacaattgggactttattagtgaaatttaaatatattcaagatatacagattgaaaaaatattttataaaattaaagatatttaagatacgtagattgaaaactggatgaaatactttggattcactcctcactctggtgaacagcctataaaaatctggccaggtccaaattagcccttaggttttgtttggtggtggggataaattttttaaaatcagtaaaattatgactctttataatataaaaacaacatgtatcaaagattttatttgcctcactaactaatgaggaaaccagraaagaagtaacagtttattcagagaagacctctaagaccagacaaacatataagcccatgagtaatgctgaaacgaattttttaaataggtacaaaactggtttcttccactgtaagggaggggaagtccattgaacctccact

SEQ ID NO: 798770 - DNA, 657 bp, Homo sapiens
  misc_feature 1, 2, 3, 4, 5, 6, 7, 8, 9, 10, 11, 12, 13, 14, 15: n = A,T,C or G
nnnnnnnnnnnnnnnctaagggggatccagacatggtttaatattagaaaagttagtgtaatctaccatatccacaggctaaagaagaaaaattatatgatcatcttgatcagttcagaaaaagcattgactactcattggtggtaaataaaaaaatcagaaaagtaggaacagaagaaaatatcttcaatatgattaaaagcatccacacaaaacctagagttaacatcatacttaataataaaagacaatgcattttccaaaagactggaaacaaagggaatattcactcttactcaacataacgctggaagtatttgccactacaataaggcaagaaaaggaaacaaggatacaggtaatttttaaaaaagaaataaaactgtctctatttaaagattacattattgtatacatcgaaaattctaaggactctataagaaactcctagaattaaaaagtgagtttatcaagggtgcaatatacatgataaacttatacaaattaaktgtatttccatatattagcaatgaacatggaaacaccacatttataagaacagtattatttataatgtccccaaaaattaaaaacttaggtgtagagctaaaaaaaaaaaaaaattacaagacttatttgttgaaaacttcaaatgct

SEQ ID NO: 798771 - DNA, 588 bp, Homo sapiens
gatctcagctaactgcaacctccacctcccacgctcaagcaatttcctgcctcagcctcccgagtagctggaactacaggcacgcgccaccacacccagctaatttttttttttttaattttagtaaagatgaggtttcaccatgttgcccaaggtggtctcgaactcctgagactgggcaatccgcccacctcagcctcccaaagtactgggattacaggcgtgagacacagcacccggtctacattatcagctttctattaaatttgagtgtttgtgttttaactatgtgctgatcctcaattatttgcaaattattataattaattagctttcattaggttatgctgcagttaacaacaacaaaggtgcgtttcctgttgagtaytgtcagctgttgactggctgtagcactgctccaagtcatcttcactccaggatcaaaagtgaagcaaagtcccttttgggacactgtcattcttttggcagaggaagcaagagatgaaagaaacttcagttttctcttacaagacacatgtaccatatttgctttaagcaagttatatggccacgcctagcatcatgggg

SEQ ID NO: 798772 - DNA, 600 bp, Homo sapiens
ggaatgctcaaagataaataaaataagataaaacttctgctttttgaaagacacttttaagagaatggtaagctgccagctgggggaagaatttgaaagtcatgtgcttgatacaagacttttaccccaaacatataaagaactctccaaacatagtaataagaaagcaaataatcaaatttttttwtaaaaatcaaagaatatatacagatgacaaataaacacataaaaagatgctcaaaaccaacagagaaatgcaaattaaaaccagagatactaatacctaataaaatggcttaaactaaaaagactgatcataccaagtgttgacaaggatgtagaagaactggtaatttcatacactgctggcgggatatcaaaaatacaggccctttgaaaaacagtttggcagttaaacatatacctaccatatgatccagtcattccattccaagagaaatgaaagcatatatccatgcaaaggcttaaacacaaatgtttatggcatttaatagcaacaggtgagtgaataaactgtgctatttccacatgatggaatactataaaaaggaatcaactatcaatatgtgctataacatg

SEQ ID NO: 798773 - DNA, 600 bp, Homo sapiens
ggaatgctcaaagataaataaaataagataaaacttctgctttttgaaagacacttttaagagaatggtaagctgccagctgggggaagaatttgaaagtcatgtgcttgatacaagacttttaccccaaacatataaagaactctccaaacatagtaataagaaagcaaataatcaaattttttttwaaaaatcaaagaatatatacagatgacaaataaacacataaaaagatgctcaaaaccaacagagaaatgcaaattaaaaccagagatactaatacctaataaaatggcttaaactaaaaagactgatcataccaagtgttgacaaggatgtagaagaactggtaatttcatacactgctggcgggatatcaaaaatacaggccctttgaaaaacagtttggcagttaaacatatacctaccatatgatccagtcattccattccaagagaaatgaaagcatatatccatgcaaaggcttaaacacaaatgtttatggcatttaatagcaacaggtgagtgaataaactgtgctatttccacatgatggaatactataaaaaggaatcaactatcaatatgtgctataacatg

SEQ ID NO: 798774 - DNA, 641 bp, Homo sapiens
caataatatagtgtggtgaaatgaacaggatggcttccccatcctcagattcttgatttgcagttccgaatattcgtagtatgtgaaaactcatactctctccccactcatcaggatgacgtactttttacttgcagtaaaagtacccttactcatagtacctaaaagaaaagcaaatagggctggacgcggtggctcacgcctgtaatcctagcactttgggaggctaaggcaggtggatcacgaggtcaggagatcgagaccatcctggctaacacggtgaaaccccatctttactaaaaatacaaaaaattaggcgggcttggtggcgggcgcctgtagtcccagctacttgggargctgaggcaggagaatggcgtgcacctgggaggcggagcttgcagtgagccaagatcgcaccactgcactccagcctgggcgatacagcgagacttcgtctcaaaaaaaaaaaaaaagaaaaagaaaaaaagcaaagcaaatagcagagcagcagttgggtgacagaattaaaaaaaaaaaaaggaaggaaaaaacatccacaggggtcttttctatatatataaaaaatgtggaagtatctacttccatttgataaggaaaaggtgacagaaatgggaata

SEQ ID NO: 798775 - DNA, 599 bp, Homo sapiens
taagtgttgttagaaaggcatcagtaaaatgagagatattcaagtgacttaaggatattgagaaattcatgaagaacagtctgtgaagaggccacagggggtaggattaagagcacaggaaggtaaacaggcattgtgcttagaagggagcaggggaagaatggtttggatgcaaagaagtttgcaggtaggaagtaggtaactgatggaattatgattacctgttcaacacatagcactatatatactaaaaatactcaataaacttatcaaagtatcgtgtgacacctgcattagaaatgggatttaatatttttgttttcatttttgtttcaattacaatttcagtgcaattcactgatctttaaaataaccctgcaaatgtgtattcrtgctttcataatctccatcagtatttactgtactagtgtcattttaccatttttcatttttcatcagttggtttctgtaaatcttcctaagatatactcctaagagaaagagtttgcacataaataaaaagcagtgcactgtggtgtttatttcacttaaatctctttacgcccttggcactcccttaattccttttcttagaataa

SEQ ID NO: 798776 - DNA, 619 bp, Homo sapiens
tgtcagacttttgattccgccactcaaccaaaacaactcttgtgaagttcaccaatgacttttgcagtttctttctacttccaacattctccctatactcgattgctatatcccccttatttcttttcttgaagctgtgctaagtatctcaaatttaacatgttcaaaacaaaattcactagtctctaaacctggactgtcctcactgtttttcttcttcgtaagtggaaccatcctattcatccacttatcagggccccgaaacttaggactgtccttgagaatctatctcacagtctacatgcaacatatcattaaatctataagctcgaatgtaaaaggatatcccaaatctccagctttatacaattctttccttttcttaaaaaaaaaaaatcattatttggaggtagttgcagatttataggcaatggtaataaataatkctgggagaccttgttaactcttaattcagtttttcctaatggtaatatcttgcataggtataatacaataccacaaccaggaaatcaactttggtaaaatctagtaactttattcagatttcaccagctttacatacattcctatgtgtggttttgtgtatatttaattctgt

SEQ ID NO: 798777 - DNA, 609 bp, Homo sapiens
gcatcctacaagataagacccactgacttggaattccagtcagacacaggcaacagggtagagcctgcctgagactggacagagcccctgggaggtggggcaggcagccacctatgctgcttgattgattcagctgttccagtctgcaggctttggagagtccaaatggtccagatkaggaaggttccccacagcacagcacagctgttttgccagatcatgtctagactgtttcttaaagtgggaccctgatccattcctactcactggggaggacctcccacctcggcactcccacaaccctgcctgtattctacaggtagagtgctgaactctccctgggacagagtgcccagagagaggcagactgccaccttggttttctggatgattcagctgttccagcctgcgggatttggagtgtctaaactgacatgggtagaggtggttcccaagcatgacatggatatttggttgaggcatggctagactgcttctataagcaagaccctgatccactcctccttgtgatgcgggtactcacagccagggcctctggtcacccctgcccgtgttctatgacagaattctaatttctccctgggatgg

SEQ ID NO: 798778 - DNA, 523 bp, Homo sapiens
agtgctgggattacaggcatgagccaccatgcccggccctcattccttcttaattccctcctatgacaagtcctatagtagggaccaaatgtctggagtctgaatctacaagctgagattgagccagagtggcatgacgttatggggatggttgtgtgggggctgaaactgakaatcataaagaagtgaggctaggcccaacaatttcattgcagtggaggcagagtgggaagtttaaggaatttttgctccaagtttactatgaagatttttagagactctacagcaactgtttccacagctctccttgatctcttctgtggcctgcctatacacaggattttgatctctatcaagataatctgaacagtgctgatggggctgccacatctccagagccctctgccctagggaatataacagacctaccacttatgttactttaacgttgaatgggatgttatttataaataattgtgaggtaaaagttagatgcctggttttatagagtcaagggataatg

SEQ ID NO: 798779 - DNA, 615 bp, Homo sapiens
cagaaccacctccctaattttctccaagcttaaactacttcaatatttggtctgagggaagttgtttgcaaacctgaccaataaacaaaatcccacacggcagtggcctgaaaatcttccctatgcagttagtgatgtgtccccattcctgttcaaccacatcgctgagcacattggctacctgaacggtggagctgagtgactacsccccttcgtccttacactgaaaattctttgttagccacccaatgactgaacaactgccagttcctgctgaaaatatgcctcgaccttagatggactatgtttcccttggtgctaacaatgaagagccttcactactagaaaagaaactatatcgaaatccttcttgtgatacagctacccagcgtccatacagcatattaaaaacaacaaaccaaacaactttattttaaaatatatacatagctccaactaactgggggcaggcaattatttccacttaatttctaaaactgatctgactagttattaatatgtcacctattcatgaccgcagacacaaattttataaatccagtttgaaaatgattaatctaatggacttttcttgtttgttttcttttttatctt

SEQ ID NO: 798780 - DNA, 626 bp, Homo sapiens
ttctgttgctaaagattttttgtaacaatttatgtgtctattgctttatgtgaaagacgcttttcaaaattaaaatcagtaaacagtgttctgtgattaaccaggaacaaaagtagatggacaactgctcaatgaacatgaaactatgaagatcaatttttcttctaggtcatggacaaattaaagtagttaagtgttaaaaacagagaccatgatgtcattcctcatgactacaatagaccaatatttaactctaagcgtatttcctttaaaaaaaaaaagttaactacaaaaatgtagttaaaagtgctaatctactaattttttggkactgtaatatttactgtattatttatttttctattttatgggcataaccatccacagaagggtcagtaagagagaaatatcactgctttcctcttctatccattatttttgttgtttcgtttcatggctattactaaaaataatgttgtcacagagaagcaaggtgataaaaggattctctctgggggtcaatccatgaagaaagctggagaaatatctgctgaacagagttcatggcttcatgttctatctgagcaagtctcatcctgcagtcagctctcttgaggctgagccag

SEQ ID NO: 798781 - DNA, 634 bp, Homo sapiens
atcagtgtaggatttccctaatggtggctggcaccataggttccaaaatgtcaccaccagctctaagtcatcagccctttaaacgcctccacacatcccggggtatactgacgcgaggagtcacagtgggtaagcatcactaggttgcagaagcactgggctaatggtgtggatgagggtttcaatttacttggaaacatccacgggccaaggttcagttcattttaggtttcgactaagtttttccaggctctaaatgtagagagcaggggtgtttaaagtgactgtcctgacacaggctgttccctaggggccactctagcttccttcttggaagtgtgatgtgggtccagagttcaggccagccacggtcttggattccagatgggagttcatttttagagaccaaatggtcataagtgaacatgtcatcttgggctagctggaaaatacraacaccagctcagagtccaggaattcaggattgtaaataggtgaaagcacccttcaccttctctcctccttccctcaaggtggttcacatacaactattagcaattgacattcatagctcttgtacttcacagtattttcatgcctgggactctgttttgatccctgcaagtacagtgtt

SEQ ID NO: 798782 - DNA, 538 bp, Homo sapiens
  misc_feature 24: n = A,T,C or G
cagctcttcagggaatcttctgtntgctggctctctgaacaaccttctcaaaagatgtcaatgacctatgtcttctattgaaatatttttatttcttccagcgcaatctgggatctcaggggctgacagcagagaagttacctgaaggcgcaacaagcagtggtccctgtaggcagaagctacctggtgccccagtgatgtgggaggccctcagttcckgcgcttcttgctgcctgggcacatgttcctggaggatggcaggacctcctggcctctcccctgtctacccgccagagctctgcttcttaagataagaccacctctttcctccagccaatgtgctgctcttctgacttcaaaacacttgcacttccagggctcaacgtacagtgagttctcaaggattcggtgaataaatgtacaaatgtctcccgttacagctgccacattcagtggggtagtcttatgatcatttctctgaggaagggtgctgtgctcatggtctcagtctgcaaattgcagactgagaatccaacga

SEQ ID NO: 798783 - DNA, 617 bp, Homo sapiens
aaacaaacaggcagacatggaaaaaacaaactgaagagataataacagaaaactttttaatttcaataaaaattataaatctgtagatacaaaaataacttaaagaaaggcaagtaggataaacacaaagaaaacctctcctaagaacatcataatgaaattgaaaacaactagtgtcaaagagaatatttttattcttttcttttttcttttttctttattcgagacaggctatccctctgttgcccaagctggagtgcagtgggaggatcttggcttgctgcracctctacctctctggctcaagagatcctcctacctcatcctgccaagtagctgagattagaggtgtgcaacaccacactcagataattttttttttttttagatggagtctcactctgtcacccagtctggagtgctgtggtgcaatcttggattactccaacctctgcctcccaggttcaaacgattctcctgcctcagcctcccaagtagctgggattacaggcacacaccaccacactaggctaattttttgtgtttttagtagagacggggtttcgccatgttggccaggcttgtctggaactcttggcctcaagtgatccacccac

SEQ ID NO: 798784 - DNA, 617 bp, Homo sapiens
aaacaaacaggcagacatggaaaaaacaaactgaagagataataacagaaaactttttaatttcaataaaaattataaatctgtagatacaaaaataacttaaagaaaggcaagtaggataaacacaaagaaaacctctcctaagaacatcataatgaaattgaaaacaactagtgtcaaagagaatatttttattcttttcttttttcttttttctttattcgagacaggctatccctctgttgcccaagctggagtgcagtgggaggatcttggcttgctgcgacctctacctctctggctcaagagatcctcctacctcatcctgccaagtagctgagattagaggtgtgcaacaccacactcagataattttttttttttttagatggagtctcactctgtcacccagtctggagtgctgtggtgcaatcttggattactccaacctctgcctcccaggttcaaacgattctsctgcctcagcctcccaagtagctgggattacaggcacacaccaccacactaggctaattttttgtgtttttagtagagacggggtttcgccatgttggccaggcttgtctggaactcttggcctcaagtgatccacccac

SEQ ID NO: 798785 - DNA, 622 bp, Homo sapiens
ttttttttgagaaggagtctcattctgctgcccaggctcaagtgcagtggcgcaatcttggttcactgcaacctccacctcccaggttcaagcaatactcttgcctctgcctcccaagtagctgggactacagacatgcaccaccacttctggctaattttttatatttttagtagagacagggtttcaccatgctggtctcaaactcctgacctcaggtaatttgcccatctcgccccaccaaagtgaattacaggcatgagccactgtgcccagccctgtttcytgactttttaataattgcaattttgagtgtggtgtgagatggtagccatactcagaaaactgaaactagaccccttccttacaccttatacaaaaattaactcactatggtttaaagacttaaatgtaaaatgtgaaaccataaaaaccctagaagaaaacctaggcaataccattcaagacataggcatgggcaaagacttcatgatgaaaacaccaaaagagattgcaacaaaagctaaaattgacaaatgggaactaattaaactaaagagcttctgcacagcaaaaaaactagcatcagagtgaactggcagcctacagaatgggagaaaat

SEQ ID NO: 798786 - DNA, 617 bp, Homo sapiens
tggccaagtctccttggagacaaatttctttggggcactcagcccaggcttgagggctcatgataactttcaagagctagtagtcaatcatgagtcccatcactactcccttttaggtctgaatttgaatcatttatttaagatctgtggaacagtggttcccaaatgccaatccacacacaaaaagtttcatatgaatgggaaaaatataaacaatgtagtgagtatttctgcaaggctaaatatattctatttaaacaactttttttttattctgagtttagactctttcttcgggaaagkttgagagattaaaatgttctttttaaaataaaataatggtgatagtcaatgtacttggtcggtaatttgctttagcatacttggcaaaacacaaccttctgtcaacccctcctactttttctttatgaaacgttttttgtactgtgaaatcgaagtctggggttacttttgcaagactgatctctaatttgcctgaatatattctaaggattcgagaatccttacttcagaaggaaatcagagacaaacacagtagttttttgcatttcctttccataaactgtaagggggcaggtatgcattacatcttcagg

SEQ ID NO: 798787 - DNA, 610 bp, Homo sapiens
agagcggagtgtcagaggagggtgaaaattgaaagactatggggtactaggcttattacctgggtgactaatctgtacacccaacccccatgacacagaatttacctatataacacacctgcacgtgtgcccttgaacataaaataagagataaaaagcatttttataaagaagttttgagatattttagcaaatcagaattgaagtgttgtcaaatgcaaaggaggctaatattgcctcaacttcctctttttatttttttattatactttaagttctagggtacatgtgcacaacatgcaggtttgtttcatatgtatacacgtgccatgtwggtgtgctgcacccatcaactcatcatttacattaggtatatctcctaatgctttccctcccacctcctaccaccccacaacaggccccagtgggtaatgttccccttcctacgtccaagtgttcccattgttccattcccaccaatgagtgagaacatgcagtgtttggattttgttcttgtgatagtttgctgagaaggatggtttccagcttcatccatgtccttacaaagaacatgaactcatcattttttatggctgcatagtattccatg

SEQ ID NO: 798788 - DNA, 529 bp, Homo sapiens
attcagtaaagtgatattttagtgagaattttggcatttatatttatacagttattgatctcttctttcctttcattgttatatctttggctggctgtggtatcaaggtaatgctgtcctcaatgtagaataaattgggaggttttccatcctcttttatttttagargagtttgtaaaatactgatgttaattctttaaaaatttggagtaacttactagtgaagctatgtgggcctcaactttgctttgtgcaaaatttcctgattagcaattttgtctctttacttgcttattataggtctattcagtatttaaaatttttgattcagattcagaagtttgtgttattatataaatttatccatttaatttgtggaaatacagttgttcatatcattcccctataatccctttttatttcaattaagtcagtgatgatagtgcctctttcagtcctgattttaggagttttagttttctcttctttttgttttgataagtctacctaaagatgtgtcaattttatt

SEQ ID NO: 798789 - DNA, 532 bp, Homo sapiens
aaaactttttttggacgaaaggaaagctttgtcatttgtttatttcttagtttgaatagtgaatctagttagtttattaagtctgctttctagttgtcacttaatgatgattgcatatttacgagatctagaggcagaattttcaagcattttaccgaatttggcactctcttgattacattttttcttgtaagacttctcttttttccccccaagaactagttcatgttttgccaatctgttaaaatgatttaattttttccttgtaaaatagtgatacttgcctttcttaaaattattccactttattagaaatcttttttgtttgtttgcttgtttgttttaagtgaaaggattgggagtcagragatgtggattgtggttttaagccccgctgacagttaaactgtaggtaatcttgggcaagtcatggaatttctctttgtcccagttatctcatttgaaaaataagtggattgaaattttttcaatctgaaaatctgtgattttgaactagaaatagcagtacatt

SEQ ID NO: 798790 - DNA, 589 bp, Homo sapiens
aatgaatttggaactattatagactgggcccctcgaggccaattatattatgattgtacaggccagacctactcatattcacaggccccatccgtctggcccattaatcctgcctttgatagtgatttaactaaaaggctggaccaggtttatagaaggttagaatcaccctatccatggaaatggggtgaaaagggaatttcaccatcttgaccaaagttagttagtcctgttactggtcctgaacatccrgaattatggaagcttactgtggcctcgcaccatattagaatttggtctggaaatcaactataggaacaaagaatcataagccatattatactatcaacctagattccaatctgacaattcctttgcaaagttgtgtagaacccccttatatgctagttgtaggaaacatagattaaaccagattaccaaactataacctgtgaaaattgtagattgtttacttgcattaattcgacttttaattggcagcaccatattctgctagtgagggcaagagagggtgtgtggatccctgtgtccatggactgaccgtgggaggcttcgccatctgtccata

SEQ ID NO: 798791 - DNA, 534 bp, Homo sapiens
ctagatccaaaagattcatttttactgtgattgcagtgaatatgggtcttattgcagtcacagctactcagaattgtggaactctgagacccaaatagatcaaaaattggcaaaccaaattaatgatcttatacaaactgtcatttggataggagataggctcatgagcttggaatatctttttcagttacagtgtcactggaatacatcagatttttgtattacaccccaagcctataatgagtctgagcatcactgggacatgattagatgccatctacaaggaagagaaggtaatcttactttagatatttcaaaattaaaagaacaaatttttgaggcatcgaaagcccatttaaatttggtgccaggaactgaggcaatcgtaaargctactgatggccttacaaatcttaaccccatcacttgggttaaaactatcaaaagttccactattgtacattgtgtattaatccttgtatgcctgttctgtctgttgttagtctacaggtgtatccaacagctctgaagaga

SEQ ID NO: 798792 - DNA, 522 bp, Homo sapiens; identical to SEQ ID NO: 797686

SEQ ID NO: 798793 - DNA, 522 bp, Homo sapiens; identical to SEQ ID NO: 797687

SEQ ID NO: 798794 - DNA, 522 bp, Homo sapiens; identical to SEQ ID NO: 797688

SEQ ID NO: 798795 - DNA, 632 bp, Homo sapiens
gtactagtttcctatcgctactataatagcattattgccttacatttctagaggtcaaaagtctgaaattggtcacaactggcgaaaatcaaggtgttggcaaggctgtgcttcttttggacgctataggggagaatctgtttcctttcctttcccagcttttagaggctgctaacgttccttacctgctagcccctttgttttccatttcaaagccagatatatcaggttaaatccttctcaagctactggctgtcttgcttttctccctcccctgcctatctctcctgcattaaaggawgcttcgggttacgctgagctcacctggataattcaacatacccttcttatattaaggcacctgattagaaaccaatttcatctgcaccctgaattcctctttgccatggaatgcagttaattcctatttccaagggattaggattctcctgcctaccacagtgggtgagctaggcgggcctctgtagtggtactctgtcctttccaggcatcaatgaggtgcccaggaaagatattctccggttctcagccttgagctcaggagttttactggtgagcatgagagaaaacactctctatggagggtgagggaagcaggattggggtgaaga

SEQ ID NO: 798796 - DNA, 471 bp, Homo sapiens
aaaacatttggagtgctgtcatttggaggatatagtgaaaatttaagtccaaggacaggctgccaattagggaggtataagcaaatactccaaatggtgaagccacgggtcacaaaggttatcaagagcaaatggtcaccattgtgtaaactcaatgtaaaggagaaatgagactcagaaaaacyttcaatttaatagctatggttttattaattttcctctacataaatgaaaaatgaaaagaaaagtgtgttgagtagaagtgattttccacacatttttttctcttgtgatttaactgtaaaagtaagaggcaataaattgttgtttctctgaattagcagaaattcgactgtggggaagcttaaaaactcttctatatttcatagttgtttttcataaagaaaggaactgattttctttcaagcagtgttcattgttgtacacagtaagaaacacaaatacagttaa

SEQ ID NO: 798797 - DNA, 643 bp, Homo sapiens
gctacgaaaatactgtaaaatgatattcagattttatagtaattcacatagatttactttttctacagattatcagtattccatttctaaataacacagaataaagaaaaattaaaaataccccattaatacattagaatttgttgtgacttatttgtatctccattaataaaacacatggaaaagtctacaggcattgactttaaatgggagtgatttatcagttgccacaaaatttatgcagaggaattaaccrtggtggtgatcaacctgcaatgagtgtttgcagtgtaacagaacatgactacatttgttatatgtgttaagccttctaatcctctgtaagatatatactgttactctccccaagttttcatatgaagaaaatgagacaagaataactaaagtaacttgtacataacccaatagccagtaagtcactaagctgggcttttaaacataccaacctagctccacacagttacttattttactttattttcccacttctaaatatttttagctgatgataaaaaaataaaatccataaaatggacaagagtagtcgttgactttttatgaatatgcatatgtatgctataactaaaagttatattaagctctgataatccctttttaactt

SEQ ID NO: 798798 - DNA, 612 bp, Homo sapiens
atcctatcctctttccttaggatcccacacttagtcttcttctgcccttttaaagttctcctaggtctttgctactcaaaatatggtccacggatcaggaatatcagcatcacctgagagcttgctaaaaattcaaaagctcagagcttctaaacaaaaatcatcattttaacaagatcctcaggagatttgtatgcaattaaaattcacagagtactgctctaggtgcctgtctttcacagagtaaagactgggtaacaggtgttaaataatgatcatcatgatgataataaacaactgttattactactacatcaataataatacaggactaattgggagagtactacttgaaaggaccatgctaaggattttacactcattagctcctttaaccaatgcctattcaagtgtcccttggcctcccagtgaatttcaggatctcccatctcaggrtgtttcttgttccatgatctacatggaaagagtcacctttgggcattaacttacagcaaatccaggcatcagagaaaccagaagcctagcaacacagagggttcacataaatagtaaggaggagagtggctggagctgccaaaagtgggccagaca

SEQ ID NO: 798799 - DNA, 629 bp, Homo sapiens
aaaagtgaagtaaatgattatgtgtaggttattttggtattttaaaaatggattcaaaaattagagaaatttacaaatgaaatttatgacagtaatcaaaaatacaattctttcaattgatgcaaaaacagtatttgacaaatcacccctaatttatggtgattttaaaaaacatatttatgaaagcaggaatatagtagtcaatttttctaactttttaaaggtaatataacaaaaacctatagcaacactatatttaatgaagaatttcaggtgctttccctataaaatcggcagcaagaaaaggaagtcatcattagcactattcctatttaatagggtaytggaggtcatggccaacactataaggaaagaaaggaagacataagagaaataatgttttccaagaaagagataaaactatcattatttgcagccagatgaaaaagaaaattcagcaagtttggaagatacaagatcaatttgtaaaagtcaataggattttaatatcataaagatgtcatttctcctccaaattaatttataaatttgatacaatctcatttaaaatatcagttagaatttagaggaattcaataaactcatttgaaagttttatatggaaaagt

SEQ ID NO: 798800 - DNA, 640 bp, Homo sapiens
gctttttaaaatcctatttctttattcccatcttacaaaacccacccagtgggagctctcatactagtttgtagaatggaggcggctgcaattcatgaatctcaaaaagccaattagatccataactaagttagttgtaattttgccttttgacacccttaacccaaaactgttatcttaaggtgtttataatgtaggtttataagaggaaaaggtaaaggttaacatgttgtagaagactgtttgtattttggagttaactataattgttacagttcataatatttaacccactgactatgacaycattgactgatatgattaacccaaccaatgtataataaaatgtagactttccaggaataagtaaatcatttcttttttgcagaagtttatgtaaattttagaaataaaccgtttaacctgcaatgcaaaatctctttcatgacactaagacacagaaaaggcaataaaaatggcttcttttcattgttagtatttttttttttttttttttttgagacagggtctcgctttgttgtccaggctggagtgcaatggcacaatcatggcttactacagcctcaacctcctgggctcgatgatcctcccacttcagcctcccaaagagctaggacca

SEQ ID NO: 798801 - DNA, 534 bp, Homo sapiens
tgatgttttttaagggtactctttaaaggggataacaagtttgaaatttctgttacacattgtgatgttttgtatttagaaggtgagttaacattttcattttgttacaatacaatttagtggcataatgtttcttattaggaaactctgattattctttcagaattctaattttttttaaaaaaaaatcatggttgcctgaaaggtttattgaagttaatgactgccaacagtatagctgtatttcaattagaaaaaaataaatccaatgatacctttcccagtgctcaacatctatctacaactaggaagaatacaatkttcatttttagttttttaaaatactttttgttatcgttgcacttgtttgctgtaattgttattattattttatttttatttagttctatttttattcttttgtttttattctaacataaaattgtttattcttgaaagccgtattaaataggtgccagttcctatctgtgaaatcgggttgttactctttaatatgattttatatagtacctg

SEQ ID NO: 798802 - DNA, 534 bp, Homo sapiens
tgatgttttttaagggtactctttaaaggggataacaagtttgaaatttctgttacacattgtgatgttttgtatttagaaggtgagttaacattttcattttgttacaatacaatttagtggcataatgtttcttattaggaaactctgattattctttcagaattctaattttttttaaaaaaaaatcatggttgcctgaaaggtttattgaagttaatgactgccaacagtatagctgtatttcaattagaaaaaaataaatccaatgatacctttcccagtgctcaacatctatctacaactaggaagaatacaattttcatttttagttttttwaaatactttttgttatcgttgcacttgtttgctgtaattgttattattattttatttttatttagttctatttttattcttttgtttttattctaacataaaattgtttattcttgaaagccgtattaaataggtgccagttcctatctgtgaaatcgggttgttactctttaatatgattttatatagtacctg

SEQ ID NO: 798803 - DNA, 462 bp, Homo sapiens
aatcaccactaaagaacttatctatgtaaaccaaacacacctgtttcccacaaacctattgaaattaaataaataagtacataaattggggggagaaaaaatgaaattacaattagttaaatatatatatatatgtatgtatttatgtcattgatgtattatctattacttaaaaaaaatcagttactgaggaaaagtatcctagatccataaaattgttttctgcttgaagggtcctatgggaagagttgtgtcggtaacagcagtcttctaattacacttggcttttcayatcttcaaaatattacaaaggtgaatttcacattcacacaaagtttacattgataaatagcatattatacttcaaagtgaatttataattcataaatatatgtgagacttgtccactttggatatccatttagatcagttaaattacttgcaatttaaatttagtagatg

SEQ ID NO: 798804 - DNA, 347 bp, Homo sapiens
tcagataagctgaggttcagagtgttaaaattcagggaacattcgggtaatagcaaaatacaccaaatgataaaggatttagaaatgtaacaaaaataagactcgaacaatggtgtaaggccaggataaaaagaaamgccattgtgcaacagagagaatgttaaacatggatatgagcaggaaggtgcctgatggcatttgtattaggatgatttttttttctagtggcaatatgaagaatgaattggagttaggaaagtctattaggtgctatggggagtgcacagtgtaaaacacaggccctgttcttaaaaagcttacaatccagttggaaagtaaaatattaa

SEQ ID NO: 798805 - DNA, 347 bp, Homo sapiens
tcagataagctgaggttcagagtgttaaaattcagggaacattcgggtaatagcaaaatacaccaaatgataaaggatttagaaatgtaacaaaaataagactcgaacaatggtgtaaggccaggataaaaagaaaagccaytgtgcaacagagagaatgttaaacatggatatgagcaggaaggtgcctgatggcatttgtattaggatgatttttttttctagtggcaatatgaagaatgaattggagttaggaaagtctattaggtgctatggggagtgcacagtgtaaaacacaggccctgttcttaaaaagcttacaatccagttggaaagtaaaatattaa

SEQ ID NO: 798806 - DNA, 579 bp, Homo sapiens
ttattactattttattatttggagacagggtctcactctgtcgtccaggctggagtgcagtggcgcgatctgggctcacagcaacctccgcctcctgcgttcaagtgattctcgtgcctcagcctcccgaataactggggctacaggcacgccaccgtgctgggctaatttttstatttttagtagagatggggtatcgccatgttggccagactggtgtcgaactctagacctcaggtgatccgtccatctcgtcctcccaaagtgctgggattacaggtgtaagccactgcacccagcctgcagcactttaaatatatattattttaataaatgcaactaaacattgaagatataaaagtacctagtgagaaggggtcctcaaaattggttatacattagaatccttcaggaagctttaaaagccttgatgttgtcctaccccagattctgatttaattggtctggcatgtggcttagacatcagggttcctaaagcttaacaggtgattctattatatagccaaggttgagaactactctaaaaatagagactactgagagaaaaaaaaaacacaa

SEQ ID NO: 798807 - DNA, 600 bp, Homo sapiens
acttctatgagatcattattttttcttttttttttagctttcacacgtgagtgagaatgtgtagtatttatctttctgtgcctggcttattttacctaacataatgtcctctaagctcgtccatgttgccataaatgacaggatttmattcttttttgcagctgagtagtattctattatgtatatatgctacattttccttatccattcatctgttgatggacacttaggttgattctatatcttgcctattgtgaatagtgttgcaaaaaacgtgggagtgcctttcaacatacttatttactttcctttaaatatatacccaatagtaggattgctggatcatatggtagttctattttaggtttttgaggaacttcaatactgttttccataatggctgtattaatttacattcccgccaccagtgtataacagtgcccctttctccacatcctcaccagcattttttgtcctaaagcagtattttaaagtttatgttgctatacaagttggaaacaggagatcctaatgatggataaggaaatatggccaaatgtcttaaaacagatttctattatatgcattctttctttagtg

SEQ ID NO: 798808 - DNA, 526 bp, Homo sapiens
ataatgattgtctcttattctactcttcaaactcctgtaagtcatttagtactcctgtaagtcaaagtggtatatttaattacttctagtaactccttattgcatttagaataaagttcaaattccatgatctggccactgtttccatcagcctcattctcatttgtcatgcctgagttacactgaccttctttctttttctggaacatgttaagctcattgtcacctcrgggccttcatatttctttctgtctggaatggtacatgctactcccccagatctttctgtgatctttctcatcattcacatctcagctccttagagacttatctgatcatcataactagagtagcctcgccttgtatctgatcttctatttcattttgctgttttatatatttttatagtactgttgcaggtggatgcccagggaaccagagagtgagtagtggttttgcatggaagaagttattagaggtactcttgatcaacacctgaagaagggaaggaaaataagaatgctgg

SEQ ID NO: 798809 - DNA, 539 bp, Homo sapiens
aaaaatttaaaggattgaaacctgatatatatgcaacaaaaaagaaaagcaaagttaaatcaattcctgtgtagagatcaaatctatctagaaatatacaactaagctaaagaaatcctgagagcttacctagcagattatcataaccattccttgaaatttataattctttcctgtcgcttcatgtcacttccttcaaatctcacttcaaacttactccttcatgaagtcttccctgatgctgagctattcactccgttcatgttacatcctttctgctcaacacacagaactgtcccagattagtgctaatgaatccaaatctgattttctctctagctctttcatctgggtttcayggtcacagacttcatcctttaatatatctaccttgaaaaatgcatgccctctacatttatactttcagtatatactgtcagttctctcaattaattacaatggtaaatacttacatcatacttactttgtgctagtcactgttgttccaagtgctttagattaaaaaaaaattatatagt

SEQ ID NO: 798810 - DNA, 374 bp, Homo sapiens
atcctccaaacttaactcatcatcttctctccaaaacctgctcccatcctgtcttctgtctcagagaatgaaatcattattcatgcagttgcccagccagaaaccctggagtgtttctgaatgcctccctttccgtctccccttcccttcccacactactgactgtatgtctacyatgtgttcccatgtctctcaactttcacagacattcaggtcatcatctctcacctgtatcattagagcagccttctgactagtctttccttattgaatcccttcttacagtatcattattgattgttttaaaatgcaaatctggtcatattacatctctcaaaaaatttttatggctttcccactgcctccaaggtaaa

SEQ ID NO: 798811 - DNA, 303 bp, Homo sapiens
tcatttgcaagctggagaaccagggaagctggtaacttgcttcagtctaagtccaaagggctgagaaacaaagaccagagaacctgaagttctaatgtccaagggtaggagaagacaagtttccctgctccagaagaaagagsaaattcagctttcctttgcctttctgttctatccaggccttcagtggaatggatggtgccacacacattgggtgaggatagatcttcctactcagtctattgattcaaatgccaatctcttcctgaaacaactctacagacatacccagaaataaagctt

SEQ ID NO: 798812 - DNA, 565 bp, Homo sapiens
aaatccaagagttttcagacaaaggacactggagcagttgagaagtttttagcaaatgatgaatgctgcaagcaatgctttggcataacagacattgtgtaaagcattgatggcttactcttgcctaaattttgtacagcatgagtttaaaatgtaaaagaatatgggaaaattgtgtacactttaagagctgctaagagtgatgaacaaagcatatttaatttagtatgatgtaatacacagctatataattaacaaatgcattcatttattgaggtcagcaacagaaatgattacacaactagaaagccagtcctatgagaaaaacccagagcctgggcacggtggctcatacctgtaatcccagcactttgggaggccaaggtgggtggaycacttgagcccaagagtttgagaccagcctggacagcatggcaaaacactgtctctactaaaaatacaaaaattagctgtgcatggtggtgtgtgcctgtattttcagctactcaggaggctgaggtggaaggattgcttgagactgggaggaagaggttgcaatgagctg

SEQ ID NO: 798813 - DNA, 599 bp, Homo sapiens
ggtctaatcagaaggccagatgtgaccaggcataacgttccccctgaagatgagtgaagtgaagggatatccaaatgttctggagttggacaaatgcaaagattgttgactgagattttcagtaatagaattctctatggtttgataaattgcaagtaatataatatatgaatatgtgggttttgaaattagacagattgggaatgagtcccagctcagttagtaatcagctatgtgaccayaggcctatcactttttttgtgacatttaaatgagataatgtagaaaaagtgcttacctcggtgcctgacacatggtaattgtgtggtacgtggtattcattattattgttactgttatttttcagtactattccaaaaatacattccgtttgggtcatcttggctttcagtttttgaaagttaacacattctttctttcataagagggggtataggatgggccaggaaccatgagacgtatcttagaaaggacaaatataaaaatttaagtccagagagggagagagacttttaatactgaaatgcctcagcaaaatctatttccaggtttctatgggccatgatcttccttaaaaa

SEQ ID NO: 798814 - DNA, 563 bp, Homo sapiens
ctataagaaatgaaaacaagttgttctgtggaaaaattaaacaatgtctcagcatttctctttttagaagagctagaagagtagggttgggtctcaactatcatgatggcaagataaacacaatgccagatgtaatagccccagtgtaggaccagagctcagaccttttatgttatagtaacttcacccctrgatctgtcaacagagcagaagcagctccacattggaccaaggtgctcatattgtgaaaggctaatcactcactggtttatttcctcctaaggccaggcaaaagagaagacatctcaccacaaatggctcaactcttttctcttactgatgacaatacatttaataaatcatatttaatatttaataaatcaaatattatttagcctggattctatttcctaacacaaagttatcctttattggggattaggagcagagtctcactctgtcgcccaggctggagtgcagtggcttcataataactcactgcagcttcagactcctgggctcaggggatcctctcacctcagcctcctgaatagctaggacta

SEQ ID NO: 798815 - DNA, 685 bp, Homo sapiens
acataaatttttagaaccgtgcttggcatatagtattatgaaaatgtgtgttctcatatttattactatacttgttaatacacctgtgactgcataggatagatatgatggtttatacagctaagagtaaacagtggctatttgtccgaagaagtggaatagagagatttataaaggtccttttggccataatcatttgtatattttattttctatgctcatagtgttaattttttatttctttttagtgagacaatattcatgtactacatagtaaaaaaaattgggctaagactttgatcatataacaaatacttctgaaaatgcaaamcaaacaaatgatatattttcacttattgtttacctatctgttcttcagcccacttgtacctatttgcctattttgttctaggcactgttcaagcactagagatacagcaatgaacaaaacagacaagccacccttgctttcctgtgaaaggtgtagacacgggaataaacaaggagaatatttactatattagttggaggttggttctgtggggaaaataaagccagaagggaaacaggaaggacaaaaggaagtagtgtttgaagcttaaatcagatggacaggaaaggccttgctgaaaggagccatctgagtaaagaagtgaagagaggcagggagctacacaattattca

SEQ ID NO: 798816 - DNA, 568 bp, Homo sapiens
aaacaacagaatatacattcttttcattgccacctggcacatactctaaaatcgaccacataattggacataaaataatcctcaacaaatgtaaaagaaccaaaatcataccaaacacactcttaaaccacagcacaataaaaatagaagtcaagactatgaaaatygctcaaaactatacaattacatggaaattaaacaatatgcttctgaatgacttttgggtaaatcatgaaattaaggcagaaatcaagaagttctttgaaaataatgagaacaaagataacaacataccagaatctctgggacccagctaaagtagcgttaaaaggaaaattcatagcattaaatgtccacatcagaacattagaaagatctcaaattaacctaacttcacaactaaaagaattagagaagcaagaacaaatcaaccccaaagcttgcagaagatgagaaataacaaaaatcagagcttaactgaaggaaattaagacaaaaaaaaattcaaaaaatcagtgaatccaggagttggcttttggaaaaaataataaaataggccactagctag

SEQ ID NO: 798817 - DNA, 649 bp, Homo sapiens
gagtgtaatcagaccactgaggggcagagagtctctaacatctaagttacatacttatattttaaatttttgtgattttagtttttgcttgctccattagagtagaaaataagtatttgttgaataagttagaaaaatgaatgaatgaatgaattgctttcaggactatgccacagaatgttagagtaggaaaggaccttaaggatctattagttaaacctgttgagcaattagttcaatgttgttaggtaytgatctcactccaaagataataaccattagcagcaataacaacagtcactgctatgagtgcctaccatgaatcagacagtttacatttataatctctatttttttaaacctttcaagaaaagtgtcattattgctacttttcaaatatgttgtccaaagtttctcaattagtaacccaaatctgcctgtttctaagccggggtgtgcccacctttttggctatgctttttctcaggtcattccaaagacagaccatttaaccactggatctggggcaacaaaggtggatcaatcgtgaatccttcactaaaaagcttgctttgtaatagatgaaacagtttaatttttaaatctagtgttataagggtttaagtagtagcacactgtcaaacttctg

SEQ ID NO: 798818 - DNA, 572 bp, Homo sapiens
tcagtagattataaatatcttcgccaactctttaaccctttcagtgatgcctttagataaacagaaattcataattttaatgtgttccaagttataagttatttcctttatggttaatgagttatttttgtgtcctgtttaagaaatctttctagctaaggttatgacaatttttaaatgttattttctaatagcattactgttttatctttcactagaattgatttttttgcatgtgatgtgaagtagtcattttccatgtggttatttaattacccaktaccattcattgaaaatactatcctttttttttccactgcttttcagtgccaccttggttatagataaaatatccataatgaatctatttctggactctctattctgttctggttgtctgtgtctcagttgtcccacatgtaactatatctaaccaaatagatccttcaccatttagtttctatgtctaccccatctaagtaaccacatcttacatcctgagtttatcattaccttaatttcttgagatataagttcagttgtggtaggtgaatttccagagtatgtatctt

SEQ ID NO: 798819 - DNA, 604 bp, Homo sapiens
gtatcatgagagggctgtggggcttcctctttggtaaaaatgtttgggccgggcgcggtggctcacgcctgtaatctcagcactttgtgaggccaaggagggcagatcacttgaggtcaggagttcaagaccagcctggctaacatggcgaaactccatctctactaaaagtataaaagctgggtgtggtggcacgcacctgtaatcccagctactcgggaggctgaggcaggagaatccattgaaccygggaggcggaggttgcagtgagccaagattgtgccattgcactccagcctgggcaacaagagcgaaactccatctcaaaaaaaaaaaaaaaattgcttgatgagaggctggcagagcccatggaaacatagtccttggtgtagaatttcacgttttctcagcttcccaacaaccctgcagctggagtgggaacactctggtgtaatttgtttctgcagttcaaacacggacttccaggaacactggttacagtcaggtcctgtggaagagccaagggcagggcagagcagcagaaactaaataattcaggaaagaagtgaagagaatatgttagttgagttgtgaatgccctgga

SEQ ID NO: 798820 - DNA, 619 bp, Homo sapiens
gctgcctgatccttcctctggaagcttcatcccagaggggcacccgcctatatgaggtgtctgtcagcccctactgggaggtgtctcccagttaggctacatgggggtcagggacccacttgaggaggcagtctgtccgttctcagagttcaaatgccgtgttgggtgaaccactgctctcttcagagctgtcagacagggacgtttaagtctacagaagttgtctgctgccttttcttcagctaagccctgcccacagaggtggagtctagaggcagtaggccttaccgagctgcgctgggatctgcccagtttgagcttcccggtgctttgtttacctacttgagcctcatcaatggcagacacccctactccagccaggctgctgcctcatagtycgatctcagactgctgtgctagcagtaagcaaggctccgtgggcatgggacctgccgagccaggcacaggagagaatctccttgtctgccagttgctaaaacctcgggtaaagcacagtatttgggtgagagtgtcccatttttccaggtacagtctgtcatggcttcacttggctaggaaagggaaatcccccaaccccttgtgctttccgggtaaagcg

SEQ ID NO: 798821 - DNA, 592 bp, Homo sapiens
tcatccttttccatggctgcatagtattctatggtgtatatgtgctacgttttctttatccagtctatccttgatgggcatttgggttggttccaagtctttgctattgtgaacagtgccacagtaaacatacgtgtgcatgtgtctttatagtagaaagatttataatcctttgggtatatacccagcaatggaattgttgggtcaaatggtatttctaattctagatccttgaggaattgccaaactgtcttccataatggttgaactaatttacactttgtaggcygggcacggtggctcacacctgtaatcccagcactttgggaggccaaggcgggtggatcacaaggtcaggagttcgagaccatcccagccaacatgacgaaaccctgtctctactaaaaatataaaaattagccgggcgtggtggcgggcgcctgtaattccagccattcgggaggctgaggcaggagaattgcttgaacccaggaggcagaggttgcactgagctgcaatcatgccattgcactccagcctgggcgacaagagcaacactccgtctcaaaaaaaatgtatatatatatataca

SEQ ID NO: 798822 - DNA, 576 bp, Homo sapiens
tttaatatctttgttctatacaaatttgtctttaacttattcaaaccagttgtaacattttacagattccctaattaataacaggctaaatcaggccaggcatggtggttcaagactgtaataccagcactttgggaggtcgaggcaggaggatcacatgaggtcaggagttcaagaccagcctggccaacatggtgaaaccccatctctactaaaaatacaacaaaaaattagtcgggcatcatgacgcatgcctgtattcccagctactcagcaggccgagacaggagaatcttgaacccgggaagttgtaatttgatcgcaatgtggtcatggtrgcatgcgaaagagaggcttgaacccaggaagcggaggttgcagtgagccgagattgtaccactgcactccagcctgggcaacagagtgagactccatttcaaataaataaataaataaataaataaataaataaataaaatctttaatgtgttcatttttcatctgtatgagaattacgatttgtatcttttttattaatattacccttcaacatacgtgtgtcggaatctctcagtc

SEQ ID NO: 798823 - DNA, 605 bp, Homo sapiens
gacacatttaaagcagtgtctaaagggaagtttatagcactaactgcccacaagagaaagcagaaaagatctaaaatcgacaccctaacatcacaattaaaagaactagagaagcaagagcaaacaaatggaaaagctagyagaagacaagaaataagtaagataattaattttaaaataacctttagaaaagctaatgaatattgcactgatatctacaaactgataaaaactttgctgccacctccaacatgcaatattaaaacattaaatattttaaaatcgctccaaaaataatgttaatccttgtttttttctgtaattttccaattctaaagacaatccactagtctggtgtacacttttgagctattctgtccaccacctattaagaagataatatcttaattcaaaggaggttcatacaaagagacagaaaattgactgcttaatgagtttgcaatgattcctttctaataaacttagcacatctgcattactggtcatatatatgaagagtgaagtttgaatttgttccttgaagcttatgtagaaatcagaaaagcagacattttttccagtgtcatatctgaacatacctgtgt

SEQ ID NO: 798824 - DNA, 680 bp, Homo sapiens
cactagttacactacttagaaagacataaatagaagtgactaaaaaaaaaaaacttaatgggagcttgatattttttttttttcacgtgccactatgacaacagtgcaatcaaattagaactcaggattaagaaactccctcaaaaccgcgtaactacatggaaactgaacaacctgctcctgaatgactactgggtaaacaacgaaatgaaggcagaaataaataagttctttgaaaccaatgagaacaaagacaccacataccagaatctcggagacacatttaaagcagtgtctaaagggaagtttatagcactaactgcccacaagagaaagcagaaaagatctaaaatcgacaccctaacatcacaattaaaagaactagagaagcaagagcaaacaaatggaaaagctagcagaagacaagaaatamgtaagataattaattttaaaataacctttagaaaagctaatgaatattgcactgatatctacaaactgataaaaactttgctgccacctccaacatgcaatattaaaacattaaatattttaaaatcgctccaaaaataatgttaatccttgtttttttctgtaattttccaattctaaagacaatccactagtctggtgtacacttttgagctattctgtccaccacctattaagaagataatatc

SEQ ID NO: 798825 - DNA, 619 bp, Homo sapiens
gccaacaagactgcaattaggagattatctgatctacgaacccatgtggtgcctggagaaaaagaaggaatcagttgagaaataagcccttaactgaaagggaggtaaagagacctttaatccttattcactctcctgtgactactcccaaataaaaataattccyggctgggcatggtggctcacacccataatcctagcactttgggacgctaaggcaggcagatcacgaggtcaggagtttgaaaccaggctgaccaacatggtgaaatcccatctctactaaaaatacaaaaattagctggatgtggtggtgcacacctgtaatcccagctactcaggaggctgaggcaggagaatcacttgaacccgagaggcggaggttgcagtgagctgaggtggcaccactgcactccaacctgggcaacagagcgagactctgtctcaaaaaataataataataataataataataataattcccaaacatgcaggtaataatagttactgctatctagtgagtatctacttacaatgtgccaggtaggtactggctccagcaaggtatatattattattcctgttctacagatgagaaggctgaggctcagagaggtta

SEQ ID NO: 798826 - DNA, 595 bp, Homo sapiens
tgatcagggtagtctcgaactcctgacctcaagtgatctgcccgcttcggcctccccaaatgcctggattacaggcatgagccactgcatccggccaaagataaaatcttgaaggccacaaatgatttattatggacagggatctttcataagattgacaagtttttttctcttctggaaccatggaggtcagaaagcagtgagataacatattctaagtgatgaaagagaaagctgacaatcatgaattctgtatctagcaaaactatccttccaaaatgaagaagaaatgaatacattcccagataaatataaactgatatatgtccctagcagtcctgtcttataaaaagtactaaagagtgtatttcacacwgaaatgagagcacattgtattagtcagcattctgcacagaaacagaaccagtagaagacctacgtgtgtgtgtgtgtgtgtaatttattatggaacatgatgtttgtaattaggaggctgagaagtctcaccatctgctctctataagctgaaagccagtggcgtaattcagtctgagtttgaagccctgagaaccaggcagccaatggtgtaactccc

SEQ ID NO: 798827 - DNA, 654 bp, Homo sapiens
tataataactctacatatttatggggtgaatagtgaggttttgatacatattttgtatagtgatcagatccaagtaattagcatatccattatctcaaacatttatcatttctttgtgttggtaacattcaatatcttctttctcattatttgaaactagacggataggtagatwgatagatagatagatagatagcacagtcatcctccagagctgtatatcattacaacttatatcttgtatctggctataattttgtaacctttaacaaatttctccctgtctccccttctcttggcaattcccagcctctagtatcccctactatactttttacttctatgagatccacatacttgcgcttctgcatatgaatacaaatatacagtgtttagctttctgttaacatgcttgtttcacttaacacaatgtcctccagttccattcagccttctacaaatgacataattccagcctttttatggctgaatagtattccatgatgtacatatcacgtttttaaaaatctattcatctgtcgttggacacataggttgactccatatcttgactattgtgagtagcactgcaatgaacatggggtgtgcaggtgtctctttgaaatattgacttcctttcctttacattagtgg

SEQ ID NO: 798828 - DNA, 654 bp, Homo sapiens
tataataactctacatatttatggggtgaatagtgaggttttgatacatattttgtatagtgatcagatccaagtaattagcatatccattatctcaaacatttatcatttctttgtgttggtaacattcaatatcttctttctcattatttgaaactagacggataggtagatagatagatagatagatagatagcacagtcatcctccagagctgtatatcattacaacttatatcttgtatctggctataattttgtawcctttaacaaatttctccctgtctccccttctcttggcaattcccagcctctagtatcccctactatactttttacttctatgagatccacatacttgcgcttctgcatatgaatacaaatatacagtgtttagctttctgttaacatgcttgtttcacttaacacaatgtcctccagttccattcagccttctacaaatgacataattccagcctttttatggctgaatagtattccatgatgtacatatcacgtttttaaaaatctattcatctgtcgttggacacataggttgactccatatcttgactattgtgagtagcactgcaatgaacatggggtgtgcaggtgtctctttgaaatattgacttcctttcctttacattagtgg

SEQ ID NO: 798829 - DNA, 654 bp, Homo sapiens
tataataactctacatatttatggggtgaatagtgaggttttgatacatattttgtatagtgatcagatccaagtaattagcatatccattatctcaaacatttatcatttctttgtgttggtaacattcaatatcttctttctcattatttgaaactagacggataggtagatagatagatagatagatagatagcacagtcatcctccagagctgtatatcattacaacttatatcttgtatctggctataattttgtaacctttaacaaatttctccctgtctccccttctcytggcaattcccagcctctagtatcccctactatactttttacttctatgagatccacatacttgcgcttctgcatatgaatacaaatatacagtgtttagctttctgttaacatgcttgtttcacttaacacaatgtcctccagttccattcagccttctacaaatgacataattccagcctttttatggctgaatagtattccatgatgtacatatcacgtttttaaaaatctattcatctgtcgttggacacataggttgactccatatcttgactattgtgagtagcactgcaatgaacatggggtgtgcaggtgtctctttgaaatattgacttcctttcctttacattagtgg

SEQ ID NO: 798830 - DNA, 627 bp, Homo sapiens
acatcctcacctactcactcataggcaggaacacatacagagtcccatagtgttcccaacatgcctttgataatgccgttgtcttcccctcactctaaatacacagcagtgacctcttaggcaagtcaaccaacatccctcttggcaayatccaagagggaagctcctttcctcactcactgtctcttcactacaaagctgtttccaacctcaaggagggacatggtgggggctgggcagcggggaggggagaaagtgccagggggctgcagtgcccaggaggtagaaggctttcccacccaaccccttccttctctcttcactcaggccccactggaggctccatctatcatttggaggcttagcctaggaggaggcagcggctgggagatggggaattagagcccagaggaaaggaaaataccccaggcttccattccaggttgattgagagcagttgattaatagataaacatataaataagtgggcctgcagccacagagttcctaaatcctaatcatttctgggaaacctttggaacagtggttctccaagcacagaacctggaccagcagctgcagcgtcactttggaactttttagaaatgcacattctcggccccatct

SEQ ID NO: 798831 - DNA, 616 bp, Homo sapiens
ctgatgacaagctttaaaaacccaggatacaatttgcttaggtctccaattgtaataaaaggatttttttcagatattgatctaattctcacataaatgaattaaacataaactgatccaaaatgtacctgtatttattattccctttgaatstagagcaatactgtcttattgggtgaataattaatctcacaatagcattacttgatttcattcttcttgttaccctcacaccataatttattaatttggaaatttgaacatcctaattggaaagaatcttcacctggaatactctaatactcaagaaaagaaaagagtatatttccttggttaattccactaggaatgaataaaaaagcaacagcaacaacaaaaaataaaacatagtagctaatgtaaattgtgcactcacaatctgcctgtcactgtcctgaaggatttccttgtattcactcacataatccttgtaacaaccttgtcattcttcccattttataaatgagaaattgaggtgtgaggatgagatgttaaatgatttactaggatcacaaaaatagtaaaaggcagaattttgattcaagatgagtcaggagactccacattctttagtctt

SEQ ID NO: 798832 - DNA, 616 bp, Homo sapiens
ctgatgacaagctttaaaaacccaggatacaatttgcttaggtctccaattgtaataaaaggatttttttcagatattgatctaattctcacataaatgaattaaacataaactgatccaaaatgtacctgtatttattattccctttgaatgtagagcaatactgtcttattgggtgaataattaatctcacaatagcattacttgatttcattcttcttgttaccctcacaccataatttattaatttggraatttgaacatcctaattggaaagaatcttcacctggaatactctaatactcaagaaaagaaaagagtatatttccttggttaattccactaggaatgaataaaaaagcaacagcaacaacaaaaaataaaacatagtagctaatgtaaattgtgcactcacaatctgcctgtcactgtcctgaaggatttccttgtattcactcacataatccttgtaacaaccttgtcattcttcccattttataaatgagaaattgaggtgtgaggatgagatgttaaatgatttactaggatcacaaaaatagtaaaaggcagaattttgattcaagatgagtcaggagactccacattctttagtctt

SEQ ID NO: 798833 - DNA, 616 bp, Homo sapiens
ctgatgacaagctttaaaaacccaggatacaatttgcttaggtctccaattgtaataaaaggatttttttcagatattgatctaattctcacataaatgaattaaacataaactgatccaaaatgtacctgtatttattattccctttgaatgtagagcaatactgtcttattgggtgaataattaatctcacaatagcattacttgatttcattcttcttgttaccctcacaccataatttattaatttggaaatttgaacatcctaattgkaaagaatcttcacctggaatactctaatactcaagaaaagaaaagagtatatttccttggttaattccactaggaatgaataaaaaagcaacagcaacaacaaaaaataaaacatagtagctaatgtaaattgtgcactcacaatctgcctgtcactgtcctgaaggatttccttgtattcactcacataatccttgtaacaaccttgtcattcttcccattttataaatgagaaattgaggtgtgaggatgagatgttaaatgatttactaggatcacaaaaatagtaaaaggcagaattttgattcaagatgagtcaggagactccacattctttagtctt

SEQ ID NO: 798834 - DNA, 616 bp, Homo sapiens
ctgatgacaagctttaaaaacccaggatacaatttgcttaggtctccaattgtaataaaaggatttttttcagatattgatctaattctcacataaatgaattaaacataaactgatccaaaatgtacctgtatttattattccctttgaatgtagagcaatactgtcttattgggtgaataattaatctcacaatagcattacttgatttcattcttcttgttaccctcacaccataatttattaatttggaaatttgaacatcctaattggaaagaatcttcacctggaatactctaatactcaagaaaagaaaagagtatatttccttggttaattccactagsaatgaataaaaaagcaacagcaacaacaaaaaataaaacatagtagctaatgtaaattgtgcactcacaatctgcctgtcactgtcctgaaggatttccttgtattcactcacataatccttgtaacaaccttgtcattcttcccattttataaatgagaaattgaggtgtgaggatgagatgttaaatgatttactaggatcacaaaaatagtaaaaggcagaattttgattcaagatgagtcaggagactccacattctttagtctt

SEQ ID NO: 798835 - DNA, 589 bp, Homo sapiens
attatgttaggaagcaatgttggagttgaaaacagaatagaactttctaacaattagttctagtgagtccttaatagaagttaaattttgctgagttatttataaaattcattcacatagagtgccttggtgagtctttaatatcattaaaatattattattcttatcattttaccaacagcatcctaaataaaattcagataatttaactactattactaaatgtatttctcttctcttttacagtagcacaactatttcaaaactttcctaaaaatgcacaagtagagattattttatatatgataatataccgtaaaatcaactctacaaatgtaagttattttctttgtgaaataaaaacatgactcatacagatttaataagctgataagatcacaatatggatgaatataytgataaggtcacaatatggatttatttcctctcagttacctcctgcctctgaagctaatgttctgtccatataatcccagtatcatataaaatagttttgtagggagaaatggttgacttaaattgacactagacttgatgatcttagagtactcattcacttaaagatatt

SEQ ID NO: 798836 - DNA, 603 bp, Homo sapiens
cttcaagcaattctcctgcctcagcctcccaagtagctgggataacaggtgcccaccaccatgcctggctaaattttttttattaattatttttaatcacaacctgtaaattatgtgttattgtgacatttaacaatatctctgctttcagagtgtatatttctaaagggccaacataaaagtattacaattgcattgaattataccaagcagtcagaagaaataaacccatctctgttattaattttagagyggcagcctaccatcagcatattttattgtgcatgaggacataggaagtgaagtccttccctccctgctttcatggatgtggggagatcatcttaatagccgatgacctcaaagactatgtggtagaatgttttatgaaatttgttgaactgatagtgtgtacggtacaaatagaatgaaaagaccaagaatgagcactggaaaaagaaaagaaaaaagtaaaacaatgagatttattcattctaaataggaccagttccaccttagagtggctttccaccttttttagtgtcacatttaagaggtaaagtgaagatgtgtgagattgagtttaattcaaaaatctgaaag

SEQ ID NO: 798837 - DNA, 628 bp, Homo sapiens
catgtaccagacaaaatttaattgcatgtttaatgttataaattatgtcatgtattttactctagaacacaaagtattacaaagtatgtgtatatcaacattattttatataatttagttgtatatgatttataattgaagatttatatatttttatgcattcactatttcttgaattctaaaaatagtaatcatatcaagaatattaataaatgtatattgaccatctttaatggaaaattactttggtaaacactacatatatatatagagagagagagagagagagagagagtctttacaacaaccctttaaatgatatattattatgatccttactttacaggtaaaaagagtgaaaattagaaaagaaaaataacttgctgagggccacacaamtagtaaataacagaacagaggcatccattcaggtctggctgagtgtaaaagatcatgctttactgccctagtcagttttaatgaaacataaaatgcattagttttgagttacttgacatttaaaagttagacgttaagtaaaatatcaagtgatatattagcataatgtaaatccattaattttcaaatttaaaaacactattggttgtgggttgttaaacatatctca

SEQ ID NO: 798838 - DNA, 656 bp, Homo sapiens
gttgagaaccacatcatacggtgttataatttttgctttatttatttatttattttttgagatagagtcttgccctgtcacccagtctggggtgcaatggtgcgatctcacgatctcggctcactgcaaccttcgcctcccgggttcaagtgattsttctccctcagcctcccgagtagctgggattacaggtgcatgccaccatgcccagctaattttttatatctttagtagaaatggggtttcaccatgttggccaggctggtctcaaactcccgacctcgtggtccgcctgccttggcctcccaaaatgctgggattataggcattagttaccacgcccggcctttttttttttttttttgagacgaagtctcactcttgtcgcccaggctggagagcaatggtgcgatctcggctcactgcaacctctgcctcccgggttcaagtgattctcctgcctcagcctcccaggtagctgggattacaggtgtgcaccactacgcccaactcatttttgtaattttagtagagacggggtttcaccatgttggccaggatggtcttgaagtcctgacctcaggtgatccgcccgcgttggcatcccaaagtacattttttactttaactgtcaaacataatttagaaaaatcaag

SEQ ID NO: 798839 - DNA, 656 bp, Homo sapiens
gttgagaaccacatcatacggtgttataatttttgctttatttatttatttattttttgagatagagtcttgccctgtcacccagtctggggtgcaatggtgcgatctcacgatctcggctcactgcaaccttcgcctcccgggttcaagtgattcttctccctcagcctcccgagtagctgggattacaggtgcatgccaccatgcccagctaattttttatatctttagtagaaatggggtttcaccatgttggccaggctggtctcaaactcccgacctcgtggtccgcctgccttggcctcccaaaatgctgggattataggcattagttaycacgcccggcctttttttttttttttttgagacgaagtctcactcttgtcgcccaggctggagagcaatggtgcgatctcggctcactgcaacctctgcctcccgggttcaagtgattctcctgcctcagcctcccaggtagctgggattacaggtgtgcaccactacgcccaactcatttttgtaattttagtagagacggggtttcaccatgttggccaggatggtcttgaagtcctgacctcaggtgatccgcccgcgttggcatcccaaagtacattttttactttaactgtcaaacataatttagaaaaatcaag

SEQ ID NO: 798840 - DNA, 482 bp, Homo sapiens
tctcaaaaaaaaaaaaaaaaaaaaatggagtcagactcattacagttcaccccgatgctcgactgctgactgaaaggtgccatgtttcatttgatttcatttgaacttgtttaagtgaaccattatggtgccctatgagaccttgagtctgaggccaataaaggaggtgaaagttctgttaaacatcttttccaagagcccagtattcattgtcaaaattaaaaatgtttgtgcttcaaaggacaccaggagcaagtgaagacacagcctacagaataaaaaaawttttttttgcaattcatatatccgatgatggacttgtctctagacaagtcctctaaagaactttttcagttcaataataaaaaaaaaatagccccatcaagaatgggtactattgcagagtaaaaagacaactgacagaatggtagaaaatatctgtaaatcatatttgattaggttgtaatatcctgaatatataa

SEQ ID NO: 798841 - DNA, 617 bp, Homo sapiens
tcatgaaatatttatttgattttttttccagtcacttaaaaatataaaaaccactcttagctcatgagctgtacaaaaataggtagtagataggatttggctcacaggctatagattaatgaccctggcattgaaagacttcagcatttaccaacccttaccgtcactctggtcctattcaatttcctcatctaactgatagaaaccagtctaggtgctgtataaaatttaggtaacttgggatcrtcaaagaataaagccaaaattaatgtcttggcttatttgatagtatatgatttattataacttcagatcaaaacaagtctcctggataggttaagcatcagggactgctgtccagggagaagtcaagtagctagaatgtatgttgatagaggcagagtctatatacccagtaggatagctgagtctccttcctcttggcaactaggcttatgcccttcgatgggagaccagataattcctctttgcagaagaaatgggccaaaagaaaagacttgatacaagcacttgttgattctacaatgaaaattcttcagtgctccattttattttgaaatgtgaaggtaaatactaaaacagctttaagtgtacac

SEQ ID NO: 798842 - DNA, 603 bp, Homo sapiens
tagttcccagatgagtcttgtgcatttagctaatgatatttgttgagtccactgaggaacaaatggtaaccagaaattagtcaggagtcacaattgtggaaatgaaattgtagtaccacactttgaagtgctcaggccaaaactcgaggcatcatatttacctctcctgtctctgatacccccataccatcagcaaatccgtttggctctaccattaaaatataaccccgaatctaaccccctgtgcactacaatcacttttaaccattctggtccaagccaccaaccccttgctggattattgcagccatctcttcactgtaggaagaactgacagtagaaggtaaaaatggygagtgacagatggctgcaatgatctctactttcttttacaattagatgcaagttgtatctaaactgctatcagaatatttgattgcaaaaaccagaaatataaccaaactacttaacgcaaagaaggaaagaatgtctcaagtttccataaagcataagattcgggaaccagaaagtcagaaatcaagattctactctcgacctccttgggtcactggtggtcattctctgtcatctctgtgtctgctc

SEQ ID NO: 798843 - DNA, 621 bp, Homo sapiens
caacttctgtgctccaggaagatctacttagtaatcctactgaaaatgaattaatttcttagttcaaatccccccaaaggaagctcctttattgaaacacaaattatcctcccaacagagtattgaaatgcttcaagtgccctgactttaccagaaagacatgtgctaacaggaactgagtagctattctgtgcataaatggaataaatggagcatctatttatctgtttatctgrtacctttcatgggtaccgacatctttattaaaatcatcctttagtctttagaaaaatagaagcttaaatgctctatgggtttcacattcctgaggactatgacatttaaaaacatagttagcattttttgctcaacttataataggtaacaaactacatccctactgtgtacaatagagtgtgtgtgtgtgtttgtgtgtgtgtgtgtgatgcaacattaataagtgcagaaatctcagtccaaaactctaaggttataacacttactggccttgggcaagttgtttaattttagggcgctttagccactagttggaaatcctaaaactaacacatctttcagagtgcaccttctctaattcagttttaaacagtactgggaaat

SEQ ID NO: 798844 - DNA, 636 bp, Homo sapiens
ttttattttttcctgggcttgatatgttttatgaggttctttcctatagtgctggcattcatatctggcataaccaaaattctgtctcttatttaatattccttcaaagctttaaacctaagtattttcttttcctttgtatgatgctggagcttgttgtgatttttaaaaaatatctggaaacatttccttccacatcagaaactcaagtttgcaagaaatccctttgggagccttgaaatgtttatttgaagggcagacaggagggactgacaacactggacctcctgtccacccagtccctgtgtgcatctgcgggagaagggatgaggttggagtgaggagactggcactgattcttcacccagaccctctgaagcccttacctgcctgacatcctctttcctctctagtgaggtacgacctcactgctctcattagtaaacaggctgctcttctccaagctttcactttcacagtgaacaggagacagccwctactgctgggtttcttgtacaggctgacttgaccttccaggaaaaatgtaaaaacaaaaaccaaaattgtaaagaggtttgggggaacacagggtggttcaataagacgggtgcctgtattagtccacggaataaattt

SEQ ID NO: 798845 - DNA, 619 bp, Homo sapiens
aacctaatactgtttcccaaatgaagagtttgacaaaagctgactaactagctgggctgaggccctaggctggcgggtagcagagtggggatgtgtctgtgtccctgtcctgacccccagggcctggctctgcactgccaggttacccagatcctgttacacaaaaaaagccaaaacaacttgcagaaaagaagtctgcagaaaagctccataacagtattccaataaatgaacagacttgtgacatctcttccctggggacagaayaagaggatacaggtttccatcccagcaagagggattctgcattaagtacaaagaaagctttccggctcggagaagtgagatgagcaacacaagaggagccaaaactgctgccctcgtgctgcattctcgctcgatcctgtcatttcctgagtgctgagaggtttcatatttggacgactgaccagtctgggaattgcttaagtcttgcccaaactccaggactctctggcatggtcctcctcctcctccccacatggcttcaccctcacagtctcttacgatctcaacttggtgccaccatcttatcagtgtctcctaggctcccaaaccgtcactcccatctgcttattct

SEQ ID NO: 798846 - DNA, 576 bp, Homo sapiens
taatcgctctgattcaatcattacacaatgtatgcatgtatcataacatcacattgtaccccacaagtatgtataattactatgtgtcagtcaaaaataaaagtttaaaaaatctagttctgattaatacctacttaattttcaaagtatacaaaaacttttcttgtatacacctctatttcttccccttcttttgtgctactattgtcaaacagagtacatttttatacatcgtacgttcttcaataccttcataattattgttttatatagttgycgttttaaatcatgtgaagtgtagagaagaggtacaaacaaaagtacattgatattggtcaggtgcagtagctcacgcctgtagttccagcactttgggaggctgaggcaagcaggtcacttgaggccaggagttccagaccagcctagccaacatggagaaatcctgtttctactaaaaatacaaaaaattgctgggcatggtggtgcttgcctgtcgtcttagctacttgggaggctgagccacgagaattgcttgaccccaggaggtggaggttgcagtgagctgagtccatgcca

SEQ ID NO: 798847 - DNA, 576 bp, Homo sapiens
taatcgctctgattcaatcattacacaatgtatgcatgtatcataacatcacattgtaccccacaagtatgtataattactatgtgtcagtcaaaaataaaagtttaaaaaatctagttctgattaatacctacttaattttcaaagtatacaaaaacttttcttgtatacacctctatttcttccccttcttttgtgctactattgtcaaacagagtacatttttatacatcgtacgttcttcaataccttcataattattgttttatatagttgtcgttttaaatcatgtgaagtgtagagaagaggtacaaacaaaagtacattgatattggtcaggtgcagtagctcacgcctgtarttccagcactttgggaggctgaggcaagcaggtcacttgaggccaggagttccagaccagcctagccaacatggagaaatcctgtttctactaaaaatacaaaaaattgctgggcatggtggtgcttgcctgtcgtcttagctacttgggaggctgagccacgagaattgcttgaccccaggaggtggaggttgcagtgagctgagtccatgcca

SEQ ID NO: 798848 - DNA, 653 bp, Homo sapiens
gttggaaaaaaagaaaaaagattatgtgcctcacactaaattccaatttttgtcctcagggtctctctttctatacaaaagcataagggttttgttgggtttgggtgaggatcactttcctgaaggggaacatttaatccctagctgtgtgtgtatttcaccatcgacttgttggacaatacgttcctgwgactgtaaaatagtctgtccccttgggacaccagttgtctccagatgggaagatttgaccttcatttcagcagggaattggaagaaatgtcattttcttgtggtctgttaaacaatgtgacatcttgttttgcattggccttcggctccaatccatcccatcctcctttaaatcattcactcttgaagatattgccttagaccttttgcttttccttctcaaattggtggtggataatgatactggaatgttgtcaaattccttctaggaataatatattcgtttttgacaattgaaagggtctcagtcctaacccaaagatcctgtacaatgaagcagcggctctctgaaagctcgcgcacccctgcaggaagaccatgcctctctggaaagcagctactctggtttaatcaggaataagcctgatgatagaagaatagaactgaagttgacacattctcat

SEQ ID NO: 798849 - DNA, 633 bp, Homo sapiens
aaaagaaataaagtcaccaggtaaaatcaaagctgaggatgtgggttcccactttgtagtcaaaagatgttaaaaattagccgtgctgctgttctgggaaaggttattaccaagtctagtcatttggaatatgtaacaagatttttccatttttaaattgctagctcccagtgttgtattcttacactcgattttaggaaagcatttacatgttaacagagctctgcactaatataatcactgcaatagagaatattcttcagttatcatagaatgcttgtctctcaaatagcttaattttttctcatgatttaaacagaagatatggatggcagaatagataacagatagcaaagcagaggtttgaataagaaagttgttgcttaatcagaatgtactatctttctaataaaaagtaaygctgatttagtgcctgataatgcacttgattgaataatatttttgaaagactgctgaatagattgattttcttacagactttgctcaaactcacaccttctctgtccctcaagggagggccttgcttcaaattactgaataactgaattgactttcactcttagagtctagaaactgaaacggaaccattcacctctgttgagaagactatct

SEQ ID NO: 798850 - DNA, 628 bp, Homo sapiens
caaagatatataaaaggtgaaagaattgatagtggatacccatatacccaccacccatgttctacaattaacattttactctacttgcttcaccatgtatctgttaacaactagtccttcaatccctctatccatcatattttttgctaggtttcaaaagcaagggggtcacataggtacacatccctctaaatacttcagcaagaatatcactaactggacccagcgcgatgcctcacgcctatatcccagctctytgggagactgaggcaggcggatggcttgagtgcaggagtttgagaccagcctgggcaacatggcaaaagcctgtctctattaaaaatataaaaattagctgggcatggttttgtgtacctgtggtcctagctacttgggaggctgaagtgggaggattcactgagcccaggagggcaaaggctgcagtgagctgtgatcacaccactgaactccagcctgggtgacagagccagactctgtctcaaaaaaaaaaaaaaaaaaaaaaaaatcactaattggagtttaacttttatttacagttttttattttttcccttgatgtgaaatttgcatacaacaaaatgccacacatcttgagtatgtcatttga

SEQ ID NO: 798851 - DNA, 628 bp, Homo sapiens
tgtatatacataaaaaacatatatatatttgttttttaaccacttgtctcatttaatgaatttattccttaaggccaccatgggaagttgggaggtaagtgttattattttcttgatttttcagatgagcaaatggggtctcagtaggattgagtagcttgcccaagtccgagggctagtaaatggcagagtaaagatttggttacaggtaggttcacaccagtgcctgcgtgcttcaacagtgtaacaaatatttattgagtgtgtattaggttctaactactttttacataatgctttatttaactctcactgtaaccttttgcagcaggtattttcatcctggttttatggatgggggtgtggctgctcaaagaggttaaaggatggacctacaayatcctatggctaagaaatggcagctccagaatttcctctcaggttcccctgaagccaaagagtgtctctccactgtgccctgtgttccagttcaggtccaggctggggaccatcaacagagtattgagatcctggcccacatcaggctagcgggtgtgctgccccccttgcttttgacagtatctgtcacaaccacaggcctccccttccaaagcagggcaacaaagtt

SEQ ID NO: 798852 - DNA, 494 bp, Homo sapiens
catctgacgaggctgcatccaggggtttttcttggtactgttgagaacgaggcacattttctctgctagaggttctggttaccatgaagcttgaagctattagcagtcaatgggggagactgaaaatggaacaatcagaaggaaaagaagagtgtagatatggagagaggcagattctcatgatgttgtttgtatacttggcttcagccattcttgaaagtcatcaaaagtatcagttaaataagcctacaaatacctcatctacccttttttattgttcttatgtccctggcaccccaaagaawactggctaactcagggttttaattgcctctactaatcctgtcgcctcttcttggacacctctgtggatgggaatctcatttcttttggatgtaggaagacctagaattaaaacagcactctttcccaagcacgggtttgtgtgcctctctcctgggaaggaattagttaccgcattcagttcatcacca

SEQ ID NO: 798853 - DNA, 414 bp, Homo sapiens
cttagaatctcagcttcactggtagctgtgaacgtgccttgggagagtcacagaactctgctgctcctgtctgtgatgggtgtcattgatcctacctgagatgttggtggaagggtgagtgcctcactgatcatgctgtgcgggtgcctagcagagtgcctggcacgttgtgggtgctcagaaagtgtgtctcgagtgagtggaaaagaaaaggtgccaattgttatagcaacaagaggggrctgtcccgccctcctgggtcagtttctttctccctctgcaatgtactcagaggtaagtaaccaaaggcttcctgatctctggggagggtttctggccctcaggcaaagctcagctcagagaggctgtcatgctcctcagggtgcacaacacagccggcaggcggtcagcttc

SEQ ID NO: 798854 - DNA, 646 bp, Homo sapiens
cccagcctatcgtgttacacgctggaggaggatgattcctaggtgttaagttttctatttgacccctcttctgggaattagtttcagagcattcctattcatttccaaggccagggttcctgtgtgagcctccagggaggtggtttctctgcccagagctggctaattgttcacccaccgtgtccattcggtgctcgtgaaaatcatgccaggctcttctacacagacactaagggtccatgtggggcagtcgcgtgaccttgagagccctcgcagcctgaggctgggggctgagaatggccttttatcattaactcagtgacagggacacggtgtggtggtggtggggccatgttaaaaagtaacttagaaatttcacataaggaatagatgcyagttttagaaaatttaaaaaaattcaagtaaacaagaagaaacaaaaaaatctacctgcccgctcttaatccacagataaccatgattaacattttagagtaattttccttagaatttctttggatctctctctataatatgtatatgtgtgtgtgtatatatattacttatataatatacatatttattacttatatatatacatatataatacttatataatgtgtgtatacacacacacacacataga

SEQ ID NO: 798855 - DNA, 615 bp, Homo sapiens
gcctttttttgttttgttttgttttgttttgtttttttgaggcaaagtctcgctctgtcgcccaagctggagttcagtggcatgatctccgctcactgcagcctccacctcccgggttcaagtgattgcccagctaatttttgtatttttagtagagacagggcttagccatgttggccaggctggtcttgaactcctggcctcaagggatccccccaccttggcctcctaaagtgctgggattacaggcataagccaccatgcctagccagtgtactgcctttttagcattccaaaatgtccctcttaatatctagtagtagtcttatgtctactttgactcatattaaaataactatatcggttttcttttggttttgtttccattatataccaaggtatgttgtacatttttaataatcagctctctaggaatgagaagcactgatttgtggcgtttgccrccttccatgatgtagccactcttaccaggactgatttcaagcttgtagcaggacattaactggctcacaatatttccaaaaatgtgatcactgatgctcatgagctagtgtgagtcggcttcaacacctcactgatggtatacttttttcc

SEQ ID NO: 798856 - DNA, 639 bp, Homo sapiens
tggtactaaaataaccatgtcttaaaatatcatttacttcaccttgctcactttcttcctgattgcaactctttgctgaagggaagtattcctgactttgctctctgtaaatcttcagagagccaatttgataagaacttttagaaatttccttcaaaatacacacccacacagttcyttttcaagttttttaactgacatgctttgtatatcatttaatcaccacattcagcatttacacattttccagggaattgcactagaactcaagaatgggcctatcacacatcagctagttttgattcactgtcttcctcactgcttcattctggcaggaatcttagagggtgaaggtgggtggatgacatgtcaaaaacacttattttcccatatgcaagtggtttagaagctcctatttaggattgttggagggaacacatgcgcagccttcttcctgcccaccctctccccaccattgggtcttcaactgataagccaggatatttcatggaattttatggggtctaagcaagaaataattacttttaataaactaaaatatggttgtgattggcatgttgatctagcattaaaaagctttgtgaatttagcttttgggatccaagctgtttccttact

SEQ ID NO: 798857 - DNA, 622 bp, Homo sapiens
tgatccctggtcatcctaataatgggatgagggaagtttccagcagatttcaggctgttcttaaagtttttgttggtcattttctcaatagtacatgaaatcaagatgcttatgagcatggaaatgtatttaaagtttttgcttgtgtcctcctcagtcagaatagaaaagtaactgaaatacttttacctttctgtccttgataaaatagtaaagaaaaccaaacaaacccaggcytgatgggaaaaatgattcctttattctagcaacttactttctgttggtatgggaaatgttattaatttctattactaaagttcatatcacaaaatgatatttaataataaccttggggtaaatcatgaattttttttctacgtgtgagtataaaagacaaaagttgaacagcatggaatctcattgccaaattattagtgaatgtatagttcaggtattctttgagacacacagtatcattaatttctgaattgtatttcagtgttattttttgtttgtgaccactaagcttctgtcttaatacaaagctgttaccttctacagaatttaagtctgaagatgtaaagagagaacaggccttgtgtaacagaagatactctttttt

SEQ ID NO: 798858 - DNA, 622 bp, Homo sapiens
tgatccctggtcatcctaataatgggatgagggaagtttccagcagatttcaggctgttcttaaagtttttgttggtcattttctcaatagtacatgaaatcaagatgcttatgagcatggaaatgtatttaaagtttttgcttgtgtcctcctcagtcagaatagaaaagtaactgaaatacttttacctttctgtccttgataaaatagtaaagaaaaccaaacaaacccaggcctgatgggaaaaatgattcctttattctagcaacttactttctgttggtatgggaaatgttattaatttctattactaaagttcatatcacaaaatgatatttaataataaccttggggtaaatcatgaattttttttctacgtgtgagtataaaagacaaaagttgaacagcatggaatctcattgccaaattattagtgaatgtatagttcaggtattctttgagacacacagtatcattaatttcygaattgtatttcagtgttattttttgtttgtgaccactaagcttctgtcttaatacaaagctgttaccttctacagaatttaagtctgaagatgtaaagagagaacaggccttgtgtaacagaagatactctttttt

SEQ ID NO: 798859 - DNA, 571 bp, Homo sapiens
caagtagttaaagatgtagttaaacatataacaaagctggcacatgtgcccatgcaggagtggcataggtttaatcctaggtccatgtttggaaaatggtttccagcagtaggaggatttaaaactcctataataaaaattataatagtaataggaacctgcttgttgcttccctgtgtgctgcgtttactccttcaagtaataaaaagttttgttactaccttagtccatcaaaatacttcagcacaagtgtactacatgaatcactatcgatctgtcttgtaagaagacatgggtagtgaggatgaaagtgagaactcccactaatgagtgaggttytcaaaggtgggggaataatggagactacacctcatattgtcttatgcccaatttctgcctccaaagaaagaagaagtaaaaactaaaaggcagaaatgaaatccacaggctgacagcccggcgccacaccctgggcctggttaaaaattgacccctgacctaaccggttatgttatctatagattctagacattgtatggaaaagcattgtagaaatcccgtcttgttctgt

SEQ ID NO: 798860 - DNA, 621 bp, Homo sapiens
tgtattgtggggatgtaactacagttccattgttttttatactattctttaaaatagtgtaattgatgcttcattcctttcttttttctgattctttgtcagtatttgttgaatatgaattttaaaagtttagttttgcttaaaattgtttatcctttgaaatttgacaaaatgtgtttttccctcttaaagtgaacttacagataaaagtgatgcttgaatttctcccacattacttttggtttattacgtttcctctttcaaaattcattcatagtcctatagtttcraaaaatccacttattggtagctcaaatgcataatttcaaatatatttctgggcaagtggttagccttaaaagactgcaaaacttgtactttatgtccttagagatggtatcctaaaataatatagccacaattctgttctaataatatttgcataatatagagttacaacatcattgtcttttttgaaaaatgaatagaaacttgtgaacagaaatcagacctcttattcacagataatgagatcaggggattcagttaccaggcctggtaaccggttgctctttctaaaattggacatgggaggacagcacaggggttgtcagtggaagt

SEQ ID NO: 798861 - DNA, 621 bp, Homo sapiens
tgtattgtggggatgtaactacagttccattgttttttatactattctttaaaatagtgtaattgatgcttcattcctttcttttttctgattctttgtcagtatttgttgaatatgaattttaaaagtttagttttgcttaaaattgtttatcctttgaaatttgacaaaatgtgtttttccctcttaaagtgaacttacagataaaagtgatgcttgaatttctcccacattacttttggtttattacgtttcctctttcaaaattcattcatagtcctatagtttcaaaaaatccacttattggtagctcaaatgcatartttcaaatatatttctgggcaagtggttagccttaaaagactgcaaaacttgtactttatgtccttagagatggtatcctaaaataatatagccacaattctgttctaataatatttgcataatatagagttacaacatcattgtcttttttgaaaaatgaatagaaacttgtgaacagaaatcagacctcttattcacagataatgagatcaggggattcagttaccaggcctggtaaccggttgctctttctaaaattggacatgggaggacagcacaggggttgtcagtggaagt

SEQ ID NO: 798862 - DNA, 621 bp, Homo sapiens
tgtattgtggggatgtaactacagttccattgttttttatactattctttaaaatagtgtaattgatgcttcattcctttcttttttctgattctttgtcagtatttgttgaatatgaattttaaaagtttagttttgcttaaaattgtttatcctttgaaatttgacaaaatgtgtttttccctcttaaagtgaacttacagataaaagtgatgcttgaatttctcccacattacttttggtttattacgtttcctctttcaaaattcattcatagtcctatagtttcaaaaaatccacttattggtagctcaaatgcataatttcaaatayatttctgggcaagtggttagccttaaaagactgcaaaacttgtactttatgtccttagagatggtatcctaaaataatatagccacaattctgttctaataatatttgcataatatagagttacaacatcattgtcttttttgaaaaatgaatagaaacttgtgaacagaaatcagacctcttattcacagataatgagatcaggggattcagttaccaggcctggtaaccggttgctctttctaaaattggacatgggaggacagcacaggggttgtcagtggaagt

SEQ ID NO: 798863 - DNA, 529 bp, Homo sapiens
ttcatttatgaagtaattaatcacaaataattattcatagtgctcctatatctactgaaagagagagagagagagcaacccaaacatgggctggagctaaagttcacaaataatctgaaactccaaattgtaaaataattttaaaagatgactggttgggtgagtatgcatattttagtgtaattatttaagccattgaggcaagaggtccacatatttagtgcctctacagccatgtgatcagagtagagatgctacctaaaatttctcacttcaatatcctgattttgtcaaaaagaaaatagttattactcgtcagtgagcacagttatgatagtttatactatgtaaacattcaaatgtaaagtttttagagccatygataggtcaggaatcattcttttgagatgaactgttataagctctccataacaactattatacatacaactgttatacataccaatatatacgaatatatatttgcacatatttttagaactattacgtatttatgttgggctttctc

SEQ ID NO: 798864 - DNA, 584 bp, Homo sapiens; identical to SEQ ID NO: 793421

SEQ ID NO: 798865 - DNA, 492 bp, Homo sapiens
taggaaagtttgagcagacaaaaagcatcaatctgaagttaaaaaaaatgcatcaacctggagaaatagtcatttttcaaatggcattgcttatcttgggacaacaaaagcatccttcacaaataaagtcagagagtggttttaatttaccatttaccaatagatttgtatgttcttttcaagagaaggggtgagatagacatagtcctsgttttcctcaatgcaggcttaggtacaaagagatgtcacttacccagagtccatatattgaagtgaaaatggaatttcatgaagcaaatatagttataggatggtaactctggacaaattttataaaagatgaactccaattgcttcatttcacagataacagctctgagcactagggagagagggagggattggcctagcatttgctttgtgtcttgagcagtcacatctattatggaagtactcactactcagctatactcactccctgagacaggatgg

SEQ ID NO: 798866 - DNA, 654 bp, Homo sapiens
tactataaaggcatataatataattatctaaccatgtcaggaagaccagagtaggtttcccaaggaggtgatggttgagttcctgaaatctgaaggataggggtgaattaatcaggaaatgagaggaagggaacactgttctaggacaagaaacaggatcagatttgcattttgaaaagaataccttgactgcattgtggagaacaaactgcggaaaggcagaatgcatgcacagattcagacaggaggctgtggccatagcctagaaaaagatgaaacatgctagggtagatttattatttttccaagcctctgccacccatctgtgggtggctaggctggacattcctttcttgattactctgtagctcaagatgaaggcatggatctgtgtgcactgaagtgaagtgggctttttgactccagaaactaggcacctgcagaataaaacaaaatatgcagactagtgggagtgaatttggaatactgactgagacgtgcagggtcrcggaaagacccagaagtgtgagattgactattattttgaagtagtatgcagaaattttcttgttttaatagattatttttattgatagcacaagctttacttcggcctggctttgcttctgagttggagcccaccttctctttcca

SEQ ID NO: 798867 - DNA, 572 bp, Homo sapiens
tatattttcagtcttctgcctttgtctgatctgtatcctaaacacatatttaaggggttgttttagtctttcaacaaactactagaaactttgttaaatttattttaataaaatagaaaaaattgcaaacaatcatagagcttaatgatcaacagatttagtaagcagatttagtatacatattttaatcatttcatctgagaaacaatagcacacatattttattacaaatatgttaaaaggattcttcaaatatgtagtccactgactgatgttttgtgacttagagatgcacagaaaacaatttgattataaaatattatgacccctactaattctttcatgctctrttttatgaaaagattggactttcttttttctgtatgcttttcaacaggttatagacatatatgttcacagtctagataccatatgtacactaagttcttcaggaagagaaaaaattttttttcttatctgcactttgttttctctcccactttaaaatctttgcataaaatcaccttgcagagtgatattctttactctctctcttcttgtctgagttgttg

SEQ ID NO: 798868 - DNA, 633 bp, Homo sapiens
ttatatcattgggtgaaaggattgtggagaaccttaaaatggataaatggatggtgctgacacctaaatctgcagttgaatcttaacatcactaaacttagaagtcctagacagtatgtgcctcctctatggtataataagaagtgcacatcacatccgatttatgcttatcacaaaaaaaattgaacttgaatttagtttaagcttctaaatctaattgccaatttataagaaatactggggaatatagaaacataacaagaaagtcaagtgacacaagaaagaagcaatcagccaaactcaaaatgtgagaaatttttcaggatgcacaacctatttatttaaaaagtaaatgatgtgaaagagtacaggggttgctacagattagaagaaacttaagagacaaaccaactaaatgtgtggatttcgtttgcatcctaactcaaagaaatcaacttgaaagctgttgggagwaaagctgagtgttgggagagaagctgaggcagggctagcatgtctgccagacttgctggctccttgtttctagcactgccgttatctcaagcagccatatgtttcttattcacttgatacactgtttcatttcaacccccatcctcaccacctgttttt

SEQ ID NO: 798869 - DNA, 642 bp, Homo sapiens
attcttacctatagacatatgaattcttttattggaggggcagttgtccccagttgtggacatccacccattcattttgtagcaggacgagctgcagacaaaacctctcagacactgagttgtagaaggaagggatttattcagctgggagcatctgccagctacggtctcaaaatccgagctccctgaatgcacaatttctgttccttttaagggctcacaacactaaagatttcacatgaaagggtcgtgattgatttgagcaagcaagaggtatgtgacagggactacatgcaccggtggtcagagagaaacagaacagggcagggagtttcacaatattcttctatacaatgtatggaatctatgaataacatcagtttctaagtcatgagttgatttttaactactgggtttaggccaggcagccccaggycttgtttcggccctggcgctgggctgcctgtctttggttttacttccttgttgttttttccttaaaacagatactgagtataaaacaatataaaacagtatgagagggtctttctcttccttcagttttaatattcttgatttataatgtatctgttctttggattctgctttgacttgattgtaacatcttactagttcacttac

SEQ ID NO: 798870 - DNA, 602 bp, Homo sapiens
tttacatctcctgcaatattagaaataatagcatcctctcccttcctggatattaagaacaatattacagggggtttgtacacttcttgggatattgagagtaatatcatcttctccacctctgaatattaagaacaatatctcctgtactccttctgcgatattgggttaaaaacatcctctcccacactggatattagaaacaatattaaagagcgggtgtacacaccctgcgatattgggaataatatgatttcttcacgcaccactcccccccagatattaggaacaatatcacaggaagtgtgtacaccccctttgatattgggagtaatatcttcctcttccttcctaaacattaggaacatacaagtggagcacacactctgcaatactgtgtgtaatatcctctttccttctggatatcaggrataatattacgaagaaagtgtacaccccctgtcattttggaagtaatgtcatcctcttaccctctggttattagcaacaatatcacagaaaagttgtacaccctttgcgatattgggagcaatattattttcttccccccggatattaggaacaacattgcaaaaagatgt

SEQ ID NO: 798871 - DNA, 631 bp, Homo sapiens
tgtattactttcaatatcgcagagagtgtacacctccctctgatattgttcctaatatccagggggctggcaaataagattactcccaatatcgcaggggctgtacatcttccctgtgatattgtgtctaatatccaggaagggagaaaatgctattactctcaatatcattgagagtgagggagtgtacacccttctgtgatattgcttctaatacccagttgagaagaggatgatattactcccamtatcgcagcaagtctacaacgtagctgtaatatggtttttaatattaaaaggtagagaggatgatattacttccaatacctcagggagtgtacacaccttccataatattgtttctaatactgtggcggaaagaggatgacattactaccaatatcacatattgtgatattgttcttaatttccagtgaaagaggatgatattactttcaatgtcacagtgggtttacactttcctgagatattgctcctaatacctgggggggggaaataaaatattactcctaatatcgcaggggctgtacaacccccccccccccgtgatactgtttctaatattcaggggggagaaaatgatgttactctctatatcacagggggtgta

SEQ ID NO: 798872 - DNA, 507 bp, Homo sapiens
tccaggtagaaagaggatgataatattcttaatatcgcagggggtgtacaaccttcctatgatgtttttcctaatatccagaaagggaataaatgatatcactcccaatatcgcaggggctggacactccccctgtgatattgtttctaatattcaggggaaaaagatgatattacttccaatgtcacagggtgtgtatgctcccactgtgatattgttcctaatatccagattagaagaggataatattgctcctaatatckcagggggtgtatgccatttctgtgatattgtttttaatattcagagggggagaggataatattacttccaatttcgcagggggtgtacaccccactgtgatattattcataatatccaggggggaagaagatgatactgctttcaatattgcagatagtgtacagcctccctgtgatattgttcctaatatccaggtggggagaggatgacattactcccattatcacagaaagtgtacacgtc

SEQ ID NO: 798873 - DNA, 507 bp, Homo sapiens
tccaggtagaaagaggatgataatattcttaatatcgcagggggtgtacaaccttcctatgatgtttttcctaatatccagaaagggaataaatgatatcactcccaatatcgcaggggctggacactccccctgtgatattgtttctaatattcaggggaaaaagatgatattacttccaatgtcacagggtgtgtatgctcccactgtgatattgttcctaatatccagattagaagaggataatattgctcctaatatcgcagggggtgtatgccatttctgtgatattgtttttaatattcaragggggagaggataatattacttccaatttcgcagggggtgtacaccccactgtgatattattcataatatccaggggggaagaagatgatactgctttcaatattgcagatagtgtacagcctccctgtgatattgttcctaatatccaggtggggagaggatgacattactcccattatcacagaaagtgtacacgtc

SEQ ID NO: 798874 - DNA, 446 bp, Homo sapiens
gtggggagaggatgacattactcccattatcacagaaagtgtacacgtcccctgttatattattcctaacattcaagaggagagacgatgatattactcccaatatcaaggggggtggtcaccacccctgtaatattttgttaaatatccagaagggagaagatgttattactcccaatatggcaaagggtgtacaccctctcagtaatattgttcctaacttccagggggagagaggatattactactttcaatrtcgcaaaaggagtacaacctttttgtgatactgtccctaatatccaggaagggacaaaatgatattactacaaatattatagagggtgtcaaacccccctgtgatattgttcctaatatccagggaaagagataatgatattactttcaatatcacagggcgggcatacagctccctgtgatattgttcc

SEQ ID NO: 798875 - DNA, 602 bp, Homo sapiens
atccaattgcccaggccaaaagccatggcattatccctaactctttgttttctaccctacatcaaattcattagcaaagcctttgagttagaccttgaaaatatatctagggttaaatcacttctcaccatttccattactatcatcttggttcaagccagtaacatctcacctaaattactgcaagtttccaaacrcatttttccactttcatccttgtcttcctaaaaggtcttttaaaatcagcagcaagtgtgatacccttgaaattaaagtcaaatcactcttcagctcaaagccccttattcatttagtagttattacctaccatgtgccggccagagggatactagcgtgtacaaaataaacaagtttcttgccttcctggagcttgcagtatatcaagaaagatggataataattacacaattagtccataataattctaacaaatgtcataagggataagcacaaggaacaatgagaatatataaaaaaggatatatattaaaagaatctgtaataaaatactctagaagaaatgctactaaaattaaaatctgaaggatgggtagcacagtgttggagctatgagtatataa

SEQ ID NO: 798876 - DNA, 593 bp, Homo sapiens
atgatcaatcaggtgcaccgctcaaagttctggccactgggaagatttttcaccttcatccttcagggatgtgtcagaaaagggctctagtgctgcagctgtccacttttaagcagtgcctgcatatcatgcagaaatatctataaagcaggtctgatctaagggaatgccccataaagccataggtgcaggcttagagagaaaactcagggtarcaggaatgagaaacgtggacatttggaccacttcttcatggaattcatttgtgtcgttagggcctgcttgggcccagtcatatatataccccttccatttgatgatggagtgcttctgtgattgcccaaatttatgacttcatgggtcaaaaaacacacaggtcatgatgggcagctccagtcccatggtaacttggtggcccatggttaagtactcagtctctactaagacctagtgttaggcaaatactgtttttcaaaaggagagtatctgtggaggatggttgggctttgcttcaaaattctagtggtctgtgctgcaattcaactatagagatctgccaaagaattcatatgtcatccttatctgcctttgat

SEQ ID NO: 798877 - DNA, 614 bp, Homo sapiens
atattttatgtaccatagtgctttataaagctgctctgtagataattatttgacatgcactattgttttaacagacttacctaatcttaggcactgtcgcattaaacctccagaagacatgtttttctcagcttcaatctcactaaaatttagagagcttgcaaacacaagtacatcaaccatagccatcagccggctgaggaaagttactgctgtctcagctgacatgccttgtgtcacttcaatattttccaattccgtctttaaaaaagtagaagatttaagtcttgtttaaaatttggaaatttggaaatataatacatatacatacatactacaagtgaacataaatttagtatatttaccatattttataaataaaataaatgttcaactaattccatatatcaccagagctggttaccaaattyggttactttacctatcaattatccttgaataaaggaaaagcccattttaaaatcaacattagttttaaatgtctttagttataaaaatgacatcctaaacttaagatcatttcacaaagatatttagacagaaccacatatatgtacttatactagttttgttttgtaatttataaagatttt

SEQ ID NO: 798878 - DNA, 620 bp, Homo sapiens; identical to SEQ ID NO: 785452

SEQ ID NO: 798879 - DNA, 620 bp, Homo sapiens; identical to SEQ ID NO: 785453

SEQ ID NO: 798880 - DNA, 601 bp, Homo sapiens
tctctaaatacagttatatccccagccaaaggaaattcctctgtccacttttcttctcatactagatgcaaaacttctcttaagaacatcatatgactgtaaaacaaaatatttattttcaaggtatatgtgatgtttaattttatgtgtcaacttgacttgattaagggctgcccacatagctggtaaaaccttatttctggttgcacgtggtggctcatgcctgtaatcccagcactttgggaggcccaaggtgggcagatcacttgaggccaggagtttgagaccagcctggccaacatgacgaaactctgtctctactaaaaatacaaaaattagccaggcrtcatggtgcatgcctgtaatcccagctactcggtgcctgaggcacgagaattgcttgaacctaggtggcagaggttgcagtgagccgagattgtgccactgaaccctagcctgggcaacagagcaagtctgtgtctcaaaacaaacaaacaaataaaaaaaccaaagcccttatttctgggtgtgtctgtgagggtgtttgctgaagatattagcgcttgaattggtaaactgagtaaagaagatcctccctcac

SEQ ID NO: 798881 - DNA, 524 bp, Homo sapiens
cctatttgaatctgtaaagacccttaagagcactttgaatttgttcatctataagctgttaacccaaattcatgtcccaggtttttaagagaataagcaatagaatataggcgtttccaaagaggaagacgtacagaagcagataggtgtatagttcattcattcacagataggcactaggttagatccagtagttggcgtgcatgyatcaacatgttaatcggaattaaaggctgctacatttaggcttggctagatcatctataaattgaaacccaaaagagaattgttaactaggaaagtagctgtccaggttccttaaagtttaaatacagggatccaactagtattctccaaaatttttcaggaatatcagactttactgctgtggaacacttggctgttgtaagaggagtgtttcatctctcataaggatgtaatgaaaggaaattaggagccagtgggagagtgcagggacttaggtgtaaatcataggtgaatctttttttttttttcagatggag

SEQ ID NO: 798882 - DNA, 654 bp, Homo sapiens
attgccctggtgttagagaaaccagtgtagagatcagtagtccaggcaaggtataatgggtgtttgaattaaagtataataaggtataatcagagaacatgctaaagagatatttgttatagtttggttagtcataaatttaatgacctacaatggaacctcttaggtatcccatcataacaaaaataaaatgcagtattctcctcatgccctatgtagtcctgcatggtatggtcactgcctgcttcccagcctcatctctgaataatgtctcctgctcccctttctactgagcaccaaccacagygatcttctcacctctaaacacaaggtcattgcctcctcagagactttgtacttgctgttcctttagcctaaatgctctttaggtgtatcttctcatcatttaggtttaagttcagataccaactctttggctccttctcatcagttaggtttcagttcagataccaactctttggagagctctttcctaacaatgctcctgcccagccttgctatcacattatcgtttctgtttagcatgtatcacaatctaagggtatctgtttactattttatgtaatccattactaccactacaatgtaaattttataagagtaccttaactgtaatattctccagtgaaatcc

SEQ ID NO: 798883 - DNA, 505 bp, Homo sapiens
aagcctgagacctgtgagggatacttcagggaaatgttatcatctcagagctttaaaataatcatctcccctgggttctccgtggtttggaattcttatgaagcttaatgcgtgaaaaggacaacagttttcaaaatgttggcagtttcctacatttgaccttttaacatttakaaacattggtcaaggtatgtttaaattctttaaattgtagctgacctttggagaaataaacataaattaaggttattacctacatggaatgcttatatggaactattagcaaagtaaaagtagtacgttaagtacaccatggaaaaatgcttttagagactgaaatcattatagtgatagagtcactgagctggaaagaaacttgggaagccatctagttcacccttctgtctgaggccatgtcacatttgaaccataacaagagatttgaaatcttttttttttttttttgggagattcaacaacttctcttggtatctagttctagtaa

SEQ ID NO: 798884 - DNA, 505 bp, Homo sapiens
aagcctgagacctgtgagggatacttcagggaaatgttatcatctcagagctttaaaataatcatctcccctgggttctccgtggtttggaattcttatgaagcttaatgcgtgaaaaggacaacagttttcaaaatgttggcagtttcctacatttgaccttttaacatttagaaacattggtcaaggtatgtttaaattctttaaattgtagctgacctttggagaaataaacataaattaaggttattacctacatggaatgcttatatggaactattagcaaagtaaaagtagtacgttaagtacaccatggaaaaatgcttttagagactgaaatcattayagtgatagagtcactgagctggaaagaaacttgggaagccatctagttcacccttctgtctgaggccatgtcacatttgaaccataacaagagatttgaaatcttttttttttttttttgggagattcaacaacttctcttggtatctagttctagtaa

SEQ ID NO: 798885 - DNA, 618 bp, Homo sapiens
gttcaccagcaaggagatgacactaagccattcatgaggaatctgcccccatgatccaatacctctcatcaggctccacctccgacattggggattacatttcaacatgagatttagaggggacacacatccaaaccatatcaccaatgaatataatctctgactaaaaatgtaaaataaatacaaagccyattgtatttccctttttcatttgactcccagaaactcttagctaaaccttaaactcaattaaggttaattgttattctgtttgctttatagtcatttccccaccatacttcattatttcactgttaatatgttaacagtacatttcttattgttaacatcactgttaatccacttcttctattttaatatgggactattatatactgttcttatcaaaatcagtcttaaaacattttttaaatatgtgaaaagaaaaaaatagtcttgagagaagaaaatgagagaaaaaataacttccccataaagaagtataaaattccacaaaggttcatagtttaatatttcattggaaacatgagaaatacctcaataagttgattagagatggctcttgagatatgatttggcagataaagagtagtagat

SEQ ID NO: 798886 - DNA, 627 bp, Homo sapiens
ccattttgaacgaaaaaagtagaagattcagttttttgttttatttgccagcaagaaaccacttaaggcttgcatttctataattttctctatttctacttaactttacaagtaccttacaattagttaactatttttctgtttcatatataagatcttacatttttagttacgtcttattaagtcatcttatctcacattttaggaagttttgtatattttgcctgactgaaattttgcagaaaactactagtttgtagtggaacaggcaagggttttgaagtcaggcrtgagcagattctactagtggctctatcacttgatagctatgtgatctttgaccagaggggtaattcctgtaaaataatgctattttggatggctttgaaggttcattgtgacctcaaatacttgttgagtgcttactctgtgacagccactctaaatgttttgtacatgataacatttattctttattgcaattctatgcagtaacctcccttgacattcttctttcagagatgaggcagctcagactgaggttttaagcaactgcccaaaattatacagatagcaattggcaaatccaaaatgttaaacccggtctagctccaaataaatgttata

SEQ ID NO: 798887 - DNA, 620 bp, Homo sapiens
attgttctgctcaattaataaatactttgatgtattagagcttgaattattgtttgaatcatatatttttaaataactcttctgataaccgaaagctctaatcttgcttgaaacacacttagaaacattctaaataacttaattcagtgtttttagcttttcttggtttgtgatttgtcacaaacctggtgaaggaagatcatttatcttcagtatatatgaattaaaatctcatgttgagtgaaaaattctcaagtctagccaccatttatactaatttagaattccacatgttatttaaaaagtaagaatcyatgtatttaaaaacaatttatttagatcatattgatttttaaagaatgtttaaacaagtgttctgacaataatttacttaattattaaatatttccatgcttaattcacgtataatattatattttatggagaaaactgagagaaaatagcagaaattttcacacggtagaataataaactatccattttggaggaattgagtctgaacacctaatttatgcctaaagctcagtaacaatccttctctgtcctttaaatatttgcagtgatgggcaaaccattgcctcttggggaagactatttca

SEQ ID NO: 798888 - DNA, 620 bp, Homo sapiens
attgttctgctcaattaataaatactttgatgtattagagcttgaattattgtttgaatcatatatttttaaataactcttctgataaccgaaagctctaatcttgcttgaaacacacttagaaacattctaaataacttaattcagtgtttttagcttttcttggtttgtgatttgtcacaaacctggtgaaggaagatcatttatcttcagtatatatgaattaaaatctcatgttgagtgaaaaattctcaagtctagccaccatttatactaatttagaattccacatgttatttaaaaagtaagaatccatgtatttaaaaacaatttatttagatcatattgatttttaaagaatgtttaaacaagtgttctgacaataatttacttaattattaaatatttccatgcttaattcacgtataatattatattttatggagaaaactgagrgaaaatagcagaaattttcacacggtagaataataaactatccattttggaggaattgagtctgaacacctaatttatgcctaaagctcagtaacaatccttctctgtcctttaaatatttgcagtgatgggcaaaccattgcctcttggggaagactatttca

SEQ ID NO: 798889 - DNA, 646 bp, Homo sapiens
ataaatgtatatttttgtgtgcttattattttattttgttttaaatgaaggaacaaagaagagtaaaacaactgtttacttctatattttctggcaaagtttcttaaaattcttaaaattacttttggtttccccctttttaaaactayagtattaaattatcttgagattgctaaaatattaacattcatattacattaataacacctcatcttctccttcaagaagcctacttctctacaaatatctatctattcctcatatagatttcaagttccctctcacaccatctttttcattccttttttctactacttctgacaggaccaagggtataaccttctattaccatacatggttcctctgaaaactctttgatggcttactcttctttgacttatcggacttaacttggtgcctcacatgtagtgtgagtttttaataaatgtttggagaatctcactaatatggagaagaaatatgagagtgtttcatgtattaaaacaaaatgaagttttaaagccatatttttgtatcaacatcatattaaaatgttgtagaaattgatctaatggccattattttccttttgcaggcaactaagacaatcatggggatcacactgtgttccttccagaaatccaga

SEQ ID NO: 798890 - DNA, 646 bp, Homo sapiens
ataaatgtatatttttgtgtgcttattattttattttgttttaaatgaaggaacaaagaagagtaaaacaactgtttacttctatattttctggcaaagtttcttaaaattcttaaaattacttttggtttccccctttttaaaactacagtattaaattatcttgagattgctaaaatattaacattcatattacattaataacacctcatcttctccttcaagaagcctacttctctayaaatatctatctattcctcatatagatttcaagttccctctcacaccatctttttcattccttttttctactacttctgacaggaccaagggtataaccttctattaccatacatggttcctctgaaaactctttgatggcttactcttctttgacttatcggacttaacttggtgcctcacatgtagtgtgagtttttaataaatgtttggagaatctcactaatatggagaagaaatatgagagtgtttcatgtattaaaacaaaatgaagttttaaagccatatttttgtatcaacatcatattaaaatgttgtagaaattgatctaatggccattattttccttttgcaggcaactaagacaatcatggggatcacactgtgttccttccagaaatccaga

SEQ ID NO: 798891 - DNA, 646 bp, Homo sapiens
ataaatgtatatttttgtgtgcttattattttattttgttttaaatgaaggaacaaagaagagtaaaacaactgtttacttctatattttctggcaaagtttcttaaaattcttaaaattacttttggtttccccctttttaaaactacagtattaaattatcttgagattgctaaaatattaacattcatattacattaataacacctcatcttctccttcaagaagcctacttctctacaaatatctatctattcctcatatagatttcaagttccctctcacaccatctttttcattccttttttctactacttctgacaggaccaagggtataaccttctattaccatacatggttcctctgaaaactctttgatggcttactcttctttgacttatcggacttaacttggtgcctcacatgtagtgtgagtttttaataaatgtttggagaatctcactaatatggagaagaaatatgagagtgtytcatgtattaaaacaaaatgaagttttaaagccatatttttgtatcaacatcatattaaaatgttgtagaaattgatctaatggccattattttccttttgcaggcaactaagacaatcatggggatcacactgtgttccttccagaaatccaga

SEQ ID NO: 798892 - DNA, 609 bp, Homo sapiens
ggtgaacttgaagacaggctatttgaaaatacatggccagagaagacaaaagaataagaattttaaaaaatgaagcaatgaagcatgtctataagatctagaatatagcctcaaagggagaaaccaaagagttattggcctaaaagaagaggtaaaaaaaagagrtaggtggctcacccctgtaattccagcactctgggaggccgaggctggcggatcacctgaggtcaggagtttgagaccagcctggccagcatggtgaaaccccatctgtactaaaaatacaaaaattagctgagcatggtggtacactcctgtaatcccagctactcaggaggctgagacaggataattgcttgaacccaggagacggaagttgcagtgagctgagatcgcgccactgcactcaattctgggcaacagagtgagaatccatcaaaaaaaagagagagagagagatagggtagaaagtttattttaaaagataataacagagaatttcccaaatctagagaaatacatcaatattcaactacaggaagattctagaacaccagacagatttaacccaaagattcctttaaggcatttaatcaaaatcccaaagtg

SEQ ID NO: 798893 - DNA, 609 bp, Homo sapiens
ggtgaacttgaagacaggctatttgaaaatacatggccagagaagacaaaagaataagaattttaaaaaatgaagcaatgaagcatgtctataagatctagaatatagcctcaaagggagaaaccaaagagttattggcctaaaagaagaggtaaaaaaaagagataggtggctcacccctgtaattccagcactctgggaggccgaggctggcggatcacctgaggtcaggagtttgagaccagcctggccagcatggtgaaaccccatctgtactaaaaatacaaaaattagytgagcatggtggtacactcctgtaatcccagctactcaggaggctgagacaggataattgcttgaacccaggagacggaagttgcagtgagctgagatcgcgccactgcactcaattctgggcaacagagtgagaatccatcaaaaaaaagagagagagagagatagggtagaaagtttattttaaaagataataacagagaatttcccaaatctagagaaatacatcaatattcaactacaggaagattctagaacaccagacagatttaacccaaagattcctttaaggcatttaatcaaaatcccaaagtg

SEQ ID NO: 798894 - DNA, 609 bp, Homo sapiens
ggtgaacttgaagacaggctatttgaaaatacatggccagagaagacaaaagaataagaattttaaaaaatgaagcaatgaagcatgtctataagatctagaatatagcctcaaagggagaaaccaaagagttattggcctaaaagaagaggtaaaaaaaagagataggtggctcacccctgtaattccagcactctgggaggccgaggctggcggatcacctgaggtcaggagtttgagaccagcctggccagcatggtgaaaccccatctgtactaaaaatacaaaaattagctgagcatggtggtacactcctgtaatcccagctactcaggaggctgagacaggataattgcttgaacccaggagacggaagttgcagtgagctgagatcgcrccactgcactcaattctgggcaacagagtgagaatccatcaaaaaaaagagagagagagagatagggtagaaagtttattttaaaagataataacagagaatttcccaaatctagagaaatacatcaatattcaactacaggaagattctagaacaccagacagatttaacccaaagattcctttaaggcatttaatcaaaatcccaaagtg

SEQ ID NO: 798895 - DNA, 587 bp, Homo sapiens
tagaaagtttattttaaaagataataacagagaatttcccaaatctagagaaatacatcaatattcaactacaggaagattctagaacaccagacagatttaacccaaagattcctttaaggcatttaatcaaaatcccaaagtgcaaggataaagaaaggatcctaaaagcagcaacagaacaaatggacataatagatatttacagaacattgtatccaacagctgcagaatacacattcttttcctcaacacatggatcattctcaaaaatagacaatatgttaggtcacaaaacaagtcttaaaacattcaaaataactaaaataattttaagcatcttttctgaccacaatggactaaaactagaaattattcatgaaaggagttttagaaactgtactattacatggaaattaacatgatcctgaataaccagwgggtcaatgaagaaattaaaaaggaaattggaaaatttcttggaaaaaatgataatggaaatacaacataccaaaatttagggatacagcaaaaccagtactaagaggaaaatgtatacctataagtgcctacatcaaataaagaag

SEQ ID NO: 798896 - DNA, 577 bp, Homo sapiens
aaaaaattggcaaataatagtatgaatctcagaaagcctaatgatatatattcagagacataaggaaacagtgaggcatggagtggttaggaaaatttcgtgaaatggaggaaatatagcctgacccttgaaggatacattgaatttcccaaagtatggggaaagggagaaatatgtaaggctaaatagtattagtcaaggtagaatgaatgtgttgcattttataaggatgtacaggtgaggtagggaggaaatgtgaattaaggagggaaagtggtgttgggattaagtaatcttactataattaatatgtccaaataattcaaccaacatgaaagcctgggattactgcctgttgtctactgggaaattcccagactgatagtgacagragagactttccatctcatcaagcccttctcttcaataaataatagggctcaaaggtcacctctttcaagcaatctctttgaagacaaaatctatagtgacagaagcaaaaatattcattgataaaccaactacaaaacgacctagcacatgtcatgtgtcaagcactagtaggctctgaagatac

SEQ ID NO: 798897 - DNA, 532 bp, Homo sapiens
ggccacaattaattccatcaagaagtaactatcattttactgcaaatatttcacaactttttaaactttacgcttttaactcctactgaccagcctcccttctttctacctctaactaaagtgaataatttaagatttacattccatcggccaggcgcggtggctcaagcctgtaatcccagaactttgggaggccaaggcggatggatcacgaggtcaggagatcgagaccatcctggctaacayggtgagaccctgtctctactaaaaatacaaaaaaattatctggacgtggtggcacgtgcctatagtcccagctacttgggaggctgaggcaggagaatggcttgaacctgggaggcggaggttgcagtgagccgagatcgcgccactgcactccagcctgggcatcagaccaagactccatctcaaaaaaaaagacttatattccatcattccacagtagcttagtgtaactggaccacaatgtaagggttggggtgggatgagaaatcggacaagtcagcagagg

SEQ ID NO: 798898 - DNA, 632 bp, Homo sapiens
tgaaaggtgtctggcaaaaacccatgtgcactcaagtagagttcataagattctggactaagcaaccccctgggctaagttttatcttggctacttttgtagagaggaactcaatggaggggaggggcacacacacattatttaatactgaaacaaattaaaattattattgtctcctccatctaataacataaacttcagcatttccttccagagcctattgttaacattgttcatattctccaagctgaggaagtatgcagtgagcccartggggattattggactatttttcaaaaaggtagtagttatgtaacacagacttgctctggggcagtgctcagatcactggctcaaaattgttcctggctcattatcatgtaataaaaagaagttattattactgttcctagtctgtgtgtatgcagaagtcccacgcagagtgcagtggtaacgggcatggggcagaggaatcccttgggtttccagttaaggccctaattgggtctattttaaaggctgcctgtaacaaggaggagtttgtgcctttgatcatgactccctagatgcctggcttcctgttgcactcaggagcttcccccagcacagtcccagcagtatgtcctgcacac

SEQ ID NO: 798899 - DNA, 584 bp, Homo sapiens
cggaaaatttgtaattagaatttttcaaagcattttctcccaaaaaaaaaaaaaaaaagaaaaggaaaaaaaagggagaattgtggacccagactcaggactcttttccttctgtctttggaattaccgggggaactttggtttttgtcctaatatatcagaaataaaatgaactttgtgatatattttcaaagctcccaggtaaagacaaaaaagagaaactttttcattttgatgctgtaaaacattattcagttgactactaaaacatacttaatcgtggtacatttataaagccatgaaatatttacaatccaatgcctcaggcagatgtcatatagtatatttgttccacagttcagtaaattatggatacaaacactcaaacagatgctttcaagcataagtgaaaacaaacctttccttaaaagttagtttttttatttggaaattattattttttattctgaaaaatgatgttttctagacacttctaaagtgacataaatgarcttagcctgtaaaattatctttcagccaatagtcagtgtcttggttctatcatttcttttttttttttcttt

SEQ ID NO: 798900 - DNA, 636 bp, Homo sapiens
cccctttatccaaaattatgcaatatatatttcccaagaagaaggacattctcttacattatcacggtataattttcaaaatcaggaaatctaacatgataaatatttttaaaaatttttcaagtttcggggtacacatgaagaatatgcaagtttgatacataggtaaatatctttcatggtggtttactgcacctatcaacccatcacctagatattaagcccggcatacgtcagctctttttcctaatgcccttccccgccaccccctaccctcctccgacaggcctgtgtgygttgttctcctccctatgtccctgtgttctgattgttcagctcccacatataagtgagaacatgtagtgtttggttttctgttcctgtgttagtttgctgaggataatggctgtcagtttcatccacatccctgcaaaggatatgatcttgtttctttttattgctgcataatattccatggtgtttatgtaccatattttctttatctagtctctcattgatgggcatttcggttaatccatgtcatttctattgtaaacagtgcttcaaagaacatacgtgtatatgtgtctttattataggatgatttatattcctttgcatatatacccagtaata

SEQ ID NO: 798901 - DNA, 656 bp, Homo sapiens
ttttaatcctctttttgaataggccaccactagagagctggtgcagatggaacagtcaggattaatttatttttctcagaagaaacaacaggttaaaattgtgtgtgtgcatgtgtgtggtatacatacatatagaggtagagacagagagggagaaggagaggagggacagaatgagctagagagaaggacaatcggcagtcacacagggtgtatagacagcatctcttctttcaacgcatttcaacatacatttattcaccctctaaaatatgtgtaggataatgatgaatatgtcactctctatcctgagagctcatggtctaatgaagaaaagatatgtaacttttagtaattctaaggccagcctttggtaatccagggtgctctgtgaaaagtctcctaatraaggtgaatattccctggtacccgtgatgatggagaaatagtagtcaatgcatgctgcctggaggatccttgggaatgtggaatttaatgaccttgaattctaaagcaaggttttttcccctaagagtaaggctgtaaaggcctcaaaagctgtggttctatgcttaccacatgtcaagtaaaaacttttatggagttcttatttgcaatgatatttcataatagctcgtgtgaagatttatcaagat

SEQ ID NO: 798902 - DNA, 620 bp, Homo sapiens
tatttatttgacagagtctcgctttgccacccagtctggagtgcagcggtgcaatcccagctcactgcaacctccgccttctgggctcaagcaattctcctgccttagcctcctgagtagctgcgactgcaggctcgtgccaccgcgcccagctaattttgtaatttttgtagagacaggatttccccatgttgcccaggacagtctccagctcctgagctcaggtgacccgcctgcctyggcctcccaaagttctgggattactggcctgagccaccgtccctggccttcagtcagggttctgtctgttgactctccaacctcgaaagcagcagcggtattgtttctgagaaagtttgtttgcattgcttaggaaccgtaacaagcctctcttcataaggataggaagaagcccaagggcattagtgggaggcggataagggagcctaacttcccagtttggctatcattctttgcaaaatcacttctaatctccaaagaggagggggtttctcctctttcaagttgcttagaagggcacccacagatctgcttatttctcacagcatctctctgcccttgcaatctttcctctccacctcaccatccacttttagtgc

SEQ ID NO: 798903 - DNA, 583 bp, Homo sapiens
ctcccggagcctggtttttctcatttgtaaaatgagatgatagaacctaccttgcactgctatgaggatttgaaatgcttgtttcaatacatggcactaaggagacatgttattattattattatattcataatacatcaaatgccaagtaatattttaatgaaaaccttgataggtgtctgatttttttttctcaacattgtctcatcaaggcaccaccacttccataagaacaatgaatctgagagattttcaccyattcaccacaattgttcttttttctctctgaaatactttgtcttttgaaacactatcatgtctctgttctataatgaattcagagaaaagttatgaggataaaggagttaacatccataacgcacgctgagctggcagataagagcatcaaaatgagttccagaaagaattctaattaactaaatttattatcaccttatctctcaaagccccttcttgcccccaacctcaagttgaaagttttgtggtcattccccaaaggacacatactccttcgaaccaggaatcagctggcactggttattgtcggtaccacaaaagtact

SEQ ID NO: 798904 - DNA, 583 bp, Homo sapiens
ctcccggagcctggtttttctcatttgtaaaatgagatgatagaacctaccttgcactgctatgaggatttgaaatgcttgtttcaatacatggcactaaggagacatgttattattattattatattcataatacatcaaatgccaagtaatattttaatgaaaaccttgataggtgtctgatttttttttctcaacattgtctcatcaaggcaccaccacttccataagaacaatgaatctgagagattttcacccattcaccacaattgttcttttttctctctgaaatactttgtcttttgaaayactatcatgtctctgttctataatgaattcagagaaaagttatgaggataaaggagttaacatccataacgcacgctgagctggcagataagagcatcaaaatgagttccagaaagaattctaattaactaaatttattatcaccttatctctcaaagccccttcttgcccccaacctcaagttgaaagttttgtggtcattccccaaaggacacatactccttcgaaccaggaatcagctggcactggttattgtcggtaccacaaaagtact

SEQ ID NO: 798905 - DNA, 435 bp, Homo sapiens
atttaaagatgacacatcttataaggggggatgagagcaataaaaccgctcccagttattacagtgaacctgccagaagaccagtctttgatgcctatcagcagtctctgtctatagaagctgttccagctttcatccagccttctgggtccacttctccactctcattcctcacatgttgmcccttggggatctcctactggaaagtgctctttcctgccatcaccctcctaggcccctaccagggacccagccccaatggggcttaataggcaccttggcatggtagtctggtgccctagactttttttcttttaattgaggcagagtctcactacgttgcccaggttggtctcgaacccctgggctcaagcattcttcctgcctcagcctcctgagtagctggaactacaagccacgtgccacctcgcccag

SEQ ID NO: 798906 - DNA, 583 bp, Homo sapiens
  misc_feature 207: n = A,T,C or G
aagaacaagccactgagaaaatatttgcaaatcatatatctaaaaatgtacttattcagaatttgtaaagaactcttacaactaaataataagacaagaaaccaatctgaaaatgaataaaagagttgaagagatatttagacagaggagatatataaatgacaaataatcccatgaaaaaatgccaacagtattcattattaaggnagatgtaaattaaaaccataagataccactgtacacccaatagaatcagaaagacagacaataaygagagtggtgaggatgtagagaagttggaaacttcatgcattatggtgagaatacaaaatgctatagccactttgggaaacaatttggctgtttctgaaatataaatttaccatacaacccagtgagttcacccctagctatttatccaagagaaatgacagcatacctccacacaaaaatttgtacaaaatgttcatagcagcattatttacaatagccaaaaagtagaaataatccaaatgcccactaactgttgaataaataaataaaatgtgacatagccacacaatgaacaattcaggaaaaaaaa

SEQ ID NO: 798907 - DNA, 561 bp, Homo sapiens
cctattgctgcctggcaccatagggatccatcaggagggtggccagagaagccgagggtaaaactccacaggcagaaggaattctctagctgacctttgtaacaatttgaacagagtgagaagcctcctggccagaacttgggagagggtgtgaatccggcttacagacttcacaggtggaggaagaactaaagcccttttctttcacaactgggaggtggaaagcctcaggcaagttttcaagcctgtctcaccctccacctggaaacagacttggggctgttgcagggggcatggtgggagtgagacaagcccctcggtttgcatgggagctgggtgaggcctgtgactgccarctttcccccacttccctgacaacctgcatgactcagcagaggcatccataatcttactaggtacacaagtccagtgacctgggaatctcatccccatcccccacagcagttacagcaagacccgcgcaagaagagtctgagctcagaaccacctagccccatccccacctgatggtcctcccctccccaccctggtagcggaaga

SEQ ID NO: 798908 - DNA, 501 bp, Homo sapiens
gatcacgaggtcaggagatcgagaccatcctggctaacatggtgaaaccccgtctctactaaaaatacaaaaaattagctgggcgtggtggcaggcgcccgtagtcccagctactcgggaggctgaggcaggagaaaggcgtgaacccgggaggtggagtttgcagtgagctgagattgcgccactgcaytccagcctgggtgacggagtgagactccgtctcaaaaataaataaataaattaaattaaattaaatattctgaggagaaaattttatttactacaatgtttgtgattctttcccacacaacgttcaacatataataaaaaattatgagtctcttgaaggtacaataaaatatgacccatggtctaaagaagaaacagtcagttggagcaaccccctattttggattcagttgctggaatcatcttatagggattcttaaataactgtgagtactatgctaaaagatctaaagaaaaaaaggggacaatatg

SEQ ID NO: 798909 - DNA, 577 bp, Homo sapiens
catcagcgagctagtgaaacattaaaacgtataaatagcaattaataagatctagagaagcattggaagcccctggctaaagtatggtcaggtacacagaaccacaacagaggcaagaatgtgaccatgtttagaaatcaaatgtcagaatatggtaaattagtcagcagtaagtgaagaagtcaaaggtatggtacatagtattaaaattcaggacaagcaccaagtttaggtttcaagtactctaagcttaaggaactagacaggtagtaaatgagttgtgacagcagtttataaactaaagagagtatatggaattaaatttaaaaactgaaaatttggggacaggytaacatttaggtggcactgtgacagcaatttatatagataaattcatataatcctcaaaatgactgcacaaaattagtggtagccctatattatagatgagcaaactgaggctatgtcatagaacttttctaaagacaaagagctagtaagttatagaatggaaattctgagatttattcaccttccaagcttctgtcatattaccaggcactgaaattgaacaact

SEQ ID NO: 798910 - DNA, 396 bp, Homo sapiens
tgatacaattatctcccactgggtccctcccacaacatgagggaattatggaagatacagttcaagatgagatttgggtggggacacagccaaaccataccattccacccctggcccctcccaaatctcatgtcctcacatttcaaawccaatcatgccttcccaacagtcccccaaagtcttaagtcatttcagcattaactcaaaagtccacagtccaaagtctcatccgagacaaggcaagtccctcccacctataagcctgtaatactaaaagcaagttagttacttcctagatacaatggggatacaagcaatggataaatacagctattccaaatagaagaaattggccaaaacaaaggggctacaggccccatgcaagtccaaaatcca

SEQ ID NO: 798911 - DNA, 643 bp, Homo sapiens
gcagttggtctgatgtcttttagacttagtttcttcatctgtgaaatgggaggagtagagcctcatttacggagttgcagagaggagaaaataaagctgtgtatcattatgggtcaaagtttgagttctggaggcaaggctcagtttgaaccgtggatcccccatcttatcggggttcctaattgcaaacaacagagtccattatggctagtttaagcagaacaaggatttattacaggatgttgggcagcttacagaaatccctggagggtcctgggaaaaaggcctgaccaaaccatgaggacatttttagtgaaaacaccactgcctggtcactcagtccctatagcatttagggctggataccagaagttccaccactgctgttccaaagaactggatgcctttgcaactgccctggtcataagatcatttgccccacctggctgcctccttcttctgaatctaggtttcacccaggtgtgtctgattcatggmacctgggtcatatgtctgatcctgagccacaaagaggtctggggatgagaattttctggcttctacctggagaatgttggactcagaatggagaaaggaagggcattgaatggccacaactatgtgctatttctttttactagct

SEQ ID NO: 798912 - DNA, 641 bp, Homo sapiens
gcataaccaactcccacatgcccttcaggcctcgctcaggtgtcacattctcaagaatgccttccctgacagccccctaccatcaccagtcaatctcagggcattctgcacctctcctttgcagcattcatcacagttctgattactaattgtgtaaatctcccattgaaatgtaagttctataagggttgggaccttgtctccacagttcatcactatatcccagaatctagtacatagtaggtgctcaactaatattgataaatgaataaatgaatccaaacacaatcacacatacaatttacagatgagaaagtaggctgggaagcagggagtggcactatggttcacacacacagtcactggttgagccaagactagaattcaaaccccccagtgaccgagttatgggaycacttcgtctcccacatctggacaagctcctgtggcctccaggcacagagtgaggtaagcaccaaggcagaggctggtgtgaattagggctccttgccttcctgctcccacactgggctctgaaagtctctcctcccccaagtcactgccaagggctgggcctggaaactcctcccagccctaatccactacatccaccatcaaagccccacttgattacctaccgc

SEQ ID NO: 798913 - DNA, 617 bp, Homo sapiens
ttccctctcatgattttccaagagaatctaaagcacaaccaacataaaggtattaaaaaatagattctgagtgacagataaattttatagcctcttgctaacttgccatgatcatagtctagattttttttttttgagagagagagtctcactgtgttgcctaggctggagtgtggtggcatgatcttggctcactgcaatctctgcctcctgagttcaagcaattctcctgcctcagcctcccaagtagctgggattacaggcaccygacaccgtgcctggctaattttgtatttttagtagagacagggtttcaccatgttggtcaggctggtctcgaactcctgacctcaagtgatccacctgcctcggcctcccaaagtgctgggattacaggcataagccaccatgcctggcccattttgacaatcacaacaggccaaattctaatcacattgtaggtatgccaggaaaccccagagctgtctggtaagagccctggaaacccagaaagagacagagatgcttctttggcctatcaggaatagattaatttggcccaacccaattagtaacacaacatcttctctatgctgggccactggggaatgaaatgc

SEQ ID NO: 798914 - DNA, 634 bp, Homo sapiens
aaatttaggcaatatacacatgtcttctacagctatcttacagcattcattcatccatcagtcatcaaatatttactgaaagcttattatatgccaagcacacaggccagtcttcttgacacacacacagacatatctgtcctcttttcttctgcaaggctgttgtgcccactcttctcacttcctcttgtgtcattccaattctattaaatcacttgactatagcctcatctggtccaggaagctttccctggcttctccaggccacctctgctgtctatgggccttgtgaggttaaaatcttctaagattgtgtaacccttagagggcccattagtctggcctggaaaggaacaatgttggcaaaaaccagggtatgctgagatgaccttggccagcaaaccatcttcctacygaagttgtgagcatgttgacagcagggatgtgtccactatgttccatggtaatgcttggcattgttccctacccagagtgggtactccatcagggcttcttaactagtggatctgttatgctcaataggagatgctgttcagagaaatgatcctagagcccagttgcaaaagaaaaggaactgtatactaaagcaaaaaaccttcccacaactccccac

SEQ ID NO: 798915 - DNA, 628 bp, Homo sapiens
agaaaagaaaagataacacgctagcaagagaagagagaaaaaccttaactgatgcaaccacatgcttttacccattagggtctgccgcctgtgtgtgttatatcaatcatggggcccacaagtctgagattcccaccctcaccctattctcgcattttctgaaagtattggaagagtccccgcaaacaaatctgttccagcattccccatttaacaacagcagaaacacatctagagaggtaaagtgactttactgaaatcaccccagtcaatgctagaaaaggctgtgaaacccartccagtgtctcataactgaactcggacaaaaggggatggaaaagcttttgaaggtaaaggaaccatcttacattttgatcatgctagtagttacaccttgtatacaataagaaaagttagtctgtacagttaaagtgggtgaattttaatgtatttaaataacacctaaataaacaggaaaaagcaaaaatataaaagtagactcagtattctagggatttgcaaagtgtgcagggctgcttgagaccacaggataaagatggtgagacccttttcctaatagtaacttatgctaccatgttctatagaaacagagtgcttaaatcataag

SEQ ID NO: 798916 - DNA, 628 bp, Homo sapiens
agaaaagaaaagataacacgctagcaagagaagagagaaaaaccttaactgatgcaaccacatgcttttacccattagggtctgccgcctgtgtgtgttatatcaatcatggggcccacaagtctgagattcccaccctcaccctattctcgcattttctgaaagtattggaagagtccccgcaaacaaatctgttccagcattccccatttaacaacagcagaaacacatctagagaggtaaagtgactttactgaaatcaccccagtcaatgctagaaaaggctgtgaaacccagtccagtgtctcataactgaactcggacaaaaggggatggaaaagcttttgaaggtaaaggaaccatcttacattttgatcatgctagtagttacaccttgtatacaataagaaaagttagtctgtacagttaaartgggtgaattttaatgtatttaaataacacctaaataaacaggaaaaagcaaaaatataaaagtagactcagtattctagggatttgcaaagtgtgcagggctgcttgagaccacaggataaagatggtgagacccttttcctaatagtaacttatgctaccatgttctatagaaacagagtgcttaaatcataag

SEQ ID NO: 798917 - DNA, 550 bp, Homo sapiens
caataaaattgacacatctttaggtagacttatcaaaacaaaaagaagagaaaactaaaactcctaaaatcaggactgaaagaggcactatcatcactgacttaattgaaataaaaagggattataggggaatgatatgaacaactgtatttccacaaattaaatggataaatttatataataacacaaacttctgaatctgaatcaaaaattttaaatactgaatagacctataataagcaagtaaagagacaaaattgctaatcaggaaattttgcacaaagcaaagttgaggcccacatagcttcactagtaagttactccaaatttttaaagaattaacatcagtattttacaaactcytctaaaaataaaagaggatggaaaacctcccaatttattctacattgaggacagcattaccttgataccacagccagccaaagatataacaatgaaaggaaagaagagatcaataactgtataaatataaatgcaaaattctcactaaaatatcactttactgaattcagcaacatatagaaaagac

SEQ ID NO: 798918 - DNA, 603 bp, Homo sapiens
agtgtcagaggagggtgaaaattgaaagactatggggtactaggcttattacctgggtgactaatctgtacacccaacccccatgacacagaatttacctatataacacacctgcacgtgtgcccttgaacataaaataagagataaaaagcatttttataaagaagttttgagatattttagcaaatcagaattgaagtgttgtcaaatgcaaaggaggctaatattgcctcaacttcctctttttatttttttattatactttaagttctagggtacatgtgcacaacatgcaggtttgtttcatatgtatacacgtgccatgtwggtgtgctgcacccatcaactcatcatttacattaggtatatctcctaatgctttccctcccacctcctaccaccccacaacaggccccagtgggtaatgttccccttcctacgtccaagtgttcccattgttccattcccaccaatgagtgagaacatgcagtgtttggattttgttcttgtgatagtttgctgagaaggatggtttccagcttcatccatgtccttacaaagaacatgaactcatcattttttatggctgcatagtattccatg

SEQ ID NO: 798919 - DNA, 625 bp, Homo sapiens
gagctccatgtttgcccctttcagccatgactggagtgactgggatgcagggcaccaagtccctagtctgcacacagcatgaagaccctgggcccggcccatgaaaccactttttcctcctaggcctccaggcctgtgatgggagggtctgctgtgaagacctctgacataccctggagatattttccccattgtcttggggattaatattcagctcctcattacttatgcaaatttctgmagctggtttgaatttcccctcagaaaatgaattttgttttctatagtattgccaggctgcaaattttccaaacttttattctctactttccttataaaactgaagacctgtcacagcacccaattcatcttttgaatgctttgctgcttagtaatttattctgccagatacagaagaatctgtattatctgtatcatccatatcactatcagcattttaagcaaagccattcaacaagtctctaggaagttccaatcatttccacatttccctgtcttcttctgagccctccaaattgttacaacccctgcctgttacccagttccaaagttgtttccacattttccagtacctacagcagcaccccactctactggtaccaat

SEQ ID NO: 798920 - DNA, 559 bp, Homo sapiens
actaaaacttagcacacttaatttaacatgtcatcctgcatactgctcctcttgccgtatttacttatcatggctattaggacttctacccttgctttcatttgggccagaagcctcagtcgtcttccatttcttgttctccattctctttaaactccagggtctcttgacatccaaatcatcaattgccaagttctgtcctttcttcctttgaactttcttcccartccaataccttgattctgctataatttaagtactttttgactcttatggattatttcagtagcttcatgacatatcaaatttccaacttcgacttttcttcattgttgcatgagttatctttctctctgatccagttcagatagttttacctcctcagaatcatcagtggctccttgctctccaagatacgtggttcagttccaggctgggactttacaacgctctaggattcagtcccaacctaccctatgccttccttatgccccatgctggtcactgccccatactggccatactgcactacttgcccttcactaaatatgccattcat

SEQ ID NO: 798921 - DNA, 620 bp, Homo sapiens
aaattgcttgagcccaggagttgaagaccagcctgggcaacatagggagacccatctctacaaaaaattagcctggcgtggcggtgcacagctgtaagcccagcactttgggaggctgaggcaggcagatggcttgagcccaggagttcgagaccaacctggtcaacatggcaaaattcgcctctactaaaaatacaaaaattagccaggcgtagtggtgggcgcctgtattcccagctactagggagactgagacatgagaatcacttgaacccaaggaggtggcatttgcagtgagccgagattgagccactgcacttcagcctgggcaacgagcgagtgaggaaagargaaagaaaggcaagaaaggcaggaaggaaggcaggagggaaggcaggaaggaaggcaggacagaaggcaggaaggaaggcaggaaggaagggagggagggaggaagaaggaaggaaggaaggaaggaaggaaggaaggaaagaaaagaaaagaaaagaaaaaagaaaagaaaagaaaagaaaagagggagggagggagagaggaaggaaggaaggaaggaaggaaggaaggaaggaagaaagggaggaagggcattccgggaggaagaa

SEQ ID NO: 798922 - DNA, 596 bp, Homo sapiens
cttgatcaccagtggaggcgcaaacctgatgatgtcaccatgcgttggcttggccagaagttcattatctcgtgtcatccttgcgcaggggccatgctaatcttctctgtatcgttccagttttagtatatgtgctgctgaagcgggcactagaagtccattatcttgaagtcttacacacaccttccaagcatcacaatctttggttcctttaataacaatagcgtttaataattcctttcctcgctgggcwtggtggctcacacctgtaatcccagcactttgggaagcctaggcaggtggatcacctgaggtcaggggttcgagaccagcctggccaaaatggtgaaaccccatctctactaaaaatacaaaaattagccaggcatagtggcccgtgcttgtaaacccagctactcaggaggctgaggcaggagaattgcttgaaccgaagagatggaggttgcagtgagccaagatcgcgccattgcactccagcctgggcaaccagaatgaacctctgactcaaaataaataaataaacaaacaaataaataaataattcttttcctcttatggtagtcacaacatcggaa

SEQ ID NO: 798923 - DNA, 630 bp, Homo sapiens
atacctaagagtggagttgctggatcctaggttaggtgtatcatctacctcttgcagatgagataaattagataaactaacttagatgttaatttagatgttcagctttagtagattctaccaatctgttaagtgcctacaccattttacttccaccaacaatgtatgagagcttcagttgctctacatccggccaacacttggaaggaaattggaagggtagcagatccaggatttagggggagaaagactcaaatagaatgcaaatagctgggcctggtggggtggctcacgcctgtaatcccagtactttgggaggccgaggcgggtggatcaccaggtcaggagtttgagaccagcctgaccaacatggtgaaactctgactctactaaaaatacaaaaattagccgggcgtggtgtcgggcgcctgtaatsccagctacttcggaggctgaggcaggagaatctcttgaaactggaaggcggaggttgcagtgagccgagatcgtgccactgcactccaacctgcgtgatgggagcaaaactccatctcaaaaaaaaaaaaaaaaaaaaagaattcaaagagcctttcaggaaagctgaaggttgttggtcttaatttcagtttt

SEQ ID NO: 798924 - DNA, 643 bp, Homo sapiens
tacagggaaatatagttctaaactacgttctaggaaccttagttccaggaaatattaatatcccaggaaaaaaggtgggggaccgttgagggtcgttcagtttccctagaaaacaaagcctggggcaatggttatatgctgatgtttttaatgaaggcacaaatccagagcctcaagagtgatataaaagggagggctgggaaatgatgcaagatgcttggaggagccagcggctcctggcagcagctggctggccacagaactccagagttggctgcagtggcaacagttaaggaaatgcaaaaggctaggatccaggacttaggcaggctaagagaacctatgaaaacacgtagaatgtgtccaacataaatgtcaaacaaaattaagaaacactaggtactacatgccgcctcttagaaatccgcaatgcatattagcacatttaacagttctagaagtacctcagcaaggaaaccagtttcwttttatttaatccagcatttcccaagcttatttgaccacagaacctttctttcacgcactgctcatctgtagaactcagttctggtcagctatgaatactggaatttggggcttaggaaagaggatagattatagatatgaatttgggattaatagt

SEQ ID NO: 798925 - DNA, 643 bp, Homo sapiens
tacagggaaatatagttctaaactacgttctaggaaccttagttccaggaaatattaatatcccaggaaaaaaggtgggggaccgttgagggtcgttcagtttccctagaaaacaaagcctggggcaatggttatatgctgatgtttttaatgaaggcacaaatccagagcctcaagagtgatataaaagggagggctgggaaatgatgcaagatgcttggaggagccagcggctcctggcagcagctggctggccacagaactccagagttggctgcagtggcaacagttaaggaaatgcaaaaggctaggatccaggacttaggcaggctaagagaacctatgaaaacacgtagaatgtgtccaacataaatgtcaaacaaaattaagaaacactaggtactacatgccgcctcttagaaatccgcaatgcatattagcacatttaacagttctagaagtacctcagcaaggaaaccagtttctttttatttratccagcatttcccaagcttatttgaccacagaacctttctttcacgcactgctcatctgtagaactcagttctggtcagctatgaatactggaatttggggcttaggaaagaggatagattatagatatgaatttgggattaatagt

SEQ ID NO: 798926 - DNA, 647 bp, Homo sapiens
tgatttttttcctcttgtcctctgcctctccctctagctcccacttcctctctgctctagttcattttctttagagcagcccgagtgatcatgaagtgcaaatcttgccatgtcagtcccctgcttagaaccctccaatggctcactttctctttaggcaaaagtctttaccccatgccttctcccatctcatctcaaccccctcatttgttggctgtctgctgtcagccactcttctttcaggtcctcagatgcactgcaccctctcctgcctgggggtctttgctcctgctactacctctgcttgaacagctcctcaccttccttcctccaaccctacccttgtataggtgacttttgttcatccttcagaattcaactcacatgtctcttgcatggagaaccctcacctactgtsttgagaccctgtccagcccccaggtgggatcctctctcgacttcccatacatttctttcacagcatttacatagtccatgatagtttacttgtgggattatttggttaatctttgcctttaacaccagggttccttgggtgaaggagcttctttatcttggtaacagcattatttcaagcataacttgtaatatagttatattacatatataacatatatatatatata

SEQ ID NO: 798927 - DNA, 643 bp, Homo sapiens
tctgctgtccctttctgagaatctgtgcttgctgggaacccaggacagctccaaggacaggaaggactgaaggaaggggcagtgtggtttggagaaagatcccagattcaggaatacgacagaaccgggtttgaaccctcatttggccactcactcactgtgataggcagaccgatgctcccatccccccaaatacctacctccttatcccccaaacctgtgaatatgttacctcacatgacaaaagggattctgcatctgtgatcaaaggaaggatcctgaaatggggaggttatcctgggttacctgggtgarcttgggccataaagttctcataagagggaggagggagagtcaaagaaggagctgtgatgatgaaagcagagtggggggtgatgcaggcctggatcccagggttagaggcagccttaagaagctggcaagggcaagggacgttttctcccgtagggcccccagagggagagcaagcctgtgccccatttctgactctgacccccgagtggaacagaatgcattgatgttgtttgaagcctctgcgtttgtggtaatttgtgactgcagccatggggtgtgaatccacaagttctgtgacctcaagcaaattccttaaccggagagccca

SEQ ID NO: 798928 - DNA, 594 bp, Homo sapiens
ctctgctgctgtcaacatcagtgattagtgtgggtgtctcagtgacctaggatatgggagtttgtggcagcagtggtggtgccattattagttgttaagtttcttggtgttgagggcttttgaggtcctccattattctcattttctccacagtgaggaactaagccaaaggaatctctcatcctgttggttttgatatggwctacaatcagctgcagcctcctgtccctttggatagcaggagtggcctttactgtactgttttcccaagtatcagagtaccactttagctcatgcacaggaggatgtggctgttctgggaggccagaacacctcttccttgggatgccaggtgttgctttagccccagcaaaggaagatagggtaccacaggaactggaaggagtatattgcatggctttaccaaagtaccccttccctaaaaggctgtatgtagctttactttgagtcccattgatagggacaggaggtagggaaattctgagcggaagagggtgggtccctagcaaagaccccagcctcaagcctggaaccaccgcccgaagtgagaacatacatctctgttttcttgct

SEQ ID NO: 798929 - DNA, 594 bp, Homo sapiens
ctctgctgctgtcaacatcagtgattagtgtgggtgtctcagtgacctaggatatgggagtttgtggcagcagtggtggtgccattattagttgttaagtttcttggtgttgagggcttttgaggtcctccattattctcattttctccacagtgaggaactaagccaaaggaatctctcatcctgttggttttgatatggtctacaatcagctgcagcctcctgtccctttggatagcaggagtggcctttactgtactgttttcccaagtatcagagtaccactttagctcatgcacaggaggatgtggctgttctgggaggccagaacacctcttccttgggatgccaggtgttgctttagccccagcaaaggaagatagggtaccrcaggaactggaaggagtatattgcatggctttaccaaagtaccccttccctaaaaggctgtatgtagctttactttgagtcccattgatagggacaggaggtagggaaattctgagcggaagagggtgggtccctagcaaagaccccagcctcaagcctggaaccaccgcccgaagtgagaacatacatctctgttttcttgct

SEQ ID NO: 798930 - DNA, 477 bp, Homo sapiens
ttgattgcattatatattgctaagttgctacccaaaatgattgtttcaatttatattcccaacaaatgtaagaaaatctttgttcctacatattctcaccagaaatttatactgtctaatttattgatttgtatgaatcttatattttcaaaatagtagctcactatggctttaattggctttttcttggtacttgtgaggttgcatatctttttttagaattatcaaccactgggtttgcctcatctttgtccatggtatcttttattgttcasaagtttatcttactgtaatttagtgtaaaattaactgaacgtttcctttatgctacgtactttttgtgtgtgtataggtttattttcataattgttctctatccccaagtcataaaggtatttacattttttaaaaatgttttttgagttttggtttcatggttatatttttaatcaatctcggcatttattttttgcaaac

SEQ ID NO: 798931 - DNA, 620 bp, Homo sapiens
ttctgtttttagtttacaaactttaactcaggaatttccatagatatgaacaaaaccgtgtttcagagtgaaagctgatcaccaatagatgatgttagtgactgtagcagattgttacacatttggttatcgtgcacttcattcgttgatgtgctttctacaggtatgagttaactgtttttcaaacattagaaactttttaagacactgtaagtgcagacatagtgaacrtttaaagtgatattaaaaggcataaaaatacaagggaaataaaagcagaaaaaggtaaaactgatagtggagataaaaaaagtcaaatgttgcacatacataaaggatgagttgtttgatgataggaacaactgtagagaataaggaacaaactatgtatgcaagagttgtagtgtgcctttgtggtgacaataatccaaataatcaaaatatgagttccataaggacagagacaatgggtaagttttcagcttggtttaccatacctggcacatagtactctgtacttatttattaagttaatgaatcaattaatcaaccaaagttgaggaaattggccaaatagaatgacatcttagtgcatatttagaggatcagcaataatggtt

SEQ ID NO: 798932 - DNA, 598 bp, Homo sapiens
tgttgaatcataaaatatgtatgaaaatattattttattcccatttttaaacaataaatttaatatagaatcaaaaaatctttaaaaaattgaaatttagaagtcttaatggcatcctttacagatattgtcattataatacttaaataatatttaaataatatctaaataatattttttaaactcatgagaaaatgtatatatatttggactcatttgttcattaacaaaaaaatttatatatgtgtatatgattgacatatttattttccaagagactgatgagggtagttattttctacacatataagcaaatggtcagtagtacaatcagtataatgaaaatgatgataactaatatttatttagattttattatatacaaatattgaaataataaatgtttaatgtatggrttatttaaataatttcataatcatagttacttgctactatattgattatgaggatttaataatatcaatcagcctaggatgtgtatctagtaagaagttgagttaaaacgtaattactgggtttcttaagcattatctgtgcaccatactgagtattcaagatatatcaatagtagtagaga

SEQ ID NO: 798933 - DNA, 417 bp, Homo sapiens
aaaaaaataaaaaggcatccagattgaaaaagaagaagtaaaattatttctatctgcagaagacataatcttatatatagaaaattctaaaaatggcacaaaaaactggctagagctaataaattcagcaaagttggagaatagatcagaacacaccaaaaaaatccactgtttttctacatattggagctgaaaaatatgaaaaggaaatttagaaaacttcatttccaayagcatcaaaaagaataaaatactcaggagtaaacgtaaccaaggaacaactgtatactgaaaacaaaaagttgctgaaagaaattaatatgaactaaatgaaaagaaatcacatgttcatggactgaaggacttaatattgttaagatggcaatattccccaaagtgatctatagattcattata

SEQ ID NO: 798934 - DNA, 417 bp, Homo sapiens
aaaaaaataaaaaggcatccagattgaaaaagaagaagtaaaattatttctatctgcagaagacataatcttatatatagaaaattctaaaaatggcacaaaaaactggctagagctaataaattcagcaaagttggagaatagatcagaacacaccaaaaaaatccactgtttttctacatattggagctgaaaaatatgaaaaggaaatttagaaaacttcatttccaatagcatcaaaaagaataaaayactcaggagtaaacgtaaccaaggaacaactgtatactgaaaacaaaaagttgctgaaagaaattaatatgaactaaatgaaaagaaatcacatgttcatggactgaaggacttaatattgttaagatggcaatattccccaaagtgatctatagattcattata

SEQ ID NO: 798935 - DNA, 619 bp, Homo sapiens
cattcaagttgcaaaattctccccctttttttttatttctacgactaataggcaaactattgatcactgtaatttcccatgtaatttgccaacaggtgaaataataaacttagatattacctaatccacctgatggttataactttcattgtacattaacaaatggatttttctttttaaaatatgtcatgcacattgttgataaaaacctgcagtcccaagtmagtgaaagactggcccttgagcactgatgagtctgagtttctgaacctgtaaatctctggtcttgaacagtatggtctttaggttactatggtaaagatctatttatgtagtcagcagttcacccagagacatctgtgtgtattacagtgtagaggatatcatttaatttttcgaatttctatatacaaatatcgttttggaaaaaaggaataaaatttgaaaccaaactctaaaatgatcttttctggaattctccattatgtatcacagatgaacttgctgtttaaagcaaaaaatatttaaaacatttatgatcagtttggagagtactttgacataggtcctaggtccttttgtattatgaaaaatcaactatatctacatacatttttaa

SEQ ID NO: 798936 - DNA, 636 bp, Homo sapiens
tatgtcttatatcccaaaattttccacttgttaacaaattatgaagtgggtatcacatgagtgatttcttaaaaatctcttttaaatcatacattttatcatatgttacaaggcaattatttaataaaagtacatgactagaaactgaacaaaccaaatagactatgaattccttcaggccaatggctgtaaattgtttatcttcatacattgagaagctgacctaayaggtgacacataattatgtcagatttataataagtgaaaggtcacatgatttaaattcaagaccaatcaactttactcttaaagttttccttattcctcctcaaatgtctacattgctttggttctccaaaaccaatttttgaaagtgctccttaatagagtaacttctaaaatgtataataacattgttgtgcagtattgaatatatggagaaagctgttaaaaagaatgaaactgcagtactgaaacaaaggaacaaagagttaagacataagtaacaatttactttctggttaagaaaggcaatgcattgcaggtagaggaaaaaagcaggtaaaacaggtagacaggcacttaggcataaaagagcttatttaggaaactgcaagtgtttcagtatggtcatgg

SEQ ID NO: 798937 - DNA, 653 bp, Homo sapiens
ttcaaaattaaaaagacaaataatcaaattaataatgggtaaaatagccgggcgtggtggctcatgcctgtaattctagcactttgggaggccgagctgggtggatcacgaggtcaggagatcgagaccatcctggctaacacggtgaaaccgtctctactaaaaatacaaaaaaattagcccggcatggtggagggcacctgtagtcccagctactagggaggctgaggcaggagaatggcatgaaccaatgaggcagagcttgcagagagcctagattgygccactgcactccagcctgggggacagagtgagactctgtctcaaaaaaaaaataaaaataaaaaataaaaaaataaaataatgggtaaaatatttgaatagtgatttttccaaagaagatatacagatggtcaataaacacatgaaaaatgctaagcctcattcatcattagggaaatataaatcaaaaccataataaaatactttttcatacccactagtatggctaaattttaaaaagaacaataatagtaagtgttggcaaggatgtaaacaaattaaaacctcatatattgctagtggaattttaaaatgatacaatccttaagaaaacagtttaacagtatctcaaaatattatatatggagttt

SEQ ID NO: 798938 - DNA, 605 bp, Homo sapiens
tgctccattagatagcaatatgtgctaaggaaaacaagcaaagcaaggcagggggactgaacttttaaatgtgaccagagagggcttaattgagaaagtgacttgaagtaaaggcttgaaggaaaaagattccaagctggggaaagggtgcttgaggctaaggaaaaaatgaatgtgggaatcctgggtaagaacacatttggcttgtgaaggaactgaaggaggctgctgtgactggagtggagtgaccaaatcgatgagggttttcgtcaatctctgctcaagctgctataacaaaatacctaagactgagtgatttataagtaatagaaatttatttctcacaagtttagagactgggaagtcagagwtcaaggtgccagtagacagattcagtgtccagtaagggctcactctttactacacaggatggtgccttgttgctacatcgtctcatggcagaagggcagagaagacaaactttagaactaaaagggctttatagatcatccagttcaactcctacattacatttatgagattcattttttcatgcatatatttctatattcattcactcaaccaatatttactgaagatctatt

SEQ ID NO: 798939 - DNA, 566 bp, Homo sapiens; identical to SEQ ID NO: 785208

SEQ ID NO: 798940 - DNA, 566 bp, Homo sapiens; identical to SEQ ID NO: 785209

SEQ ID NO: 798941 - DNA, 607 bp, Homo sapiens
tcatgcttggatgtcctcctccatactgaaggctaaataatatacacctgtatttagttcttttgaagttttaaacatttattctctcagtttcatgttgagtgagactattttcccaatagttgtcccatttggaaactgatttcccagcaccactgactaaatagtacttgcccccgaccaatttgaaatgttggcttccgcaatattatatttgtatttatgtctgggattacttgtttccattctcttccactgatctgttatttttgttccagttttagatatgtggcattaccatgtttttctaaatagaaaatacttgccrggcgtggtggctcatgcctataatcccaccactttgggaggccaaggcgggtggatcatctgaggtcaagagaagagtttgagaacagcctggccaacatggcaaaaccgcgtctctactaaaaatacaaaaaaattagccaggcgtggtggcaggcgcctgtaatcccagcttggggaggatgaggcaggagaatcgcttgaacccgggaagtggagattgcaatgaggcgagaacacactactgcactccagcctgggtgacagagcaagacagact

SEQ ID NO: 798942 - DNA, 585 bp, Homo sapiens
agggatccctaggaaaagcagagaggcaagtaaaggttagccacctgcggtttccttattcctgtagctttttttctctgccttttttccacctggctactctgggacctctcccctgtagttgctccgcctggccgcccaccccccagcccctgcaggcagtggggctgttgacacatcccaccatcctgactccggaactacggagatcacagggctttattattaattggtgatgagaagaagtagggattttttttttttttttttttcctgatgagaaaccctgggctcaagggtggatagttgtctcggccagagtcacatgggccttttaaaagctcaagcttgtgtttcttttcactatggattctctttactcagataaggcaggaagcccactgatctacatatttacccagagaaaatgcasagagtggagattggcggctggtcaggtgtggtgccccgccaccagggcctcccatcagctaagccaaattaagaggctttatcctttttttctccctggacggtccataggcctgaaaagctgctgtgatcttcctgtcaagctggtgactg

SEQ ID NO: 798943 - DNA, 528 bp, Homo sapiens
attaattatgagccccatgctctgctttctgtgagtttcctcttctcttagaccaagctggcaggtctgttattgtaaaagaaaccactgaagggtcatcaccagtatgagatgaaatcatcgatgaacgtttgacagtttgtaaggcatagtgatgttacttagatgttttgttttctccttgggtgacatgggcagcatagcaattatagcacatttcaaatcattgcttacagggatatgactcatttcacaatgcagtacttagttggggccctggctrtggatagagacaagtatctttctgtttatgacttttcctgaattatgagcaaaccagacagaggcttaggttcatttgaaattttacactgtgtttttcattttaatgagatgcctgggtaaattcaaaaccaatactttacactgacacttgatacgcactgacatgtcattatgtcctacacatgctggtcaggacttgtaaaacagaaacaccagagccatctcaagagtctccaaatagat

SEQ ID NO: 798944 - DNA, 623 bp, Homo sapiens
tacctggccaagttatcccattctgtagtaaatttttctaggaacacttcaacaacattcatacagtcatggtaatctcttgttctctgaagatcctcttccctttgcaagcacaggttgttagactgacggcacaaatcgagccactgatcatttaaatgatttatttccttgtgttcaggcgattcctycttctttgttaacttattcaccttttctattatggtgttcacggatgcctgtttgctctgtagtttcttaacaaaatcctaaaggataacagcaacaaaaaatatgtaatgtgttaagaaatgcccaaataaatatagagagcaacacagacataagacctttaaacactctaagttccttaatatgaaaaaaactgaagaatgtataataagttatgggaaacaaagagaaaatctaaaaatcaccatacctctttatgaacgttaattcccacgtgtgcaagattcagggtagctgtggtatattcttttattgtactattccaagaggcataaagaaaaactaatacatgtgaaacattacagtcattaatgaaaaaagtcattatcttaccttgaagtgcggcctttgttttctaagaatttttaagg

SEQ ID NO: 798945 - DNA, 477 bp, Homo sapiens
gcaggccaactcaggagccattgttaagctggatgaaactggaaacctgatgatctcagaagggcattttgcatctgaaaccatacgggtgagtatgagtagctcgtggagtggatggcttcatctgggtggagcattgtagattcatgcatacatgtcagtttgggttcccaaaaagatagacttttccagcttttaaaagaatttatgaagtctccttaagaagttaccygaatcctgcctttgtaatatgacagcatgaatgcaagcgtttgtatactcagtgaggaaattaatattccttttgcagagcaaattagaatgtgattatactttaaagaaaactgtgaatttaacatttataagtggcagtgagatggcagagcatattagtgaaattggcaaatttaaggactcagatgcaaagataaatagaaacaagcacagacactataaagaaggttatctgtgggaaag

SEQ ID NO: 798946 - DNA, 633 bp, Homo sapiens
agggttgaggatgctcagaagcagggagcagttccacagcctgagaacaatcctctgaacaattgttgcagggtatttgcaaaggggtagattgtgcactgaggttgtccactagaatactaactttaaagggtatggaattgaaaaattcrcacaaatgagaggaccgcacttttttcctccctttctcactccccatccaatcaagttgggatgggagaaaggaaggttgaagatcggcatagggagcgccaggggaaacatgctacttttccaggtgcttcctagaggaagtgtggggggcacccgggagaatttccctcaaagtctgtgggtctttaggaagacagcatacttgtatcccttctctcatttcttctgaagacagaagattgcaggagtgtcccacatggtcggggcattgagaaacaagagtacagtgtgcctaagtagaaagggtgacccagcaccaccccctctcatttctccatgatgttgaagacattgtaaaatgatgccaaagttccccagggccctgagtgaagagccgtggaggtagaaaatgaaaaagaatgcatgtgctgccctggagcctcttggctaagtaaccggagctccccaggaaagggctgc

SEQ ID NO: 798947 - DNA, 574 bp, Homo sapiens
atcattatgattgtacatgtacaagtgcaacaaccgcagctggagagcatgtgactagggagcgcagactctttggggatgagggtctagttccaccaccaggaaagccaccaagaccagtagcgagggtaagtgaaggtgaggggattctagattgtacagtggagaagggaagctgcatatcgtttgtggcctggagcccaactgctgaggctggggctgtatcttatcctgctcacgtgcctcttctaggtttctgagcaagagaggccaccagaatcctggacaagccacttcctsagtgagtacggagcaggggtcctgagaagcacaagaagtaggctggtggacatgggggtgcactgcccagaccctcttcaaaaaaaggctgcctgccaatcatagggagaatggcaggcagacagcctgctgcccccagcatcttcagggttttccccagctgtggaaggtgtcttgtctttcccagaacaatccacatctggggaccaggtgtgatgagagtcaacaggcctggccatttctgcccagcagggcacaactctgatggaccctc

SEQ ID NO: 798948 - DNA, 574 bp, Homo sapiens
atcattatgattgtacatgtacaagtgcaacaaccgcagctggagagcatgtgactagggagcgcagactctttggggatgagggtctagttccaccaccaggaaagccaccaagaccagtagcgagggtaagtgaaggtgaggggattctagattgtacagtggagaagggaagctgcatatcgtttgtggcctggagcccaactgctgaggctggggctgtatcttatcctgctcacgtgcctcttctaggtttctgagcaagagaggccaccagaatcctggacaagccacttcctcagtgagtacggagcaggggtcctgagaagcacaagaagtaggctggtggacatgggggtgcactgcccagaccctcttcaaaaaarggctgcctgccaatcatagggagaatggcaggcagacagcctgctgcccccagcatcttcagggttttccccagctgtggaaggtgtcttgtctttcccagaacaatccacatctggggaccaggtgtgatgagagtcaacaggcctggccatttctgcccagcagggcacaactctgatggaccctc

SEQ ID NO: 798949 - DNA, 633 bp, Homo sapiens
gaattccctttttctgctaatcaaaaattaacagctatctttctgtttcttcttgttgaaatccccctatcttttaaggcttaactgggaagaagttgtccctgactcccagctcctgtactcaagggatatgatttttctccactttgaacctccattgtacttaaaatgtaatagatgctacaagagacaatatagttagtttcatgttctagttgttggtacatttatcctttctaccctcataatgtgcaagggtgcctgttaaggtaccctgcagatagcttatgcagtaacaacgtgtggatagacagacagaagaaagcctttcctttccttgtattaatgtcaaaatacattccctctgtgaaagcagcagagctgaaggtgaattcaaggatcagtttctgatttgrtgctaatgattggatgattatttaatcaacagacaagtttctagaaactactatgtataagccactatcatagacaccttgagcatctctgttgtagtttgtgtggtttctgttagcttgctcttcaatatgtttcacatatataacttccttggaagctttaccagctattgcctaactttcttcatatatttatttgtcacctttttctgtattt

SEQ ID NO: 798950 - DNA, 626 bp, Homo sapiens
acttacagacatgtaaagtaatggatccagtagaaaatttatacagcttctagttctttttaaattatttcaccaaacatttatctatccacttcgtgttctgccatgaagatgaagatgcaaattaagtacagatattatgatgattttcaagtaatttacagttcagctggggtattagagatacacacacaaatgatttaattctgtataatttgtggctgactactagaatgtatgaaatgagtagagtgagaataaacacagagtataggaaaggaaagaaataaatcaatgtggatggaagtagtgagatggaattttatccagactacatgacagggagaatttaaaagagcartccaacaaaacacacttcatcattttgtttgaaacgtaggccccaaatacaaagccaaatgtaatttttgattgaccaggctgtggcttccctttactagaatgtataataaagagttgactgtatttttacataatacttgaaagcagaaagcaagttttcttggttgtgtttttatgacttattttttaaagagttttgctaaatcacaaactgctacagatactcaattttatatgtaattttttccttttttctattcatg

SEQ ID NO: 798951 - DNA, 636 bp, Homo sapiens
gactttagattacttgttccttgcctctcccagtagaatgtaggcttcatgagaacatatactgtgctttgtttaccactgcactccctaccttcaaaagtgcctgataagtagtaggcactcaatggctgtaaatcagatgaataaatgacccacacggtgggttaatctgccaaacgtagagtgcctacaatatataaacaatccaaggaatgaatggatgtgaccagggcattgataaagaaggaaatgtgacggatcgtactaatatattgtaaaagatcaatatcattagtgtccccataactgcatattaaaatacttagataacctttccayttagaagattagtaccaattaaaaattactgatactattcactgctgaaggagatatgaggaaatggtcattattttacactgctggagaaagtttaaattgctactaaaataatctggtaataaatattaatgtgaaaaatgcgaactcctacgaatgttctagagagaatctataatatagatttaaaatcacataaaaaaaactctattgcagaattgcttgtagtattcaaaagtaaacattcttttttaaattttattttttaattgacaaataataattgtttatgtttgt

SEQ ID NO: 798952 - DNA, 614 bp, Homo sapiens
tgtagaaatggggagatgattctggattatgtgggtgggtccagtgaaatcatagtatccttataagagggaggcagcagggtcagagtcagagaagaggatatggcaacagaagcagaggtcagagggatgcaggacaggagccaaggaacacaggtggtgtctaacagctggaaaaaacgggaaaatggattctctcctrgagccttcaggaagctggcagccttgttgactccttgattttagctcagtgaaacttattccagacccctgacctccataactatgaggtaataaatttgtgttgtttaagccagtaaatttgtggtaatgcagaaatgaaaacaaccattagaaacgattacaaacacctctatgcacacaatctagaaaacctagaagagatgcataaatttctggacacatacaccctcccaggtctgagtcgggaagaaactgattctctaaacagaccaataacaagctccgaaattgaatcagtggtaaatagcctaccaataaaaaaaggcccaggacctgatgaattcgcagttgaatcataccagatgtacaaagaaaagctgttaccattcacttcttctgaaactattcca

SEQ ID NO: 798953 - DNA, 601 bp, Homo sapiens
atgtttcatattaatcctgaatgattatctggagaaggagtgggagtaaaataagtaaaataaagaacactaaaaatatcagttacttcatcatagccaacttgatggcaaaatgaatctgccaggcaaccctaaaatttataaactttattccaaaattaagaagaaaaaaaatttagcttttggtcaagcaaaaatttcggatttagttctatttctactagccatggaatatactgaaaaattcaagagaaaaagtagaaagtcatttttttgcattaaaacagagtccttttaggattccaaatgaatggttttgttttcgaattttaaaatagctataccttaaaaatattaactaacaggcattaaattacagattaaacataagaagatcccaaaagccagcatatgttaagtggcatcmcttaaatcacattaatcaacaatttacctaataaaagaaaccactgcaagtgtgtttctagaaaatgacaacaataaccatgatttgccctacggtcagtacatattcaaactagacctctttgtgtgtgtgtgtgtgtgtgtttttttttttttttttttttttgagacggag

SEQ ID NO: 798954 - DNA, 522 bp, Homo sapiens
agatagtcaacagcctttaatcaatcttaggaggatgaaaataagccagataaagccattggaagaaagtaagtgaaaaattctatctctttctgagttaaagtcttattaatagaggttagattagttcttctatcagtacaattcagtttcggcttttaagatgttaccwtaatgcagaaggccataataaatatgttggcttatcccaacagaattttcaaactcaatgaaataagaacaccacatttcgagaatttcaggattgtgatttttggttttccagttttaataatctgatggtgggtagccagtctaatttacaagccacgtaaagttatacgtataactcgtttgaaaaactcaatgaaaaatacctttaaatgtccaaatctgtggagtgattattaatttgctttcgtctgcctgctgatactagataacaagtagaacatttttagctattttaactactcagagacatagtcttgctcatataattataagtatttgcaattactt

SEQ ID NO: 798955 - DNA, 522 bp, Homo sapiens
agatagtcaacagcctttaatcaatcttaggaggatgaaaataagccagataaagccattggaagaaagtaagtgaaaaattctatctctttctgagttaaagtcttattaatagaggttagattagttcttctatcagtacaattcagtttcggcttttaagatgttaccttaatgcagaaggccataataaatatgttggcttatcccaacagaattttcaaactcaatgaaataagaacaccacatttcgagaatttcaggattgtgatttttggttttccagttttaataatctgatggtgggyagccagtctaatttacaagccacgtaaagttatacgtataactcgtttgaaaaactcaatgaaaaatacctttaaatgtccaaatctgtggagtgattattaatttgctttcgtctgcctgctgatactagataacaagtagaacatttttagctattttaactactcagagacatagtcttgctcatataattataagtatttgcaattactt

SEQ ID NO: 798956 - DNA, 522 bp, Homo sapiens
agatagtcaacagcctttaatcaatcttaggaggatgaaaataagccagataaagccattggaagaaagtaagtgaaaaattctatctctttctgagttaaagtcttattaatagaggttagattagttcttctatcagtacaattcagtttcggcttttaagatgttaccttaatgcagaaggccataataaatatgttggcttatcccaacagaattttcaaactcaatgaaataagaacaccacatttcgagaatttcaggattgtgatttttggttttccagttttaataatctgatggtgggtagccagtctaatttacaakccacgtaaagttatacgtataactcgtttgaaaaactcaatgaaaaatacctttaaatgtccaaatctgtggagtgattattaatttgctttcgtctgcctgctgatactagataacaagtagaacatttttagctattttaactactcagagacatagtcttgctcatataattataagtatttgcaattactt

SEQ ID NO: 798957 - DNA, 632 bp, Homo sapiens
acacaaagaccctaagagagatggagagatgcattgtttcccagaggactcggaaggtagaattgctgaatcctgtttcagttatctaattcctttaatgtcactatcttttttttattactccaatgtatctttgcattaacttaattgtcacttgcctaacattttcttgagtcagtttgagtgaggttctgctcgttgcaatcaaatcaaccagacataaacaccttttacaaaaacaacacccctccttccttcaaagaaacaacaacattcctcagcatggattgcaaatcagagttgcatttacctctacgtgagaaaaacatagacagttggcaagagccatcttgttttagtctaccaatttattrctgtttgatgccttttggtaactctggtatagatcagatcatctcaactcgtagtcctcaactagcctctattcaagtgagtaatctgcaaatgatgtttctgaaaaacctcaaaagtggagcctgaattgacagtgttgtctggggtcttagtggtttctaataatcctgtcaaatttccttgtaaaactaagagaactttattgattaggccactgctgtttgcaagaaggcaggaggatgggacaaaagaataag

SEQ ID NO: 798958 - DNA, 632 bp, Homo sapiens
acacaaagaccctaagagagatggagagatgcattgtttcccagaggactcggaaggtagaattgctgaatcctgtttcagttatctaattcctttaatgtcactatcttttttttattactccaatgtatctttgcattaacttaattgtcacttgcctaacattttcttgagtcagtttgagtgaggttctgctcgttgcaatcaaatcaaccagacataaacaccttttacaaaaacaacacccctccttccttcaaagaaacaacaacattcctcagcatggattgcaaatcagagttgcatttacctctacgtgagaaaaacatagacagttggcaagagccatcttgttttagtctaccaatttattgctgtttgatgccttttrgtaactctggtatagatcagatcatctcaactcgtagtcctcaactagcctctattcaagtgagtaatctgcaaatgatgtttctgaaaaacctcaaaagtggagcctgaattgacagtgttgtctggggtcttagtggtttctaataatcctgtcaaatttccttgtaaaactaagagaactttattgattaggccactgctgtttgcaagaaggcaggaggatgggacaaaagaataag

SEQ ID NO: 798959 - DNA, 562 bp, Homo sapiens
attgctgcattcaccacgtctcacctgtcttcagggcacttagcttttgggtttggagctatcccagggcactgctcataaaaggagacacctcactttgctgcaggcctctccttccaggcttttttctttcttttacgagtggcttggagtctgacttgaaggagcgatcataaagagaatgattgcttttacgctggctgcaatgagaaaaggattctgtgaggagggagttatacatggaaatcaataccagcattggaaagcatccccttttgcctatataagtgctacccacagggtcaatagctggaattaacctggaccctttcattattattgttatttttaataaagctgctttacgatagactctgatrtgagctcccaggctgcagctgcaccgatgtaaagggagtgaaaaaatagttttatataaaagttatcttttgtcccagtgggtaccactccccagtcccacctccctccccgtctcagtctctatagactcagagggggagagtgaaattcagctttttataaacataagcagagaccaaca

SEQ ID NO: 798960 - DNA, 542 bp, Homo sapiens
aaagttaggccagccacagtagctcatgcctgtaattccatcactttgggagactgaggcgggtggatcacctggggtcaggcgttcgaaaccagcctggccaacgtggtgaaaccctgtctctaccaaaaatacaaaattagctgggcrtagtggcaggcacctgtaatctcagctatttgggaggctgaggcaggagaatcacttgaacctgggaggcagaggttgccatgagccgagatcacaccattgccctccagcctaggcaacaagagtgaaactccatctcaaaaaataataaataaaaataaaataaaataaataaagttgcatatgcatatagtttagagagtcaaatagtttgttaaagtttacaataaaaagcagtaatctgacttatcgttttaaaatggtggcacagaagcaagctggcttcactgctcatatgggaaaccaaaaacaaatatacaatgccaaaattttcactagcaacaactcacatctcaaatatgaggatgagacagatcctagggacacagaga

SEQ ID NO: 798961 - DNA, 512 bp, Homo sapiens
caagaaacaacactgaatagggaaatgtgacctctgcaaaaggacaaaggaaaaatccagtgaccgaccctaacaagacagtcatttgtgagctctctgaccaaaaattcaaaagagcagtttcaaggaaattcagtgatctctaaaataatacagaaaagcaattcagaaaattgctggagaaatttaacaaagagaatttgttaaatttttaaagttaactttaaaaactcaaacaaattttggaactgagaaatacgtttgctgagctgaacaactaattagaggctctcaacatccraatggaacaaccagagggaagaatcagtgagctcaaagaccagctatttgaaaatacagtcagaggagaaaaaagaaaaaagaaagaaaaagaacaaaaactgcctacaagatatagaaaattacctcaaaaaccaaatctaagaattcttgatgttcaaaagggagctgagcaaaggcagagggcagaaagaaaaaatacaaaattttcc

SEQ ID NO: 798962 - DNA, 621 bp, Homo sapiens
gctgaaatcccaccagcatctctgagaccttcacaccttctattctcaggttaagtggacagtgggtctggggttttgtctctacagagccacatcggccgggcctcacagatgcgttttccagagattcctgagctgccatacttctttggtcccatacgaccttttcctcccctcagccctcaaaatcaccctctctcctgcctccagcctctcagggctcttacctgaggtaaaaatcgcctcctgcatctcttcctggggtaaaattcccgcccgctggacacgtgaccactgagcctgcactctgtgcttccattggccagaccaggccccgccccttgggctccgggcacttccgtccgcgagtgggcacagcctasggaggtaaggattgtggggattcgaggctgcagcctgggcagcgccgaggtcctcgggagtgagcagaaccctcataacactgggcggagtgtgacggtggagaagtcggcgtgaggctagaaagagctggttgtgaagggttgggaagacccggcaaagcagtccggacttctttgggagtggcggctcccatgttgttagcgaggccgggcaaaacgcggcagggttagccggagg

SEQ ID NO: 798963 - DNA, 480 bp, Homo sapiens
cgtggagatccgaacttctatctgaattattttctgagttaaaaataatgagattgtataaaaacttattttaagatatttattctaaataaactaataaaaacaaacatggaattatataattttatggctatattatttatttatttattcattgagacagagtcttgctctgttgccaggctggagtgtagtggcgccatctcggctcactgcaacctccgyctcccggattcaagctattctcctgcctcagcctcctgagtagctgggactataggcgtgcaccaccacgcccagctaatttttgtttcatcatcttgtccaggatggtctcgatctcttgacctcatgatccgcccacctcggcctcccaaagtgctggaattacaggtgtgagccaccgcgcctggcctatattatttattagagaggatttattccataattaacttgacatggcaaatataaagacccata

SEQ ID NO: 798964 - DNA, 611 bp, Homo sapiens
aagcaaaaatgccagccaatgtgccccagagctacaaaggtagctctcctaattttgaatttaccagtaaataaaatgagttcagggatctaaaatcttaaccttgggtgccggaatttgtaatgatcattaggatgaacttttaagtaraaaaactccgagtttcttagttgagaagctaaagtcaaagtagttaatgaaagaaaactaatgagataaacagtacagaagctacgaaataatggaaattcaaacagacaaataggggttatcttatcagctgggccaagaaaccagagggtcagagaagcagctctggatgcctggaaaataaaatgttaagaataagaaagaaaaatgcaagcaccataacagccttgaattctgagctaggaatgggacaaaaattcagataagcttaaaaagaacaatcatgggtcttgcatttttagaaatagttcacatgtcatcctcaatggattataaagctcaaaaataacccagaactcttgacactgaaactacagaactgagatattagtttaagtgttttaagttggatatcatgcctaattgtcaagaccacctgctgaggtttgggtgcggtttgc

SEQ ID NO: 798965 - DNA, 596 bp, Homo sapiens
tttgaacttaaaattatatgtcatagaattttacataacattatatataattttatataatagctacatgttgatagctagagactatgattgatatcttctatttaaataaaacatcttcaaggtagctttaactggtgycctttaaaaaaccaggaactggcccagtgactgtgttttatgaatgtgttattttattctctcctgggccacatgttttaaacaacataattaataagtcttgtattttcatctctgccaaaaagttatttggttcatgaaccatgggtttgacctaggtttgactgtacctgaatgaaactagtccttgttctgagccatgtgtcatcaggatttaaaaccaattcttcacgtagacatgatggatatgctggctcttcagaaatgcacagctagagagaggctggatacaaaagaagtatttcaagtcccttaagtagctttgtgcaacacaagttatttcgtactgcctaaaatgagcacaaacccagcagtgttcacaaaaccataacccacactctttcctcctgcagatggtcttcacagtaatctaattaaattattttgttagctaa

SEQ ID NO: 798966 - DNA, 504 bp, Homo sapiens
ggcaatattgaaataaagaaagggaggaaatggaaatactacgaacttccaaacaagcgcaagtccaaggattatagctttccttttttctttcctttttatctgccctcaattggctttagaatcatggtttgtaccaagcaggactcacgaaatgtttttttaccctttcatatcatgctgcctgagctcatgctttggggtaacttccttcatttgttaccatatggcacatccaaaaagatatgctatagcagacactgcatgccygaatcaaagcaagatccaagtggcatacacttacctggatagtgtatgcaataattctacaagccctacagccctcactgtccctagaggggcagagaatgtcagtcctccctgttcctccttggcctcttcggactgcccagtcttgagtctctggctgctggtgaatcctccaccaagggcagtgcttccagcacgaccagacccccactcagtatgcaggactatacagta

SEQ ID NO: 798967 - DNA, 504 bp, Homo sapiens
ggcaatattgaaataaagaaagggaggaaatggaaatactacgaacttccaaacaagcgcaagtccaaggattatagctttccttttttctttcctttttatctgccctcaattggctttagaatcatggtttgtaccaagcaggactcacgaaatgtttttttaccctttcatatcatgctgcctgagctcatgctttggggtaacttccttcatttgttaccatatggcacatccaaaaagatatgctatagcagacactgcatgcctgaatcaaagcaagatccaagtggcatacacttacctggatagtgtatgcaakaattctacaagccctacagccctcactgtccctagaggggcagagaatgtcagtcctccctgttcctccttggcctcttcggactgcccagtcttgagtctctggctgctggtgaatcctccaccaagggcagtgcttccagcacgaccagacccccactcagtatgcaggactatacagta

SEQ ID NO: 798968 - DNA, 526 bp, Homo sapiens
taggaaacatttcaagagctctcttctacctgatttgaaatatacactacattgttgtcaactatagtctgtgactatagttatctgtaaacactagaatgtattccttttatctaactggatttggcacacattaaccaacctytcttcatccctcccacccactctagcaacccttcccaggttttggtaactatcattctactctctacttccatgagatcagttttttttagcttcttcatatatatgtgtgagaacatgtgatatctgtctttctgtgcctggcttatttcactcaacataatgacttccagtcccatccacattactgcaaatgacaggatttcattccttttttatgactgaaaagtatttcattgtgtatatatgtcacatttctttattcattcatctgttgatgggcacttaggttgatttcatatcattgctatatgagtagtgctgaaataaacatgtgggagcattatccctttgatattctaatttttctgtcctttggata

SEQ ID NO: 798969 - DNA, 617 bp, Homo sapiens
aaaatatcccagattagccaaagcattcttttaaaaaaaatagaaagttggaagaagacaaaaccaattatggtaatcaggatagtataagctaggtctgaatgtatttcctccaaaactcatgttgaaatgtaaatgtcactgtgattgtattgtgagatgagacctttaagaggtgtttaagttatgagggtgcctcacaaactgactaatgccaktatcactgagaatggttaaccctttttgctgtctctcaccctgctggcatatgccttccactatgctatgaagcaggaacaaggctcctgccagatgccagcaccttgatattggacatcccagcctctagaactgtgagccaataaatatctgttcattataaattacccagtctgtgggactctgttacagcagcacaaaatgaactaagattgtgtgatactggcataaggattgacaaacagatttcttcaattatgttttactgttctttccactgactatgccataattggaaacagtacctgatttcccacaattttattttcctaactcacaagctccagctattttctaccttaacagccacagaaaatttatggagaagaattttagac

SEQ ID NO: 798970 - DNA, 588 bp, Homo sapiens
tgtggattttgaggaattgatcaatattatataagtcgtagaactcaaaagtaagaaaataatcttctagaaaatagaacaccttactaaagaaggtatacaaaaggtatacaaatggcaataactacataaaaacatattcgacattcttcgccattaaggaaattcaaattaaagccacaataggataagactatacagttattagaatgactaaaatttttttaaatactatgttagtcaattttcattttctataaagaactacctgaaactgtgtaatttatgaagaaaagagagtaattgacttacagttctgcatgtctrgggaagcctcaggaaacttacaatcacggcagaaggtgaagcggaagcaagcaccctttttcacatggctgcaggagagatcgagagcaaatggggaggggctacgcacttttaaacaaccacatctcacaagaaatctatcacgagacaacactagggggcgtggtgctaaaccattaggaactgcccccattatccaatcatctcccatcaggtcccttccccaacatgtgggaattataattctacatgaaatttggg

SEQ ID NO: 798971 - DNA, 588 bp, Homo sapiens
tgtggattttgaggaattgatcaatattatataagtcgtagaactcaaaagtaagaaaataatcttctagaaaatagaacaccttactaaagaaggtatacaaaaggtatacaaatggcaataactacataaaaacatattcgacattcttcgccattaaggaaattcaaattaaagccacaataggataagactatacagttattagaatgactaaaatttttttaaatactatgttagtcaattttcattttctataaagaactacctgaaactgtgtaatttatgaagaaaagagagtaattgacttacagttctgcatgtctagggaagcctcaggaaacttacaatcacggcagaargtgaagcggaagcaagcaccctttttcacatggctgcaggagagatcgagagcaaatggggaggggctacgcacttttaaacaaccacatctcacaagaaatctatcacgagacaacactagggggcgtggtgctaaaccattaggaactgcccccattatccaatcatctcccatcaggtcccttccccaacatgtgggaattataattctacatgaaatttggg

SEQ ID NO: 798972 - DNA, 431 bp, Homo sapiens
agaagaagcttaaaaaacaaaatttagtattgtttctatataccttaatgaaatagctgagaaaaaatatcaagaaagcaattccatttacaatcgacacacatatacaaatacctaggaataaatttaactaaagaggtgaaaggtctctacaagaaaaacagcaaaagtctgaaaaataaaaatagttgaagaggacacaaatggaaagacaccctgtactcatggatcagaggaattaacrttattaaaatggcaataataacaatgaaaactacagatttagtacactccctatcaaaataccaatgtcattttttcccagaaatagaactatcttgaaatttgtatggaaccaaaacgggtccaaatagccaaagaaatcctgaccaaaaagaacaaagctggaaggatctcactgacttcaaaat

SEQ ID NO: 798973 - DNA, 617 bp, Homo sapiens
aaaggagggtgctgggagctgttatcaggcactagccacggagcacgcctactgtgtcccgcacatcaggctaggggaaaagcacagactgagtcccaacttgaaatgggccagttaggacagaacctaggatcctaggtccgaggcagsccgccgaatgtgtggctggttctcatctttccactgcatttggaacctggattggtatggcccccctccctgttaggctgccccactggcttgctttctgcctcctgcacacaatgtgagggcagactgagttttgggaatgaggtgcccacagtggtcaactgcacaatgccgcatctcctggttgtaattaagttgtcatttggcacatttttgcttgggtgtggttttctggagcacctcaggagatgtcaaactccataactaagccctgggaccaaaatattcacacacaagtaaatgaaagcagacccgtcacttgggtctgccccctaaaatatggctgcccacatctttgaaagttacaaaccccactgtctatcatcccgcatcgactttatgttgctgatgcttgtcagctcatatgcaacctgaatcgcctaccactggggaaaaggtgaagtaaa

SEQ ID NO: 798974 - DNA, 617 bp, Homo sapiens
aaaggagggtgctgggagctgttatcaggcactagccacggagcacgcctactgtgtcccgcacatcaggctaggggaaaagcacagactgagtcccaacttgaaatgggccagttaggacagaacctaggatcctaggtccgaggcaggccgccgaatgtgtggctggttctcatctttccactgcatttggaacctggattggtatggcccccctccctgttaggctgccccactggcttgctttctgcctcctgcacacaatgtgagggcagactgagttttgggaatgaggtgcccacagtggtcaactgcacaatgccgcatctcctggttgtaattaagttgtcatttggcacatttttgcttgggtrtggttttctggagcacctcaggagatgtcaaactccataactaagccctgggaccaaaatattcacacacaagtaaatgaaagcagacccgtcacttgggtctgccccctaaaatatggctgcccacatctttgaaagttacaaaccccactgtctatcatcccgcatcgactttatgttgctgatgcttgtcagctcatatgcaacctgaatcgcctaccactggggaaaaggtgaagtaaa

SEQ ID NO: 798975 - DNA, 607 bp, Homo sapiens
tattaatataaagtcagcactttttttcccccttggacatgggacttctccagaaccctatcccataggggacatacatcatggatcaagggagcatttgtcagtgtgatatgtcttttctaaaaaaccttatatttctgaaactttctttccgttcatgcctagggcaggattatttccacaaaacagtaaattatagtattatctcaatatttaaaagtaacatttcagaagactatttcaaatgtcaaatttttaataactgatattgcaacttttcttagccaagccctatagtttctgaaaattattaatattttctaatgaatcatccttttattttaaaaagtcctggcgttcagttattttactcwgggttgcctttcacatatacaaatatacaaatacaactctagacaatggtaacagaaaacatgtttctttataaatgagcttatatttcaaggtatactgagaaattatgcagttgttatttgagatttattgtgtggtagaaaaatacaatgaataatgtctggtagtaaaataagagcaaaaaagacaaaacactccagattctaaagtgcattaaggaaattatttaaaa

SEQ ID NO: 798976 - DNA, 636 bp, Homo sapiens
acgagatctgatgattttataaggagaaacccctttcacttggttctcattctcttttgtctgccaccacataaaatgtgccttttgccttccaccatgattgtgaggcatccccagccatgtggaactgtgagtcgattaagctgctttttctttataaattactcagtcttgggtatgtctttatcagcagcatgaaaacaaactaatacaattacattccccaacaaatatgcacaaatattatgtaaaaacagaaatatataactttaaaaattgaaatataaattttttaaactattacaacattaaaatactgtttgagaaagcaaggacataattcttagtttcttgtcaggtgctgaccatatttctcacacgacccaaagctgctttcctttctggattatctcagagtgcaaaagygtgtccttccttgggatggcaaatattttaggcaagcagaatagaatgattttgtggcatgtgtctgagtggttcttgcattcccttagaaaagtatctgttgtcagggtcacagccagcttagtattgttttctcagaaataaatgggcaaggaaaactcccgtaccaggtgtacctcataacagggatccaaatttttcctaactgag

SEQ ID NO: 798977 - DNA, 528 bp, Homo sapiens
agaagtgatcttctaacaaatggatcctctggaaataacagctataaagccaagattaattattttaaaaataactacttgagtactctagggattgaagagaggcaagaagattttggaggagaatcaaaacatagaacaagctattggcataaaatgaattatctggtgtgtatgtgcttgcatgtgtacatatgcttgccttcagggtgaatgtagtcaataaaactcaaaaaaaaatctgtttggaggaagcagaggaaagagcctgagataagcaagttgctggattccatagattagaaccctgggggaatrgtaccagagaaggtgaatacccaagtacgtgtttaaactcaagtttttggatgaatcctgaaccacacacaactcatgcaacctagaaggaatttgaagccattgtttaaaaataaaactaaactgagatctgagcccaggcatgacagtttgcagtttgagtctaaccaagttaattgcacattaattaaaaaatatcaacagtcttca

SEQ ID NO: 798978 - DNA, 571 bp, Homo sapiens
ttctagccttcctcttcataaagcttaagaaaggctgcatgcctttcagactagcaggagccacagttcaggtagaaaagaattctcccttcacttattcagtcattcattcctgcatgcacatatgattacaacatagtacattatatttacataaatacatcatcttgtatttcctgccccttagascttacaacatagtggatcacatcttccaaatgccaagaccagggatggaagaatgactgctggctctgagtttatgcaccattaagtcctaacctattccttcataccttggttttcccaatgagaaaatggggctgcaggtgccacaggagaaaacctggttattctctttatgtaaccctcccttccacagtaacatcagaagaaatcgcaggtggcactggattagccttctgaggctgggggagggtggaaagaaaaagaagaaaacagaactctatgtatatggtgccctcagaccaggatcgatatgtcttgttcctgtaatgatttctgctgattaggagaaggtgggaaagattcgctctagatgaaagacctc

SEQ ID NO: 798979 - DNA, 470 bp, Homo sapiens
ataatgggatcacagaaagaacactcctgaaggaacagcaaagaaagtgtttggacttggggcccctgggggagccttgggccaagaaaaaaataaatcatctttcctggagacagagggacatgaaaggggtcttgaaagctatgagggaaaagaaaggcaggcgacaactattgtgatcmaaatgtggaattcacccaaactccctgaacagaagtccatcagggtaaagcagacagactgtggtttcctcgtgcctcctctctttcctgttctcaggggagaaattctatcctccagcttcttgagctcctgccccctgccctaagggacagcctgtgtggagccaggagtagtcaagaccacaccctcacgtgggaggaggaaatctcccacctcagtgtggggggattccaagctgggagcactgccatccccccacagccctgcaggacacagggagcccacca

SEQ ID NO: 798980 - DNA, 470 bp, Homo sapiens
ataatgggatcacagaaagaacactcctgaaggaacagcaaagaaagtgtttggacttggggcccctgggggagccttgggccaagaaaaaaataaatcatctttcctggagacagagggacatgaaaggggtcttgaaagctatgagggaaaagaaaggcaggcgacaactattgtgatcaaaatgtggaattcacccaaactccctgaacagaagtccatcagggtaaagcagacagactgtggtttcctcgtgcctcctctctttcctgttctcaggggagaaattctrtcctccagcttcttgagctcctgccccctgccctaagggacagcctgtgtggagccaggagtagtcaagaccacaccctcacgtgggaggaggaaatctcccacctcagtgtggggggattccaagctgggagcactgccatccccccacagccctgcaggacacagggagcccacca

SEQ ID NO: 798981 - DNA, 604 bp, Homo sapiens
acctcctgctcctgagaaacatccatatgggccaccccagcagacacactcccaggccgggtaagcagctatgtgcccatgtcctgggtctgagaaacatccccgtgggctgtccctggcaggtatgccccagaccattcaagcaaccatgtgtatgtgatcttagccagaggaacagacctatagccctaatagcagccccaagtcggtcgacctggggcaggtacatgcctctgacctgaaaaaccgcctgatgaacctacccacagcaaagccacaccatggccactatagcctatgtctttgagatacttgcaaacatcactagcatagatgacagctgaagaaatgacatagagrcgatactacttcatccacttataaccaaagccaatgcaccccagcaaactggcactccaagagccattcttagaaatgtatttccctacgaaacctacttcataaaactagaagagatgactgttacaccagatgtttagaaatcagtgtaaggacacatcaaacctgaaaaagcaaggaaatgtgacaactccaaaggaacacaattattatccagcaacagacatcaataatgagaaaatat

SEQ ID NO: 798982 - DNA, 649 bp, Homo sapiens
acagaatgaagaacaaaaaccatatgatcttctcaatagatagagaagaaagcatttgataaaatttaatatccctttatgatacaaactgtcaataaattaggtatagagggaaagtaccttgacacaataaaggttatatgtgacaaagtcacagctaatatactgaactgggaaaagcttttagttctgagaactgaaagaagacaaggatgcccactctcaccactcttattcaacacagtactggaagtcctagctagagaaattaagcaaaacaagaaaatgaagggaatttaaaygggaaagcaaaaagctcaaattgttcctatttgctgatgacatgatcttacatatagaaaaacctaaggtctccaccaataaaccatcaaaactgatagacaaaatgcagtaaagctgcaggatacaacattaacataaaaaatcaatagtgttcctctacccaaaccacaaactacctgaaaaagaaattaagaagtcaatctcacttacaatagctacaaaaaaatacctagaaataaatttaaccaaggaggtgaaaaaccgctacaaaataaaccaaaaaaatcttatgaaagtaattgaagatacaaataaatgaaaaaaatcccatgctcattaatcaaaa

SEQ ID NO: 798983 - DNA, 605 bp, Homo sapiens
ggagtccagtctctcctccctgtgagcctttgactccctgctcttcaccaaggagggcccctggctcaggcctgcagagcaaccaccacaccccctggtggaactttctccctggtagcagctctgcatttctctggggtggagctcccaaaggcaactgaaagccccttgtcattgccactgcactgagactgcccttgctgcccccggactgggtaaggaacaaagaccctgagtgctttactcagaacaccatcacactgaagtcaccctaagtagaagaggccagccttttttccctgtgagcccccgactaccctacttatcaccaagcaggccatctcagcttgagcccacaatgcagtcaccccagcccaggctgatcattctgattggtagtggctctgtgtttctatggggtggagccccaataaamaagtgaaaggccctctgccattgccactgccaaggtcatggcccctgcagcccccaaagtggagaggaaacaaaaagcctgagttccccccaggggtgttgtgtgtagaccaggagtgccaagctgagatctgtagtaagaactccagtgggagaggagcccacaccat

SEQ ID NO: 798984 - DNA, 492 bp, Homo sapiens
ggtaatgtgctccacacgtgtgcgagtcccagcaacagggacccttgtagacagcccagcaccagccatggttgcccctcctccagctcctaccatcagggactctttcccttcctgcagttaataatctctgatttacctcagcatctccaatatgcccttttcctttcttttttattttttattattttttttagagacagggtcttgctgtgtcgcccaagctggaatgcaatggagggatcatagctcactgcagtctcgaactactgagctcaagcgatcagcttcccaagtagctgggattacaagagcacaccaccatgccccacatttttttttyctttttttttttatagacggcggtcccactatgttgcccagactggtcttaaactcctagcctcaagtgatccttctgcctcagccttccaaaatgctgggattacagtaaggtgtgagtccacctcatccggccagcctttctctttt

SEQ ID NO: 798985 - DNA, 492 bp, Homo sapiens
ggtaatgtgctccacacgtgtgcgagtcccagcaacagggacccttgtagacagcccagcaccagccatggttgcccctcctccagctcctaccatcagggactctttcccttcctgcagttaataatctctgatttacctcagcatctccaatatgcccttttcctttcttttttattttttattattttttttagagacagggtcttgctgtgtcgcccaagctggaatgcaatggagggatcatagctcactgcagtctcgaactactgagctcaagcgatcagcttcccaagtagctgggattacaagagcacaccaccatgccccacattttttttttytttttttttttatagacggcggtcccactatgttgcccagactggtcttaaactcctagcctcaagtgatccttctgcctcagccttccaaaatgctgggattacagtaaggtgtgagtccacctcatccggccagcctttctctttt

SEQ ID NO: 798986 - DNA, 529 bp, Homo sapiens
ttctgttttgccttcctgctttgcttatttcttactctgtcaatgtcatctgcttcaagaaatgtatcttttaattaattattcttgtctcaagttgtctgctgtggctcactgtcagggcaataattcatatcggtaaaataggatatgttgctaaatggaaatatcttggcttatttcaacatgagattaacttcatttacccaataatcaccttaaatgakttttcagataaatctttttgttgtttatattttatttgaagttgcatacaacattgcttttctaaaagagcagaaatttggaagcatgagaacattaaactatagaagaccctagaagtctgattgaaaaaacatttagaaggaattctaaagctagaagccaagtccaacgacacaacaataacaattccattcatattctgatctatgggaaatctccaaaaaaggcctcccagaaatgcataataaaatatggatagttttgaataggttacacatggtttgcctgagtttattaaaacaat

SEQ ID NO: 798987 - DNA, 604 bp, Homo sapiens
agaaaattacccatttgtcacttgtgttgcaagtagcttttctcagtgggaagtttttgttttgactttatttatgatgatttttttcctgttcggaaataattggtcattttgcagcccaatttgcccaccattcttgttttgcttctgggattaatttattagccattccacacttcagagttaaaacattttcccaatgttttcttctaattctttcctagaaaaatatttttwaaaaaatcttaaagtgcacatacttttatgttggtgaagaaaaaaattgggtttcatttagagagcaagctcagtgccacagactgattcactgtctgaggaaaaccaaagacagatccaattttttggatatgtaagcattttgtgaacggttctaggagctccttatccaaactagtggttttcttaccctggttgacaattatcacgaccttgggaaattttctcaaacatgctggtacccagtatccaccacacaaagcaattgaatcagaacctctagggattgctgggtaagggctttttttaagtgctacaggtgattctaatgtgctgccaagactgagaaccactcatctaattacac

SEQ ID NO: 798988 - DNA, 477 bp, Homo sapiens
ttttcttcataaattttgattctccctgaattctctggataatttccacaattctctttattttgctaacatatgcagaatctataatcttcaagtcttcacttttcaaatgcaaaactattttagaagcagtttattgtcttttgaaaattatccatgttcatttaaaaacagattagctcttcaccttcaaygtatttgaattgtcatgttacaggagacttggaatattaagcttatcggaaagttaggacaagttttccctagagggtggagagtagttttaaattcgaagtggaaaaaaagttccatatcttaaaatagaagcaaattttttctctgtttcacattctctcaagatatcctcaatcctttttaaactctctatttattattaaatacaagcaatttagctcctttgtaaggttatgcaaataactcatccagaattagcatttaacatgcaattcttatatc

SEQ ID NO: 798989 - DNA, 562 bp, Homo sapiens
aaatgtggagacatcacattaaccaacttcaaactatgctacaaggttatcaaaatagcatagtgctgatacaaaaatagacacataggccaacaaagcagaataccgagcccagaaataatgccacatacctgcaaccatctgatctctgacaaagtcaacaaaaacaagcaatggggaaaggagtccctattcagctatgctagctggtgtaactggctagccctaaacagaaggytgaaactggaccctttccttacaccatatacaaaaatcaactcaagattgattaaagacttaaatgtaacacctgaaactataaaaatgttggaagataatctaggaaataccatgctggacacatgccctggcaaagattttatgatgaagacacgtaacacagttgcaacaaaaacaaacattgacaaatgggacctaattaaactaaagagcttcagcaaaataagctatcaacagaataaacagacaacgtacagaaggggaggaaatatgtataacctatgcatccaacaaaagtctaatatccagaatatataaggaa

SEQ ID NO: 798990 - DNA, 566 bp, Homo sapiens
accttgaactccagggctcaagggatccttccatttcggcctcccgagtagttaggactacaggtgtgtgccactacacacagctagtttttaatttttttttattttcatagacacagggtctcactatgttgctcaaactggtcttgaactcctggccccaagcaatcctcctgccttggcctcccaaagktctagaattgttacaggaaagaggtcccaatccaggcccaaagagattttatttatgtactagtgtggagcctagcctaggacacatcaagcagaagtgcagataaggtctgactctttccagtacagctagggtgcctggctctccacatgtccccagaccttatctagaatctaatgtctccaaggtaggtacattgaataattttcaaaagtcaaggaagcagtttatgaccttaaagtagttagcaaacttaatatctgacctgactaatttagaccaaatgtttacatttttgaagatatttttattttatcagtaatctttaaaactattttctattttccaaagattacttaagtcaaatgaacta

SEQ ID NO: 798991 - DNA, 647 bp, Homo sapiens
ttagaaataataaaaaaaaatccataaagttgcagggtacagaatcgacatacagaattagtagaatttctttaaaataatagtgagctatctgaaaaagaaatcaagaaaaaaattccatttataatggttacaaaaaagacatgtaggaataaatatagccaaggagatgaaatttctccacaatgaaaaccatgcaatgctgatgaaagaaactgaagattacacaagtaaatgaaaatatatcttttgtgtytataaattggaagaattaatgtcattaaaatattcatactacccaaattgacttacagattcaatgtaatccctatcaaaataaccagtgacattcttctcagaaatagaaaaacaattctaaaatttatatagaaccacaaaaaaccatcaatagcaaaagcaatcttgagtaaaaagaacaaagctggacgcatcacactaccttacttaaactatactacaaaatttgagttaccaaaacagcatgttactgacatacagactcatagactaatggaacagtacagagaacccagaaattaatccacgtatctacagtcaactaatttttgacaaaggggccaagaaaacgtactggggaaaggatagtcttttcagtaaatagttct

SEQ ID NO: 798992 - DNA, 631 bp, Homo sapiens
gctttttttcaattagaaaataatgattagtttgggatttatttaatccaattccttgtataagttatttaacacaccagaagactgtttataaaatgcacctaaaatgacattcctttttggtatttattttaaaacatgattttaaacgtaatattaaaaataaaaactttcagtcattttcagaatgtggctgctaaaaaataactagttcttctatttttcttacccttaaagcaacccacagattatatattctctaaagtatacagtatgtcaccaaacaaaatattttatatatactcttctttaacccttttgtgttaatacacttttctaatgatttaatatgtaaacaaaatgctaaattcagaatatcttatttatcttaaaagcatttgttgcctgggctgctagtttgcttatttggtctgaattaataattcrgtcatcgagtgtcatattgctgtgcatagtacataactataactaaatgtgaaacttattttctgccacatagcatcctcatataatacacacttaataaatacattttatctgagtcaacaataatgctccatgaagtcccatcagtctgtgaaagatctgatattcaatcacacttcccatt

SEQ ID NO: 798993 - DNA, 626 bp, Homo sapiens
tggaggaactcaacaccaaagaatgtttctgaagaataaatgtttgtttgctatttctgccttataaaagtcagtcatcgacccaatagttagaatcctgatgtgaattgcacccttgctgatagatggtccagctcccactagaaaatagaaaacaactcttgtttttattaaacggatctcatgaacacctcagatctactatcatgtggctgcccatttttattaatatgtgcttatgttaattcttatatgtagaataaacagtccattgccaggaaaatattttatgtaagcataaccatctatatatgaaattaatgtattttcttgtttcatcataaactttccttatggcttcaaaactaatattttagaagctaatatttgtctcctggggtgagttactctargtactactcttaaaatgttccaaaagggttatgaattatatagactgtgaaaaaatattcaaaatacattgtgtttcatttcaatttgaaaatttgaattgaattgaaattaaaatgaaataaaagttaaatacattacatttattttggcaataaatgtaggtctataagaaaaataaaaatactatgtatgagggaatggtctctagtttt

SEQ ID NO: 798994 - DNA, 629 bp, Homo sapiens
aggctagcagcctgcagctcctcaggctcctgccgggtcctgtctttcagcttctccaagtccagcgccaggtttttgtgcagctcaaagcaaagggcatcagttcttctatatgtcaccatgtcatcaaggctggaggtggtgagagacagagtcaagtggttcttaagggtttcagtccttgaagctccttgtttgccctgctttttcctatttcctatccagcctttcttccygacagccgacatctgacctatggagacagcaggtccaacatcagattcaagaagcaacagccctgcatagattcctccaccagcacccacgactgcatcagggctaacccgtggaataaaccactcttaatggttccgcttctctgatcaaaccctgattatgcccagccacctcatttccctcttaatctcttcataggcatctctctggtactccaagcagtttaattacccaggcatgttatgagagctccacctggacgccattgctatggccttgtcttccactgactcacctctccagtcacccaaatctcacgcacaacctacaaactccaactcaagtcctctctgcagcttccctcgaccacttcagcccctggtgacctcctc

SEQ ID NO: 798995 - DNA, 556 bp, Homo sapiens
tcctgacctcaggtcatccgtctgccctgcttccgaaagtactgggattacaggcgtgagccaccatgcctggccactaaattattatcttcatatttacctccaattcttccctttaaacagaagtcttgatatttgtacttgatttttcaagttwtagcattatctattgacttcctgctgtggaagattcagattaagctttatttcaatatttctgacctaaatcccttttccccctctattatttcctatccttccccattcttccaatatagatattttggtaaaatcagtcttttgttagtattctgtactttaaagatactattgacagctgaacagcatagtgaactgatttctttttctacacagctatttatttttcttggaaaaccctttatagaataaataataatataaataatagtttgtttaagcttatttatttatttatttatttatttttattttttatttttttgagacggagtttcgctcttgttgcccaggctggagtgcaatggcgcaatcttggctcaccgcaacttccacc

SEQ ID NO: 798996 - DNA, 595 bp, Homo sapiens
ccctaccctctcccatccctggaaaaattatcttccacaaaaactgtccctggtgccaaaaaggttggggatattgctgggctataccatttgtgtttgtgtagtacattctatgatattcctacaacaatgaaattacctaacaatacatttctcagaatgtcttaaatcttaataattaccttaactaatagttttttgtaagagaaatttccaaggccatttttaaaaagccacttaaaaaatacattcttcaggaatttttccaaaagatatactgccaggagtatatttgaacaataatacaaakgtcttaaaaataaagtaagccagctgggtgtggtggctcacacgtgtaatcccagcattttggaaggccaaggcagacagatcatctgaggtcaggagtttgagatcagcctgccaatgtggcaaaaccctatctctacttaaaaaaaaaaaaaaagaaaattagccaggcatggtgatgcacacctgtagttaagaaaaaaaaaaaaagaaaagaaaattagccaggcgtggtgatgcacacctgtagtcccagctacttggtaggatggtgatgtacacctgt

SEQ ID NO: 798997 - DNA, 635 bp, Homo sapiens
atgatggcttaaagaacatttcaaaaagtgttgcttggatgccttgaacgtaaacctattctacataaaattggtctcttttactgttattctctaaattgtttttcctggaaatcctgttttagagaactccgggtgaatctcagtgattttggggtccgggagaagaaaatacagagattagatttgaagtatggacagtatcagttcagtctttaagaacaggagaggtaattataggtaaatgatcactgggagtctaggcagggtagagatgggtgggtggaaactggggagctaagataattaaggctctaagtctcaactatcaaaaaatcttaaatgacagatagtagctatttggtattccaacaaatctttctattttggagaattcttactgagtctcatgcatacayacaaattaacataaaaattcacttgttgtatagagaatgtcaagtatatgcaaatactggtaatcttttgcagacatcagtggcatcaatgtatatattaagatttggcagatgactgatgccccaagtccatattcaagggtaagaatttagtgtttggatggagatctcctctagtttagagatctgcaataggctgataccttccaatttcca

SEQ ID NO: 798998 - DNA, 525 bp, Homo sapiens
actatgtacaaggcaatatgccaaatgccatatgtaagggaaaagtgaaagactgaacacaacctgtaaactccttaaagaatgttgttaataaaatttttcaaatatatttactacaaatctattagtaataaaattagatgttctatcatcmtctgaactttccctttttcccatattataatttccataagattaaaatccatgcatattttattttatagccactctccagatttaatctactgttggcaagctcgcacataattaaggttcagaattttatctaagacaagaaacattctcctttacaacaaaaatacaagcaaagttttgatttataatttcaaatagtcattgttttggaaggacagtcataaacagcagccaggaaaaaccacttatgaaaactacattgagttccttagcatctttttgtctcatgtaaaaaggagaatgcaagaaaagtgattctgtttgaatcctaaaaacgtttagaaactacagagaagaatatttgttgac

SEQ ID NO: 798999 - DNA, 619 bp, Homo sapiens
gaataaagccacttgtaaggtgtctgaggcatgagttagaatgacattccctgtgtttctgggccatgggagtcagggagtctccagcctgctgcccagtgtgcacatggcttcccagctgttttcttcgctcatcctcccatatgtagcaattcttgtgaaatgatgaaacttgtatttcttcatgaacaacactttaaaaaagaatgatagttgcataattaatgacatcagttttgtgtttggtagagtaagcaagtttggaaaagctcacctaaagttttcatttcaattctactgaatttcatggtcaaaattatattctagactatgttcaacaccacatatggggatgtcaacaaagatcttagcacatatctctcaggatttttgagtggctgatatattaaagaatatataacagagcagtacaatataatgaatgtttcagaaggcaggattatcmctgcatggtgcagttgacataatattgctggcaatgctaggtatggtctatttcattgcagcagtgttggaaaggctgaaaggtttggtgatctggaacagggcccacttcttaaaatagagtatacacaattagaagaaagtgttggcatgc

SEQ ID NO: 799000 - DNA, 576 bp, Homo sapiens
ataattatacaattgcttacttagttatataaatcattcatccaatttaataattttcaaatcagttattgatttatttagaagtcaataatataatcttttgtttatcatttcactaagtttctcctgtctgagtccagatttaatattgtgagccacatagcagtgttccaatgacttctccaataggtagttcccttatgtgtctgaaaatattaaatggaaaattccaraaataaacaattcatatgttttaaattgcacactgttctgattagtgtgatgaaatcttgtgccatcctgggctgtcctgcccgggatgttaatcatccctttgtccagtatgtccacactgtataagctacctgctcatttgttgtcaatactgtctgctccagacatccaaccatctaccctatcatggctccatcaaccagactcacccaaagcagatgctcctccttctgatgtatcattacagggtcagtagtagtctaacactgtgtcacaatgcctacatcattcacctaacttcatagcatcacacagtcgttttatcatctcacatcatcacaa

SEQ ID NO: 799001 - DNA, 601 bp, Homo sapiens
taacatctttcttgttcttgtaacctctctcttttctagtgttcttcccatccatgtatcccattcttctaagcctctatggttgattttccctcctctaaactgacctctgtttgagttcttcaatgtttcataataggattttctttttgccctctaaaggctttatacggtagatctcctgtgtttctacagatttaaataccatctacatgttgatgacgttcaactaatatccatttctttagatttccaattttatatgtctrtgtttccatttgacatctttatttggatattttatggacaccccagatgtaacatcaatcttgtgaatcccattccattcatagtcttcctcatgttagcaaatggcactttctttctccccagctgcattatccagaaacttgggaaagatcctttattctttcctctcccaatcctcctgcttccaaagtgttagtatggcctgaatgttttatctacaaattacgtcttatatgcttctattctccacatccattaccagcactccaagtcaagccatatacatagcaggtcataaaactactttaatagtattctgagtttccctatg

SEQ ID NO: 799002 - DNA, 586 bp, Homo sapiens
ttcttactgacttttatcttttttcttttccaattattgagagagatatatgaaattctcccactatgcttggatatatggctgactctaagaatggaaaaggaaaatgcagcactggagcatcttatagttctagagagtaaggaacaaaaggataggggcatgttatcaagtcatagagactgtcttagtcaataaagcctgttgtaacagaatactatagactgggtagcttaaacaacaaacatttacttctcacagttttggaggctgaaagtccaggatcaaggttccaaaagatttggtgtctagtaagggccacttctttgtttactgatgattctcttctcactgtktcctcacagggaggaaagaaggtgagataggtctctggggtcccttttaaaagggcattaatcctattcatgaggactccaccttcatgacctgattacctctcaaaggctccaccacctaataccatcacattgggggatagggcctagacatataaacattaggggaatgcaaacaatgtagtccattgcaggggccatcctgaaagagctcctgatggctcaaacca

SEQ ID NO: 799003 - DNA, 555 bp, Homo sapiens
cagtttattaaatcacgctggttgtaattattatcccaccaaattcttatctgtttcaaggacataaacatttatttcaggctagaataaatattaaaatagatctggctttggcttcattacttcctaagtcactgcttatctgcagaaagctcagtatttaataartgttaagaggtacttctaataggtgctcactttttgagctgcagaaagagcaaaaggttttgaaaggagttgggaggggcattgtttgtttgtctatctgcttttgtttccaacttttattttaggttagcaggggtacatgtgcggtttgttacataggtaacttgtgtgtcatgggagtttagtgacagattatttcgtcacccaggtaatgagcatagtgactaatggatatttttttggatgtcaagtaggccctgatgtctattgttcccttctttgtgtccatgtgtactcaattgtttaactcccacttataagtgagaacatgcggtatttggttttctgtttttgcattagtttgcttaggataatggcctccagttc

SEQ ID NO: 799004 - DNA, 586 bp, Homo sapiens
ggtggggatttctcatgaatgatttagcaccatactcttggtgctgttctcttgacagtgagtgagtgagtgagttattgcgagatctggttgtttaaaagtatgtagcacatcctcctctctctcttgctcctgctcttgccatgtaagacatgcctgctccccattcaccttctgccatgattgtaagtttcctgaggcctccccagaagccgagcaaatgccagcatcatgcttcctgtgtagcctgcagaaccacgagccaattaaacctcttttcttaataaattacccagtctcaggtatttctttatagtaatgtgagaatggaccaatacatatattttggtttttcggagtttttttgagakagggtctcactgtcacccgggctggagtacagtggctcaatcttggctcactgcaacctccacctccaggttcaagcgattctcccacctcagtctcgcgagtagctgggaccacaggtgcacaccaccatgcccagctaagctttgtgttttttggtagagacagggtttcaccatgttagtcaacctggtcttgagctcctgacctcaggtta

SEQ ID NO: 799005 - DNA, 591 bp, Homo sapiens
gcaaatacttgaccgactgactgtattagtttcctatggctgctgtgacaaatgtccaccaacttagtggcttgcactatatgaacttattatcttagagttctggaggtcaaaagctcaagatggactaaaatcaagtttttggcagggctgcatttcttctgaagggtctagggaagaaaccattttcttgcctttttcagcttctagaggctgcctgcatttttgctggtttgtggctccctcctccatcttcaaagacagcaatggtgggtagagtctttcttgcctcccatcactctgactctcactcttctgccatcctcttccactttaagggctcttgtgataatatgggagccactgaataatccagtcagctgactggcagcyttaattccatctgtaaccttaattcctcattgccatttaatctaacatattcacaggttccagggactaggatgaggacatctttgagggccattattctgctaccatactgactgacctatcatactttacatacttgcttaattgtccctgttccacagtaggccatagactccagaggtgtagaccatgctcatc

SEQ ID NO: 799006 - DNA, 619 bp, Homo sapiens
tcacagactgtgcaaccaccaccacagtcaattttagaacattttcatcactgaaaaagaagaaagcctgtaggctttagctatcaccccacctcctgtcttcctatctcctctaggcaactattaacctactttctttctctctgaatttgcctattctggacatgtcataacaatgaaatcacataatatgtggtcttttgtgatgggcttctttcacttagcgtaatgttttcaaggtttatcacatttactatgtattagagcttcattcctttttataggtgaaaaatattccactgtatggctgtgtcacattttgtttctccatttgtcagtgaatggacattgtattagtctgttctcatgctgctaataaagacatatccagccgggtgcggtggytcacacctgtaatcccagcactttgggaggctgaggtgggtgaatcacaaagtcaggagttcaagaccatcctggctaacacagtgaaaccccatctctactaaaaatacaaaaaattagctgggcctggtggcacgtgcctgtagtcccagctacttcggaggctgaggcaggagagctgcttgaacccaggaggtggaggttgcagtgagcc

SEQ ID NO: 799007 - DNA, 619 bp, Homo sapiens
tcacagactgtgcaaccaccaccacagtcaattttagaacattttcatcactgaaaaagaagaaagcctgtaggctttagctatcaccccacctcctgtcttcctatctcctctaggcaactattaacctactttctttctctctgaatttgcctattctggacatgtcataacaatgaaatcacataatatgtggtcttttgtgatgggcttctttcacttagcgtaatgttttcaaggtttatcacatttactatgtattagagcttcattcctttttataggtgaaaaatattccactgtatggctgtgtcacattttgtttctccatttgtcagtgaatggacattgtattagtctgttctcatgctgctaataaagacatatccagccgggtgcggtggctcacacctgtaatcccagcactttgggaggctgaggtgggtgaatcacaaagtcaggagwtcaagaccatcctggctaacacagtgaaaccccatctctactaaaaatacaaaaaattagctgggcctggtggcacgtgcctgtagtcccagctacttcggaggctgaggcaggagagctgcttgaacccaggaggtggaggttgcagtgagcc

SEQ ID NO: 799008 - DNA, 569 bp, Homo sapiens
aaaatgaattatgagaaggcaagaatgaccacagaaagaacaatagcaagaattttcatttgccccaggaagatatgatcatgatttaggccaagtttgtggtctagagcttgaaggaagataaatgaatatgaatgataaaatataagagaacttgagtaatggcttgaataaaaaggataaatttattctatagttgtgggagatatttggggaattttaagattttaagcaaggatgtagctttatctgactgtttaaaaacagcrtggaagactggaagaagaaaggtagtttggaatcaacaaaatcagtcaatgagaaagagaaagaggttgtaatgatagaaaatctgtcgaagaagaaaacccagtgcctagtgactcactacaattagtgccaatggagaatggaatctagaatgaacagatctttgtcttgagttactagatggagagttgtgacttttactgatgtagaaactacaagaggagacagaaagttgggggaataaacaaacacatttaccttaacatgtgctgagtgtgtggtgcctgtgggatatccaa

SEQ ID NO: 799009 - DNA, 587 bp, Homo sapiens
aaaaaaggaagaaatggttcttttttcttcacttgcttcataaaacccctttctaaagcatttaaagtttaatggccaagtgctcaaactggagaagggttaagtagcgtaaggaaacataggaataaaactttgttccaaatttcataatactgtcacactgcactcaatattattgagttccaaatctgttacactaagtattaacaaaatttcaggggagctccctaaactatttatagaacaytttgttttcagcatataaccaatattgaaagcaatgagtaaagggaatcctaaatatacacgtctcctagggctttactctaaatgactttgaaattttcggactctgaaaattaattttcccaaatcaggtcccttgaaaagtagtctctacaaatagaaggcagaaggatgatgaagataagcaggagaagaaaaatacataaattggccagagaccaaactatatttggcttcttggatttcaacattgattttattttattttcccaaatattataaacatcatgagatcctataaaccataacaagcagatagactgccttactgtaccccattt

SEQ ID NO: 799010 - DNA, 587 bp, Homo sapiens
aaaaaaggaagaaatggttcttttttcttcacttgcttcataaaacccctttctaaagcatttaaagtttaatggccaagtgctcaaactggagaagggttaagtagcgtaaggaaacataggaataaaactttgttccaaatttcataatactgtcacactgcactcaatattattgagttccaaatctgttacactaagtattaacaaaatttcaggggagctccctaaactatttatagaacactttgttttcagcatataaccaatattgaaagcaatgagtaaagggaatcctaaatatacacgtctcctagggctttactctaaatgactttgaaattttcggactctgaaaattaattttcccaaatcaggtcccttgaaaagtagtctctacaaatagaaggcagaaggatgatgaagataagcaggagaagaaaaatamataaattggccagagaccaaactatatttggcttcttggatttcaacattgattttattttattttcccaaatattataaacatcatgagatcctataaaccataacaagcagatagactgccttactgtaccccattt

SEQ ID NO: 799011 - DNA, 638 bp, Homo sapiens
accacatacctaaaattaagttttcttcaataaagtcaacaaaaatatatacactggggaaaggacaacctattcagtaaatggtgctggaaaaattgtattgccatgagcagaagaaagaaactgggccccatctctccaggctagctgatgaagtaccaaactgtatactgtatacaaagactaactcaagatggattgaagacttaaatgtatgatgtgacactatataagtcttagaaaaaaaaactgaggaaaaactcttctagacgaattggcctargtaaataatttatgaccaatttgtcaaatgcaacaaaaacacaaatagacaaatggaacttagttaaactaaaaagcttctgcaaagcaaaatatatgatcaacatagtaaatagacaacctacagaatgggaaaaaatatttgcaagccatgcatccaataaaggcctactatgcagaatctacccaaacaactggacaggaaaaaacaaacaaccccattaaaaagtggacataggacatgaacagatatttttcaaaagaaggcatacaaaaatccaacaagcatatgaaaacatgcttggtatcactaaaaatcagaaaaaatgcaaattaaaaccacaatgagatatatt

SEQ ID NO: 799012 - DNA, 638 bp, Homo sapiens
accacatacctaaaattaagttttcttcaataaagtcaacaaaaatatatacactggggaaaggacaacctattcagtaaatggtgctggaaaaattgtattgccatgagcagaagaaagaaactgggccccatctctccaggctagctgatgaagtaccaaactgtatactgtatacaaagactaactcaagatggattgaagacttaaatgtatgatgtgacactatataagtcttagaaaaaaaaactgaggaaaaactcttctagacgaattggcctaggtaaataatttatgaccaatttgtcaaatgcaacaaaaacacaaatagacaaatggaacttagttaaactaaaaagcttctgcaaagcaaaatatatgatcaacatagtaaatagacaacctacagaatgggaaaaaatatttgcaagccatgcatccaataaaggcctactaygcagaatctacccaaacaactggacaggaaaaaacaaacaaccccattaaaaagtggacataggacatgaacagatatttttcaaaagaaggcatacaaaaatccaacaagcatatgaaaacatgcttggtatcactaaaaatcagaaaaaatgcaaattaaaaccacaatgagatatatt

SEQ ID NO: 799013 - DNA, 657 bp, Homo sapiens
ccctaaccaaacactgaattttgccatgaaaggaacaataaagggtattctttaaagtagagagaaatagcaatggtcccagacatcctcaaaattcttctattatagaaacctgctggagttgaaaccagggtgaacaaaaaaagggaaaaaaaagctaatatttggttgtctcttaggtcaaatattgtcttggttaacggaagatgcaggtgaagctacaaaagtttagcttggacaaatcacttacttctatctaaattaaagctcagactcaaacttactytagtagccccttaccccaacccctagacagaggaaataacttgcattattttacaagtaaataaagcaataaaaactaaattatatagcaatctccatcatcattttatacacaacctccataatgtaataaaaaattataagacatacaaagaaaatgtgactcacaatcaagaaaaaacatagcaattagaagaaaacccacagttaacccagttaagggcattagcaattattttaaaaccaattttctaaatatggtaaagaatctgcagaaaaatacatatataacaaataaaaagatatggtatttcagaagagatatgagaactatataaaataaacaaaagacattataatatttaaaatcca

SEQ ID NO: 799014 - DNA, 584 bp, Homo sapiens
ttatacccactagaatgtctaaatttaagaaaactgacaatacaaaattttggtaaggatacagagcaactggggttttcaaatattgctggtaggggtgttgtcaagtttcttatagagtgaaacatgcacgtgccccagcaattttatccctggagacataaaaatatatgtgcacaaaaaaaatcgtatatggagtattatttttaaaagccaaaaaatgaaaacaaatttagcatccagcagcaggaaaacagataaataaaaatcatartagaatagttttggcaataaaaatgatcaactgaacacagaataatgtggataaatctcaaaaaaattagttaagaaaaagaatccaaacacaaaagagagtacacacttttttttttattcttgcaccgttcaagaacaggcaaaactaatttatgatagtggaaatcaccaaagtagctgattcttagtttaagaattgaataagaaggggcacaagggaaaaaaccttttgtgtaatgaaagcactctatattttaattgtacttttgtcaaagctaatcaacgggtatattttaaatgtgcccatg

SEQ ID NO: 799015 - DNA, 610 bp, Homo sapiens
tgtctagcctccctggctccagcaggggaaaagcatggcctgaagctgaagagatggctgccgccctttccccaccctgggatcttaggcagctatcagtcccagtgttggctgctacccctcccacaaggagctcaaatggcttagacagcccagtgtcctccggaaaagaaagctctggagggtcaggccactctttttcttcaaaataagkagggggtgcagaagggtagggatgaacctcttcctcctttgctgctttagctttagctggcaaacaaacctgctctgtcatctcttctgttatttcattatactttccttccttttattattagtgtgaaaaggttccaacgtagaacaagccagagcccacacttgtcccattgttaccctgatgcttccaagctcccctcaccacagggattgcttatgagtactcaggtgtcctccagcttagttccacattctccaaccgtcgctccagtgaccctttgacctgggttcgagactccacgtatgggcaccacttgccaagaccagctcggttgtggagacactaacccagcagcgctagaggaattaaagacacacacacagaaatacagag

SEQ ID NO: 799016 - DNA, 638 bp, Homo sapiens
atgccttgttcctgataccacttgtatctagaagtgtattccattatataggaaaattccattcaccacatatagcacagcataatgcatgcactttggtcaacaatggtgcatatatatgatagtggtaccacaagattacaatactgtgtttttactgtacattttctatgtttatatatacaaatgcttacctttgtgttataattatctacaatattaggtacagtaacatgctatacaggtttgtagctcaggagtaataggctataccatatagcctaggagtttaatagmctatcccctctaggtttgtgtaagtacactctatgatgttagcacaatgatgaaatcacctaacgacacatttctcagaatgtgtccccattgctaagtgacacatatatagctctagaacatttacttctatccagtggtcagtgttgttggtcacttcaatatagaatgttctgattacaaactgggctctagtgcaggttgagatttcttaaactaaaaatcaaaaatctgaaatgcttcaaatctgaaactttttgagcaccaacatgacagacaccacaagtgaaaaattctaaacctgacctcataggacaggtcacagcaaaaacacagttgaa

SEQ ID NO: 799017 - DNA, 561 bp, Homo sapiens
atcatggtattccctggaaatcattaaactattttttcttcatgactttctgtatcatatttaacccattcatccaaacttcaagtaattcctaacctccaccttcatctctttccacactttcctattcttcagctcataggctttcacaaattttatttttccatttgatttctttaccattttgattgcaaacagaattatgaaatgtctaagttagatcatttttggtagtcaaactttgatgagcagatgcatttattaacacatctacttctagaagrcaaaagtctctcactcttcattgggtctacttatatttaaatgattttacatgtatgtaggtatggctgcctaggaagaaggaagaagagttttaaagaaggggattcattcataggtgagagcatgaataaatatagtttgtttcctaagctctaaacgtagccataagcaatatatagtttgtataattccttaaactctaaaagtagccataagcaatgaacactgaactaaaaagagaaaagacagtataccttccatctcaaagaatgggaa

SEQ ID NO: 799018 - DNA, 610 bp, Homo sapiens
gtctttattaggagctacatcagaccccctttgaattagttttgtaaagacagaaaaaataaaccccaaatggagttatgtgtaaaggaaaacagccacagagaacaatccccaggcttcttcccacaagagctggggattggccaagcgggacctctggtagtcacccaagtgcccttctctgcacagaaaatctgaacccaggggctctgaggtgtgtgaaataaaaacaaatgtccatgtctgtccttttatggcattttgggactttacatttcaaacatttcagacatgtatcacaacacgarggaataacagttccagggatatctgtagcttaaatgagtagaggaaagtccctgaacactttccaaattgctctcttggaactgagtttctaactcactgtccaagcccagggctagtcagtaagcacattcactttgactcgtgttgattttcattagccacattatgtggtggtcaccctgggtctgcatgtcagtgggggctacttgaccttcaacagcttccctccaattaaaatagttttattctctgttttctaccacatgcctactgtgctattatgtaatatttcacctgtaga

SEQ ID NO: 799019 - DNA, 597 bp, Homo sapiens
tcacaaatcaattagaaaaggtttatcgattgtctccactgttcgatgcagccagggatctgttttacatagaatggacactcaataagtgtttgtgggtgtgttttttttacatcttttctaattataaaaattagaaaactcagtaaagaacatttgaaacacacaaaagaaagaactctggctgagtttttaccatggctckgtggtctataaactttgcaaccattcccgcccttcttcctacctcatcccgcctgcctttggctatgaagttttagcgaattaatgcaagtaaaaatgtttttaaaaggacatttgtagacaggagcatttgatgttgtttcagggcatcaaaataatgtgccagcagagtgtactgggatcttctcattttcatgcaacgtttccatccctgttgacattgcttcttagcatttgacaagatagatggaaaaacacttcattgattcgaaggaaaaaaacttccaagcacttaatctttcatctctacctataatgctttttattcttggaatcacacaggtgatcatgattaatattataaaaactccacaaaattaatttttcaaaatg

SEQ ID NO: 799020 - DNA, 664 bp, Homo sapiens
atccatcaagtattctgttttggccccaagaatacttagtacggcatcttattcagagtaggtacttgatatggtttggctgtgtccccacccaaatctcatcttgaattgtagttcccataatctccacatgtcagagggaagacccagtgggaggtaatttaatcatggaagagtttactctcatgctgttcttgtgataatgagtgagttctcacgagatctgaggattttataaagggcttttcccccttttgttaggcacttctccttgctgcagccatgtgaagaaggacatgtttgcttccccttctgccatgattgtaaatttcctgaggcctacccagccgtgcttaactgtgagtcaattaaacctcgttcctttataaattacccattctcgggtatgtctttattagcagcatgagaacggactaatacagtactcartgagtgctagtaggtagaaactttaggtggcactggtaaattaacaatctacaggggccaaagagtctgtgagcacctcatattcacacacacaagcacacatgcaaactccaaaacaacagacatttccaaaagtgggactccagtctctagcaacttacagagacaccagaagtgaggggacctaagcaaattcctctgttggattgtgttg

SEQ ID NO: 799021 - DNA, 664 bp, Homo sapiens
atccatcaagtattctgttttggccccaagaatacttagtacggcatcttattcagagtaggtacttgatatggtttggctgtgtccccacccaaatctcatcttgaattgtagttcccataatctccacatgtcagagggaagacccagtgggaggtaatttaatcatggaagagtttactctcatgctgttcttgtgataatgagtgagttctcacgagatctgaggattttataaagggcttttcccccttttgttaggcacttctccttgctgcagccatgtgaagaaggacatgtttgcttccccttctgccatgattgtaaatttcctgaggcctacccagccgtgcttaactgtgagtcaattaaacctcgttcctttataaattacccattctcgggtatgtctttattagcagcatgagaacggactaatacagtactcaatgagtgctagtaggtagawactttaggtggcactggtaaattaacaatctacaggggccaaagagtctgtgagcacctcatattcacacacacaagcacacatgcaaactccaaaacaacagacatttccaaaagtgggactccagtctctagcaacttacagagacaccagaagtgaggggacctaagcaaattcctctgttggattgtgttg

SEQ ID NO: 799022 - DNA, 614 bp, Homo sapiens
attcatctgacaagttattttgcattttatcacacataatatgcaatccatataaagatttcttcttctataaaacatgtttgcataattttccaatttttctattaggcaatttttctttttcttattggtatgtaacgaatctttatatrttcatcttactaattatttgtcataggtgttgcaatattttctcagtttatagtatgtctttcactacatttatgatgtatttgatgaacaaaaatatatagttttaagatagtttatcactattttattttatggttaatgctttttatgccttaataaattcttcttttctccaaagtcagaaagagatttacctctattttctactaaaaattttaaagtcttgcgtttgacatttaaattttcaatttttctggtgttcatttctatatggactatgagaaagggatccaaaggctttttttctttatacatccaacatttctagctccggtttttgaataattctacctttgcctacactacttttcatatatgaagcccccacatatatatgcatccatttcagagtctatattctgctccactggtccatctgtccatccttcactaacaccgtt

SEQ ID NO: 799023 - DNA, 614 bp, Homo sapiens
attcatctgacaagttattttgcattttatcacacataatatgcaatccatataaagatttcttcttctataaaacatgtttgcataattttccaatttttctattaggcaatttttctttttcttattggtatgtaacgaatctttatatgttcatcttactaattatttgtcataggtgttgcaatattttctcagtttatagtatgtctttcactacatttatgatgtatttgatgaacaaaaatatatagttttaagatagtttatcactattttattttatggttaatgctttttatgccttaataaattcttcttttctccaaagtcagaaagagatttacctctattttctactaaaaattttaaagtcttgcrtttgacatttaaattttcaatttttctggtgttcatttctatatggactatgagaaagggatccaaaggctttttttctttatacatccaacatttctagctccggtttttgaataattctacctttgcctacactacttttcatatatgaagcccccacatatatatgcatccatttcagagtctatattctgctccactggtccatctgtccatccttcactaacaccgtt

SEQ ID NO: 799024 - DNA, 616 bp, Homo sapiens
agacagcatagatatgcttctgataggaagttgccaaatgtattaagttctttattactcctcttgaagcattatggaaatgagaaaataaatggtaactaaagtcaaaagagctaggtctaagtcttggctttgccaatgsctaactctataatgctagcagtcaaccagctttcccaaatctatatttattcttctgaaaatggggataatttctgtctcattgggttattttgtaaaagtaagtgatattaatcaaaagaatttaacagattatagtgggttctcaattgatgctttttacagttgctctctgctaaacatgggttgatctttttattccaaagtgcctaaaagacaaggtaaggctctctatctaattggatgtacgagcttaggaacaatggttaacaatagggaaaataattaaatattttcaggcaacacaggggttttaagcatgagtgagccaaatttttgaatagtagcagctctatgacttaaaaataataattgtgtaatagtatcatatccaaacaaaagaagaaattagtatatcttgtggccaaagtggatccatagaagctatatgtttgaactacatgttgttgaattt

SEQ ID NO: 799025 - DNA, 612 bp, Homo sapiens
agagcatttgcaaggtgtgtgagtgtctggttttgttggtgaacccctctatacaattttagaagttggacttgctaagaagtttggactttaggtggtgtggtgtggggttcagtcaagtgatgaacaaggtaaaaggaagcagcaccatcttggtcaagaactctcaaaatttcattaaatagataatagatgggctggttgtgctggtcttttttttcccagcttcacagacacacaggtgtttcaagggctgttagccagtttccaaccccactgcagagatggactatgagaagttttgcccatgatytagacaagtggctcactccatgtggcacagcatccttaacactcccaaatttctttcccgccccaaaggtggatgaggtcttaaatagtaccaaaagagtttctttcttttagagtaaagctttgatttttgttaattctattttccccagaataattctttgagttgctatcaggcatttataaaaaggcccacagaattttagaatgttcattaagtcttttgacaaatattcactagaacttactctatacctgatgctgcacttggtctggaatctcttcagaagactggtactg

SEQ ID NO: 799026 - DNA, 532 bp, Homo sapiens
tgtttttcatgatgttagcatccactgtttggaaacagagattggataaatgcagattctcaagacagaagtcagctaaagcttttgaaatcaataataagttatgagtcactcaattcatttctaaataatagtcttaatgtcaccgattgctgtgatattgtataaacccagaaagaagagtggaaaattattccttggctatgacacaaaatattacagaccccaggattctttatgggaactgatggctttgggaacttagtgccctaagaaataaataagtgactctctaattacctttccactggtagatcaactataggagacattgtaaaactatattagttcagctagraaacatttgaccttattctcatgaatcgtttattctgttgttctcgtattttaaaggaaatgttttcttttctacaaggattcaaaaataagctgctaacttgacctgttaaactaactagcaaacttagtgatggagcaatacaaaaaccacctgaacagatagtaaagtatg

SEQ ID NO: 799027 - DNA, 626 bp, Homo sapiens
atgactaaaacacgaaaagcaatggcaacaaaaaccaaaattgacaaacgggatctaattaaactaaagagcttctgcacagcaaaagaaactaccgtcagagtgaacaggcaacctacagaatgggagaaaatttttacaatctrctcatctgacaaagggctaatatccagaatctacaaagaacttaaacaaatttacaagaaaaaatcaaacaaccccatcaaaaagtgggtgaaggatatgaacagacacttctcaaaagaagacatttatgcagccaaaagacacatgaaaagatgctcatcgtcaccagccatcagagaaatgcaaatcaaaaccacaatgagataccatctcacaccagttagaatggccatcattaaaaagtcaggaaacaacaggtgctggagaggatatggagaaataggaacacttttacactgttggtgggactgtaaactaattcaaccattgtggaagacagtgtggcagttcctcaaggatctagaactagaaataccatttgacccagtgatcccattactgagtatatacccaaaggattataaatcatgctgctataaagacacatacacacatatgtttattgtggcactattcac

SEQ ID NO: 799028 - DNA, 631 bp, Homo sapiens
aaatattaaaattggacctcttcaatactttcttcattaggctttattctatctcagtaaattgtctacattccacagttcagtagttcaagccaaatatctaggatcattcttaatttctacttttctctatgtctctctgaatctaagcattcaccaactagaacctcagaactatccacttctctgtatctccgtggatattatgaaagccacattatttcaacataatcagactccttgctttcacccttaacccacttatcctattccctatagtcacaagcatcttttgaaaatgtacatcagattattttatcaccctcctttaaacctttctgcggcctcccattacaccaacaataaaacccartctcccacagggttcagagctcccagagatctggctattgcctgcttctctcattttctttcatactattcctgtcctctcatgaatctacaaccacaaaagccttcttttttccccttgaacataccatgctcattcccacctcagtctttgcacctgcagttacttctacatacctggctgcttttactcacttccacattttatttaatgtgaggtgccatctcatctctcagttttcaactcagggagcttttt

SEQ ID NO: 799029 - DNA, 604 bp, Homo sapiens
tttattttaaataattcatttatattaatattactcttatttattccatgatgtatcagagggcagaactatatataaaacatggatgaaatttatgagaagggtgatatggggtcaataaaaggaacatatttctaaaacagatctttctacagtcatacaggttatattgccttaaagatgtagtatattccttgtcactaaaagcattcaagaacaggttacatttcttctctcargactaccaatacatgcagttagaagttaggccagccgatttttacgtatcttcttaatattgtgtgatacttgccctgttttctcaaaaattctctgcattttaaaggcttatacaacaatctaagtcttaaaccacaatctatacattcagaaatttcactgacattttcatttttagacacgtatagatgcactatagaaaagcaacatagaatatgaaaattttttaattggccttttctccttcgattgagatcaatactcaaaacattcaattcttttatgtgttaactgtctgttcatatactgggaaaaaaataaactcgatatgctcttgccaaaaaaatctatgtattcatttatc

SEQ ID NO: 799030 - DNA, 658 bp, Homo sapiens
tctgcgtccttttctctatggggatgaggatgctcctctcttccagatacaggaagggcatctctcacatgaaggtcttaggatctggttcagagaaggtcagaaagtccctcctaggtcttaggacctgcttcagggaagagaggaaggggaaggtcagagaccttcgtgcttctgctgttttctccaaatccttcagcttatatgccaaggtgccaaatttgggagtagcatgtcctaaaccccatcaataataatataaagcaccaagttgagtgccacaactgttagtttttgtccactctccagaagtcttgataaaaagaagacattagaatggccgggcacagtggctcacacctgtaatcccagcactttgggaggccaaggcaggcagatcacctgaggtcaggagtttgagaccagcctgaccaacatagtggcctctactaaaaatacaaaaatcagctaggcatggtggtgcrcgcctgtaatcccaactactctggaggttgaggcaggagaattgcttgaacctgggaggtagagtttgcagtgagccaagattgcaccactgcactccagcctgggcaacagagtgagactctgtctccagaaaaaaaagaggacactagaataataagatagctaggtccac

SEQ ID NO: 799031 - DNA, 615 bp, Homo sapiens
tttttttattgtacttatttacttatttatttttttgagacagggtcttgctctgtcacccaggctggattcatagctcgctacaccctcaaacttctggcctcaagtgatcctcctatctcggcctcccaaagtgatgggattataggtgtaagataccacacctggcctgaactctkctttaaaaactgcatgctgaagtgtacaggagagtgaattgtactattatctacaacttaagttgacgtgcaaaatgaaaatgagattgatagatgagtagaggaaaacacaaatgaataaatatgttaaaaacaaataagaaaatgttaattatagaatctactggcatttgtagtagtacaattcttcaaacttttctgtatttcttaaatttttcattaaagaaaatgtgaggggaaaaaatattaatactcccacaagtctgtgcaataggtctctggcagtaacactagactaacaagcataaacatattggttaggaagatactgtcaaattaaacctcttaaacttatgtaaagcggacattacaaatatccaatgagtcaactaattacccagagcttgcattaaggaaaggcatgatttggtggtta

SEQ ID NO: 799032 - DNA, 621 bp, Homo sapiens; identical to SEQ ID NO: 797929

SEQ ID NO: 799033 - DNA, 471 bp, Homo sapiens
atcctgatggaagaacacattctacttatggagtcttgatcaaacgaaaaagcaagcagaagagcctgaatctgacctagctttacatccaacatccaatttacaggaaatacatgggataaagaaacatgttaattgacaccataaggatgcaaccagcaaaatccagaccatgagaatctccaaggacaactagcccagtttcctgaacaaataagttaaaaaggacttcaaagacaaagcatgggccgggcacggtggctcactcttgtaatcccagcactttgggagaccaaggtaggtggmtcacctgaggtcaagaccagcctggccaacatggtgaagctcccatgtctactaaaaatacaaaagttagctgggcgtggtggcgcactcctgtaatcccagctactcaagaggctgaagccatagaattgctgaacccaggaggcagaggttgtagtgagccaa

SEQ ID NO: 799034 - DNA, 624 bp, Homo sapiens
ctacattctgactccaactgtcagattgtgacattttctctttctctgactttatgccaaatttacttcaacttctagcatccatcattctcatttatgaacaaatatgtatttaacaaatgtggaaatacaaatcatgaagcaaacaaaaccaaaccctgggcttacgtagccgatagtaaaaaattcaccaaaataaccacccgattacagtttcatgcaatgtgataggagtaagggaccaccatagggaggtcagaaggtgcttttcagaggtggagactacagctgttctcagaagaataggggttaraagaaccttccaggcacagagcaaagcatgagcaaaagctctgtggaggccaggaagctggtaaatagggaataaaagaggccagtttggctggagcagagagagcagaacggaattggtctgagtagtgagaagagatgaagaagtgggcaaggcgcctggccattcggggcttggttagttaggaggttttgtctaagagaatgggaaggtgtttaagtgctttaggctgggaagtgacatggtcacattatattttggaaaagccactctgcctgttgtgttgagattagagaggcgataaaggggat

SEQ ID NO: 799035 - DNA, 621 bp, Homo sapiens
acaaaatctctaattgccaggagcttatgttgaaaatcagattaaacacatacaaaatcatcataataacaacaatgaatactatattcataaataatagctgtaagagattttagtacatcttttaaattagaaaaatataaaaattattaaaactaaaatggccaggtgtgatggctcatgcctgtgatcccaacactttgggatgccaaggtgggaggatcatttcagcccaggagtttgaaaccagtctgggcactacaggaaaaccctgtctacaaaaaggagaaaattagccgggcacagtggtgcatgcctgtagacccagctactaaggaggctgaggtgggaggagtgcttgagcctgagagatcaaggctgcagagagccatgatcataccactgcactccagcctgggtgacagagcgagacactgtctcaagaaaaaamaaaaattatttgatgtagtcctaaaactattatgtagaatactattgtttatatcacagcacgtgagccccttaaatggcttaacacttatttaggtatgatccataaagcttttctggtaattaagtatacttaagaacaattaagtataaaagagttactgccttgac

SEQ ID NO: 799036 - DNA, 562 bp, Homo sapiens
atttatgtgccccacacgcttgtagcctctggggattcatggtgaacatatcaaggcctgctctaaggtggctgcggacatgtgtgcgagtcaccaagcacacaaaatggggcagtgtgagagagtgggtggcagtggagagaagtacctgggctgatgcaacacagccagctgcaatggggaacgcaggggactggggcagccctaactggccaccttatatgtgggctggggggtgtgttagggaaggaggaggtgatgtctaaggtaacacttggaagacgagtgaggggtggccaggcggagagggggctgaagtgccgcaggtgggacagggcagtctggaagtgagagtggatgtggccctgactgtcctggaggaagggggtcgctgakctggagagacctcagtgggggccaggttaccaagacctggccagaggcccagaagagaacggactttctcctggagcactggggagccgggtgcggggagtgttaagcagggaagaggctgcttcctatttgtatgtggggagtggatcccatagggtcaagatga

SEQ ID NO: 799037 - DNA, 655 bp, Homo sapiens
tgacaccagcatttgtctctggtcagggactcaggaagattctactcattgcagaagggcatagaggaccagagcaggcatcacatggagagaggaaggaaatgaggaggaggtcccaggctctttaacagtcagctctcacaggaatgaatccagtgagaactcactcattactgcaaggtattcatgagagctctgcccctatgttccaaacacttcctaccgggttccacctctgacattggggatcacatttcaacatgagctttggaggtaacaaatatcctaactatatcatatatatttcatatgcatttaattaccataactttagatttcattttaatgtgtagcaagggtagtttcactcaatccatttctctttataatatttcctttgccttttcatgaatgtattcttccttatgaactttaagaataaaatacaacattcattgaatatatttgcaaaattgatrtgagaaatgtacttggaattagattgtattctcatagcaaaggcatcctggagcacgtatatatctaggagtttgaaatggactagtaattttgcaagggattatggtattgagcaggagaaaggaaatgacccatggaatgtgtttctcatatcacatgaagtcaactcggagaa

SEQ ID NO: 799038 - DNA, 615 bp, Homo sapiens
gcaggcagtgctgtgtgacgtgctagctcacaacgtgtgtgcagagatgcaggcgagttaacactcagtgatgtgtaggcgatgtgtgcctgaaagtgaggtttgttcaagagctaaacatagaaaagtggatgactgtctgactctaacacatttgaatgtgtatgtttctgtaagaagagttttgataagttcgaaatctaaaaaaagaaatcagaatgaagtgttcatggaacccygaagcaccgttgcagaacagtttgtaaaccacaaagtttaattacacctaacgtcttttttggctttcatattttattgttttatttcatttatagctacatttgaatatctgtttatcagctttcatccaaaagacttgatggattgatttctgatatgtgccatcttggtagggtaattattgtgcttgattatttagacagtagagcttaaaattaactttagtggtattgcataatggaaactttttataaggccatgcaaatttattattaagtgaatcatcacaaattaagttgtgactagttcaccgctctgtgaacttgaattctctcttgcagaacacacaacactgatgccccaattgggggtgtc

SEQ ID NO: 799039 - DNA, 582 bp, Homo sapiens
atgacctggtttcctgctgtgctagagcatcatccttagtcctttcctcctaaagtaggcactgtttgaaatgaactttgatttcaaatgcacctgctctctattgatgttggccatttgcatttatgaatcttcctccctcactgttcacccactaccccaacccctgacctctcttttcatctggcccttycctacctatgataacactcaatggagtgagtggccattgcctacttggtttttgtttccccttagacctaatctgagatttgccaatctcatgttctaatatcccgactgctttttcaaataggagttagcagagtatggtgactccattttaatttgtgctgaatatttaggagtaaactcataataggcctattctggactctgctgttagaaatactccaacaatgacacaggatcaggaatcaatagtatttgtcaagtatttccatttctagcaagggaaaaatgatctattaaatatactccacattaacaaaaaagtccctgatttatgtatgttgatcaatgaaggttaaaaaacactgttaactaaggttttctatttgc

SEQ ID NO: 799040 - DNA, 621 bp, Homo sapiens
atgctgagcctcttccgttcccatgcccgtctcaaggccacttgctccgtgggcccatccagcaagcatggtggccaggaaagaagccggctccattcacagggcgtgctgttttgctcacctcaggaccaagagcatcctccatagtgattctctttggtgggagcactagaaacatgaaccacagataccttcagcgtctgagccgctgaggcgagggctgcaggacaccctgctgtcgggaaaccctgcactggcggctggaaggcatgtggtggtggcgcctgctgtggctgcagcagttgctgcsaggcttcgggatctcgccggcccctgcgaggtgaattgtgacagtgcagagctccgtggtaccagggccccctgcatggccatgctgactgcagctgggagcccaccacacctctggttccccgctcttcccagggctggggtctaggccaggcccctcttggcctgcgaattgtgccctgggagggggacactgttccacaggttgggaccaaggacccagggcatgctactggctggctgggctgcagggatgccatgctcacctttctctctcatggccttgacgggaccggcttcctcattgaacag

SEQ ID NO: 799041 - DNA, 593 bp, Homo sapiens
ttcctcatcactgttacccccgaggcccaggaccagcatcagagcatccatgggtgctccctaacttcagccctccccaaccagggtggtcctgggatacacataggggtggagggaagttactgttgctgttgaatatcagaataaaaatgttaatactattacctaataacctttcagtatctgtaggaactcttaatggtatccctttttgtatttctgatattttaatgatatgtttctctccatgacccttggttattctaggtagagggtcctgtggggaaagtgcctggcaccctgtaggggctcactcttctagamatgtgatctgaaatctggctcacctgtccttccacccagggcctaggggatgccgagttccggagaccagaaagagcttgggataaaaagaaggtttaaggggaaggctttgacctgggctgggtttgcctgcgccatccaaacctgcaggctcgagtcctgagacacagggggtccagatgtcccaatgcagggccctcctcattaacacctgctcccctgtactcattagtaacctcacccatcctaccctcaaagcacagttggcc

SEQ ID NO: 799042 - DNA, 615 bp, Homo sapiens
ctcttacatgatcacaatacatgatgctgaagccactattctggagaccacgctttgagaaccaacgcacagagactaagataaaactgctgttcaataaatgctcttctcctcatcctctactcttccctttccaaaagtcaactgtcattatcctatgaaaacagaactttgaatatgttatacaatcaatttgttggcagggaatacccatccccaacatatctactgagagactaaataaacaaatggtcaaaggccagatcgtaggtaactacgacccacgacctgcagmtacaagcccaggcaaccaacctattatctacaataaccagtctaggaagtcagactggttactgtctagcaactagcccaggaagcccaacaatgcccttaagaatttgtacaaagccacactatctgtgatcatgcctggggaacacagcaagatctcatctcttttttttaaaaaaaaaaaaaaaaaaaaaaaaggacaaaatggccaggaaatgattagtaactgtcagcttccctaatttttgctcctgcttccaatgtaggaccaaccagagaaagccaaaaatgtacccttaactaatcacacaggttgctatg

SEQ ID NO: 799043 - DNA, 615 bp, Homo sapiens
ctcttacatgatcacaatacatgatgctgaagccactattctggagaccacgctttgagaaccaacgcacagagactaagataaaactgctgttcaataaatgctcttctcctcatcctctactcttccctttccaaaagtcaactgtcattatcctatgaaaacagaactttgaatatgttatacaatcaatttgttggcagggaatacccatccccaacatatctactgagagactaaataaacaaatggtcaaaggccagatcgtaggtaactacgacccacgacctgcagctacaagcccaggcaaccaacctattatytacaataaccagtctaggaagtcagactggttactgtctagcaactagcccaggaagcccaacaatgcccttaagaatttgtacaaagccacactatctgtgatcatgcctggggaacacagcaagatctcatctcttttttttaaaaaaaaaaaaaaaaaaaaaaaaggacaaaatggccaggaaatgattagtaactgtcagcttccctaatttttgctcctgcttccaatgtaggaccaaccagagaaagccaaaaatgtacccttaactaatcacacaggttgctatg

SEQ ID NO: 799044 - DNA, 615 bp, Homo sapiens
ctcttacatgatcacaatacatgatgctgaagccactattctggagaccacgctttgagaaccaacgcacagagactaagataaaactgctgttcaataaatgctcttctcctcatcctctactcttccctttccaaaagtcaactgtcattatcctatgaaaacagaactttgaatatgttatacaatcaatttgttggcagggaatacccatccccaacatatctactgagagactaaataaacaaatggtcaaaggccagatcgtaggtaactacgacccacgacctgcagctacaagcccaggcaaccaacctattatctacaataaccagtctaggaagtcagactggttactgtctagcaactagcccaggaagcccaacaatgcccttaagaatttgtacaaagccacactatctgtgatcatgcctggggaacacagcaagatctcatctcttttttttwaaaaaaaaaaaaaaaaaaaaaaaggacaaaatggccaggaaatgattagtaactgtcagcttccctaatttttgctcctgcttccaatgtaggaccaaccagagaaagccaaaaatgtacccttaactaatcacacaggttgctatg

SEQ ID NO: 799045 - DNA, 544 bp, Homo sapiens
agaaaattatgctggaaataacagaaattgcttgcgttcacttggtcaactaataatgactgaacctcggtaacaaagatttctggggttatgaacgtcggtttttgcaatgttcacgaggttccaaggattatgacctaggccatacttaagggtacatagatattatatctatacaatctgtatagatatagtacagtcataatatgagctggaattgattttattaaagctgataatagaaaccagatggtccaagtatctgaatcaaatatagacttccttaagctagggttgaaaatagctcaagaaaaaatgaatgaagttctaaatatgacataagagctctgcggaggtaatataagtgtggatatccaagaataataatgacttgttctgractaagttaattacgtcttccaaggtattttatttggagaacgctgcatggttgtgtgctatatcctaaaattcaagtgtgcagaagacttatcagagggtgggtagaaagttgcaaccaatcaagttttacatgccttagtct

SEQ ID NO: 799046 - DNA, 609 bp, Homo sapiens
tgcttaatatactacattatttaaacaaatgtaaattacattgagttcatggttctatttatgaacttagaataagcatcgttaacacataaagaaaaaaacagacgacaagaggcctgcagaggagcagaaacaatgcggaaagtgagaaagaaaagtccagttattttgaaaaacaagaytggtttcaatattatcatttggccatcttaaggaactgcaggttaatcaatacattataattgattaaaaggaagtatttacaatatatacaatagtactaatatatttagacacataaactacatttaataaaatctgtgttaagagtcctaaacaatgctataatatttaatccttatctaagctaggcaacacaaagcaacaatattgttgataaacagctttgctacataaggtattgggaaactaagtaaacttgtgatagctttggtttttaaggtgctatggttggactccatttgacacatttaataaatggtgcatacaatttttagctaaatatctaacaggatgtcatcctaaaacctcatgttcctatattactgtgctgttaacagaaacagcttgcagagatttatggcttct

SEQ ID NO: 799047 - DNA, 584 bp, Homo sapiens
gaagtctgatatccaggatctacctcaaaaatgttaagcaaataaatcagcaaaacaaaaactcagtgaagaaagggcaaagggcatgaaaacacacatctcaaaggaaggtttatagcaaccaacggacaggacatttctctacctcagtaatcatcagagaaatgcaaagcaaaaggcccatgagatagtatttcacactggtcagaatgacaattatgacacagtccacaagaatgaatgccagcgaggcagaggaggagaggatgctggtctgctgttggtagaaatgcaaactagttcagacaccatggaaaacgatgtggggatttctcaaataactttctcgacatcaccaatccycacaaaaatgtccacaaaaaccacactaagagtccatctcattccactcagaatgaatactaccaaaaacaaacaaaacacaaatttttaaaggtgacagccagtgtagacttacagaagagaaacctcttaaatgctattggtggggatgtaaattagtatacacactatgaaaaacagctagaggttcctgaaaaaattcacagtacaactaccatgtc

SEQ ID NO: 799048 - DNA, 584 bp, Homo sapiens
gaagtctgatatccaggatctacctcaaaaatgttaagcaaataaatcagcaaaacaaaaactcagtgaagaaagggcaaagggcatgaaaacacacatctcaaaggaaggtttatagcaaccaacggacaggacatttctctacctcagtaatcatcagagaaatgcaaagcaaaaggcccatgagatagtatttcacactggtcagaatgacaattatgacacagtccacaagaatgaatgccagcgaggcagaggaggagaggatgctggtctgctgttggtagaaatgcaaactagttcagacaccatggaaaacgatgtggggatttctcaaataactttctcgacatcaccaatccccacaaaaatgtccacaaaaaccacactaagagtccatctcattccactcagaatgaatactaccaaaracaaacaaaacacaaatttttaaaggtgacagccagtgtagacttacagaagagaaacctcttaaatgctattggtggggatgtaaattagtatacacactatgaaaaacagctagaggttcctgaaaaaattcacagtacaactaccatgtc

SEQ ID NO: 799049 - DNA, 557 bp, Homo sapiens
gggactgtttgtggaaatgtaaattggtattaacactataaaaaacagttgggggtcctgcaaacaatagaaaaaaaaaaaggaaataccataccatctagcagtcccactactggctatatattcaacctacctgttcacccacagataaagagatcaagaaactctcatatacatacactggggaatattcttcggctatcagaataatcaaacagtgtcatttagagcaacccagatgaacctggaaaacattatgwtaaatgtgatgagctaggcctagaaagacaaacactgcatgataccactcatgtgaaatcttaagatgtttatcttaaagaagtagaaagcacaatattggttaccagagtctgggagacagaaggggaatggagaaggattggttatggaaacaaagttatcttaacattaaaagaataaatctgagtgttctcctcagcctggtgactggacttaaccgtattacatttttctaaagagcaaggagaattttgaatgttctctttacacaaaaataatacctgtatgagggaata

SEQ ID NO: 799050 - DNA, 640 bp, Homo sapiens
agggggcccaatagccacggaaagctgggggctggagggacagtcccgagggcagcagggcgtccttggcctcaccgtctacattcgtcctgtgggagcccgggggcgtcgctagggcccagactcctgcggcctcaccagggctgcctgggtcaccgggctccccaggaggcaggsagggaccctggggtccagcgctgcccccacctcaactccattctgcgtcagcatccgcgaggggatcctgtggactggacccagacccactccttcccggggagcgggacccgcatcggtctctgtgacacccacgggaggggccgtgctgacctctcccggggatctgggggcgaggtgggggaatctcggccacctcttgaagctcgctgagccccccaccccagagagcgctcaggagcaaaggaaaggacggagagcccacacattttctatctttcatttccgttttttcttttttcccccctccaaaatgaaagacgtgtgtagctttgtcccctgtacaccatccattccccatggccgctgtgcggatccagcccgctggttgcctctagggtcctgggcgcccggcggtccgcatgcagcccggggcctgcccaggtgaggtctgcggccgcca

SEQ ID NO: 799051 - DNA, 640 bp, Homo sapiens
agggggcccaatagccacggaaagctgggggctggagggacagtcccgagggcagcagggcgtccttggcctcaccgtctacattcgtcctgtgggagcccgggggcgtcgctagggcccagactcctgcggcctcaccagggctgcctgggtcaccgggctccccaggaggcagggagggaccctggggtccagcgctgcccccacctcaactccattcwgcgtcagcatccgcgaggggatcctgtggactggacccagacccactccttcccggggagcgggacccgcatcggtctctgtgacacccacgggaggggccgtgctgacctctcccggggatctgggggcgaggtgggggaatctcggccacctcttgaagctcgctgagccccccaccccagagagcgctcaggagcaaaggaaaggacggagagcccacacattttctatctttcatttccgttttttcttttttcccccctccaaaatgaaagacgtgtgtagctttgtcccctgtacaccatccattccccatggccgctgtgcggatccagcccgctggttgcctctagggtcctgggcgcccggcggtccgcatgcagcccggggcctgcccaggtgaggtctgcggccgcca

SEQ ID NO: 799052 - DNA, 640 bp, Homo sapiens
agggggcccaatagccacggaaagctgggggctggagggacagtcccgagggcagcagggcgtccttggcctcaccgtctacattcgtcctgtgggagcccgggggcgtcgctagggcccagactcctgcggcctcaccagggctgcctgggtcaccgggctccccaggaggcagggagggaccctggggtccagcgctgcccccacctcaactccattctgcgtcagcatccgcgaggggatcctgtggactggacccagacccactccttcccggggagcgggacccgcatcggtctctgtgacacccamgggaggggccgtgctgacctctcccggggatctgggggcgaggtgggggaatctcggccacctcttgaagctcgctgagccccccaccccagagagcgctcaggagcaaaggaaaggacggagagcccacacattttctatctttcatttccgttttttcttttttcccccctccaaaatgaaagacgtgtgtagctttgtcccctgtacaccatccattccccatggccgctgtgcggatccagcccgctggttgcctctagggtcctgggcgcccggcggtccgcatgcagcccggggcctgcccaggtgaggtctgcggccgcca

SEQ ID NO: 799053 - DNA, 669 bp, Homo sapiens
gcggatccagcccgctggttgcctctagggtcctgggcgcccggcggtccgcatgcagcccggggcctgcccaggtgaggtctgcggccgccacagcgctgaggtcccgcctggccggggcgcacgggccgctggggatgctggctgcgaggctccggggaggtggagcgggaggttgtcccaggccctggctgcagagctcttgatgtcacgcctgacaccctccatccaccgcctcggggcagcgcttcagagccccggcagaggcaagaagtcgatcacttygttcttcattcgttggaaaaatggaaaagcacattataatccctggaacaaccacttcagagaaagagcaaaaaattaaaataggattgtaaatgacacactgaaataagttgattttaaaaatggtagtcaatggaaaaacaggatcagaagacaggagagacagggaaaacaaataagttatctgactgaaacagaattagaaactaacaacagtaagaaatattggacatctgaaaatatgtgaaaatttaacaacccacctctaaatcattggatcaaaaaaaatcacaagataaattggaaaatattttgagctgcactccagtttgggtaacagactgagaccttgtttctaagaaaacaaaacaaacttcaaaaagc

SEQ ID NO: 799054 - DNA, 456 bp, Homo sapiens
gatgaatgaagccaatgtattgatattcaagtttatctagtttttataacaaaaatcaacaaaagatatgtcttatgcctaatagtaacaaagagaagtaattagtcaatgtggtttatcccaattctagctttctttgcttcatccagtagttcctggagctgccaaaatcaaatcctttttgtgtaaacatgctaaatgcatctgaagtgagttgactcaggtttcctcagcagaaaccccaaaattacataaataacttcttcttttccctccttcctgcctcamaatccctcttgcttgaggaaaataattgctacatcagtgatctcattggttctcgttccacaattttactggttattacaataacttttccgtctgtttttagcaatacgatgtgacgtctgtaaaatctatacttcaactcattctccttccacccttggtgaaaac

SEQ ID NO: 799055 - DNA, 456 bp, Homo sapiens
gatgaatgaagccaatgtattgatattcaagtttatctagtttttataacaaaaatcaacaaaagatatgtcttatgcctaatagtaacaaagagaagtaattagtcaatgtggtttatcccaattctagctttctttgcttcatccagtagttcctggagctgccaaaatcaaatcctttttgtgtaaacatgctaaatgcatctgaagtgagttgactcaggtttcctcagcagaaaccccaaaattacataaataacttcttcttttccctccttcctgcctcaaaatccctcttgctwgaggaaaataattgctacatcagtgatctcattggttctcgttccacaattttactggttattacaataacttttccgtctgtttttagcaatacgatgtgacgtctgtaaaatctatacttcaactcattctccttccacccttggtgaaaac

SEQ ID NO: 799056 - DNA, 456 bp, Homo sapiens
gatgaatgaagccaatgtattgatattcaagtttatctagtttttataacaaaaatcaacaaaagatatgtcttatgcctaatagtaacaaagagaagtaattagtcaatgtggtttatcccaattctagctttctttgcttcatccagtagttcctggagctgccaaaatcaaatcctttttgtgtaaacatgctaaatgcatctgaagtgagttgactcaggtttcctcagcagaaaccccaaaattacataaataacttcttcttttccctccttcctgcctcaaaatccctcttgcttgagkaaaataattgctacatcagtgatctcattggttctcgttccacaattttactggttattacaataacttttccgtctgtttttagcaatacgatgtgacgtctgtaaaatctatacttcaactcattctccttccacccttggtgaaaac

SEQ ID NO: 799057 - DNA, 611 bp, Homo sapiens
cttttccagaaaactgaagaggagaatatactttctgattcattctatgaagctggagttatgctgataccaaaaccagacgaagacattacaagaatgtaagactacaggctggggaattgtgactcacgcctgtaatcccagcattttgggaagccaaggtgggaaaattgcttgagctcagaagttcgagaccagcctggacaacatagtgagatgctgtctctattaaaaattttaaaaaagtagttgggtgtgttggcacacagctatggtcccagctacttgggagacagaggtgggaggtcraagctggagttagctatgatcgcaccactgcactccagccaggaattagaacgacaacctgtctcagaaaaaaaaaaagaagaagaaaaaaagtgcacaggtctacagccgtggtgcatccacagttttattaatactcagcaagaaaagggagtacactgttaacaagtacaacagcatagatgaatctccaaataattgtgctgaaataaatcagtccaaaaagcatacagttctgtatgattccacttatatacaactctagaaaatgcaaactaatcttggggacaaggacggatggc

SEQ ID NO: 799058 - DNA, 526 bp, Homo sapiens
ttataacatgatagtaagcaaataacaatcttaaaattttttaagtaaaagagcaactatattacatactgactttttagagaggggtggcatagaaagataaggagtcaaagaggaaggtaagaatagagaaaggatgagaaagtaaatatacaagaaaacgtaaccagaggctcaaaaaaaaagcaaagtagaacagtaaaataaacattttgacctatttatatractcttaagttcaaaataacttgctatgagattgtcatcattaactgacatttagattagagaaaatatacatgaaggaagcctcaccccaggcaatacaacagctccgattccacttttcagctttgacctgcctcggccacctcaccccgacagtcctgcacctcgaggtctccgctttcctggaaatccagacccacagccctatgtaacagattaagaaaagtcaacattctgtgacagcccaaaataatttttaaatccaaatgccactgagataaaacattttattaaatgt

SEQ ID NO: 799059 - DNA, 526 bp, Homo sapiens
ttataacatgatagtaagcaaataacaatcttaaaattttttaagtaaaagagcaactatattacatactgactttttagagaggggtggcatagaaagataaggagtcaaagaggaaggtaagaatagagaaaggatgagaaagtaaatatacaagaaaacgtaaccagaggctcaaaaaaaaagcaaagtagaacagtaaaataaacattttgacctatttatataactcttaagttcaaaataacttgctatgagattgtcatcattaactgacatttagattagakaaaatatacatgaaggaagcctcaccccaggcaatacaacagctccgattccacttttcagctttgacctgcctcggccacctcaccccgacagtcctgcacctcgaggtctccgctttcctggaaatccagacccacagccctatgtaacagattaagaaaagtcaacattctgtgacagcccaaaataatttttaaatccaaatgccactgagataaaacattttattaaatgt

SEQ ID NO: 799060 - DNA, 500 bp, Homo sapiens
ctcttaaccacagtttctaagaacttactgatgacaatgaggactttatacaatgggatagttagctttaagaaaggagatactgccatttgtgacaacatggatgaactgggaggaaagtatgctaaataaagtaagccagacacagaaaaatactgtatgatctcacttaagaagcagaatgggaggcagsggggtgagaaactgaatgtatagagagtagaatggtggttatcaagggtctggaggtaggggatgggtaggatgggcagaagtgggtcagagggtacaaatctgcagttaggtaagatgaataattctagagatcaaattaatacacagcatgagaaccatagttaataatattgtgtactgaaaatttgctgaaagagattttaggtgtacacacacagagagtaactatggaaggtgaaggatacagacatttgtttgaccatagtaatcatttcactatgtatacaaagcatgttgtatacctc

SEQ ID NO: 799061 - DNA, 558 bp, Homo sapiens
ctgcaaccctgggaggaacatattgctttcccattttataaatgaagtaacagaggctctgagaggttctcagttcctcaaattaaacacctagtgagtgggggaagttgggatttgaatccaggtgtgcctcgttaaaaagtaattgcggtagggagactttgacctttttaaaggctatgtaatcagagattcttctttctgcattcagttaatgctgtcctttacagaagaattttctccttgtagattgatgatgtggaggagttatggcactagtgttactggtagtaacaacagtarcagctaatattcactgagcatttcttgtaaaccactgggaatgctttacacataataacttagttccttgtttcttaatccatgcagtgctgtgagggggaccattttacccaacttcacagatgaggacactgacacagaagttacataaattgcccagtgtgccatagtaagtggcagagccaggattcaagtccagacaggcagtttggctccagagtccaagttcctaattttattattatatgttctaga

SEQ ID NO: 799062 - DNA, 558 bp, Homo sapiens
ctgcaaccctgggaggaacatattgctttcccattttataaatgaagtaacagaggctctgagaggttctcagttcctcaaattaaacacctagtgagtgggggaagttgggatttgaatccaggtgtgcctcgttaaaaagtaattgcggtagggagactttgacctttttaaaggctatgtaatcagagattcttctttctgcattcagttaatgctgtcctttacagaagaattttctccttgtagattgatgatgtggaggagttatggcactagtgttactggtagtaacaacagtagcagctaatattcactgarcatttcttgtaaaccactgggaatgctttacacataataacttagttccttgtttcttaatccatgcagtgctgtgagggggaccattttacccaacttcacagatgaggacactgacacagaagttacataaattgcccagtgtgccatagtaagtggcagagccaggattcaagtccagacaggcagtttggctccagagtccaagttcctaattttattattatatgttctaga

SEQ ID NO: 799063 - DNA, 593 bp, Homo sapiens
accttatgattcaggtactagttttgctgtcatcattgtgcagtggtgtgattgaaacttagaggcggccaggtgtgttggctcacaactgtaatcccaacatttttggaggccgagagaggttgcggtgagccaagatcatgccaytgcactccagcctgggcgacagagcaagactccgtctcaaaaaagaaagaaagaaacttagaggcattcatttaattacttgttcaaagtcactgtactagtaatgaccattgctgacattagactccaaagcagtctgattcttgaatccattttcttattgaacatactagaatcagtgaatttgtgcatgaataaatttctgaaaggcaataatgagcttctataatgtctttatatacctgtttatagcaaaacttacagctatttaaactttggtaaatggtagatgactgatggaaactaaaaataaatgatgaattcatgcctggaaatggcagagagattaattaaatcagtgtttctctgaacttgacaatttttaaaatcacttggaatgattaaaaaaatacacaccctgagcaacacccctgagtggtgtcatt

SEQ ID NO: 799064 - DNA, 630 bp, Homo sapiens
tacttttgttgggcatgaattcatctacatcatttcttccacttaagtctcttcgcttcccttcctctaaaattaagtgatgcctggaatgcagactgtgccattttcttcatcccaccaagctccagagaatgtgaatatagcatgtgattgtggacagaccacctgagtgagtaaaaaaagtaaaartgtccttttcactcctctctggctgtgtgcattgggcaaggtacatatcctttctaagcatcagctttcttgggggtactgggaataaaattagtcatctagaagagatgaagagtaaattttgtaaggtaagtagttggtaccttaactaatgcttcttccttttaaattcttaccctctacatttgactctactaatagctccaggagccttacgcgagagtactatcagaaactttcttcctttgatatttccttatgctttgtgtgtcagaaaactacttatgaaagaaattacttgtatatgtgtgtgtatacaataatgtatattatacttacagttggaaaaataaagcaaaaaaagagcaggaataaaacaactaaaatagttaaaaatatctgaaaatgcttgtctatattgtccacaatccttatagaaat

SEQ ID NO: 799065 - DNA, 593 bp, Homo sapiens
ctttctgttcctgtgttagtttgctgagaatgatggcttccagcttcatccatgtccctgcaaaagacatgatctcattccttgttgtgactgcatagtattccatagtgtatatataccacgttttctttatccagtctagcattcataggcatttgggttggttccatgtctttgctattgtaaacagtgctgcaataaacatacrtgtgcatgtatctttatagtagaatgatttatattcctttgggtgtatacccaataatgggattgctgggtcaaatggtatttctggttccagatccttgaggaatcatcacactgccttccacaataaatgaactaatttacattctcaccaacagtgtaaaagcattctttatttctccacagcctcacccacatctattgtttcttgatattttaataaatgccattctgactggtatgagatggtatcttcttgtggttttcatttgcatttctgtaattatcagtgattttgagcttcttatcatatgtttttggccacatacatgtcttcttttgagaagtgtctgctcatattctttgcccactttttaatgaggttt

SEQ ID NO: 799066 - DNA, 593 bp, Homo sapiens
ctttctgttcctgtgttagtttgctgagaatgatggcttccagcttcatccatgtccctgcaaaagacatgatctcattccttgttgtgactgcatagtattccatagtgtatatataccacgttttctttatccagtctagcattcataggcatttgggttggttccatgtctttgctattgtaaacagtgctgcaataaacatacgtgtgcatgtatctttatagtagaatkatttatattcctttgggtgtatacccaataatgggattgctgggtcaaatggtatttctggttccagatccttgaggaatcatcacactgccttccacaataaatgaactaatttacattctcaccaacagtgtaaaagcattctttatttctccacagcctcacccacatctattgtttcttgatattttaataaatgccattctgactggtatgagatggtatcttcttgtggttttcatttgcatttctgtaattatcagtgattttgagcttcttatcatatgtttttggccacatacatgtcttcttttgagaagtgtctgctcatattctttgcccactttttaatgaggttt

SEQ ID NO: 799067 - DNA, 616 bp, Homo sapiens
gggtttacaatttttattctttcacttagcaaatattcattgagccctttatttgtggtgataaggaagtggtgatagtatttttaaaaactgatggtattcttgttgtcaaggaacctatgccctaataatatcagatacataaatttacctttaagttaactagagttttactgcctgtaatagcaaattatttaatcaataaatctttcactattgaaaactttaaaacatagaagaaataattgtattaaaaacattaaagagctaataagaaagacaagcatcatttggtgaaagttcaggagtaggtaaaaatccagtgagacagacatggcatttgacaggacttttgccttgggataatttgctgacctacatcttggggccttagcatagatttgaaatccttrtcagtctaagtaaacaaaagttggattccaagtttcaccgagagtaggagtcatgtttaattactcctatttgggctgtcacttagaagcctaatcttttggaatagcacaggacatgtgtagtaatcacagagactgcagcacttcctggttttgtgttgtctggtggcccagaatattgcccgacctatatctggtagtgc

SEQ ID NO: 799068 - DNA, 644 bp, Homo sapiens
gaacttttaacacaatatttttaaagtagtctttttttattttaaaagaaattttaaagagtgtaattggattgttaattatttctttaactgaaaaaaatagtaactttctgcaacccaaattcaatcaagccttttatttaaataaagttatattaatgtataaaactcaaatgcccaaatcttatcagtctattacatgaaaccactgtttcactggcttttacttaaagctatcatactgcttagctgctaaaaatcgtcttttttccaaattcatattctttttgggragatttctggggcaatgtttctgaaatttagcattcatccacatcacccgaagaatgaaattgctggatcccatccccagactttcagtttagtaggggtgggttgggttcaagaatttatatttctaatgttccaagttgatgttgatgctgttatttctgagcccatagtttgaaaactattacttttaggggtgcctataaactccacgaccattttgtcctttgctcactacattggccagccagctgattatagtattctgaattcagttccattcttagttgactgtttccgagcaaaggaacacttaaccgaagactctgcatctgcgtcccttgagctgatgc

SEQ ID NO: 799069 - DNA, 633 bp, Homo sapiens
aaatatatatatattgagtcagcagctccctagtttcatgatggacttcgaagccactggtttaagctgggcatagtgggactgtgcccatatagttctgtgcctatagtcccagctacttggcaggtggcaggctgaagcaagaggattgtttgaggccaggagcttgaggccacagtgtgctatgatagcaccaaggaatcgccactgcacttcagcctgggcaacatagcaagaccttggtcccagctccctagtacccagaatgtttataacgactatgactgtcattcatgtggccacagccccattcactcagggcccagctctggggctcctcctaacccccaccctaaggtcatagatgaaatggatgggagactacrtactcaaaagttctaagctggggagtgtgggaagctgaatgggaatggaagctgactcacacttccagattccttcttcagcctcaggagaggctcattttcccactgatttcaggacccatttccagaggaagccaaaccctggattacttccctccttgctgctccacctctattccaccagctcacctctacaagaggaggacctagggccagtccctggagaaaagtcccaaaggagcttggg

SEQ ID NO: 799070 - DNA, 680 bp, Homo sapiens
ttgttttgttttgttttgttttttttgagacggagtctctatctgtcgcccaggctggagtgcagtggcgcaatctcggctcactgcaagctctgcctcctgggttcacgccattctcctgcctcagcctcccgagtagctgggactacaggcgcccgccaccacaccaggctaattttttgtatttttagtagagatggggtttcaccgtgttagccaggatggtctcgatctcctgaccttgtgatccgcccgccttggcctcccaaattgctgggattacaggmgtgagccactgcacccggccgaatttgtcttgttttgagccacccaatttgtgataacttggtacagccgctgtaggaaattaatacaccctatcatgaacaagaattaaaaatatgtttttggagaaaacagaaaaggccattaattgtattttatcttctggaatcatgagagtatttagagctggaaagaaagtaattttgaaagaagccaatgtgtaaatgcttggatataaacattccaagcaaaacatcactagtttgaactaattggaggaaaagtgcttctgatatggtaaagaataatggtagaatattttcatatacccatatattttcagaatgaggcttaatgcaagcctaagaatggatcccattgtaattaacaaacaa

SEQ ID NO: 799071 - DNA, 642 bp, Homo sapiens
tctggttccacttttgtttttgaccactccaacttacgctgatcttagccactaaatctgagttaatcttttttaactgacctatacaattacttaactcccttgtcaaacatatcttatttgtctaccagtaggcaagctccacgttagggatcctatgaagtgctttttgcacagcactaaacacagtgaatatttaatggtcaagattatgtgttgaatgaaagaaagaatgattaaatggccgaatractgacagtgaaggaataaatctgagtggttgcccagaagtcatgaaagcacataagtcattaaagcacatttttacgtctgggaaacactggtgttgataaactagaagatgggtattggagattaaaagcaaagctatatatctgggatgtatgtatatatatgtgtgtgtatatatatatatatatatatatatatttatatataatatttttatatatcccaaatctgctgtgtccagaaatgttaaagtgtagtgttcactgcagaaacttctttcactccaagcaatgcttgctttgctcttcctggggctcacctgggcttgcccttcctaagctgtgctctgtgacatctgtcctgcctaatcccactctttcttacataaaa

SEQ ID NO: 799072 - DNA, 512 bp, Homo sapiens
taacattggatgtatctattaataatttaagaaaaaattgcctggacaccactatctacagttcatgaatttatagtgaaacatgattaaatgaatccacagctaggaatcaagctgtagaacaagtgtgcattccccaagatggcctacaagaataattggatcttctgaaagaaaacatttgttaagcaaatcaatcaaatcaatctagcctgacataactggctgtcattcctgcacaaaatgaaatttatactacatgaatatgtatttgaattggrgaaaatacgataggaggaatataatcatttaatggggggctcttttaatacacagttgacagttaaaatttttattttggtaaggagaaaagtgtctgttgttaccactccaagacaaagttaattctggactggacaagttaaaattatgtaactgatgagtaactttattgtttcttaatttaaatttatgagaaatatattcttattattggaagagtatcctgcaag

SEQ ID NO: 799073 - DNA, 643 bp, Homo sapiens
ttttacatacgtgatgaaagtctaagaagccagagcacatgaaggagagaacctcagagatttgtaacaagaagaagccgctaatacttttgtaagcaggtctcactgccagagcccacaggtcaggactgttcaatagcagctaggcccatgacatggggtttcccagtgtgagctgtgccaataggaggatgggctgtccagctgaacctggagccaaggaaataaaaggctttggaggagacaccgcctgtgacaataagagagaggaaaatagcctgatttctctctttctccagtctacaatcactctcttgccagtatctcccattgagtgaaccctgccagaaactaaaaaacatagtaggctgggaatgcaccttctggtgtgggggcracatagagcatagcaagagaggtgcagagaatagctttgagatcaaataggcaaaaatgagtgcataatatctttccgttaattttaggtagaagttttcaaaaaatatacgattattttcaattatgttcaaaaccttaacattggtataaatttgttatatccttttcacatagaatttctccatgagaagggtaattaattttgttgatattttacagtctaactttgttgtctaaattctta

SEQ ID NO: 799074 - DNA, 592 bp, Homo sapiens
gacaggttacctaaatttcaagaaacttacagcttcacaccagagtttccagtccatgttttgtttctttttccatatttccagaatttttatatccttaagaaaagcctgtacagataaagtgttgagaaaacagtagcaatgatagcagatttaccacctgcccatttactgcctgcagatttacggccaacgccgcctattttgccatctgggtcaaagtcatattttcagtggaaatatgttggtaagttattgctggcattttttacatgcaggtggtgatcacacaggttttatggcactttcataactgtgcgtctgactgaagtgcacagaagctgatcttttgtgartgtctacagaagcaattcaatgaaatgaaatgcagtctattcattacatttaccagtgtgggaggaactccttaaacataaaatataatcctgagaaaggtgccaagtcatctatcctgtttgtttccagaggatacattgtggtacacagaaaaaaaaattggctactcttgcacagtgaggctagtgataccaagagagtttcagagttgatggtagatatttgttcagaatag

SEQ ID NO: 799075 - DNA, 526 bp, Homo sapiens
aagtaagtgaaagatctttacaaggacaactacaaaacactacagaagaaatcatagatgacacaaatgagtggagaatcattccatgttcatggatcagaattagtatggttgaaatgaccatattgcccgaagcaatgtacagagtcaaagcaatccctttcaaaattccaatgccatttttcaaaaaattagaaaaaaagaaatcctaaaaatcatatgaaaccaaaaatgtacttgaatggcaaagcaatcctaagtaaaaagacgaaagctggaggcatcatatyacctgacttcaagtgttactacaaggcgacaataagcatggtactagtataaaaatagatacacagatcaatggaatagaacaaaaaattcagaaataaagttacatatctacagacaactggcctttggctgtcaacaaaaatatacaatgggaaaagaacaccctttacaaaaagtggtcttgggaaaattggattgccatttgcaaaagacaaaaattggatccctatctctt

SEQ ID NO: 799076 - DNA, 574 bp, Homo sapiens
acctaccatggtgggaggtgggagggcaggagggcctccatgccatctcgaggggagccctgccacctcttaaagaacacccctctttggaatctcatgctgttgactgtttcacttgaattttgggggtacttttagaccagagctcaggctctacgttcggtggctctgctaggtggtggggatcagtgagmggcatcggtgggtgagaggcatcggtgggtgaacggcatcggtgggtgagaggcatcggtgggtggtggggatcagtgagagaccacacacactgttggggtgggcaggtcacccactgtccaggacgcctggctgggcacggctgctcaagtcttccctgtggtccagccgagggcggccgtgtgtctcgagctccctgatcagcatctgtggtgacagtggtttccctgcagctgctctcacatgggggcatggggctcacaggtggcaggctggcacgtttcttcatatcttccccccaccccaccccaggctgggcatcagcagcccctgcaggcatctctgtgcgaagccccacttgaggataggtgcacagctc

SEQ ID NO: 799077 - DNA, 598 bp, Homo sapiens
gtttcacttgaattttgggggtacttttagaccagagctcaggctctacgttcggtggctctgctaggtggtggggatcagtgagaggcatcggtgggtgagaggcatcggtgggtgaacggcatcggtgggtgagaggcatcggtgggtggtggggatcagtgagagaccacacacactgttggggtgggcaggtcacccactgtccaggacgcctggctgggcacggctgctcaagtcttccctgtggtccagccgagggcggccgtgtgtctcgagctccctgatcagcatctrtggtgacagtggtttccctgcagctgctctcacatgggggcatggggctcacaggtggcaggctggcacgtttcttcatatcttccccccaccccaccccaggctgggcatcagcagcccctgcaggcatctctgtgcgaagccccacttgaggataggtgcacagctcggttctctttagtggggcggcatcagtgccggaagagccctgctgttttttgtttggaaagcatctcctgtgtcctttaggtgtgtgggacccacgtgttgctcttgctcacttactctggctcatttgtgt

SEQ ID NO: 799078 - DNA, 574 bp, Homo sapiens
acctaccatggtgggaggtgggagggcaggagggcctccatgccatctcgaggggagccctgccacctcttaaagaacacccctctttggaatctcatgctgttgactgtttcacttgaattttgggggtacttttagaccagagctcaggctctacgttcggtggctctgctaggtggtggggatcagtgagaggcatcggtgggtgagaggcatcggtgggtgaacggcatcggtgggtgagaggcatcggtgggtggtggggatcagtgagagaccacacacactgttggggtgggcaggtcacccactgtccaggacgcctggctgggcacggctgctcaagtcttccctgtggtccagccgagggcggccgtgtgtctcgagctccctgatcagcatctgtggtgacagtggtttccctgcagctgctctcacatgggggcatggggctcacaggyggcaggctggcacgtttcttcatatcttccccccaccccaccccaggctgggcatcagcagcccctgcaggcatctctgtgcgaagccccacttgaggataggtgcacagctc

SEQ ID NO: 799079 - DNA, 631 bp, Homo sapiens
tcatcttccagaaagctctctccctgcaaggctgagtagctgcctctcttcggcacttgcacgggaccctgaacatgcccctatctgaaatgtggctgctgactgccttgcaggcttccctcactaaactgtgacctggattcgttagggactccggttcccagcacatcatctcatggtactccttcagtgtttcatgaatgaatgaacagcgacagtctcttgggtagcagccgcctcttttgggggcaagactacatgcctgaggaaggctcacagcaactctaaatgtttacatctatgtagatacacacatatagtggtgaagccatcttcaaatagagacccgtgtgtgtgtgtgtgtgtgtgtgtgtgtgtgtgtcttgttataamagaatatctaagtttggaaaattgttcacttccctttactttatcttcccctttgcttgtaagttgccatatagttgccatataagatgccaagatcggagagaattgcaaggaggaggcagtggccatgccatatatttttccattgtgactgcttgtgcttcattctgctctttcaggagctgtacatttgcacaccataacatttctcagtattcttactcagtattcaggacaa

SEQ ID NO: 799080 - DNA, 531 bp, Homo sapiens
ttcccctcaactccagcccctgacaaccaccattctacttcctgtctgagtctgattactttatgtacctcgtgtaagcaaagccatacaacatttgtcctttgtgactggcttatttcacttggcatcatgtctccaaggttcatccatgttgtagcctgtttcagaatttcactccttttctgaacaatattccattgtaaatacatagaccacattttgctcatccatccatgatggacactgggctgttcccacyttttggctactgtgaataatgttgctacgaacatgggtgtacagatatttgtttgagtccctgctttcaattcaactgggtttataccagaagtggaactgctgaatcatatgtaattccttgtttaattttttgaaaaactgtcgtatcattttccaaagcagctgcatgattttacattctcagcagcaacacacacatgttcagttttaaaatctgtacatctttgtaagaggaactaacttgggagctagttccttaaaacatatctt

SEQ ID NO: 799081 - DNA, 540 bp, Homo sapiens
aaacctctgcatcattttgttatctccttcctgaccaccataaaggggcattatggaggatccctaataattatgagccctctataaaaaaggtaaattagcagaaaccaccaccacaaaaagcccacagccgggcaacttccttcccccaagtggatgcctcacacaggaagcagagtgcctcattggatatattgaaaccatgcctttgtatcgcatttaccaccccggctgcaaaaaatgctygtaaagccatcatgggaggactaggagctgccaaccgcttcctctgctctcagcctgccgagagggtcagccatccttctctgctgaatgctcttgtaattgcacggcccactttattagctgccttgacctccaataaaagcttcagcctaacaatgtctgaaacctggggcagaatgtctaccgtgttaccaccttacatgctgccttcagggcctccacaaagtgcttgcgcgcacacacacacacacacacacacacacacacacaccatggcccgttagaaagtcgagt

SEQ ID NO: 799082 - DNA, 502 bp, Homo sapiens
actttcattttcaatgaatccctgcttttgttcttttgttgcttcatactttgctttgctttgctgggcattttgtccaattctttgttcaaaatgccaagaacctggacaacttgcagtcacaaccctcgaccagtgacaaggcaaggtggctcacacctgtgatcccagcactgtggaaggctgaggcgggaggaccacctgtgtccaggagttcaagaccaccctgagcaatacagtaagamcctgtttctacaaaaaaatgtaaaattagccaggcatggtggtgtgtggctgtagttccagctaccctggaggctgagatgggaggatgacttgagcaggtgaggttgaagctgcagtgagctctgtgatgctgccatcacacggcagcctgggtgacagaacaagactctgtctcaacataaataaattcaattaaattaaagcaaccttttaaaaccatttttaacattattaaaattattaaagaatttaaatt

SEQ ID NO: 799083 - DNA, 534 bp, Homo sapiens
caatgtcaagaagttatcctacacggtctaaaagggggaggaaccctccgttccaggaattgcccacccctttccctcatgaataatccagcccttgtttagcatataatcaagaaataatcataaaaatgggcaaccggcccggcgtggtgactcacgcctgtaatcccagcactttgggaggccgaggcgggtggatcacgagtcacgcctgtcatcccagcactttgggaggccgaggcgggtggatcacgaggtcaggagatcgagaccatcctggctaacatgtgaaacctcatctctactaaaaatacaaaaaattagccgggcatggtggcgggcgcctgtagtcccagctactcrggaggctgaggcaggagaatggcgtgaacccgggaggcggagcttgcagtgagccgagattgtgccaccgcactccagcctgggcgacagagccagactccatctcaaagaaaaaaaaaaaaaaatgggcaaccagcagccctcggagctgctctgcctatggagtagcca

SEQ ID NO: 799084 - DNA, 534 bp, Homo sapiens
caatgtcaagaagttatcctacacggtctaaaagggggaggaaccctccgttccaggaattgcccacccctttccctcatgaataatccagcccttgtttagcatataatcaagaaataatcataaaaatgggcaaccggcccggcgtggtgactcacgcctgtaatcccagcactttgggaggccgaggcgggtggatcacgagtcacgcctgtcatcccagcactttgggaggccgaggcgggtggatcacgaggtcaggagatcgagaccatcctggctaacatgtgaaacctcatctctactaaaaatacaaaaaattagccgggcatggtggcgggcgcctgtagtcccagctactcgggaggctgaggcaggagaatggcgtgaaccygggaggcggagcttgcagtgagccgagattgtgccaccgcactccagcctgggcgacagagccagactccatctcaaagaaaaaaaaaaaaaaatgggcaaccagcagccctcggagctgctctgcctatggagtagcca

SEQ ID NO: 799085 - DNA, 609 bp, Homo sapiens
tgtaaaatctttctatgacccaacactgtcctctagaggccgtatccaatttgttcttgagtacaaaaacatgtataagcaatggcattaaaaacaataaaattatacaataattctaagtacagaattcatggaatgtttaatatagacactattttatattataaaaggattttatatttgaataayctttggattttagaatagttttagatatacagaaaagttccaaatataatacagagttcccatatacctctctcactcagtttcctctatttttttccagtcttactgaggtatgatggacaaataaaaattgcatatatttaaggtgtgccacacgatgttttgatatacatataccttgtggaatgattaccacacaggctaattaacttatccaccgactcactagttaccttttttgtatgtgtggtgagaatacttgagaactactctcttagtaaatttcaagtatagaataattattaaccatagttaccacactgtacatcagaaattgtttttcttatcactaaaagtttgtactctttgaccaacattttcccatttcctctacccccacccccggttaactacccatct

SEQ ID NO: 799086 - DNA, 611 bp, Homo sapiens
aaaaaaaaaatagaatataacttgtagaataagaataaaaaggaagtatttaatacagttttacaatgtgtgttttaagctaagtgctattacaaaaaaagtcacaaagttaataaaaagtaaaaggtttacaatgtaaaaatgtttccataaactaaggatagtttctaattgaagaaagaaaatactttttaatgcatttaatatagactaagtgtacaaagttgataaagtctgtagtcatgtacacgactgtcctggctcttcacattcagtcaccacccactcactgactcacccagagcaacttccagtcctgcaagctccattcatggtaaatgccctagacaggttaccattttctgtattttatacagtatttttactgtgccttttctatrtttagatacacatatacttaccacggagtgacagctgtcttcagtattcactacagtaccatgctgtactcgtctgtagcctaggagtgacaagctatcccagacacttatggcccaggattgtggtaggatacaccatctgggtttgtgtaagtacatgctgtgatgctcacacaacgacaacatcacctaacgacgcctttctcagaa

SEQ ID NO: 799087 - DNA, 516 bp, Homo sapiens
ttgagaaactgccaaactgtttttcaaagtggctgcaccatttgacattcccatgaataatgtatgaaggttctaatttctccagcatcctcaccagcacttgttattgttaaaaaaaaaaaaaaaaaaaagaatgccatcctagtgagaagtggtatctcatcgtggttttgatttgcatttccttaatgactaatgaagttgggcatctcttcacgtgcttactggccatttctatawctttggagaaatgtctatgcagttcttttgcccatttttaacttgggttatttgtctttttattgttgagttgtaagagttctttttatattctggatactagtcacttgtcagatatatgatttgcaaatatttttctcccatgctatatgtcgtctttttactttcttggtagtgacctttgaagcagaaaaaggttttaattttgattgagtccaacttgtctttttttcctttttttttttaactcattttttgagcaacggggttttgcta

SEQ ID NO: 799088 - DNA, 603 bp, Homo sapiens
acaaagggccaccatagtatatgatgccatttaaataaaatttccagaacaggttaatccatagaaacagaaaatatactggagactgcctagggatggggagtttgggtagaagtggggagtgactgctaatggttatggaatttcttatttgggtgatgaaagggaaagtgttctacaaatgactgtggttttggttgcacaattatgtgaatatactaaaaatcactgaattgtaaacttttatttatttatttatttttgagatagggtctcgctctgtcacccaggctggagtgcagtggcacgataacagctcactgcagcctggaactcccagctccaagtgaaccttctgcttcagccccgagtagctggaaccgcaggygcataccaccatgtccagctgacttttctattttttgtagaaacagggactcactatattacccaggttgatcttgaattcctgggctcaagtgatcctcccgctttggcctcccaaagtgttgggattataggtgtgagccaccacgccaggacagaattgtaaacttcaaataagtgaattgtatggtatgtgaattacatctccataaagct

SEQ ID NO: 799089 - DNA, 658 bp, Homo sapiens
cagagattctggtacattgtatttttgttctcattggttcaatgaacttcctggtatttgccttaatttcattatttacctaagagtcattcaggagcaggttgttcactttctatgtaattgtatggttttgagtgaatttcttaattttgaattctaatttgattgtgctgtggtctgagagactgtttattatgatttcgctttttttgcacttgctgaggagtgttttacttctgggtatgatcaattttagagtaagtgctgtgtggcaatgagaagaaagtatactttgttgtttttgggtggagagttctatrtatatctgacaggtccacttgatccagaactgagttcaagtcctgaatgtctttgttaattttctttctcaatgatctgtctaatattgtcagtgggatattaaagtctcccactattattgtgtgggagtctaagttactttgaaaatctctaagaaattgctttacaaatctgggtgctcctgtattgggtgcatatatatttaggatagctagatcttcttgttgaattgaaccctttaccatcatgtaataccctttgtttttgatctttgttggtttaaagtctgttttgccagaaactaggattgcaacccctgctttttcctgttttccat

SEQ ID NO: 799090 - DNA, 573 bp, Homo sapiens
gggaagaacatggctaagaatcaggagaccatttgttcactcattcatgatttaatagcctcatttagttacaggaggctttgaaaatttagataagaggacacatatcctcttagagaagcctctgtccccgtctataaaatgtattatcctacctagcctgtcgacctcataggcatgagataagttattgtctaccccacaagtccctccatgtcccytggagaaccccctctattaccacttctttgtgtctcacacacacaccccaaaatcaaattcactgctgtctcatttcctggggatttaaatctaagaatgtctagttctgccaataaatggggattaacctttttgactgcacttttgaaattttttcaagtatttacatttcttcgaggatttaggttggtccaaaggcacttgctccatttaagttggttcgagaaccaacgtaaatcctccaagaaatgtaaatttattgtacagaaaatgtcaagggagaaatctggaggatcagagttttgtgggagttcacatgacacctaaggctagctaactgcttgaagtact

SEQ ID NO: 799091 - DNA, 384 bp, Homo sapiens
agaagtaaaattatttctatctgcagaagacataatcttatatatagaaaattctaaaaatggcacaaaaaactggctagagctaataaattcagcaaagttggagaatagatcagaacacaccaaaaaaatccactgtttttctacatattggagctgaaaaatatgaaaaggaaatttagaaaacttcatttccaayagcatcaaaaagaataaaatactcaggagtaaacgtaaccaaggaacaactgtatactgaaaacaaaaagttgctgaaagaaattaatatgaactaaatgaaaagaaatcacatgttcatggactgaaggacttaatattgttaagatggcaatattccccaaagtgatctatagattcattata

SEQ ID NO: 799092 - DNA, 384 bp, Homo sapiens
agaagtaaaattatttctatctgcagaagacataatcttatatatagaaaattctaaaaatggcacaaaaaactggctagagctaataaattcagcaaagttggagaatagatcagaacacaccaaaaaaatccactgtttttctacatattggagctgaaaaatatgaaaaggaaatttagaaaacttcatttccaatagcatcaaaaagaataaaayactcaggagtaaacgtaaccaaggaacaactgtatactgaaaacaaaaagttgctgaaagaaattaatatgaactaaatgaaaagaaatcacatgttcatggactgaaggacttaatattgttaagatggcaatattccccaaagtgatctatagattcattata

SEQ ID NO: 799093 - DNA, 621 bp, Homo sapiens
cctctctgagactcaatttcctattgtaaaatacagaaattgatgaggccataaaggaattctgggaattaaatgggataatgaaagtgaacattctcagcacagtgactggtatatattaaattcttgatacatattaattctcttccctgcctccccaactcttcttttttttttaaggcagggcagttgtttccatttactgagcatctgccccgagtcatccaaggtgttataggcaatagttcctaccctcaaaagtttgaggcacagtgctgagcatataactaagattccaaaataatcaagtcatagtcctttcccttgaagtgcttgcaattttgttagaaggggaagatgtcaattggagaatacttggaatcatagggtgttcaagtcttccctgtgggtgmatagagtttggagggagctcagatcacatcagtatctgaggccaatgtcctcggactctgtgttcagtggaacaagacttggactggttgtcggaaacccttggtcttgttacttgtttatccactatctctgtgtgatctcgggcaagtcattttcccttttggggactcagtttccatatctggaagatgaaagagtgagactatc

SEQ ID NO: 799094 - DNA, 649 bp, Homo sapiens
tcccaactcccaaagcagggcttgcacaatacatacttttgacttgccaaaaaataagtttatccctgggaaatttcccatccatctgttgctttgtagaaatgcttgaactttgcatgcagtatgtccaaacatttcgatcgactccctggttagagtctcagacctcgttattattattattattatttgagatgagagttttactctcgtcacccaggccatagtgcagtggcgcgatcttggctcaccacaacctccacttcctgggttcaagtgattctcctgcctcagcctcccgagtagctgggattacaggcatgcgccactatgcccggctaatttttatatttgtggtagagacagggtttcgccatgttggctaggctggtctcgaactcctgacctcaggtgatccgcccacctcagcctcccaaggtgttgggattacaggcattagccaccgtgcctgaccttacacktttattcttattttatttttcttctttttgagatagggtctcgctctgtcacctaggcactatcaccactcacttcagcctcgacttcccaggctcaagtgatctttccacctcagcctcccaagcagctgggaccacagatgcgtgacactatgcccagctaattt

SEQ ID NO: 799095 - DNA, 546 bp, Homo sapiens
atgaactcctgggctcaagcaatcctcccacctcagcctcccaaagtgctgggattacaggtatgagccaccggacccggcctggaaagcattcctttttaaaccaggaaaatggcaagaatattctcttatattctctatcactttttttttttttttttyctggagacagagtcttgctctgttgcccaggctggagtgcagtggcacgatctcggctcactgcagcctccgcctcctgggttcaaacgattctcctgcctcagcctcctgagtagctgggattacaggcatgcaccaccacacccagctaatttttgtatttttagtagagatggggtttcaccatattggccaggctggtttcaaactcctggcctcgagtgatccacccacctcggcctcccaaaatgctgggattacaggcgtgagccactgtgcctggccttctattactatctctgttaaacattgtactagaggttatagccagaacaataagttgaaacaaacattataaaaattaaaaaagaagaaataatctgt

SEQ ID NO: 799096 - DNA, 604 bp, Homo sapiens
cgcctggctaatttttgtattttttgcagagcccagatgaactcctgggctcaagcaatcctcccacctcagcctcccaaagtgctgggattacaggtatgagccaccggacccggcctggaaagcattcctttttaaaccaggaaaatggcaagaatattctcttatattctctatcactttttttttttttttttcytggagacagagtcttgctctgttgcccaggctggagtgcagtggcacgatctcggctcactgcagcctccgcctcctgggttcaaacgattctcctgcctcagcctcctgagtagctgggattacaggcatgcaccaccacacccagctaatttttgtatttttagtagagatggggtttcaccatattggccaggctggtttcaaactcctggcctcgagtgatccacccacctcggcctcccaaaatgctgggattacaggcgtgagccactgtgcctggccttctattactatctctgttaaacattgtactagaggttatagccagaacaataagttgaaacaaacattataaaaattaaaaaagaagaaataatctgtcattatctattggtgctatgaa

SEQ ID NO: 799097 - DNA, 622 bp, Homo sapiens
aaaatagatcttctggacttcacagactgtacttgaatcactactctatatgatctctttcctatgctagatacaatgataatcataaacaaggggtaatctagactttcattatctttggtaaattcacagaaaatgcccatttaattacaagatactactatactgagattttaatagtaaagaattaatgaagaatttaaatattctagttacaaaaataattaatttagaactatgtgtagcagtttgagatttaaatttatttatgaaaagttacattaaaatatgtttcatatattctcaatacctctctgaactttttcttattcttaagatatttcattgaattgtgatactgatttcagatataacattgttagaactctggttaaatacactggtaacatttgttagyggttaaaaatttaacacgggcttatggttcaatgtagtagattgagcatatgctgatgtctactgctttgttccaaaactcattttaataggaatacaagtatagaaataagaaatggaggaagagtgtcaatggggtatgaaagcatttgtaaaatcttatgggaagtaattagtggatgaaggaatagaaatacaggaaacc

SEQ ID NO: 799098 - DNA, 651 bp, Homo sapiens
aacagaatagtgaattccgattggtatagaacatgaacagatgcgttctgggagggactggccgtcactcgctgcgtgtattagtcacagatttaggggccaggctggggtcggcagagcactgtgtgccctgatgtgctgcacatctggttggcagggccccggggarccacgggacatatttctgaaggtggccagtggtccaagcccggagatcaaagacttctttgtcatcatttactcgtaagtgcacaggctttggggacctggaggcggtggcggaggagaggaggaggcaggcctggggctgctggtggattgaaagtgggcttggccccttcctaaaattgggggagctttcgggccttcgctttgtgaggcgggattctgctgcgagttcagggcccgcaggggtctagggaaggcaccttggaggggcacgtgcagcctgagggacttgggatgcagctcctgccaccaaggagagacaccagtcagcctctgtccccagatagtggcaagggccacccagaagcccctcattacctttttcttgctgagtccctaggctgaacagcatgaatgaagctgtggtccctcctgcggagaggcaggactgtggtggaaatgcccatccctctctcctccagg

SEQ ID NO: 799099 - DNA, 528 bp, Homo sapiens
aaataaaaacacagtgctaattcagacaatataatgaaagaaaacatcccatttacaacagcagcacaaaaaattaaatacccatgaaaaaatttaataagaattgttaaaaatctacattttaaaaccatttttaaaatcattcctgaaagacacaaaaatagacttgaacaaatggaaagacatcctgttcttggttagggcaactaaacatccttgagatgtaaaattctctctaaattcaatcataaatttactgcaatcccaatttttaaaatgccaatcagcattttttggagctagacctcttgatacaaaagttaatccagaaaataaacatgcaagaaaagctagaaaagcaaggaaaasaagaaccataaagctgaacttgccttaccaaatgctaaaacacacaacagagcctccaaaattaaaacagtatggccatggtacattaacagacagggcagcccatgagagtaaaagtccaaaaacagatgcactatccataaagacagagtatgtgat

SEQ ID NO: 799100 - DNA, 645 bp, Homo sapiens
tttccaccacttctagcattcacctatcctgagttttcttaatttctgaaatatgctacggtttcagccactacatgttgacaatgtttcaactccctggaaaagtcttccttccttcctttatatatttttttaacctaactaaagtctgggcttaaatatctcttactccaggaaacttattccagatcttccatactaagttaggtctcctttaattgcaataacttgtttattgtrtttatttattattttaataaggtctgtcttccttgctttactgtagactttaagactgtagggaacaaagtcaatataacatttttttcccctggcatatggaagaattaaataaacatggttggataaccaaattgtacctatatttccatttttgtggctgactgactgaattatatttagggctatccagaataactttttgtgatggtagaaatgttccatatctgtgctgtccaatgtggtatcccataaccacatgtggctactgggtacttgaaatatggctaatgcaatggaaaaatcttacatgtttctaattttacttaatttacatttaattggctagaggctaccatattaaagtgcacaggaaagatatttccaccttctaagtcatatttc

SEQ ID NO: 799101 - DNA, 645 bp, Homo sapiens
tttccaccacttctagcattcacctatcctgagttttcttaatttctgaaatatgctacggtttcagccactacatgttgacaatgtttcaactccctggaaaagtcttccttccttcctttatatatttttttaacctaactaaagtctgggcttaaatatctcttactccaggaaacttattccagatcttccatactaagttaggtctcctttaattgcaataacttgtttattgtgtttatttattattttaataaggtctgtcttccttgctttactgtagactttaagactgtagggaacaaagtcaatataacatttttttcccctggcatatggaagaattaaataaacatggttggataaccaaattgtayctatatttccatttttgtggctgactgactgaattatatttagggctatccagaataactttttgtgatggtagaaatgttccatatctgtgctgtccaatgtggtatcccataaccacatgtggctactgggtacttgaaatatggctaatgcaatggaaaaatcttacatgtttctaattttacttaatttacatttaattggctagaggctaccatattaaagtgcacaggaaagatatttccaccttctaagtcatatttc

SEQ ID NO: 799102 - DNA, 603 bp, Homo sapiens
aatgatgactttttaaaaacaatatagtcagtaaaaaaaaatttttttttttttgtgacagagtctcgctctgttgcccaggctggagtgcggtggtgcgatctcggctcactgcaagctccgcctcccgggttcccaccgttctcttgccacagcctcccgagtagctgggactacaggcgcctgccacygcgcctggctaattttttatatttttagtagagatggggtttcgccgtgttagccatgatggtctcaatctcctgaccttgtgatccgcccaccttggcctcccaaagtgctgggattataggcttgagccaccgtacctgtcctatagtcagtaaaaattttactaagacaaggctgtggaaaattctaagaatttgtggatatttgtcttgacatgttgctcttctggatcctggaatcaatttagctattgtacttgccaaacaagtcagattccttagagttgcttgttgcaaggtgtggcagattgtattctccaaaagtagccacagtaatatttctggggcccattgacagctgcagcctttttcccttccccttgaagctgggcaggattttgtgaccgccaca

SEQ ID NO: 799103 - DNA, 582 bp, Homo sapiens
ttttaaaaaaaaactagttctccaataattggtctatgtccaggttatttttgctagcttagtatagacttagtgagactccagaattggaattgaggtgagattagttgatttctcaattaaaaaaaaaaaaactctaagataagctcctgacaaataaaagaataacattactttcttttcacaaagattccagtaaaatctttgctttttggtaataatgacaacaaaagttctcaattaccattacaataactgcaagctttgtgttttcttttttccttctccaatcaggagcatttgatccctccaaacaggaaatgagtgaaaaactcaaatgacatttccactgtcatttctggtgctaatgcctgtttactttttatgttacctcatctgcagagcttcaaagcaagtgaaactggygccctgaattcaggctacctgggatggcaataaaagcaaagcacgtttctttgtgatgctaccctgtgaatgaaatctgaattcagagtctagcccagggcccaggttttagcattctgagagaaaagggtctctgttttgcacaaccccctttct

SEQ ID NO: 799104 - DNA, 598 bp, Homo sapiens; identical to SEQ ID NO: 779523

SEQ ID NO: 799105 - DNA, 636 bp, Homo sapiens
cattgtggttttaatatgcatttccccagtggctgataatgttaaacatcttttactgtgcttatttgtctatctctctctctctctctctctctctctcacacacacacacacacacacacacagtttattttatcttattttttggaaacagagtctcgccctgtcrcccaggctggagtgcagtactgcaatcttggctcactgcaacctccacctcacaggttctagcaattctcgtgcctcagacgcctgagtagctgggattacatgcatgtgccaccacacctagctaattctcactcatatattttctttggtgaagtgtctgttcaaatctttagcctatttttaatgtggattgtttgtttcttactattgaattttgagaattctttatatattctggatgcaagtcctttgttggatatgtgatttgcaaatatttcctcccagtctatagtgtctattaattctcctaacaccgtcatttggtgaactctaatttaccaatttttatgttgacagatcatgcttttggcatcctgtctaaaaaactctttgcctttgggaggccgaggtgggcggatcatgaggtcaagaaatcgagaccatcctggccaacatggtgaaacc

SEQ ID NO: 799106 - DNA, 644 bp, Homo sapiens
gcctgagtcatgagtgaaattctttaggccctcactctttagattattgctcttatatttctctgtcctcatgtcattgatcatcaagtaaagatatatcttaagagaagcagtagtaacatttttatttatttatttatttatttatttgagacaggatctcactttgttgcctgggctaagtgcagtggtgcgatctcrgctcactgcaacctccacatcccatgttcgagcaattcttgtgcctcagctgggcctacaggcgtgtgccaccatgcccgactaattattgtatttttagtagagacagggttttgccatgttcaccaggctggtctcgaactcctgacctcaagtgatctgcctgccccagcctcccaaagtgccataattgaaggaattacaggctaccacgcctggccaagagaagcagtaataatatttgtatgtttaaatatccttggaatggaactcatggtctacatggtaaactaattgtttacctatattttgcagatatatttgggacttttctgacatttcatgtaattagagatatatcttttaggagaatctagaggagactacaagctttgagaggagaactttttttttaagtctgttcccagatatcagatgtctta

SEQ ID NO: 799107 - DNA, 653 bp, Homo sapiens; identical to SEQ ID NO: 785430

SEQ ID NO: 799108 - DNA, 630 bp, Homo sapiens
taaaatttgcaaactgagaaaggtcacatactgcttttcaagactctttagggcctttaatacagtgctaaaatagaagaactttgtcaaaaataaacaaaagtatgaactccttggtaggagtagattctctttgttttaaaaaagttaaatacattgggttaaaatgagcaaaatatgagctccttttcgtaaagttaataaaggaggaatagagattaggaaaaattcagaaatttccaatcactgcttttcaaatctaatcacatgatccaggacttcatttcccagaaaactctgcatctgcccgagggaacattagttatgagacagtgcagagatttctaaggcccatttcttcacttaaagtttatgtgctctcaaagcttcctgtggtaccaggatagagcattaaatagcgttattctctttgagttatagctgtttyttatttttgtgttgttagatccaatgtagcatggtaataaaacatatttgaagcatcccttcctgcatacacagcgctcttacctgtgttctcgtatgacactcaccctgaggaaggtcttattgtatccccattttcagatatgaaactgagattcgggaaagataaccgatttgtccaag

SEQ ID NO: 799109 - DNA, 438 bp, Homo sapiens
aatggtcattttataatgtaactcatgagtttgtattaatggacttttttgctgttataaataatactgtaataagtatttttatatctagtcatctagattgattcttagtgtaaattattagtggtgccattgctggatgaaaggaagtgagcattttaatctgccagatatttgtratcgctcttcaaaaatttggacctattatagtctcacaggtagtgcattagcatgattctttgctctatctttgcccaaattgaatgttttacagctaaattttttgttaatctgatattcttactgtttcaattgacttttttaaaaaagttatcattgaggttggacattttttccacatgcatattgattatcaacaggctttttctgattaacacaaaaaattttagtaagttgtctatacgctatgatttcatt

SEQ ID NO: 799110 - DNA, 657 bp, Homo sapiens
atatcattaagtcggtccctctataatgttgaggtgcgtcagtttccttacgcaagaatttcatttctcattgttttcataataaatattttgtccttaaaaacatcttgatactttttcatgtaaatctgtgttttatgrtaagtaatttgtaactggtttatttggacaccgccagaaactctagttgttcatttcactgtctcatctgtctggagacagggagtttcatgaatgcatctccagtgccagcacggggaaggtgcccaggctttgaatggaactgaatgcagaattccgggggcgccaggcaagccagatggccttgtgggcagtcacttcccgtggtcgggtggggcggggaaggccctgaggcgctgccggctgtgtaccgcctggcccagctccctacccgctgcctatgtgggtcacctctcagtgggtttcagggacacggcaaaatagacaacttccattttgactttgaaacctcgtgtgccaacacttgaatatgaatcttttcgtaaatgtacgtgtacatttcaatcagtttttgcagttagaatatattgttttgcagtcaatcttctgtatagctttatgtgtattattataaacataaatatagctacaaaaatggcataatgtattcactgt

SEQ ID NO: 799111 - DNA, 657 bp, Homo sapiens
atatcattaagtcggtccctctataatgttgaggtgcgtcagtttccttacgcaagaatttcatttctcattgttttcataataaatattttgtccttaaaaacatcttgatactttttcatgtaaatctgtgttttatgataagtaatttgtaactggtttatttggacaccgccagaaactctagttgttcatttcactgtctcatctgtctggagacagggagtttcatgaatgcatctccagtgccagcacggggaaggtgcccaggctttgaatggaactgaatgcagaattccgggggcgccaggcaagccagatggccttgtgggcagtcacttcccgtggtcgrgtggggcggggaaggccctgaggcgctgccggctgtgtaccgcctggcccagctccctacccgctgcctatgtgggtcacctctcagtgggtttcagggacacggcaaaatagacaacttccattttgactttgaaacctcgtgtgccaacacttgaatatgaatcttttcgtaaatgtacgtgtacatttcaatcagtttttgcagttagaatatattgttttgcagtcaatcttctgtatagctttatgtgtattattataaacataaatatagctacaaaaatggcataatgtattcactgt

SEQ ID NO: 799112 - DNA, 657 bp, Homo sapiens
atatcattaagtcggtccctctataatgttgaggtgcgtcagtttccttacgcaagaatttcatttctcattgttttcataataaatattttgtccttaaaaacatcttgatactttttcatgtaaatctgtgttttatgataagtaatttgtaactggtttatttggacaccgccagaaactctagttgttcatttcactgtctcatctgtctggagacagggagtttcatgaatgcatctccagtgccagcacggggaaggtgcccaggctttgaatggaactgaatgcagaattccgggggcgccaggcaagccagatggccttgtgggcagtcacttcccgtggtcgggtggggcggggaaggccctgaggcgctgccggctgtgtaccgcctggcccagctccctacccgctgcctatgtgggtcacctctcagtgggtttsagggacacggcaaaatagacaacttccattttgactttgaaacctcgtgtgccaacacttgaatatgaatcttttcgtaaatgtacgtgtacatttcaatcagtttttgcagttagaatatattgttttgcagtcaatcttctgtatagctttatgtgtattattataaacataaatatagctacaaaaatggcataatgtattcactgt

SEQ ID NO: 799113 - DNA, 619 bp, Homo sapiens
cctccagacatttgggaacgagttgtgttactggttaatgttggaagcatggctggtatctgctcgtgtccaatgccaagggtgtgggcagcttcccaaggccaggtgagatgctggcatgggggcacaggtgctctgactcaccagggctccygtgttagggggatggggtggaccaccgccccagcttgcacaggggacctctggtctcccaagcgccctctgattcaagggtgcctaaatggactgttctgaatggaattggctgcagtatttttcatcttttaattaaaatggatgtggcggattacctgaaaccaggagtaactgttctgagctgctggagagactcctcaggtgaacggaaggtgtctgaagacagcaggcagcttctctcccaagagccccttctcagagccagagccgattttgcatgccccagagcacacatgattctgtgggtgttttatcaggaagttaggggtttctgcctgagtgctctacaatatgtgctctatgattaaagtcggatttctcctctgaagaaactgtgtttgacatgacagaatcaaaggcaagcatcactagtcaccagcgtgtcagacacaaacaccaggct

SEQ ID NO: 799114 - DNA, 619 bp, Homo sapiens
cctccagacatttgggaacgagttgtgttactggttaatgttggaagcatggctggtatctgctcgtgtccaatgccaagggtgtgggcagcttcccaaggccaggtgagatgctggcatgggggcacaggtgctctgactcaccagggctcctgtgttagggggatggggtggaccaccgccccagcttgcacaggggacctctggtctcccaagcgccctctgattcaagggtgcctaaatggactgttctgaatggaattggctgcagtatttttcatcttttaattaaaatggatgtggcgkattacctgaaaccaggagtaactgttctgagctgctggagagactcctcaggtgaacggaaggtgtctgaagacagcaggcagcttctctcccaagagccccttctcagagccagagccgattttgcatgccccagagcacacatgattctgtgggtgttttatcaggaagttaggggtttctgcctgagtgctctacaatatgtgctctatgattaaagtcggatttctcctctgaagaaactgtgtttgacatgacagaatcaaaggcaagcatcactagtcaccagcgtgtcagacacaaacaccaggct

SEQ ID NO: 799115 - DNA, 619 bp, Homo sapiens
cctccagacatttgggaacgagttgtgttactggttaatgttggaagcatggctggtatctgctcgtgtccaatgccaagggtgtgggcagcttcccaaggccaggtgagatgctggcatgggggcacaggtgctctgactcaccagggctcctgtgttagggggatggggtggaccaccgccccagcttgcacaggggacctctggtctcccaagcgccctctgattcaagggtgcctaaatggactgttctgaatggaattggctgcagtatttttcatcttttaattaaaatggatgtggcggattacctgaaaccaggagtaactgttctgagctgctggagagactcctcaggtgaacggaaggtgtctgaagacagcaggcagcttctctcccaagagccccttctcagagccagagccgmttttgcatgccccagagcacacatgattctgtgggtgttttatcaggaagttaggggtttctgcctgagtgctctacaatatgtgctctatgattaaagtcggatttctcctctgaagaaactgtgtttgacatgacagaatcaaaggcaagcatcactagtcaccagcgtgtcagacacaaacaccaggct

SEQ ID NO: 799116 - DNA, 621 bp, Homo sapiens
  misc_feature 614, 615, 616, 617, 618, 619, 620, 621: n = A,T,C or G
accccatctccactaaaaaaacaaaacattagccatgcacacctataatcccagctactcaggaggctgaggtaggagaatcacctgatcctgggagcctgtggctgcagtgaccaagactgcatcactgcactccagcctgggcaaccaaagtgagaccctttctcaaaaacaaaaaaacaactaacaagcgtagttacttagaagggatataggcagagggaacaatagcgtggtcaaatgtaagagccaagcttctcaatgtrtatttaaattgctttgatgtttgaaccatgtgaatatatattgtcttttcaaaacaaacaataaataaaatataacttaaaaaatataaaagaaacagacgcttagagtaagtagttaaagcaatgtattaaaaccattgttttcattttaaaactaatctgagctctttaatctttttcaacatactaaatactgaagataatttttgttctttcagaattttagccccatcaaattattgggatactaactttgaaaatggataatgacttcagcaatacattattataaaaacacacaacttgagaataatatttaatagctgatttttagacatcaaagacacnnnnnnnn

SEQ ID NO: 799117 - DNA, 594 bp, Homo sapiens
tttatttctccttcacatctgaaggatattttcagtggatataatattctgggataaatgttattttcctttagcactttaaatatgtcatgccattctctcctaatctgtaaggtttccactgagaagtctgctgccagatgtactggagccccattgtatactgtttcttttctcttgctgcttttgagatcctttctttatccctgacctttgggagtttgattatcaaatgtcttgaggtagtcttatttgggttaaatctgcttggtgttctataaccttgcacttgaatactgatatttttctttaggattgaaaaggtctctattattagctctttaaataaactttctatccctctctctccttctacctcctctttaaggccagtaacccttagatttgcccttttgargctattttctagatcctgtgggagtatttcactcttttttcttttgtcaactctgtatattttcatatatcatgtcttcatgctaattctttcttctgcttgatcaattctgctgttgagagcctctgatgcattctccaggttgtcaattacatttctaactccagaatttctct

SEQ ID NO: 799118 - DNA, 556 bp, Homo sapiens
cctgtcctttgaagttaggcattgactacttctctcagctataaaagaaagttgtagaggacattttcttccaatagaaggctgttttgtcaacattgaaaatctgttgtttagtatacccaccttcgtcaattacctcagctagacatgctagacaacttgctgtagcatatacatcagtacttttacattatggagatggcttctttccttaaacttcacgaactaatatttgctagcttcaagcttttcttctgcagcttccttatctctctcagccttcagagacttgaagagagttagaatcttggtctggattagactttggctaatcctaatgttgtggctggtgtgattttctattcggactactaaaattctctccgtatcagcaataaggctgtttttcactttcttaccattcatgtattcaccagagtagcacttttaattcctttaagttgcattaacaacttggataactggcacaagaagccttgctttcagcctrtctgggcttttgatatgccttcttcactaagcataatcctttcta

SEQ ID NO: 799119 - DNA, 491 bp, Homo sapiens
ggaaggcaagcgaggaggtagcagtaggcacaggggaaccacttccctaaccccaggactctcaggtctgcacggtttgggacacagaaggaagccgccggcagcatcttttgctgctgaaatgcagatggtttggacacttcataaagagggcattaataagyccgccgagtgagcgccagggcgggattctcccacaaattcaaggtctgtatctccgcggaagccgtgcctatcggtcccccgagtgctgaaggctcccacgaggggcaggccagcccggtgcgccagggaaggagcttgatggtgtgtacggctacgtagtgaacgtggaggtgtgcgcagcggagtcagaggggctagatccccagcatttcccacggggtcccacctagcgcgtggatgggagcaacttcatcactccaccgagggcagggaaagaggagtaagcattggagctcaaagaatgagcaatttttcaaagctttctc

SEQ ID NO: 799120 - DNA, 611 bp, Homo sapiens
actcagccctacagcaggctggactctggtgatatatccaatagatatcaagcttacaacaatgcttagatgtgactgagatttaacagagttaggagtcattaatggaatttatattggctaacctaaaaagtaactcatttaaagcattagaatttaggatatatttccaataactcatttactacaaagacaagcaaacaaagccaatcttccacccaagaacttttcctaaaatgggacttgctttgatctgcgctgtctaatatggtagcacaaatggctaatgagcaggtggaaggtgtttggtccaaattgagatgtgccttttagtgtaaaatacacactacattgtgatgacttaatatataacataatgtaaaataggtcwttgatagttttatattgattacacactgacataatttttggaattattaggttaaataaaatattattaaaataaattttgccttttgtcattttttaatattaattatatttctagactttggctatataaatcactctatacttttcaaatattatttgttcaatggaaaggtgatcttaaccaggagtttaacaaaaggccacatttctgaggcatg

SEQ ID NO: 799121 - DNA, 611 bp, Homo sapiens
actcagccctacagcaggctggactctggtgatatatccaatagatatcaagcttacaacaatgcttagatgtgactgagatttaacagagttaggagtcattaatggaatttatattggctaacctaaaaagtaactcatttaaagcattagaatttaggatatatttccaataactcatttactacaaagacaagcaaacaaagccaatcttccacccaagaacttttcctaaaatgggacttgctttgatctgcgctgtctaatatggtagcacaaatggctaatgagcaggtggaaggtgtttggtccaaattgagatgtgccttttagtgtaaaatacacactacattgtgatgacttaatatataacataatgtaaaataggtctttgatagttttatattgattacacactgacataatttttggaattattaggttaaataaaawattattaaaataaattttgccttttgtcattttttaatattaattatatttctagactttggctatataaatcactctatacttttcaaatattatttgttcaatggaaaggtgatcttaaccaggagtttaacaaaaggccacatttctgaggcatg

SEQ ID NO: 799122 - DNA, 466 bp, Homo sapiens
ccacctctttttgtttgtcttttataatgtcttcagtctgagcatgcagtcaatctgtaatattttgcaaccctaggattttttcaaatagatcctttttgagccataggatccaagccataaaattctttatgcatgwtgaattcagtcagaaaagagcaaggctttgctttttgaaattgcaactcaaatgagatgggatgaaatcctatgacagtaagcaaaaacagaaccatgaaaaatgattggaaatataccttttcaattgtggcaataattgaaagaatcgataaaagttcatctttggacagaaagccttttaaaaaaaatcactccctcttccccctcctcccttattgcagcagcctactgagaactttatgactgttgctggtaacttagaagctacaataataattaagggcagaaattatacttaaagtgtagatccttgttctctgacaat

SEQ ID NO: 799123 - DNA, 610 bp, Homo sapiens
taagaaagactcaattagggtgaagaggtcttcctgcttcttcccagaatagcctcatcttgttggattggcagctcctaggctaggaacaggtgggaccagtaaagctgccagggacaggcccttgagaaggtggctgaacacactgtccagtccctttcaaagtctagtggggatggctctcacacaggctggcagggtggatcctgggtgttgagctggggtgtgaccttgaacaaaagaggtataagtaccccaggggcaaaagtcaattgttctgagaaggaagctggtgaagtggtcctgggtgccagttataggggggtcaggaagctaaagctaagggcactgggartggccatgagccaggaggccaggggctgagagtctgggggaaagtagtgaaagcctcagacaggctgcaagcaataccacgcttggcaaggggcctttgtagtgcaaggtctctgaccccatggtatacagcggggagtgtcaatgtgtaggtgaaggggtgatatgggacaaattcaacctcagaatgctcctctgggtaaactcactttggaagagggacaagtgacaagcttacaaagaaccatcatcatat

SEQ ID NO: 799124 - DNA, 610 bp, Homo sapiens
catcaactttctttacccagccaactccttgtcaaccttcagctagttccataagtttccatagtagttttgtcttcctcttcctgtctcccatgatcaccgatgtttctccagcaggctttaaacttcatgaggtcagggatcagagctgtctggttgccycctctatccatattgtgtagcacaatgccttgcacacaataagtactcaataagtatttggttgcacaataaaaatgacattatctggctcaaacttcccattctgagaaagaggaaactgggatccaaagaaaggaagcaacttattcaaaacaacagagcccaggctaagattaatacagggctggagcctcctaatttccagatcttttttttttttttccagcacatcatgtgcctatctataatatggtaaccagaaggaagcagactggattccctgtgtcttgtaaaagccggagcaagttcttatttgtaaacacagctgacatagttgttttctttgtttgttttaagtaaaaggactggaagtacaacccaaaaataaactttgtgtttccaaaccaagaagcttctacaacttttatcccctgcagcctcctttctg

SEQ ID NO: 799125 - DNA, 610 bp, Homo sapiens
catcaactttctttacccagccaactccttgtcaaccttcagctagttccataagtttccatagtagttttgtcttcctcttcctgtctcccatgatcaccgatgtttctccagcaggctttaaacttcatgaggtcagggatcagagctgtctggttgccccctctatccatattgtgtagcacaatgccttgcacacaataagtactcaataagtatttggttgcacaataaaaatgacattatctggctcaaacttcccattytgagaaagaggaaactgggatccaaagaaaggaagcaacttattcaaaacaacagagcccaggctaagattaatacagggctggagcctcctaatttccagatcttttttttttttttccagcacatcatgtgcctatctataatatggtaaccagaaggaagcagactggattccctgtgtcttgtaaaagccggagcaagttcttatttgtaaacacagctgacatagttgttttctttgtttgttttaagtaaaaggactggaagtacaacccaaaaataaactttgtgtttccaaaccaagaagcttctacaacttttatcccctgcagcctcctttctg

SEQ ID NO: 799126 - DNA, 621 bp, Homo sapiens
taataagaataaaacacaaaaataggaataaaacacagtgaacatttaaagtttcaattatgaccacacctcctgggcttaataaatacttgtgtattgaggcctctggggcataaacaacccagaaggcaaagcagttctgtgactgcctccaggggtaagtgggaagaattatttcccctcctcactatctggacacagggcagaagcagggaacataaccagccgctgagtacattgtctacttccctaaagatagcaatcacggaatggaactcacttcgcacctgtacttgaggataaaatatttaagacctctccaattcaacttcagctctttttccagcaatctctgaagttgtgagtacatactgagacctccgggctgagtctaagtgacttgagttctggaatgtgacttcaggacattcttttctttacaatggggcactcaggcagatgacatgttacagcatctgggtrgacatggtatggtaggtgcagcatcaagattaaccatggattgttttggctcccatatgagcagaagggttaggtttttttaagcagtctcctaaggctgttaaggccatgagaaagtaaactttggagtccaacaga

SEQ ID NO: 799127 - DNA, 535 bp, Homo sapiens
accatgttggccaggccagtctcgaactcctgacctcaactgatcagcccacctcggcctcccaaagtgctgggaatataagtgtgagccactgtgccctgcccagaattgttaactcatacctccaccagaagtaactttgtggtttgaagtagaatactacgtaaagatgtttggctttagccttacagagccctctcattatcggcaccttacttttttccatcctcttcagcaaaattgtttcataggtttgcaatacatttaaattatcttgtcaaattctgtattccatctttggatcccaggacagcctaaatgattgtttttgtttacatacattaaggttcacattttgtgctataagtttcttttttgttcacaaaggcagggtgtcatgtatccgctgtcacaatatcrtacagactagttttactgccctaaaaaatcccctaagcttcattcacctattcgcctttcctcttcgatctccaaatccctggcaaacactgacatttttttattctctctatag

SEQ ID NO: 799128 - DNA, 590 bp, Homo sapiens
aaagcatgtaactggcctcctataaacattctactaaatgggtagttgtacaagtaaatactcagttgtattatttaaacaaggggtctgccctctagccataatatttttacctttatcaattgcaaatataaataaatatatttccttacaaattacacataacagtaacatctgaacacgtttgggcagcaacatagttatgtatcaatcaagtttatactaacaacaattactgatatagaaattgatacagatcatgaggaaaaaatcaacattcatatcaattaaraacctactggaggcagctgcttcttctcaatcgtcaggaccagactgtgtgaccacctatgtctatcaattagagttatgtggccttctgggatggtcacagtaatgtagctgccacaagaagatatttatgtaaagattttatcattatttgcctcagattaaattatatacatgtaaaaagtaggtgagtgctcagctttcttactttgggagattaaatttatgtcccacttaacaaattgtttttcccacagatttttttcataaatctattccaaattcaagaaacataaaat

SEQ ID NO: 799129 - DNA, 590 bp, Homo sapiens
aaagcatgtaactggcctcctataaacattctactaaatgggtagttgtacaagtaaatactcagttgtattatttaaacaaggggtctgccctctagccataatatttttacctttatcaattgcaaatataaataaatatatttccttacaaattacacataacagtaacatctgaacacgtttgggcagcaacatagttatgtatcaatcaagtttatactaacaacaattactgatatagaaattgatacagatcatgaggaaaaaatcaacattcatatcaattaagaacctactggaggcagctgcttcttctcaatcgtcaggaccagactgtgtgaccacctatgtctatcaattaragttatgtggccttctgggatggtcacagtaatgtagctgccacaagaagatatttatgtaaagattttatcattatttgcctcagattaaattatatacatgtaaaaagtaggtgagtgctcagctttcttactttgggagattaaatttatgtcccacttaacaaattgtttttcccacagatttttttcataaatctattccaaattcaagaaacataaaat

SEQ ID NO: 799130 - DNA, 633 bp, Homo sapiens
ttcacgaggtgtgggtttgcctgatgcatcaggagaagtttcaccagatttgtctgaaatattaaagataattgaaatgggaaccaccatggcagaagctaggatacatcagtaagtcatacactgtgctgtccaastaacagccggcatgagacagtatcagcattcccactcagaagtccttcctgtcccctttcccagtgccttttctaaaaatgtcagatactcaaattatttcagccctttctggattcagaacaaaaattatttatccaataaggatttaatcactgaagatttgaaaaggacactttataactttcaggtttatattatacgtatttttaggatgagaaactagttacataacagtaaaaatgtattttaaagtaagttacactgaatgaatcactacactgaaactttaaaacgtgaaaggcaaaatacaacaaagtacaacaggacagtgtagactatatgccataatataacccgaaagtacataagctatactccttatgtgaggaattatatggtatagtgtgttttgttctgttttaattgagcaattcatcgaagtctaacttgttggcattgttgctctatgacagcaacatgggcagcaggaaccta

SEQ ID NO: 799131 - DNA, 627 bp, Homo sapiens
ttatttttttttacaggctaaattgaactcctgggctcaagcgatcttcccatctctgcctcctgagtagctgggactacagatacatgcctggcttacttttattattttatgcatccatcttataactaaaattatccacttttaagtgttaaagtttcttgcagggaatcaattttctttatgaatacacttagtttagagcttctgaattttcttatttttctaggttctaatttggatctagctgttgcacagcgatcaccctagagtatcttttcacgctctcctggkttaacactactgtgtctgtcactttcttgcactcctttgttgtttggctggggtgcatacttgagtagtgctctcagagaagatcactatttgataaatatcagagtctttgcttatccattaatatctaggttttatttttattcttgattgatagctcaggaagctataaccttttatgttatttcgtcaaaacttaaaggtaatactttattgtcctatggcattgaagattgctgattaaaaatctaatgccaatatgattctggttcctttgtaggcaacttattctgtctggaaacttcatatttggcattctaaaattttatgatg

SEQ ID NO: 799132 - DNA, 627 bp, Homo sapiens
ttatttttttttacaggctaaattgaactcctgggctcaagcgatcttcccatctctgcctcctgagtagctgggactacagatacatgcctggcttacttttattattttatgcatccatcttataactaaaattatccacttttaagtgttaaagtttcttgcagggaatcaattttctttatgaatacacttagtttagagcttctgaattttcttatttttctaggttctaatttggatctagctgttgcacagcgatcaccctagagtatcttttcacgctctcctgggttaacactactgtgtctgtcactttcttgcactcctttgttgtttkgctggggtgcatacttgagtagtgctctcagagaagatcactatttgataaatatcagagtctttgcttatccattaatatctaggttttatttttattcttgattgatagctcaggaagctataaccttttatgttatttcgtcaaaacttaaaggtaatactttattgtcctatggcattgaagattgctgattaaaaatctaatgccaatatgattctggttcctttgtaggcaacttattctgtctggaaacttcatatttggcattctaaaattttatgatg

SEQ ID NO: 799133 - DNA, 627 bp, Homo sapiens
ttatttttttttacaggctaaattgaactcctgggctcaagcgatcttcccatctctgcctcctgagtagctgggactacagatacatgcctggcttacttttattattttatgcatccatcttataactaaaattatccacttttaagtgttaaagtttcttgcagggaatcaattttctttatgaatacacttagtttagagcttctgaattttcttatttttctaggttctaatttggatctagctgttgcacagcgatcaccctagagtatcttttcacgctctcctgggttaacactactgtgtctgtcactttcttgcactcctttgttgtttggctggggtgcatacttgagtagtgctctcagagaagatcactatttgataaatatcagagtctttgcttatmcattaatatctaggttttatttttattcttgattgatagctcaggaagctataaccttttatgttatttcgtcaaaacttaaaggtaatactttattgtcctatggcattgaagattgctgattaaaaatctaatgccaatatgattctggttcctttgtaggcaacttattctgtctggaaacttcatatttggcattctaaaattttatgatg

SEQ ID NO: 799134 - DNA, 616 bp, Homo sapiens
cttttgtgtcaataaccaagtttcagccaatcagaggtgaccaacaattcaaatcatcctcaaataaggcaaacgcggaactgcaacccatctggctatttctgtgcctacttctattttctgtacatcactttctttttctgtccataaatcttcttggactgcactgcagggctggagtccctttgagcctactttggttcggaaggctgcccgatttgtgaattgttctttgctcaattaaactctgttaaatttcatttgtctaagatttttcttttaacagttgccagtggcagcaaatcaaaagatctctttagactctcgatcccagaaataccgtctggggatagttttggttggcacaacttgaggagtgctactagcatctactggtagagaccagagattctgctgaacatcctacaactcacaggacaggacttcacaacaaagaattgtctggcccaaaatgtgaatagtgttgaggytgagaaaccttgcactagaggaacttagaagttactgactgacacccagttaagagaaagttgcttggaaaaattgatctcagaggaaaggaaaacaaaatagtaaatctgtttaacttacaaca

SEQ ID NO: 799135 - DNA, 585 bp, Homo sapiens
aaagtactggagtctcaggtgtgagcccctcactgctccagccacgacaacctcttccaagtgactttggaccccttatatcctacccacccttttcttcctgattgtggtcccaggttcccactgcctgctcatgcttcccttgaatgccccaatgacttcagactcatcattcccagaactgacctgaacctccaccaagtctttcccaatgagatgtaatctttccctcatttgatttttccatagctgtgtccctctctggggtgcctatttcatgctacttgtatggtatcaatttgagctcctgtctttttcggcttgcagaatgaaagctccttgtcagtgtctttgtsttgctcattgctaaacaccctgaagcaccttgctccatgctttttgtgcacccaacaccgtatacggtaaataaatgaaagaatgaacagatgacttcttcaggttgctagctctcgtggtatctagacttgcctgttatttcttagcaatgtagaaaaccacttttgcattctatctggccctgtcaagaattcaggcatcccttagtgaagatgaggcaaaaaaaaa

SEQ ID NO: 799136 - DNA, 669 bp, Homo sapiens
atcagaaagctgtgagtggatatcctggaagaccactgagaggaggagccaggaatggcaccagacatttctgaaggtggggggcccagaggtcgaagcaaaggggggcctgtttctgtaccaaagcaagagcttctgtatatccatcaaaacataatcaggccaggcgtggtggctcatgcctgtaattccagcactttgggaggccgaggcgggtggatcgcttgaggtcaagagttcaagaccagcctgaccaacatggtgaaaccccatctctactaaaaacacaaaaaagccagatgtggtagcgggtgcctgtaatcctggctacttgggaggctgaggcaggagaatctcttgaacctgggaggcggagtttgcgatgagccgagattgcaccattgcactccagccagggcaacaaaagcaaacaaaacaaaacaaaacaaaaaactccatytcaaaaaaaaaaaaaccataatcagagcaaagacattctaacaaaactgtgaactcggagaaatgagtaatgcctgcttcccgtcaactttcaggtgtccaggccttctctttattaaaacagaaaaaaaaatctgataccagttgtgtgttctttctttgatgtagtgcagtttgcccaggcttgccttaagttggtgctatttttgt

SEQ ID NO: 799137 - DNA, 630 bp, Homo sapiens
tgtattcattttcctactgataaatttttaagtggtttccaactttttattgcaataaatattcttgtaaatcttcatccaagggtatcttcaaccacactaggcattgcccaaattgctctgcaacatcagtgcaccaatttacattgccaagatcaatgtttaagtgtttctattctttgatgcctttgtcaaccttggtactatttgactattacacttttcaccaatcagatataaggatgaaatggtgccttcttggtattctgaaaattaattttaaatgggaaaataaattactagtaagtgcagcttaatcaacaagagttttcattaacacgtgggaatacaccaggtgttcctcggattttcttgaaaattctacagggagggtaggggagtgatggtacagataagattggacatgagctgataattgttggaactaggtggtgagtgtatgggggttaattatcctgytctctccacttcggtacatatttgaaacttttcacaatagaaaattaaaagaagaacggggcgtggtggctcacgcctgtaattccagcactttggaaggccatggcagaggatcacttgaggtcaggaattaaagaccagctggtcaac

SEQ ID NO: 799138 - DNA, 614 bp, Homo sapiens
tgttctctgagtttcctggatctgtggtttggtgcctggcattaatctgggagaacttctcagtcattattacttcaagtatttcttctgttccattctctctttattcttcttctgacatatcctattacacatatcttatacctttatataatcattccacagttcttggatattctgttttttttttataaagtctttttttgtctttgcttcttaatgttggtggttaccatattgagataatttcagctcagagattcttctctccagctacgtccagtctgccaataagatatcaaaggcattctttatttttgttggtgtttttgatctagcagttcttcttggtttttagaatttctgtttctatgcctrtatcccctgtctgttcttgcatgctgtctccttttccactggaatccttagcatattaattatagttttttaaaattcctagtctgataattccaacatccttgccatatctgagtctggtactaatgctcgctctgtctcttcaaactatgtttttttgccttttagtatgtgacatagtttggttgtgtccccacccagatctcctcttgaattgtggttcccataatccccat

SEQ ID NO: 799139 - DNA, 701 bp, Homo sapiens
caaatggtagatttacttttagttctttaggaatctccactgttttccatagtggttgtactggtttacattcccaccaacagtgtaaaagtgttcccttttcactgcatctgtgcctacgtcgattatttttttgattttttgattatggccattcttgcaggagtgaggtggtattacattgtggttttgatttgcatttccctgataattagtgatgttgagmatttttccatatgcttgttggccatttgtatatcttcttttgagaattgtctgtccatgtctttagcccactttttgatggaactgttttgttcttgctgatttgtttgagttctttgtagattctggatatgagtcctttgtcggatgtatagattgtgaagattttctcccactctgtggtttgtctgttaactctgctgattatttcttttgctgtgcagaaactttttggtttaattaagtcccatctatttatgtttgcttttgttgcgtttgcttttgggttctttgttatgaagtctttgcctaagccaatgtctagaaaggtttttccgatgttatcttctagaatttttatggtttcaggtcttagatttaagtctttgattcatcttgagttgatttttgtgtaaggtgagagatgaggatccagtttcattcttctataggtggcttgccaattgtcccagcac

SEQ ID NO: 799140 - DNA, 620 bp, Homo sapiens
ggatataattatctgtggatctcttgcatttctgtattttttttgtttttgtttttgtttttgtttttgtttttgtttttgttttgagggagggtcttgctctatcactcaggctggagtgtagtggcgagatctcggctcagggaaacttccaccttcccggttcaagcgatcctcccacctcagcctcctgagtagctgggattacaggcacgcaccaccatgccctgctaaattttgtattgtttgtttgtttgttttagtagagactgrgtttcaccatgttgcccaggctgttcttgaactcatgggctcaagtgatccacctgcctcagcctcccaaagtgctgagattacaggtgtgagccaccatgccgggctgcatttctgtatattttgagtagaaacactgcctgtcctttgctctggcctatcttttgaaggatgtttctgtagtgaacaaacttgaaaacagagatcatatgtaccttgggagcaaagggtaggtttgcctacatccttggaagatagagataataagtaatcctgaaatcaagggcgtgcatgcttactgccctttgttcaggtcccctaagctcagaattcctgtcctaaaatgc

SEQ ID NO: 799141 - DNA, 561 bp, Homo sapiens
gggctatcccagtcatgtcccaaatttatgactggggatcatggatccctcttcttagttcacatccattggtttcctgtcacctattgggcaacttgccatcgagctctcccatcaagtcactgccaaaagtgttgmgctaattacagctcatgggtatcggctacttctgtcagtgtgccaccctccaaggcagggaagtcagcgttcacagagcttatctaactggccaataagggatggagccaagtcaaacccaagtctgtcagccccaaagccagggcattggaaggagaaatcctctaaggagtccctgcccacaagagacctaggggggaggttgcatcttacatggttcctgaagacctgggaacaaagggggttgaggaaccatatgaagccagtgcctggatgcaaaaggcccaatctcagactccatgtgctaattaacagagcagtagagctcaagtgttgaggtgggagacaggatggcagaggagaagaggcacaagatttccagcaagacaaagacctgggtttggaaggatcctccaacctagg

SEQ ID NO: 799142 - DNA, 375 bp, Homo sapiens
gtatccaaataacaacaatacaaggcagagagtgctgatagcaaaaacaaagcagaagttaagaactgggtggttttagagggtggagataggagatgatggttcataagaaccttttttgggggaagtagtgagctcccagkccctgaaggtacttaggcagaaactggagctatctgtgaggctctgaactagtgtcagcatctgaaagatgcctctaggagtccttctggcccttggaatgctgattttagcacatggcctatgtgcagagcctagaagattttttttctttttttctttctctgagacagagtctcgttcagttggccaggctggagtgcagtggtatgatctcggctcactgcaacctcc

SEQ ID NO: 799143 - DNA, 375 bp, Homo sapiens
gtatccaaataacaacaatacaaggcagagagtgctgatagcaaaaacaaagcagaagttaagaactgggtggttttagagggtggagataggagatgatggttcataagaaccttttttgggggaagtagtgagctcccagtccctgaaggtacttrggcagaaactggagctatctgtgaggctctgaactagtgtcagcatctgaaagatgcctctaggagtccttctggcccttggaatgctgattttagcacatggcctatgtgcagagcctagaagattttttttctttttttctttctctgagacagagtctcgttcagttggccaggctggagtgcagtggtatgatctcggctcactgcaacctcc

SEQ ID NO: 799144 - DNA, 375 bp, Homo sapiens
gtatccaaataacaacaatacaaggcagagagtgctgatagcaaaaacaaagcagaagttaagaactgggtggttttagagggtggagataggagatgatggttcataagaaccttttttgggggaagtagtgagctcccagtccctgaaggtacttaggcagaaactggagctatctgtgaggctctgaactagtgtcagcayctgaaagatgcctctaggagtccttctggcccttggaatgctgattttagcacatggcctatgtgcagagcctagaagattttttttctttttttctttctctgagacagagtctcgttcagttggccaggctggagtgcagtggtatgatctcggctcactgcaacctcc

SEQ ID NO: 799145 - DNA, 634 bp, Homo sapiens
agattttttttgtgtaagacctcaaaagcacaggcaaccaaagcaaaaacagataaatagattatatcaaactaaaaagcttctgcacagcaaaggaaacaacaaagagacacccccacaatgggagaaaatatatgcaaaatatccatctgacaagggattagtaaccrgaacacataagcagctcaagcaactcaatagcaaaaagacaaataatccaattttaaaatgggcaaaaggtcaaaatagacatttctcaaaagaagacatacaaatgtccaatagatacatgaaaaaatgctcaacatcactaatcattagagaaattcaagttaaaaccaaaatgagatcatctcgctccaattaaaatggctttcatcaaaaagatagctaataatagatgatggtcaggtatggaaaaaggggaatgctcctatactgttggtgggagccactgtggaaaactgtgtggaggttcctcaaaaaactaaaagcagatctaccatatgatccagcaattccactaccgggaatatatacaaaaaaaaaaaaagaaatcgatatgtcgaagaattatttgcactcctgtgtttatcacagcactattcacaacagccaaaatacaaaatcaacc

SEQ ID NO: 799146 - DNA, 439 bp, Homo sapiens
tggtagaagccccgacacttgcctcactcggatccctggaggaggattatatgggcactggggcaaggcagggacatcttggcagcctccccaccgcacgcttttcttgcaagtcctttgaacggcacctgctccttagctgctgcctggcaactttgagggtttcagtgagatggggtgagtgcttcccagccagcaaagtgcgttgacagtggctggcttgcccccccycccccccgccccggctctggaagcttctccccctgggtcttccagtctcatgtctggacacagacaggagaggtgaggaggagcagcaggggtggcccgggcagttcctgtgacctggaggcctggcaagttgttctgacggccaggcccatccttggggaggcctctgaggacgcctggaaccccaggcccgccctgccttgttttc

SEQ ID NO: 799147 - DNA, 439 bp, Homo sapiens
tggtagaagccccgacacttgcctcactcggatccctggaggaggattatatgggcactggggcaaggcagggacatcttggcagcctccccaccgcacgcttttcttgcaagtcctttgaacggcacctgctccttagctgctgcctggcaactttgagggtttcagtgagatggggtgagtgcttcccagccagcaaagtgcgttgacagtggctggcttgccccccctccmccccgccccggctctggaagcttctccccctgggtcttccagtctcatgtctggacacagacaggagaggtgaggaggagcagcaggggtggcccgggcagttcctgtgacctggaggcctggcaagttgttctgacggccaggcccatccttggggaggcctctgaggacgcctggaaccccaggcccgccctgccttgttttc

SEQ ID NO: 799148 - DNA, 590 bp, Homo sapiens
cttgcctcactcggatccctggaggaggattatatgggcactggggcaaggcagggacatcttggcagcctccccaccgcacgcttttcttgcaagtcctttgaacggcacctgctccttagctgctgcctggcaactttgagggtttcagtgagatggggtgagtgcttcccagccagcaaagtgcgttgacagtggctggcttgccccccctcccccccgccccggctctggaagcttctccccctgggtcttccagtctcatgtctggacacagacaggagaggtgaggaggagcagcaggggtggcccgggcagttcctgtgacctggaggcctggcaagttgttctgacggccaggcccatcctyggggaggcctctgaggacgcctggaaccccaggcccgccctgccttgttttctggtcctggcctgggggggtcgtggtctcgctggtgcagcctcctccgggcaggccccgcctctgctcccttcccctcactccatctgattcggccccgtttccttgtccactccacgttcttctgagcgtgtctctgggacatggttaaggttaagaagcggcctct

SEQ ID NO: 799149 - DNA, 649 bp, Homo sapiens
gggggggtcgtggtctcgctggtgcagcctcctccgggcaggccccgcctctgctcccttcccctcactccatctgattcggccccgtttccttgtccactccacgttcttctgagcgtgtctctgggacatggttaaggttaagaagcggcctctgaacgagggagaatgtactgaaattgcctaagtgaacttcaaacacaggaagaagcgctcagtcgatgttcatggtgagaacgagggttgatcttttgaatgagtcacgggtttgagagagacctaagaaccattcgatctgaaaactagattcactttgaacaaaatatctcaggtgctaaatactccagttagtgtggggaaatgtctctgagaacgaaagctctgactgaccggagcctgctrcagtggatctgaaagatgctcacgaataattctcgctgcagagcttagtaaaccaacaatacaaacgattttctgtaacgacctcccgtaaagcagccactcccctcacagcgctgagcaggcgtaaccgccagggtcctcccccttctgaagccgcggcttccttgcaggccggtgtccggcgttgatcctttaactgaccatgggcagttttagttcacgagtgtggattcttgggatacggtcg

SEQ ID NO: 799150 - DNA, 649 bp, Homo sapiens
gggggggtcgtggtctcgctggtgcagcctcctccgggcaggccccgcctctgctcccttcccctcactccatctgattcggccccgtttccttgtccactccacgttcttctgagcgtgtctctgggacatggttaaggttaagaagcggcctctgaacgagggagaatgtactgaaattgcctaagtgaacttcaaacacaggaagaagcgctcagtcgatgttcatggtgagaacgagggttgatcttttgaatgagtcacgggtttgagagagacctaagaaccattcgatctgaaaactagattcactttgaacaaaatatctcaggtgctaaatactccagttagtgtggggaaatgtctctgagaacgaaagctctgactgaccggagcctgctacagtggatctgaaagatgctcacgaataattctcgctgcagagcttagtaaaccaacaatacaaacgattttctgtaacgamctcccgtaaagcagccactcccctcacagcgctgagcaggcgtaaccgccagggtcctcccccttctgaagccgcggcttccttgcaggccggtgtccggcgttgatcctttaactgaccatgggcagttttagttcacgagtgtggattcttgggatacggtcg

SEQ ID NO: 799151 - DNA, 657 bp, Homo sapiens
gtgctttacatccacccttctcagaacacaagaccctccctagatccctgaggattgtgggcattcctagcacactccagagttttacttttttgttttgttggtgaggaggcagttatgcaaaggtgggagagaagtgagctcgggtaacaccaccaccatgataactgtcatgaaatttcatcaattctttcactgctttctgtttgctcacccctccccgactctctctgttgtactttcattgtaagagaagaagccatgtctctgttcccaccaccattcctgacctggagcgaacattcaacaaacgtttgtggactgaatgaatgatgggactttactccatttcatcacttcccattttccattctctatttttcctccttttttgctgatggttcactctttatttttttggaaagccagttctaagataaacagtagcaaaagcaatagctgaaataaagacaaaagamttagtttctttgaactgtttttattttacaatttgatattacattattaaattatgttactgtttcctaacacattttcctttgtgtaactcacttatcaccatttggctccttgtaggtgcataaaataattttctctttgattgtaatgaactagagtaagggtacaactgtctat

SEQ ID NO: 799152 - DNA, 615 bp, Homo sapiens
ttgatgggaatgtaagctagtacaatcactgcggagaacagtttggttcctcaaaaacctaaaaatagagctaccatcatccaccaatcccactgttgggtatataactgaaagaaaggaaattggtatattgaagagatatctgcacacgcatgtttrttgcagcactgttcacaatagctaagatttggaagcaggctaagtgcccatcaagagatgaatggataaagaaaatatggtaggtacatatatacacaatggagtactgttcagccataaaaaagaatgagatccagtcatttgtaacaacatggatggaactggaaatcgttatattaaatgaaataagtcagggacagaaagacaaacttcacatattctcacttgtgggagctcaaaaaatcaaaacaattgaattcatggagatagagagtagaaggatggctactagaggctgggaagggtagtggggggttggagggtaagtggggatggttaatgggcacaaaaaatagttcaaaagaatgaacaagggctagttttgatagcacaacagagtgactatagtcaatagtaatttagtggcacattttaaaataactaagagtataattt

SEQ ID NO: 799153 - DNA, 613 bp, Homo sapiens
ctctcctgccccccccattcagtctctctggtcccttaattcactgcaacatttctggtgctgaaacccgggactggagatggcagatttctgtctcctttgcctgtgggactgaggccccgggacagaggagacctgggaaacttggtgccaatgggagagcttcagccctgaaggggataggccytcccatgtcccggtgcccttccagacagtgcaacggaaccagtaaaggggattcctggatggcatcaggagcactgcacagacatctgaaccgtggtaaggtttgggccctgaggcaggacccatccctaaggacagaagggaagcctgatcacctccaggggagtgacaactaatctgacccagaggggctggggacaacaagagtggctcattgatttgaatgaaactcacaccccaacagagacaggacacgagagtggctcgctaagtcagctcggaaaagaaaaccggaggtggcgagagtggctcaccaccccaactaggaaactggaagtggcgagagtggctcgctaccccaaccaggaaagggagctggaagcagggaagtgtatgagtgtgtgtgataaagactgttccagaagga

SEQ ID NO: 799154 - DNA, 613 bp, Homo sapiens
ctctcctgccccccccattcagtctctctggtcccttaattcactgcaacatttctggtgctgaaacccgggactggagatggcagatttctgtctcctttgcctgtgggactgaggccccgggacagaggagacctgggaaacttggtgccaatgggagagcttcagccctgaaggggataggccctcccatgtcccggtgcccttccagacagtgcaacggaaccagtaaaggggattcctggatggcatcaggagcactgcacagacatctgaaccgtggtaaggtttgggccctgaggcaggacccatccctaaggacagaagggaagcctgatcacctccaggggagtgacaactaatctgacccagaggggctggggacaacaagagtggctcattgatttgaatgaaactcacaccccaacagagacaggacacgagagtggctcgcyaagtcagctcggaaaagaaaaccggaggtggcgagagtggctcaccaccccaactaggaaactggaagtggcgagagtggctcgctaccccaaccaggaaagggagctggaagcagggaagtgtatgagtgtgtgtgataaagactgttccagaagga

SEQ ID NO: 799155 - DNA, 613 bp, Homo sapiens
ctctcctgccccccccattcagtctctctggtcccttaattcactgcaacatttctggtgctgaaacccgggactggagatggcagatttctgtctcctttgcctgtgggactgaggccccgggacagaggagacctgggaaacttggtgccaatgggagagcttcagccctgaaggggataggccctcccatgtcccggtgcccttccagacagtgcaacggaaccagtaaaggggattcctggatggcatcaggagcactgcacagacatctgaaccgtggtaaggtttgggccctgaggcaggacccatccctaaggacagaagggaagcctgatcacctccaggggagtgacaactaatctgacccagaggggctggggacaacaagagtggctcattgatttgaatgaaactcacaccccaacagagacaggacacgagagtggctcgctaagtcagctcggaaaagaaaacyggaggtggcgagagtggctcaccaccccaactaggaaactggaagtggcgagagtggctcgctaccccaaccaggaaagggagctggaagcagggaagtgtatgagtgtgtgtgataaagactgttccagaagga

SEQ ID NO: 799156 - DNA, 599 bp, Homo sapiens
aaaaggagtcaattcccagccaggaccactgtctatgtgaattttctccaggtactccagtttcctcccacatcccaaagatgtgcacattaggtgaattagcatgtctacatggccccagtctgagtgagtgtgagtgtgtgtgtgtgtgtgtgtgcgcgcgttcatgcatcctgggataggatgatgtcctgtccaaggctggttcctgccttggccttgagctgctggaataggctctggccattcgtgatcctgaactggaaaaactgggtagatatatatcttacttgtttttcttcatctttcttaaatgtatgtatagctcgcatttaattcaatgtttagtattaggagtgtttttatctttacttagaagtttggtgatgtttttgtaaccagaaatatgctgtaggaacttaagttttgtttatatcaamtagcttatggtaaaattggttttgttatacattattttacgtaaagttgcagttcccaagaacctaccaatgacattgaatgaggagttactgtatataatttggagctctggcagacttagtattttttaaaaattcatagttgatttttttaaacaa

SEQ ID NO: 799157 - DNA, 615 bp, Homo sapiens
tttcaaataatgacttcttttcctccgggtatgcaaaggcttaagaatgatacaatggactttggagacttgggaggaagagtgggagtggggtgagggataaaagacaacaaatatggtgcagtgtatactgctcgggtgataagtgcaccaggtttttttgtttttgtttctgtttttgagacggtgtctcgctctgtctcccaggctggagtgcagtggcgcgatctcggctcattgcaagctctgcctcccgggttcacgccattctcctgcctcagcctcccgagtagctgggactacaggcacccgccaccatgcccggctaattttttctattttttggtagagacagggtttcaccgtgttagccaggatggtctcgatcacctgacttcgtgagccgcctgcctgggcctcccraagtgctgggattacaggcgtgagctaccgctcccggccgcaccaggttcttacaaatctccactaaaagaacttactcatgtaaccagatatgacctgtatcccaataacttatggaaaaaataaaataaaataaaaatctcaggggctaaacaaaggaaaattatcataatcccacacagatcatgtaac

SEQ ID NO: 799158 - DNA, 617 bp, Homo sapiens
gatatttggtctttgaccctagttcctgacacagagctcctaaaatcccttaaaatttcctaggtaaaaatatccttttttgttcgaaagaggtgactcttggtaggctcttggatagcctcaggatgttggctggttgccaggggaagcaacaatgcaactggggggtcagaactttaagccttcccccaacacattccacccttgacctccatggaggatagaggggctgaaggttgacttgattaccartggccaatgatggaatcaaccatgcctacaaaatggagcctccttaaaaacccaaaaagataagagtcagaattaaaactaggttgctgaactaaaactaggtatctggagggtaatgcgctggacaggacatgggagctctgtgcctcttcccacatttcctgccctaggcatctcttccatctgagtgttcatctgtatgctttgtactatcctttataataaataggtaaacattagtaaactgttttcctgagttatgtgagctgctctatcatgaggagggggatcatgggaacccctgatttaaatcagtcagacagaagtaaagatgacaatctactacttgcagctggaatctgaag

SEQ ID NO: 799159 - DNA, 598 bp, Homo sapiens
agcaaaaaagtatttgaattccaggtattttcagaagttttggcattctgcagatgtgaggttgccgtcgtctaaggcagctagtagccctcttttgccagaagagttataattattagggatatttggagttcatttcttgtccagcttttcaacactacataattctctaatgacacaattctggagcactgaatatyccataatccctcaaaaaagtgaatccaaatataattctcattgtgacccttggtttatatagcccccaaacaccttttattaataaagaaatttactgaaactgttttatgcttaagtagaaaaacaaaggtgacacatttgaaatttatatactgttcatggtcctgtttctcactggcttagtggccttgagtaccatactataaaccaaacttattttcacaatgataaaatgagcgtgttctactagatgtcatataaattcctctttgtctttgaaattatgactaaatatttttattttatatttaaatataataagtcaagtgttgtattgccccctctataaaagccaaaaaaaaaaaaaaaaaaaaaaacagtgggtcagacataccat

SEQ ID NO: 799160 - DNA, 598 bp, Homo sapiens
agcaaaaaagtatttgaattccaggtattttcagaagttttggcattctgcagatgtgaggttgccgtcgtctaaggcagctagtagccctcttttgccagaagagttataattattagggatatttggagttcatttcttgtccagcttttcaacactacataattctctaatgacacaattctggagcactgaatattccataatccctcaaaaaagtgaatccaaatataattctcattgtgacccttggtttatatagcccccaaacaccttttattaataaagaaatttactgaaactgttttatgcttaagtagaaaaacaaaggtgacacatttgaaatttatatactgttcatggtcctgttwctcactggcttagtggccttgagtaccatactataaaccaaacttattttcacaatgataaaatgagcgtgttctactagatgtcatataaattcctctttgtctttgaaattatgactaaatatttttattttatatttaaatataataagtcaagtgttgtattgccccctctataaaagccaaaaaaaaaaaaaaaaaaaaaaacagtgggtcagacataccat

SEQ ID NO: 799161 - DNA, 656 bp, Homo sapiens
ttctccgagttgacttcatgtgatatgagaaacacattccatgggtcatttcctttctcctgctcaataccataatcccttgcaaaattactagtccatttcaaactcctagatatatacgtgctccaggatgcctttgctatgagaatacaatctaattccaagtacatttctcayatcaattttgcaaatatattcaatgaatgttgtattttattcttaaagttcataaggaagaatacattcatgaaaaggcaaaggaaatattataaagagaaatggattgagtgaaactacccttgctacacattaaaatgaaatctaaagttatggtaattaaatgcatatgaaatatatatgatatagttaggatatttgttacctccaaagctcatgttgaaatgtgatccccaatgtcagaggtggaacccggtaggaagtgtttggaacataggggcagagctctcatgaataccttgcagtaatgagtgagttctcactggattcattcctgtgagagctgactgttaaagagcctgggacctcctcctcatttccttcctctctccatgtgatgcctgctctggtcctctatgcccttctgcaatgagtagaatcttcctgagtccctgaccagagacaaatgctggtgtcat

SEQ ID NO: 799162 - DNA, 518 bp, Homo sapiens
atatgattggctatggaatctttcggtaaattatctgaatgacaattcagcaaggtagctaaatataagaccagtatatttttaaaaatcactttacttaatatatttcaggaacaaacagaacatatatgtttttaaagattccattcacaacagcaagaaaaaaatgacacacttaagaatataaatagcaaaagatgcataagaattttttaatataattataaaactttatcagttactttaaacaggaacaaaataaatgtagagctataccatgtttatggatagaaaggctcratattataaagttatgaactgctcccaaattgatacataaattcaatgccattccaattaaaatactgactgtgtatcttacagactttgacaagctgattcttaagtttgtgtcaaaatgcaaagtgcccggaatagttaggaacatcttaaaaatgaaagcaaggtagagtacttctcatcaagacttattgtaaagccatagttattaaaataat

SEQ ID NO: 799163 - DNA, 635 bp, Homo sapiens
tattgtatgatatagtcctaacatgtggtccactttgctttcacattggaaagagaaaagttccactgagttagctttaaagattatggaaccacctgtctaaagatatgctcatgtgaataagaaaatcttgatttgattcaaaggaaccaattctgaatggtggggtttggagaatcctttacagaactgcaagtgagaccatctggggaaaattcattttttaatagatcaaatcattcaacctatcaatgactatacagccygtggcaatcctagtcctgattaaacatatccacttgcacataaatatacgtatacacacacacacacacacacacacacacatgcagcatattttgtgtgagttcattgaaatgctaatactttttcactacctgtaattatgtctgctaacatgattcccatctcaccctccccccatgacttaaaagttgttagggaacaccatctgaaagacagccatattcgcacacccatgataagctggacctgaaaagtaattatcctggattagcacaggccctctctatgctaaattagcagccagatccaggcacacagttgcttcctgaccctcagttacacttcacagaaaacctgaagaaatctga

SEQ ID NO: 799164 - DNA, 635 bp, Homo sapiens
tattgtatgatatagtcctaacatgtggtccactttgctttcacattggaaagagaaaagttccactgagttagctttaaagattatggaaccacctgtctaaagatatgctcatgtgaataagaaaatcttgatttgattcaaaggaaccaattctgaatggtggggtttggagaatcctttacagaactgcaagtgagaccatctggggaaaattcattttttaatagatcaaatcattcaacctatcaatgactatacagcccgtggcaatcctagtcctgattaaacatatccacttgcacataaatatacgtatacacacacacacacacacacacacacacaygcagcatattttgtgtgagttcattgaaatgctaatactttttcactacctgtaattatgtctgctaacatgattcccatctcaccctccccccatgacttaaaagttgttagggaacaccatctgaaagacagccatattcgcacacccatgataagctggacctgaaaagtaattatcctggattagcacaggccctctctatgctaaattagcagccagatccaggcacacagttgcttcctgaccctcagttacacttcacagaaaacctgaagaaatctga

SEQ ID NO: 799165 - DNA, 635 bp, Homo sapiens
tattgtatgatatagtcctaacatgtggtccactttgctttcacattggaaagagaaaagttccactgagttagctttaaagattatggaaccacctgtctaaagatatgctcatgtgaataagaaaatcttgatttgattcaaaggaaccaattctgaatggtggggtttggagaatcctttacagaactgcaagtgagaccatctggggaaaattcattttttaatagatcaaatcattcaacctatcaatgactatacagcccgtggcaatcctagtcctgattaaacatatccacttgcacataaatatacgtatacacacacacacacacacacacacacacatgcagcatattttgtgtgagttcattgaaatgctaatactttttcactacctgtaattatgtctgctaacatgattcccatctcaccctccccccatgacttaaaagttgttagggaacaccatctgaaaracagccatattcgcacacccatgataagctggacctgaaaagtaattatcctggattagcacaggccctctctatgctaaattagcagccagatccaggcacacagttgcttcctgaccctcagttacacttcacagaaaacctgaagaaatctga

SEQ ID NO: 799166 - DNA, 476 bp, Homo sapiens
aatggctgtgaatgtaggttatacctagcaatagctcccttcatactgtgaaatatattgtatttttgtattcaagcagagaatgagcaatatttattatttttatagcttctataatatctttatagattgaggtgttttataatcctattttggtggtccgggatattacttcagattttttctcatccaaaacattcatatcaacatgagatggagtytggcctaaattaatgatcaagccagcaggtttgaaaagaaatatattttattaatgttaagtattgtatgttataaagtaaaacattcgtgaatattaagtaaaactaagtaaaatgaataagttacagcaggattgctttccctaaatgttatgcattacgggcctgaacattcatatgtatttccacattgttactaaatcaattcacttatattgttggtggcatgattttattagtgacatctaaattaac

SEQ ID NO: 799167 - DNA, 362 bp, Homo sapiens
ccttaaattgaataaggccacagagaataatccccattattttatgccctttagtaatgatatagcacctgcccatgcgttcccaccactctcctcatggtgacagttcatgccaaaataatctgagtaacatgtccctgcagagacagccgtggcatgagtggcagcaagccmgggcttttcatgtgctcttttgacctcagcctctttattccattctgggcagacccaactagccgagagtaaagagacagaaagaaagcagagagcctctccatcggcccgtggtggtggactgggtgagggaaggagcctcctcctcaactcaaagaaacttctttcaaaagataagaacttcagca

SEQ ID NO: 799168 - DNA, 483 bp, Homo sapiens
aaagtgagcacttttgactttcagcccaaatctattttcccaccaggtcaaaatctacccaatacacccaatactcatcaataccatttcatagaaagtatttctgcctagtgactacaaggttggctgtgcagtccatcaagagcccctcatacagagaaaggctgaacacatgccatgaagcctacattytagtggaggaggctgctaataaagaagtaggatcaaaaacatggcaagatttacaggaagaggagtataagcaaactgaccctggggaattcccacagacggtatgaggtgggtgcataaatggaaggcaactgaaaaatattcctggagtaataacagaaaagtgagcatggtgtcctcatgagggcccagccatgcacctaagtgctaaagacagttaggactgatgttccttcgttgtgcaaagatgtcacccaggactctggaaaagagtgggtgaaggagttaaaa

SEQ ID NO: 799169 - DNA, 535 bp, Homo sapiens
aatgtactgctatttctagttcaaaatcacagattttcagattgaaaaaatttcaatccacttatttttcaaatgagataactgggacaaagagaaattccatgacttgcccaagattacctacagtttaactgtcagcggggcttaaaaccacaatccacatctyctgactcccaatcctttcacttaaaacaaacaagcaaacaaacaaaaaagatttctaataaagtggaataattttaagaaaggcaagtatcactattttacaaggaaaaaattaaatcattttaacagattggcaaaacatgaactagttcttggggggaaaaaagagaagtcttacaagaaaaaatgtaatcaagagagtgccaaattcggtaaaatgcttgaaaattctgcctctagatctcgtaaatatgcaatcatcattaagtgacaactagaaagcagacttaataaactaactagattcactattcaaactaagaaataaacaaatgacaaagctttcctttcgtccaaaaaaagtttttta

SEQ ID NO: 799170 - DNA, 594 bp, Homo sapiens
cgcagcatattccaggttgaggaaacagcatgtgcaatagcctgaggctggaaagagcatagcattcaagcaacatgaagaagtcaagattgacttgcacacagagtagagaaagggcaagtgtcaagagaagagactgagaaggtaggggagcggactatatagagtgctttctaagctargttaggtattttggactaaattccagtaataacgggttgaagttttgggggagaaaagaatggagtaatatacatagtaagatttactttgggataactcattgcagttttctcttgaccacaatgagaatgaattggaaagatttaagttaaagcaaaagctcactttgcaaaaaaatcaaaggggttctgaaacaaaattcattttagaaaaaatttaatcagcttgacaccaaaatatcaacactttcccaaggaattaaatacctgatctcataagtatctggcactatataaaaacttgaaaagaacacaccatgtttcattgtttctagagttcaaatactgaggcaaaattcaaacacctgctattaccaaatcaacaaatggacagagctggcacattaacaca

SEQ ID NO: 799171 - DNA, 618 bp, Homo sapiens
ttatttatttatttatttatttatttatttatttattttgagatggagactcgctctgtcacccaggctggggtgcagtggaacgatctcggctcattgcaaccttcgcctcccaggttcaagcggttctcctgcctcagcctcttgagtagctgggattacaggcacatgccaccactcctggctaatattttgatattttaatagagatgaggtttcaccatgttggccaggctgatctcaaactcttgatctcaagtgatccgcccgcctcggcatcccaaagtgctgggattacaggcatgagccaatgcgcccggccatttttttttttttttacagcaatttcagatacacattaaacttaagaggaaagtgcagaggtttcccatataccctctacccctacacatgtaaagcttcccccattaccaacaattcctaccagaatactrtatttgtgacaattgatgaacctacattgatgcatcataatcactccaagccaatagtttacattagggttcactcttcgtgttgtgcattctatagtttcgggaaaatgtgtaacaaaatgtatcctacattaaagcaccatagagaataccatcacagcct

SEQ ID NO: 799172 - DNA, 426 bp, Homo sapiens
acttcaaaacattataaataaatgtttaaatatttccttaatataatttactaacagataattcgaacgaatgtcaaggaataacacactatcattcagctaccatatatatatagctatatatttcagtttgtgaaataaactagtatttagawcaagcaattgaaagccgcaaataaagatgatgaaacaagttggtaaatactttttctaagcaaactggttgtagatttagcattgtttaaattactgtcaattttttcttatgaggagtgatttcatcatttgtttaaaacctggcttttgacacagtttttctgaagtctttagaaatttgaaaaattatctcgcatgactctgtatttcatgaaataccaatattttaacatttccctgtaaacaataaaacgtactaatatggattat

SEQ ID NO: 799173 - DNA, 640 bp, Homo sapiens
taaaagaattttcattgttattatcaaggtgaatctttgccttcccaaagtttaaagcctatcctgaatccactctggtactgctgtcttaacctttaattcatggagacactgtggtttgtagccctgacactcatttcayagatacttaaagacctaacaaagaataagaaaaacctcatgtgcattcatgtagtggacttttcacatgtaatgtatggcatctattagcaacaacaataattatgatgatgataacaataaataattcctgtaaccttagtctctgtcaggttctgggttaatcactttatatgcaatatttgacattatcttcacagtgacctaaggaggtagatactattattacacgctagtaacttgctcaacatcattgagctaaaaactggtagccctgggtctctaacccaatctttgaatcttcaaagtttcaacaatctttgaagttgtttatacaacttcaaagagtagccttctgaccactttgtcatctacagaatgaaataagtacatttctgtctaaggtatatttccaatttctttttcttttcacaatcttgttcttacataaaactgcagtctacccttcatattccagttctgcatctgtgtattcaac

SEQ ID NO: 799174 - DNA, 666 bp, Homo sapiens
tttactacttcagttataaatatatttctcctgttgctttattcttgtctctgcttttaattttcatgtagtcagtttttgtatggtcaccttttattttgtaattttagttttgaatcttaaagccttccatcagtgttataaatctattttctaatgtattcttcaaattttttatactttttwaatttatttttatttttgttttacaaacagatttttatttcacctacagtagtatgtattttttccaacattctaaaataatgattaaaaagtatttgtcctagattggtagccatttattccagtattatttattaaaggtaacaattcttaccatttaatgacctcagagatgaaagtaaacacctagtaaaatgtctttcgtgatttcagagtttgatagaactttcagatagaataggtgagttttgtttatacttctttggtgtgagaataaaacctggtgaaaatagagggaaaattatttgattttgagacataaggaaatatttgactttatgtaagtgagaagactgtgagcaattctatgtaggaagtctagatggtgattggttgtaatagtctactaaatgtgacacttatgttgtatattttagttacatcatttaaagatgtactgaaaattatttatccagtttc

SEQ ID NO: 799175 - DNA, 666 bp, Homo sapiens
tttactacttcagttataaatatatttctcctgttgctttattcttgtctctgcttttaattttcatgtagtcagtttttgtatggtcaccttttattttgtaattttagttttgaatcttaaagccttccatcagtgttataaatctattttctaatgtattcttcaaattttttatactttttaaatttatttttatttttgttytacaaacagatttttatttcacctacagtagtatgtattttttccaacattctaaaataatgattaaaaagtatttgtcctagattggtagccatttattccagtattatttattaaaggtaacaattcttaccatttaatgacctcagagatgaaagtaaacacctagtaaaatgtctttcgtgatttcagagtttgatagaactttcagatagaataggtgagttttgtttatacttctttggtgtgagaataaaacctggtgaaaatagagggaaaattatttgattttgagacataaggaaatatttgactttatgtaagtgagaagactgtgagcaattctatgtaggaagtctagatggtgattggttgtaatagtctactaaatgtgacacttatgttgtatattttagttacatcatttaaagatgtactgaaaattatttatccagtttc

SEQ ID NO: 799176 - DNA, 666 bp, Homo sapiens
tttactacttcagttataaatatatttctcctgttgctttattcttgtctctgcttttaattttcatgtagtcagtttttgtatggtcaccttttattttgtaattttagttttgaatcttaaagccttccatcagtgttataaatctattttctaatgtattcttcaaattttttatactttttaaatttatttttatttttgttttacaaayagatttttatttcacctacagtagtatgtattttttccaacattctaaaataatgattaaaaagtatttgtcctagattggtagccatttattccagtattatttattaaaggtaacaattcttaccatttaatgacctcagagatgaaagtaaacacctagtaaaatgtctttcgtgatttcagagtttgatagaactttcagatagaataggtgagttttgtttatacttctttggtgtgagaataaaacctggtgaaaatagagggaaaattatttgattttgagacataaggaaatatttgactttatgtaagtgagaagactgtgagcaattctatgtaggaagtctagatggtgattggttgtaatagtctactaaatgtgacacttatgttgtatattttagttacatcatttaaagatgtactgaaaattatttatccagtttc

SEQ ID NO: 799177 - DNA, 636 bp, Homo sapiens
ggaacagattatttaatttccaggtatttgcatggttttgaaagttccttttggagttaatttccagtttattctactgttgtctgagagactacctgatataatttaaattttcctaaatttattgagacttttttgtggcytatcatatggtctatctcggaaaaacttccatgttcactgatgaatatatattctgcgtttgttgggtcgaatattctgtaaatatctgttaagcccttttgttccaggatatagtttaaatccattgtttattgtttctttgttgactttctgtcttgatgacctgtctagtgctgtcagtggagtattcaagccccccactattattgtgctgcgtccatctcatttcttaggcagtagtaattgtttttataaatttgagagctccagtgttaggtgcatatatatttaggattgtgatattttcctgttggacaaggcttttattattatataatgtccctctttgtcttttttttttttcttttttgagatggagtttggttcttgttgcccaggctggagtgcaatggcacgatttcggctcactgcaacctctgcctcccaggttcaagcaattctcctgccacagccaaccaaatagctaggatt

SEQ ID NO: 799178 - DNA, 610 bp, Homo sapiens
tataataaaaaaaaagaaaaaagaagaaaaaaaaagaaaataaacaatagtgaaataacagcaaaaaaaagaaggaaaagaaaagagagaaggatcaaatagacacaataaaaaatgataaaggggagatcaccactgatcccacagaaatacaaactaccattagaaaacactataaacatctctaygcaagtaaactagaaaatctagaagaaatggatgaattcctggacacataccctcccaagactaaaccaggaagaaatcgaatccctaaatagatcaataacaagttctgaaattgaggcagtaattaatagcctaccagaaaaaaaaaaaaaaaaaaagcccaggaccagacggattcacagcccagttctaccagaggtacaaagaggagctggtaccattccttctgaaactattccaaacagtagaaaaagagggacacctccctaactcattttatgaggcaagcatcatcctgataccaaagcctcgcagagacacaacaacaacaaaaaaattcaggccaatatccctgatgcatatcgatgtgaaaatcctcaataaaatactagcaaactgaatccagcagcacaccaaaagc

SEQ ID NO: 799179 - DNA, 569 bp, Homo sapiens
gacctcccaaagtgctgggattacaggcatgagccactgcgcctggctgtattctgttttcaatacccactacattaatcactgtagttttataatacgaagtgattatctgatagcttaactcctgttgtctgttttattttgttttgtttttcccaaactgtctgttttgggctcttccctatgaattttactatcaacttgttataacctcccactcctmtccccaaaatgccttattgacatattgatttattacttattttatagatgaattttggaagaagtataatattacatttttcaattcatttactcaattttttgtaatcttcaacatatttcaattttttgtataaaaagtctgaagcatttttatatatttattgtacagtttttaaagtataatactttatatgctattataaatgaaatttttctactatatttttaattaaactttgattttgaaataattccagattcatatgcagttattacatgtaatctagacaaatccatgtaaactttccatgtgttataaaagtagattcataaggtatgtaact

SEQ ID NO: 799180 - DNA, 569 bp, Homo sapiens
gacctcccaaagtgctgggattacaggcatgagccactgcgcctggctgtattctgttttcaatacccactacattaatcactgtagttttataatacgaagtgattatctgatagcttaactcctgttgtctgttttattttgttttgtttttcccaaactgtctgttttgggctcttccctatgaattttactatcaacttgttataacctcccactcctayccccaaaatgccttattgacatattgatttattacttattttatagatgaattttggaagaagtataatattacatttttcaattcatttactcaattttttgtaatcttcaacatatttcaattttttgtataaaaagtctgaagcatttttatatatttattgtacagtttttaaagtataatactttatatgctattataaatgaaatttttctactatatttttaattaaactttgattttgaaataattccagattcatatgcagttattacatgtaatctagacaaatccatgtaaactttccatgtgttataaaagtagattcataaggtatgtaact

SEQ ID NO: 799181 - DNA, 644 bp, Homo sapiens; identical to SEQ ID NO: 770602

SEQ ID NO: 799182 - DNA, 591 bp, Homo sapiens
agaagcttaacctttagaaataccaagacctgagattgaaacacaggcaaatttcttactttttctatatctcatttttttcattattagggaggaaaaaaagtagtattctttacaaaaaagagtagtattctttacagtgtacattctagaattgctctgagaatttctctgtgccctaggatttaatttcctgaacyatcctacttcagtttctttttctaattcattccacagcttgtcctctctcattgaaattatactctcatatcccttaggtcttttctggttttctcactgtttcagggctagagtgttcatggaatccactgggaaatatccattcttgtcatgtctcctcaaacttgattccaaggacacttctatctttgagtttcttttgtgggtgttctcaccccaacccagtttggcctgagtatctgtgtgggtcacatataaccaatattcctttatttatctatctttgtcagttttatcttttaaaatgttttgtctatatcatatttctagactaataattcatgtattaataaaagacaactaattaataatcagtatttgtaattacca

SEQ ID NO: 799183 - DNA, 595 bp, Homo sapiens
ttttaatgtgcttatagacatctctaaataatttttggtgaaatgtctattcaagtattttgcccatttaaaaaaccttattatcttattaattttattattgttgagttttaagagtttattgtatattctagaaacaatttatttgtcagatgtgtggttttcaaatattttctcccagtctgtgacttgtsttttcagtctcttaatggtatcttttgcagaggaaaagtttataattttaatgaagtcctatttattatttttttcttgtattgataatgcttttgctgttgtattttaaaactaattgctaaacccaaggtcacaagacttctcctatgttttattttaaaagtttttatagctttatgtttcatatttaggtttatgatctattttgagttaattgttgtataaggtgtgagcttcagatgtaggttaatttttttttgcaaatgcatgcatacggttcctttcgccatttagtttttctggggcccaaaattaatttgtcatatttgtgtgcgtctatttctggactctgcattttgttctgtgtgttctatatgtttgaactatatgtttctttttt

SEQ ID NO: 799184 - DNA, 466 bp, Homo sapiens
aggaaccctaggaggattgaaaaaaccttgtttgccctgaatggtcaacactggataggaaaatggcaactcaggcacaacggcgagcggtgaaggcatttttcagatcacacctgaaaaccagtcctcacaaacacctctaaactgaagctgcccatatcccatatttggtgtaatgcagatgrtaaaaagcacagcctgatcgtaagtcacacagatctgggtttaaattccaactgcaccacttactagcggggtgaccttggacaaactctttaactttttatgcctcagtttttcatctgtaatgtggggctcataatattatctataaccccaactgtaggtgtggtaggagggtgaaatgaaataccacattgcctgaactggaacaagtgctccataaacattaaattgttgtaatatttacaaatctctaccttagactgtacacttctcatcagtc

SEQ ID NO: 799185 - DNA, 466 bp, Homo sapiens
aggaaccctaggaggattgaaaaaaccttgtttgccctgaatggtcaacactggataggaaaatggcaactcaggcacaacggcgagcggtgaaggcatttttcagatcacacctgaaaaccagtcctcacaaacacctctaaactgaagctgcccatatcccatatttggtgtaatgcagatggtaaaaagcacagcctgatcgtaagtcacacagatctggrtttaaattccaactgcaccacttactagcggggtgaccttggacaaactctttaactttttatgcctcagtttttcatctgtaatgtggggctcataatattatctataaccccaactgtaggtgtggtaggagggtgaaatgaaataccacattgcctgaactggaacaagtgctccataaacattaaattgttgtaatatttacaaatctctaccttagactgtacacttctcatcagtc

SEQ ID NO: 799186 - DNA, 632 bp, Homo sapiens
tggtcatcatcatcattattattactttcaatctgaagagcattaggcccatgagatactccttaaaaaagaaacccatgaccaacaaagttagagaaagggtgtacatagagctacttcgtggtgattcataatgaccttaacataataaggctcttcgagtacttacgaaatctattttatttaatctagttatttcccaagttatttggctaaggagtccctctcttctctttgcctgtgttccttgggacacacttggagggaggccgaaccagtgtgctatttaagcyccctgcacttcccccaatagttacagaaatctgtactgatcctctgagggattgatgacataagtgtgtaatagatacattccataatttaaacaaaaacatgtcaacccgagaaacacaagggaacacgcattcaagaccacctggtaatatgatgtgttcattggtctgaaatgctttaacctcttttttcctcctcttccttgtaaaattaagtagtttatttcaaaccagatatgtctaaagtgaatatccaattctcatccagtttttgtacgttgatataacctattaccacattttgtactccagaaataaaaatgcaaaatgtagaaatga

SEQ ID NO: 799187 - DNA, 632 bp, Homo sapiens
tggtcatcatcatcattattattactttcaatctgaagagcattaggcccatgagatactccttaaaaaagaaacccatgaccaacaaagttagagaaagggtgtacatagagctacttcgtggtgattcataatgaccttaacataataaggctcttcgagtacttacgaaatctattttatttaatctagttatttcccaagttatttggctaaggagtccctctcttctctttgcctgtgttccttgggacacacttggagggaggccgaaccagtgtgctatttaagctccctgcacttcmcccaatagttacagaaatctgtactgatcctctgagggattgatgacataagtgtgtaatagatacattccataatttaaacaaaaacatgtcaacccgagaaacacaagggaacacgcattcaagaccacctggtaatatgatgtgttcattggtctgaaatgctttaacctcttttttcctcctcttccttgtaaaattaagtagtttatttcaaaccagatatgtctaaagtgaatatccaattctcatccagtttttgtacgttgatataacctattaccacattttgtactccagaaataaaaatgcaaaatgtagaaatga

SEQ ID NO: 799188 - DNA, 632 bp, Homo sapiens
tggtcatcatcatcattattattactttcaatctgaagagcattaggcccatgagatactccttaaaaaagaaacccatgaccaacaaagttagagaaagggtgtacatagagctacttcgtggtgattcataatgaccttaacataataaggctcttcgagtacttacgaaatctattttatttaatctagttatttcccaagttatttggctaaggagtccctctcttctctttgcctgtgttccttgggacacacttggagggaggccgaaccagtgtgctatttaagctccctgcacttcccccartagttacagaaatctgtactgatcctctgagggattgatgacataagtgtgtaatagatacattccataatttaaacaaaaacatgtcaacccgagaaacacaagggaacacgcattcaagaccacctggtaatatgatgtgttcattggtctgaaatgctttaacctcttttttcctcctcttccttgtaaaattaagtagtttatttcaaaccagatatgtctaaagtgaatatccaattctcatccagtttttgtacgttgatataacctattaccacattttgtactccagaaataaaaatgcaaaatgtagaaatga

SEQ ID NO: 799189 - DNA, 632 bp, Homo sapiens
tggtcatcatcatcattattattactttcaatctgaagagcattaggcccatgagatactccttaaaaaagaaacccatgaccaacaaagttagagaaagggtgtacatagagctacttcgtggtgattcataatgaccttaacataataaggctcttcgagtacttacgaaatctattttatttaatctagttatttcccaagttatttggctaaggagtccctctcttctctttgcctgtgttccttgggacacacttggagggaggccgaaccagtgtgctatttaagctccctgcacttcccccaatagttacagaaatctgtactgatcctctgagggattgatgacataagtgtgtaatagatacattccataatttaaacaaaaacatgtcaacccgagaaacacaagggaacacrcattcaagaccacctggtaatatgatgtgttcattggtctgaaatgctttaacctcttttttcctcctcttccttgtaaaattaagtagtttatttcaaaccagatatgtctaaagtgaatatccaattctcatccagtttttgtacgttgatataacctattaccacattttgtactccagaaataaaaatgcaaaatgtagaaatga

SEQ ID NO: 799190 - DNA, 392 bp, Homo sapiens
tggccaagcactgcataaggcacatggattgagaaaacaaatataacagctgtaagggacagcagtacctgacatataacggacagttagtcaatgataattccccaccccactcacctcccttgttcgtgtccctctttcaggaaccaattccaatgcacagcttccagggatgagcaatggaggacagaatggaatagagcaggaactaagcaaggrtgctaatgcaagatatagccggtaggtggcagcagcgtccgtgaaatgagcccggtctcgggcagccttgcctaaatttctcccaagccaagctgtttgactgtgtgcacgtgtatgaacacaggtgtacggatgtgcatgtgtatgggtcaggtgtatgggtcacaggtgta

SEQ ID NO: 799191 - DNA, 637 bp, Homo sapiens
tccaaaatcactggcagatggcagggaatcctgagatactgataaaagagctgcttcaagactaagggtcttaagggattagtggaaacaaatgaaaagcattacattatgaagagtaagtgacagtaagaaatacatctctcactcaatgtgttacctgaaagcaaaaatccatattaacaccagaaaacagacaaccaactcaacaattaggagattaatatattcctgatcaaatgctaataacagaatcacctaaaattagtttaacaaacatatatttaagataaacaatgtgataaatgaaagaatacaatttaaatgggasaacaataaattataaaacttatctgacttccccttttccaatttggatgccttttggatacgtgcacctccatgttgactgcagcactattcacaatagccaagatatggaatcaaccaaggtgtccaaaaccagattaatgaataaagaaaatgcggtatatatacatcatggaatactaatttagccattaaaaataatgaaaccctgtcattcacagcaacatggatggaactggaagatattatattaagtgaaataagcaaggaacagaagttaaataccacatattctcactcatatgtagaa

SEQ ID NO: 799192 - DNA, 629 bp, Homo sapiens
tctcaccagcacctggcagaggcacttcccccagaaaatctttgcagaccctcctggcctttgggaaggtgcccagcactgctccatcttctttggcctgtaattccctgctgacttagagttttgccatttgtaggtttttcctacaaggctctgagctctttgagggcagaggctgggtcattcatcttagtactcttggtacacaagaaaaaataatwataagtttcaattaagttccaacgaagcactgatattttgtgagctggagccattgttctattttgctcagagaggaaaaaaataatctaatcaggagaaatgtctctactaaggtttatcgcacttttttttttttcttaaaatgtcggtgcctactaatgtttgtgtattttggaattccaaatacacaataaatctatcacaataaatctatcttgcagtgatatttaaaaacccattatgaaattctgaacccagtatttcatctagaacaaccatttaaaaattattttgatgctagtattttgagaatgccatgtgataagaagcatcatgaataaccttgagaaccagtgagttcagtaaatgtatgttaaatgagtgaaaaaaggagaatgagaaggcat

SEQ ID NO: 799193 - DNA, 596 bp, Homo sapiens
taacatctggtaatgcccatctactccaattactcagcattttgagacaattcattctttttccctgaaaactttctaaatgatctgataaatttcactatatatgcatttttatgattacttaaaattttactatgcatctcaattgtttaaagtctatagttaatcaaaatagttccttttcaacaaaataaaaggctttgaacagtttaaatccagacattccttcttggtgtttaagctcctcctgtctaatacttgaattctgtcattttttaaaaatcaacccatagattagacatttttgttttattatgttataattgcctctttatatttttatagttatttactagtcattttctcatcattcctattagaataatattccttctgaagccattccytttttattaactatattctttacacagtcacctaattgattttttctaagtatttaacttacactgtctcactcttaaaggataattttgttcagtatgtaattctaattgacagtcattttctctcagcagaagagactatttggcttctattattgctatggatatgtctgctattaggctacctga

SEQ ID NO: 799194 - DNA, 607 bp, Homo sapiens
aaacctaaaaaataccattctggacataggccctggcaacaatttcatgatgaagactccaaaagcaattgcaacaaaaacaaaaattgacaaatgggatctaattaaactaagggcttcttcacagcaaaataaactgccaatagaataaacagacaacctacagaatggaagaaaatatttgcaaactatgcactcaacaaaaatctaacatccagaatctccaaggaacttaaacaaatcaaataagcaaaaaacaaacaactctattaaaaaataggcaaaaaacatgaacaggctgggctcagtggctcacacctgtaatcccygcactttgagaggctgaggagggcagatcatttgaggtcaggagttcaaggccagccttgccaacatggcgaaatcccatctctactgaaaatacaaaattagctgggtgtggtggcaggcacctgtaatcctagctacttgggaggctgaggcaggagaatcgcttgaacccggaagtggagtttgcagtgaaccgagatcatgccactgcatttcagcctgggtacacagtgaggctctgtctcaaaaaaacaaaaacatgaacaaacacttctga

SEQ ID NO: 799195 - DNA, 542 bp, Homo sapiens
acacttggacacaggaaggggaacatcacatactggcgcctgtcgtgaggtgggggaagggggcaggaatagtattaggagatatacctaatgtaaatgacaccaacatggcacatgtatacatatgtaacaaacctgcacattgtgcacatgtaccctagaacttaaagtataataaaaaaaattatatatatatatatatataaacaaatctttagctagacacaaagtgccgattggtgcatttacaaacctttatctagacataaaagttctctaagtcaccacccgactcaggagcccagctggcttcgcctagtggatcccgcgcaggggccgcaggcggagctgcctgctagtccagtgctaggtgccggcactcttcagcccttgggccgyccatgggacctggggcctcggagcagggggcgaggtccgtcgggaaggctcgtgcggtgcaaggggtgggcatgagggcttgggcatggcaggctgcaggtcctgagccctgccctgcagggagatggctgaggcctgacgag

SEQ ID NO: 799196 - DNA, 608 bp, Homo sapiens
cagggaaaagggaagactccacatggaggtcatactcctcaatagtaggccactcctgggagctgcctcagaggcaggaccggcccatctgtctgtgtccacaggtgcttcctctcctcattctgctcccaggaggcggctacatccctcacttgggaagtgggcaggagacagcccagggtcggggaggcggaggctgtcctgagcaggggcgcagagtccgggctcctgggggccatgccactggctgggctgtctgaacagcagagtggacgcagactggtcttgcctggcatgggcatgcaccctggctgccctagccggccaagaggcaaggctacaggcctggggaagccagcactgtgctggccaggcgagggacggaggagcccaggcacgcagctgtgaatggaaccaccaggccccaccctggaatcacgtygcctcgctgcaggccacgtggtccccaacatgcccctccacggggctgctctcggccacagcagcccacggcagggaggggccgctcacggtggggaggggtagcctgccctggtcctattcactggtgttcctcccaggttctaacttcctgagctgggccggtc

SEQ ID NO: 799197 - DNA, 587 bp, Homo sapiens
catctgcacggtcctatcagcacagaagcctcaatgggatatttcgcttaaagacatttggaaaaacaagagctggaaagctctcactgaaaactgcccttgattccataaaatacactttatttttcctaggctataaattcaggaagaataggctggatgcgacggctgatgcctgtaatcccagctctctgggagatcaaggcaggaggatcacttgaggatgggagtttgagacaagcttggacaacacagcaagatcccatctctaccaaaaattaaaaatagctgggcatgggggtgggacctatactcccagctacttgggaggctaagctgggaggatcgcctgagcctgggaggtggtggctgcagtgagccaagatcgygccactgcactccagcctgggtgacagagcaagacgctgtctcaaaaaaaaaaaaaaaatctggccgggcacagtggctcacgcctgtaatcccagcactttgggaggtcgaggtgggtggatcacttgaggtgagaagttcaagaccagcctggtcaacacagtgaaaccccgtctctactaaaaatacaaaaatta

SEQ ID NO: 799198 - DNA, 592 bp, Homo sapiens
ctggaggaataatttaatacaaacagtctcctccactacaaacacttaggaagacaggataaaaatatattaaaaacaaagaaaaataatttaaattaaaagtaaaatttaacaaaaagacaaaagttccagatgctaaaatraaaagtaaactcaaagccaaagtaatcaattctagctgatggtgatggacccagaagaacagtgccactggatgtaggccctgggaataacaagctaagtcttcaatgcttataaagctatgatagattcacaggtacctaactgcaggtctatttaaatcatggagatgaaactatgggttctccatgaaactaggactcttaaaaaaaaaaaaaagaaatctcacattgaggattttctttaacaaaaaataattgtaaaagtctcaaagaaacagaaataaaatgtgctaactgctctgggcttggggtgggtagagccccacaccatgtttcccatatttttatgaagaatcaaagtgtgtattaccaagaaagtgtggaaattctgatttaaggccaaagatatacttggagattcagcagagggaaataacataaggccaggt

SEQ ID NO: 799199 - DNA, 629 bp, Homo sapiens
cattctggcattggggaaatgaccacaggatgagtccggggacccacaggaccaactgtaagttgaaactgaggtaaaactccattaattagctgacctccataagcctctactctaactggaggaccacaatgatgttttgggtcccctagaatcaacgtcagctcagaaccagtgtccagtagtcctcaaaatatctgatcatttccctttccacaatgcacagttaccctggtaaaaggctggaggtctccttgcagaaggatgggagaaagattaatagtataaattgttggtagtttagtggggtccttcctgaagckgacctggcctccccttcactcaatgggttcaggatctgtaaactggctcaagtctggaaattaattgaggggccatgactctttgcctttataattcaaattagtcttttgtccaatcgacttggaagttttctgcctatataaattaagtagaaatgcagtaggtttcatatcaatttcacatctaggaacactgtgattaattagccaaggccagagctctacataagtcagattattctgattgctgctttgcctctgctgtccattatggtagctacacccaccttgcctttgaaggttgag

SEQ ID NO: 799200 - DNA, 629 bp, Homo sapiens
cattctggcattggggaaatgaccacaggatgagtccggggacccacaggaccaactgtaagttgaaactgaggtaaaactccattaattagctgacctccataagcctctactctaactggaggaccacaatgatgttttgggtcccctagaatcaacgtcagctcagaaccagtgtccagtagtcctcaaaatatctgatcatttccctttccacaatgcacagttaccctggtaaaaggctggaggtctccttgcagaaggatgggagaaagattaatagtataaattgttggtagtttagtggggtccttcctgaagcgkacctggcctccccttcactcaatgggttcaggatctgtaaactggctcaagtctggaaattaattgaggggccatgactctttgcctttataattcaaattagtcttttgtccaatcgacttggaagttttctgcctatataaattaagtagaaatgcagtaggtttcatatcaatttcacatctaggaacactgtgattaattagccaaggccagagctctacataagtcagattattctgattgctgctttgcctctgctgtccattatggtagctacacccaccttgcctttgaaggttgag

SEQ ID NO: 799201 - DNA, 609 bp, Homo sapiens
aagcctgtaaagttctagggcaccttaaagggatttatttctttatctcagctctccttaccttctccctttttagtcagaatctgtaacactctcatccactctcatcgaaggcccactttagaggcttttttttttttctagcctgccacacagtcagccttcagtaggccctgcctttactagaggagcgtcccatgtctgtccctcagatggcatctctctcattcttcacaaggccatacctatgtactcaatgagggaccataggaaagaattgaccagtgtttgcagactttctttagctgacccacttctgaccaaaaactaaacaacaatttgtggggcaaaaatgctgatctgggaaaacattatttgctcttttgctrccctttgaaatgagagtttttatattggttgctacctcaacattcataattttacaatatctaaatttataaatatgttaatcagtaatttatattttttccttattgtaaaataaaaatacggaggaactattagggatgtgtacaggccacaaacacagcagagaccaactatagagatggagatagacaacatttagctttctaaggcataaaggca

SEQ ID NO: 799202 - DNA, 562 bp, Homo sapiens
tataatttatcaataaagggcatagtcaataaaatctaacacagtgccaaggtttaaggctgataccaagcacaaggtgcgcactcactaactactcaatatttagaaaaagccaaatttagacactaagagttaaaataaagtaataaaatacaatatgaaatgaggccataggactccaggctcctatgactagctgaggatagtcatagaagttttctgccttgataacttgaatatcatttaccaaaataggtaactgcttaacacyacctgcaagcaagcaaaatgccactcatcttactttaatgcatagtgaaaaactatgccaggtattagataaaaacaactacagcaggttgaattttattgattggggtgtgtgtgtgtttgtgtgtgtgtgtgtgtgtgtgtgtgtaaaattataggtttgaaaatcatgtttttccagaaatgttgtaccctctcaggctagttctccaatttttatttctttgctccactctttgcagtctttgtcctttcatgctctggatgatttcctcaagtttatctctagtgc

SEQ ID NO: 799203 - DNA, 655 bp, Homo sapiens
aggcaggtcatcaatcaaaacagaaagtcaacaaagaaacaatggacttaaactataccatagaacaaatggacttaacagatatttacagaacactctatccaacaacctcagaatatacattctattcatcagcacatggaacattctccaagatagaccatatgataagccacaaaagaagtctcaataattttaagatatttatttaagaaaactatatcaagcactctatcagagcacagtgtaataaaattggaaatcaactacaaagggaaccctcaaaaccgtgcaaatgcatggaaattaaataacstgctcctgaatgattgttaggtcaacaatgaaatcaagatggatatttaaaaattctttgaactgaatgataatagtgatacaacctatcaaaatctctagggtacagcaaaggcagtgctaagaggaaagttcatagcattaaatgcctgcatcaaaaaatctgaaacagcaaaaataaacaatataaggtaattatatcaaatatcctctcagactatagtggaataaaattggaaatcaactccgaaagaaactctcaaaaatataatcttctccatagtaacctttgaatcaacaatgaaagtaagatggaaattaaaaaattctttgaactgaa

SEQ ID NO: 799204 - DNA, 501 bp, Homo sapiens
catttacttttgcttgtcacctaaagggcattgccaacacaagactgcttcacatgcggttttgaggcacaaacagttagttttcatgggactttgaaccctataaagagatgacttctaaattttcttggtagattttccgcattcacttatcgataatttttgcttctaccttttgcaatgtatcttacttctcattcrtccttacattttgggttttcccttttacactattggattagctctttgggatttcaacattaaattaggtatctcctgtttcatttctcaagttggtgggtgttagctttttatcttttattctctggcttccatgcagttattgagaaagtagtcacaattacccagggaccaagagaaaccctgagagagaaaaatcatctttgctaccaaatgtttctcacccttgtgttatatttgctataggttaaaaacacttaagaatatatattttgtatcatgttaatatttttcaagaaa

SEQ ID NO: 799205 - DNA, 613 bp, Homo sapiens
agatctgggcacaaagttgtgcccggatcccttcctgctgggagcctcagcttctaagcacagcctggcatgaagacagggggctggcctgaataactctcctgcagactcctctggctctgggattccatttctggcttgtcgtcctggccacctgttctcctctcagaggcagacagcctgttccaggtggctagtcgggttttcaacaaagggccctcacctgggctctgcctaagaccacactccaggggctaastggacccctggggtgggcgtccttgtgaatctcatgcagaacagtctctgggggttcctagagatgccccaaatcctcagacatctgccagtgctcagaggagccttgcaagtcaccttccttaaccctcttcagttacagatgggacaactgaagtgcagacaggtggagactccctaataccaccgagtgagtcagtgctgtgtgaacctggggttctggctccttctaattccaagattctctgctcaggggacgatgcctccctcaaccctcgggttatgctgcctaagttcaaatcttgctaccgctactgaatagttgtgtgaccctgggcaagtttcctcgtttgta

SEQ ID NO: 799206 - DNA, 609 bp, Homo sapiens
tcaccctgccctggccagcacccagacccctggctcatgtgtgtgagggtgtcacaggagaggccagaaatggttctgtgccagctcactcactcccgctttctggaaaaatgattgcttggcccgagggctctgctccctcccccaacccctctctcagcctcaagaagtgtgagcaccattcagggctctaccggaaggaagcaggatgatactatcatctcctgcccaaccccatctcacagctgccctgaaggaacagtacayggcaggcttgcagctcctatgtgcagaagagaacacagagccccggaacagggaggggattcactctgggtccatggggcttgaggggagctgagattccagctggccagtgcctcactccatctggacctctgtgcactctaccccgaaggctggagagaccccaggatggtcttctgctcagaacccacgagttcagaggcagtcctcagaacccaccgagccatttcactctgctcagagcccacgggggagggctggacccacctgggagggagccgcgctggggatgttgcgctggacacccaggctaggcatggtgggtaggtggacagcaatgga

SEQ ID NO: 799207 - DNA, 668 bp, Homo sapiens
gctgggatccattgttcccaaggacaccctatcccctcctacccccacccacttctactgggcagacaacagctggggtctgcccaaggacccttgggcaggggagctgcctctcctggagccatctgcccctcagtaccctccccttgcctcttcctcttccctcctccrtgaggcctagagtggccacgaggtcagaggtcagaggaagcacgcaggtccaacttccaggcggtactgcttccctgatgaggcaggagggaggttgtccacactgatgatgggcagctgttgggggtcttgggtccggaaggtgaagagtgtctgatgccagcggccatcttggacctgaaggcagaaggaaaagtgcacacgtacatccatcgtgattcttatcatacatcatgagcattttcccttccatctttcctcacaatttttaatggctatactgtatttcattgtagcaatgacctatatggcacatttagattgcttccactctttttattcttgtaaggaatgctgtcatgaacatcactgtaactaaacctttgtgtgcattcttatttccctagaacaaattctagaaggattgttctagattgctagaccaaaaaacaagtacatctcatatacatatatatatattttttaatttatttttt

SEQ ID NO: 799208 - DNA, 609 bp, Homo sapiens
agagttaaaccccgttgtgtgctgtgaggaacagagcctcaaactgcagctcaaagatgtaggctctgagttctgccatttgctcactggcagacctcagcctcactgtgtctcagtttcccagattggagaagatcatcctcaaatataataagtggcttcagctgagttcctggaggtcagcagtgatgccttattctttcttgcagccacccccaaacatcactygggatggtgccgtgtctaaggggtgtttggtgagtgaatgaatgaatgaatgaagatgtgaacaagtggcaggcatacatagggctttcttgagtggtaatgtgagtgtagacagaagcatgtggctggtgccgttccctcctctccccttccttcccgcttccggcccatgagactctccaggtgctccccacccccacaggctcaggcagcctcctaattggctccttctggcatgccaggcctgaccaaggggctccctccagagacaccccccagctccttttccccagcttccaggaaagcagctccacgtggtggctcccagagccagtgctgggaccccgccagacccagagccagcccgagaagggatccatg

SEQ ID NO: 799209 - DNA, 561 bp, Homo sapiens
gccccatcaccagccccaggatcctgggacagggcttatgaacgcaaccactgtagtcagctcacttgatccacagcctggcacctccactgtctggctagggagcctcgaatgggtcccaaggccaccctgctcctcagttacatcatctgcatagtagtggtggttgtgaggaattcaagagctgcagcataagggccctgcaggtactatgtgctcagtaaatgccagtggttcttaagggtctgagctcccatkgtagaggcaagtaagctgaggttcagagacagaaaatgacttgcccaagatcacccagctgggaagtgacagtgccagggttggagccctggttgagctggttccacaggccagagctcattctgccctctccccggaagacctcccaccctgtccccatgcctctgcttctccctcaccccaattccccgctgccttctaggataagtgtgagccactggagaagcagcacgagaaggagaggaaacaggaggagggggaatcctaccaggacacagccttggatcaggacagagacttggg

SEQ ID NO: 799210 - DNA, 628 bp, Homo sapiens
atacctaagagtggagttgctggatcctaggttaggtgtatcatctacctcttgcagatgagataaattagataaactaacttagatgttaatttagatgttcagctttagtagattctaccaatctgttaagtgcctacaccattttacttccaccaacaatgtatgagagcttcagttgctctacatccggccaacacttggaaggaaattggaagggtagcagatccaggatttagggggagaaagactcaaatagaatgcaaatagctgggcctggtggggtggctcacgcctgtaatcccagtactttgggaggccgaggcgggtggatcaccaggtcaggagtttgagaccagcctgaccaacatggtgaaactctgactctactaaaaatacaaaaattagccgggcgtggtgtcgggcgcctgtaatsccagctacttcggaggctgaggcaggagaatctcttgaaactggaaggcggaggttgcagtgagccgagatcgtgccactgcactccaacctgcgtgatgggagcaaaactccatctcaaaaaaaaaaaaaaaaaaaaaaaaagaattcaaagagcctttcaggaaagctgaaggttgttggtcttaatttc

SEQ ID NO: 799211 - DNA, 588 bp, Homo sapiens
aggagaaagcttttattatgtacctctttatattattttttgaaccatctgaatgcattttatgcaaaaattttaaggtaaaagtaaattattttaaaaatgatggcagcaaaaaggttaatagaaatagacatgtttgagcaagactgggaaatggcagaaaattccaagggaaagagatagacataaggtaacttcaagtttacaaaggatataatgccataggcaacaagcaccagacaaattactctagtgcaaagaaaagtaattaaactgtgcagcaacatttaaacagctgaagcataagtaaaatattagcacaggagaagaggcagtagaagaattmgattttatgtttaacacattaaaatgaaaagattttaattaaagctgttatttaaagctacaaaaacattttaaatgaagaatatatattgtaaatcacatccattctttatatattctcgacctctacttcagtctttctataaaaccaacacatgtacattccatccatgtcaagaaaagtcattttttatcttagtgacttacatggtgcaacatatgtatgaaaacaactttagatct

SEQ ID NO: 799212 - DNA, 624 bp, Homo sapiens
ttaatctaaaataatattaatgagacttaatcaatctattagaatgtactggcttctactatgtgactgcctaataccccatgtatacacctggcctggatatatagcaaccccagcagggcaatgtcttttattttttactcagctagttatcrtagccaaggtgacaatggcgaagtctcccacgtagagggagtaggatggagaatcttccagatagcccaaaatttgaagtggttctcttcctcctgaaacttccagcagccgcagtgcttgcagaaggcacttgatggcagctttcaggggcatttcctggcagctgtggcaaggattttgcagaattagaatggcatgtattaaaaccagagccataaaagtacagttcttggatactctgtactttaaatctgcattctgagcaattttagacttgggaaccaaggattccttgcaattagggttcccattttcaacagcagaaagtaatgcagtcatcacttggcacaggatacacaggcaagtttgaagacaagcagagaagagaatggcccagaaccaaggcacatacttcccgtagccacaactgccttagggtctcaccaatatctgaaggatacaggatcc

SEQ ID NO: 799213 - DNA, 507 bp, Homo sapiens
accagcctaggtaacataccgagaccttgtcactactaaaaataaaaattataaaaataaaattagccaggcgtggtggcacccgcctgtaattccaactgctagggaggctgaggcaggagcttgagtccaggaggtcgaggctgcagtgagctatggtcgcctgtcaccrcactccagccttggcgacagggtggaaacctagtatttaagtttcttagaaaaacggctgggtgcagtggctcacgcctgtaatcccagcactttgggaggccgaggcgggtggatcacctgaggtcaggagtttcagaccagcctgaccaacaaggtgaaaccagtctctactaaaaatacaaaaattagcaggtcatggtggtgcgtacctgtaatcacagctacttgggaggctgaggcaggagaatagcttgaacccgggaggcggaggttgcagtgagccaagatggcactgggcgaaagagtgggattccatctcaacaacaacaacaa

SEQ ID NO: 799214 - DNA, 507 bp, Homo sapiens
accagcctaggtaacataccgagaccttgtcactactaaaaataaaaattataaaaataaaattagccaggcgtggtggcacccgcctgtaattccaactgctagggaggctgaggcaggagcttgagtccaggaggtcgaggctgcagtgagctatggtcgcctgtcaccgcactccagccttggcgacagggtggaaacctagtatttaagtttcttagaaaaacggctgggtgcagtggctcacgcctgtaatcccagcactttgggaggccgaggcgggtggatcacctgaggtcargagtttcagaccagcctgaccaacaaggtgaaaccagtctctactaaaaatacaaaaattagcaggtcatggtggtgcgtacctgtaatcacagctacttgggaggctgaggcaggagaatagcttgaacccgggaggcggaggttgcagtgagccaagatggcactgggcgaaagagtgggattccatctcaacaacaacaacaa

SEQ ID NO: 799215 - DNA, 612 bp, Homo sapiens
aacaaacaaacaaaatttttctcttttcgataataaactagctcactgtaacttttttaatttataaacttttaaatttaactttttgactcttgtagtaacacttagcttaaaacattataaagttgtataaaaataatttctttctttatatccctattctgtaagcttttttctattaaattttttttattacttttaaaatttgcttgttaaaaactaagacacaaacacatacattaggttaggcctatacaaggccaggattgtcaggatatcactatgcaataggaatttttcagcttgattctgatctttgggaccgccatcataggcgcggtctgtcattgacagaaacgtcattttgtggcatatgactgtattttaatggaagttcctgcaaagkaataggtcagtagtttagacagagtatgcaattgccctcttagagtcattttgctttgagtctatccaaggcaggatcgtaagtaaccagggaaacagatgaggataacttgttgggaggacaagagtctattaaccagatcagccttcaaataattctggtgatagaaaccatcacctgaaactgtacttaacattttaaatcag

SEQ ID NO: 799216 - DNA, 561 bp, Homo sapiens
gagttggaaatggataaaagcaaagtgccatcataaagcaaattaactaatttattgagtagctttagtttgagtagcaaactgggtctgagggtaatttcagatgagcatttccaagaatgttttcaacaatggcagcatgattggtataaawgcataatcccttaaggtgatactttaaaaagtaaaactcacttgatgcaagttctgagttttgcttttactcttttgtcttatcttttaaatttcccttctctctagtcttccccatatgtacttcacagtggtttgtagtaaacacatttagtattttgtttctattttcctcagcaagtcaatacttgctattcaaattaccaataaaaattctgagagcctgcaatgatcacagcattatgctaatttctataggaaagagttagtcctgactcgaccaattttcataaatttgcatgttagacatcatagtaccaccagtgagtccacacaggtactttaagctgatagcctcttcaacaccaagcaataagcaactgataatttctatgtatgtcctagtgg

SEQ ID NO: 799217 - DNA, 707 bp, Homo sapiens
agacctgatgcccagagctcttggatccattccccactcacccaggaacttctaaaccagacatgagcttgtaatgagtactttcttccccaacagaacttcatgcatcccagagatgcagaatgagaatgatctccatcctggtcagcgaaatacagcatacggtgggataaaggattgaaaaagatgcatgctccgtgaattacttccccatgtggtttctgcctggctgagttatgatggtcaaatcttacctctgcagcctaaactagatcagagatgcagcatgactgaggcagttttagttgttattgttgttgtatagttctttgctttagtctgtaggttgcctaacgctacacagctaatgaaacactgtcccctctccctctccctctccctytccttctccctccccctccccctccccctctccccacggtctccctctgatgccgagccgaggctggactgtgctgctgccatctcggctcactgcaacctccctgcctgtttctcctgcctcagcctgccgagtgcctgcgattgcaggcgcgcaccgccacgcctgactggttttcgtatttttttggtggagacggggtttcgctgtgttggccgggctggtctccagctcctaaccgcgagtgatccgccagcctcggcctcccgaggtgccgggatggcagacggagttgcgttcactc

SEQ ID NO: 799218 - DNA, 663 bp, Homo sapiens
tgtgacaccaggcagagttcagcaagggatcccagaaaaccaaagtcgggtgatccagaaacagaaaactgggccatctgaggctctgggaagagaactcagagattcaggaaatactacaagggctgattttggagactgggtgactgggtgcttgctcttgtgaaaaggaaatgctgatccaggcagactccagcagggagagctgcagcctgaggggaacttacaggcccgtttgggaggaatttgtctttatggacaattcctcttttttcccatctctgattctttcctgcaaacgaatttggaagtaaaatgtatgaaagtgaaaaaaacttacatgttacaatgtgcatctcttaggtataaagaactattcccttttttagagtacttaaaacaaaaaaaaaagaaagattataaaatctctaaatatacctaatgtctcagactcaagcatccacaattacttcacagcatttcaygaacaccctttcattctatcctttcccttcacagcggtagatcccacaagcgcccaatcaagaccaaagattcacgccaattgatttccctctttctcaattgatgtgtttaggagaattacgctctttctaactcctattattaacctttttaatttgtcactttcattttaataaa

SEQ ID NO: 799219 - DNA, 595 bp, Homo sapiens
agacacggggttgagcatgttggccacgctggtctcgaactcctgacctcaggtgttctacccaccttggcctcccaaagtgctgggattataggcatgagccaccgcgcccagcctatagctgattatttttattcatagtagttgtgttctataaagtgtcacaaacactgaattaacaaatcctgaatcattgctcctaggggaaatatggggttaggttcctgtgagcctccactcacaaccctttcatcaaccaatgaaaacttaattttactgatatattatcacatcataattttgttgatatttattttatctgtgtttccatttaagaagctttttgaatatatattgttgttcattcacaacgaactgtgccagaatgacgcttatctaatacacattttatccataaggcataccacagccttcctgtacttagaaacactagatagyatttcagcagtgcttgggctccgtttcaaacagcaaaatgaacaaaaatgcaaaaaatgtggtactaaacagaccacaaaaaggacacttggaaagccaaaacaagcgggcagaacatcactttgttcaccctcag

SEQ ID NO: 799220 - DNA, 621 bp, Homo sapiens
cagggctgctctgtctatggaatagccattcttttattcctttgctttcctaataaagctgctttcacattactgtaggaacccaacctgaattctttcttgtgcaagatccaaggaccctctcttgggggtcaggactagaaccctttatctgcaacagtcataatggctaagtttattgagtggttactacatgacagacaatgagctagggttttatctgctttatgtcacagaaggctcccaacaatcaaggtgaagttggttgatcaaagtagatggttaacaaatgataatgaatgaacgactgctgtacagatttaactaagattatatttagcatgcataagaacacattctttartaattccaaaattagaaaattaaagtgtcaataaaaatcatacaaatataatttagttaatgtttattgagaactgacttacaagagggctgaccatgaaacactgaagctgaaagctcaagtctcctcactcccactggccccttcttgggccctgggatgggtcccagcaatgtgctgaatgagcaccttcagtaaataagatgagtcattgtacaagaacatttaaatgccataaaatctgacgccttatatat

SEQ ID NO: 799221 - DNA, 653 bp, Homo sapiens
gattatatttagcatgcataagaacacattctttagtaattccaaaattagaaaattaaagtgtcaataaaaatcatacaaatataatttagttaatgtttattgagaactgacttacaagagggctgaccatgaaacactgaagctgaaagctcaagtctcctcactcccactggccccttcttgggccctgggatgggtcccagcaatgtgctgaatgagcaccttcagtaaataagatgagtcattgtacaagaacatttaaatgccataaaatctgacgccttatatatgaaagaaacttaaggttttcccaaatttgagagtagtcctaaacgtttacatggtgttaccaacaactagttgtgaagcttacaaatttttttcttagctatcaatagtgaagaacaaatcccaaccattcaggctggaggaataagaaaattgaaaattatcttctattctctctagagataatggcattccaaaatcattgtyatatgaagaaatgatcagaatatatagcctaaaatatgtaggaagaaaaataatgtaacatatcaaacagataacaagtaatcatattttatttttctgcattttgtgatgtaaggttgtcagtttcttaaacatatacttccttgtgttttctt

SEQ ID NO: 799222 - DNA, 597 bp, Homo sapiens
cttctgataatcaggctaagaactttggagtaatacttggtatctttttctcatactctacattcaatctagcagaaaatcttgtttatttgaccttcaaccgttaatatatattttaaaatatatttgtatacttctttcattattaccacccrggtccaagccatcatctcactgggttattccaacagactcctgattaggctccctgttgctgtttttgccctctatagtcattcttttttttttcccccgagatggagtctcactctgtcacccaggctagagcacagtggcatgatctcagttcactgcaacctccacctccctggttcaagcaattctcccaccttagcctctggagtagctgggattacaggtgggcgccaccacacccagctaatttttgtatttttagtagaaacagggttttaccatattggccaggctggtctcgaactcctggcctcaaatgatctgcccgccttggcctcccaaagtgctgggattacaggtgtgagccaccactcccagcctctatagtcattcttaatgcaacagccagaatgatccttttaaatggcaagtggaagatat

SEQ ID NO: 799223 - DNA, 597 bp, Homo sapiens
cttctgataatcaggctaagaactttggagtaatacttggtatctttttctcatactctacattcaatctagcagaaaatcttgtttatttgaccttcaaccgttaatatatattttaaaatatatttgtatacttctttcattattaccacccaggtccaagccatcatctcactgggttattccaacagactcctgattaggctccctgttgctgtttttgccctctatagtcattcttttttttttcccccgagatggagtctcactctgtcacccaggctagagcacagtggcatgatctcagttcactgcaacctccacctccctggttcaagcaattctcccaccttagcctctggagtagctgggattacaggtgggcrccaccacacccagctaatttttgtatttttagtagaaacagggttttaccatattggccaggctggtctcgaactcctggcctcaaatgatctgcccgccttggcctcccaaagtgctgggattacaggtgtgagccaccactcccagcctctatagtcattcttaatgcaacagccagaatgatccttttaaatggcaagtggaagatat

SEQ ID NO: 799224 - DNA, 613 bp, Homo sapiens
atcaagttaagtacatatgttgtagtttctagtgtaaatactaactgtatatagaaaaaaaatagatgaaaaaaatcctcaagcaatccgaacaatcaaaaataagataataaaacaggcaggagaagaaagctcaggataagatgtcagagttaaagccaagtatattagtagttacgttacaaataagtgctctacagtagatgcagattataaaactgtatttataaaaaaatttttttaaaaagataatctgattggattttaaagcytagatgataggttgaaaggtgcagcaaaccaccatggcacatgtatacctatgtaataaacctgtacattctgcacacgtatcccggaacttaaagaaaaaaaaagatataaaaaacaaacaaacaaaaacaaaaactaatgaaaggcacacatagaagagaatactgaaaatctaaagtaaaaagaatggaaaaggtataccatgcgaatgttaactaaaagaaagccagtgcagctatagtaatatcagagaaagtacagtttaaagtaaaaggcattgctagagatgaagatggtctcttcatagtaataaaagattcaatttaccaagaagatataa

SEQ ID NO: 799225 - DNA, 618 bp, Homo sapiens
ggaacccaacccctaggccgcagaccagtaccagtctgtggcctgttaggaactgggccacacagcaggacatgagtggcgggtgagcaagcgttaccacctgagctccacctcctatcagatcagcatgggcattagattctcacaggagtgtgaacactattgtgaacagtgcgtgtgggatctaggttgcctgctccttatgagaatctaactaatgcctggtgatctgactgaggtcttccatgaaactggtccctggtgccaaaaaagttggagactgctgatctggagtaygtaaatagttgttatactgcattggttttttagttatattatttttatcattatattgttatttttttctgaatatttttgatccacaatgcggaatctgtgataagaagggccctctgtacattttttcaatcctgtgattagagtggcaacaggaatagtctgatttctggttcctttattaggcagaaactttcctgtaattctgaagtttggctcagactcagcctgtggagactgggaaactgaggactaagtgtggattccaaaggccttctctgtcggagtggttagtgtttggcaagcttgatggagattctt

SEQ ID NO: 799226 - DNA, 608 bp, Homo sapiens
tatcctagtacaaaatgcaaaagaatgaatttggaccactatcttacaccatatagaaaaattaactcaaaataaatcaacaatctaaattttgtcagagctaaaactttaaaaactctttttttttttttttctcagacggagtctcgctctgtcacccaggctggagtgcagtggtgcgatctccgctcactgcaagctctgcctcccgggttcacaccattctcctgcctcagcctgccgagtagctgggactacaggcrcccgccaccacgcctggctaatttttaaaacctcttaaagggaaacaaatgtaaagtttttcgggtttaagacttaggcaacagtttcttacgtatgacagcaaaacataaacaacaaaagaataggtaattggacttcatcgaaattaaaagttttgcatccaaagacactatcaagaatgtgaaaaaacaatctacagaatggaagaaaatgtttgcaaatgatatatctgataaggatctagtgtccagaacatataaagaactcttacacttcaaaaataacccaattttaaaacaggcaaggagtttgaatagacatttctcgaaaaaagatatacaaat

SEQ ID NO: 799227 - DNA, 626 bp, Homo sapiens
gtcctttttctacaaaggaacttccatcagtatacaagttgaggtcaggatcagtcaagggaacctctagaaggtcccctcgagtggcataggtttgagaaattatttgttgacagttatattctatcttcattgtctggaagaaatgtgactgggttaagagttgcacaagtgcacagttgcagcactggcctttcaagtaatagagcctgatatttaagtaaacggttgtctgacagccacaagtctcctttagcagtgagtatgctgttcacctcatgagatgtccacacagtaagatctctccctgtattattttaactgcttcagatactamaactgctactgccaccactacccataaacaatgaggccaaccctttgccactacatcagtttccttactcaggtatgccatgggttgcaagcttgtcccttggacctgtgtaaggactcccagagctgtttctgtttttttctgtgatgtataaagaaaagtcttgccccgttggcaagcttaacactgggacttgggttaaggccttctttagggcctggaaagccacttttgcttcaggtatccatcttactaaatgggtattggctttctgagtttccttaattac

SEQ ID NO: 799228 - DNA, 590 bp, Homo sapiens
tgatttccatccttttacatttgtttcgccttattttatagcctggagtattaattaccttgggggatttttttttgtgattgaaaggacgagtattttgttgctggatgaagtgtttactagttatcagttaggtccaatttgtttatagtgttggataactcttctatatctttgataattttctctctaggtgttctatcagttcttgagagtgagatactgaagtctgtatctattataaaattgtctaattctcttctctgtcagtttttacttcatgaattttggggctctatttttagatgtgcttaagtttataattgttacattattgattaayacttccattataaaatgtcccattttgtctgtaggaacagttttgtctttaaaactattttagtatggccactctgaatctcttgtggttattattggcatggtgtgtattttttattttctttgaacttatttttgtcattaaatatgaagagttctcttgtagactgcatacaattacatatcctttatccagttagacaatttctttatatttaatcaataggaatttattacaattattggta

SEQ ID NO: 799229 - DNA, 611 bp, Homo sapiens
gaaaacacagatattcttttttttttccctctctaaaaagacgttgagggaaacagaagactaaatatgtttcctggacacaagaaaagtctgatgaaagccatttttcattttatttccatgctgtgaatgcatattcaggctattcaaactaccgcagcagtctggttctcaagttaaaccaccaaccaccagtccataggggtgaaaaaacctatttttatgcactgtgacatttttaacttgtaaaacattgcaaatgtaggtggtagttctcacagtctggtgtatttttggagtttcataatccttctagtcagagctcaggggctgctttttttcaacattttggcatgtcgtgaccttttctccrtaactgtacatgtttaaaaaataaatctttttttctcattgctcttccagtcctcctgttgaaaggcactggaatgggaaatagaacacacacatattcacacttgatcctgccctgttctctccctttctcttcctctttttctttttctttcctcctcctctctctcctcctttttatttcattatctcttatctgttctcccatgcttttcttcctcacatacatttctaagaat

SEQ ID NO: 799230 - DNA, 633 bp, Homo sapiens
ctatgcagatgagatatatagatctaatataacaattaagaaatgaatacccaatatttgcttgaatggtattggtgacttcccaaagtaactacactattactagaaagttccttcttatattaaaaccagtctaactctcctatcactaacctttattgttgctggttctgcctgttgcaatacagggatacacaaagccagtggggactctctctccttaccctgaatgtacacttcaattcttatttttatactgtcatgtttcactacaawacatcctcatctaccctaatttcaagaccctatactattggggcagccctcctttaaaagttttctagtttatcaatattctacttgttacaatgtgaccatcaggacaggttgctccaggcacatctataatttgtcacctgatttttttcagtattgatcaacatttatttagtgagacagggagaaatatattgccaattaatataaactatatttttgatatttggaaataatatatatcaattgtccccttatcctcttctttgggttctccccaaaataaccttcacttgccaaaaacagtgttgaaatttccaaatatgtacttgttagaatgaaagacagcataagttg

SEQ ID NO: 799231 - DNA, 628 bp, Homo sapiens
ttcactaatactttgttaaaaatttttatgcctatgtccatgagagatattggtctgtaattttctttttgcgatacccggtaggttgtggtatcagtaatatcctagcctcatattatgaaattataattatttccttttactctattttctaaaagagtttctttctgaactgtttgatagaatcaacaagttagccctcccggtcctggtattttttgggagaagkagcaggtattctttttaaataacgaatttaatttcttttgcagatataatgctattatttttaatttaatcttgtaccacatttttacattgtattttcaagtaatttgtccattccgtttcagaggccatatttattgacctatcgtggttctaaatttttttttatgatccttatactataggatttgtaatatttctgtttttattgctgatgttagtgattcgttttttctgttacttgatcatgctttctagtagtttgtcaatcttattaattgtttaaatgcactcctgggggaaggtgttaaaaacttcaaatatgaatgttatttcactaatattccatatatctggaagctctgttatgtatgcatatatataattatctcttcatggt

SEQ ID NO: 799232 - DNA, 580 bp, Homo sapiens
taattataaagtttataaagacagtttcattgatgggttctagagttagattagcctacaaattgacaaagaaaaccagcatttagttgaacagctatcattactatgccccaggaagtatgctaagtattttacatataaaatttcaggcaatccttacaaaaaactctgggaatggtaattattggcctgattaataaaacaaatgggaaaattgatgacatatacttaagttaacatttagaagtcatagagttactaaatggcaggattaaaattttaaatcaagtttaacctattccacagtccactctctttccattataccctgtggaagggtcctcatatttctytctttataaaagtttaagctggatatgttggaaaacatcttttattataaaactatttcatttaattgaatcaccggtttcatatttttatctagtcatcccacctctagtcttagaccttctagatgccccaagtcctttatgcttattagtaggcatgtaagcaatagttattgcacacctacgtttcatctattagattatttatttcttaaggcaatggctac

SEQ ID NO: 799233 - DNA, 580 bp, Homo sapiens
taattataaagtttataaagacagtttcattgatgggttctagagttagattagcctacaaattgacaaagaaaaccagcatttagttgaacagctatcattactatgccccaggaagtatgctaagtattttacatataaaatttcaggcaatccttacaaaaaactctgggaatggtaattattggcctgattaataaaacaaatgggaaaattgatgacatatacttaagttaacatttagaagtcatagagttactaaatggcaggattaaaattttaaatcaagtttaacctattccacagtccactctctttccattataccctgtggaagggtcctcatatttctctctttataaaagtttaagctgratatgttggaaaacatcttttattataaaactatttcatttaattgaatcaccggtttcatatttttatctagtcatcccacctctagtcttagaccttctagatgccccaagtcctttatgcttattagtaggcatgtaagcaatagttattgcacacctacgtttcatctattagattatttatttcttaaggcaatggctac

SEQ ID NO: 799234 - DNA, 580 bp, Homo sapiens
taattataaagtttataaagacagtttcattgatgggttctagagttagattagcctacaaattgacaaagaaaaccagcatttagttgaacagctatcattactatgccccaggaagtatgctaagtattttacatataaaatttcaggcaatccttacaaaaaactctgggaatggtaattattggcctgattaataaaacaaatgggaaaattgatgacatatacttaagttaacatttagaagtcatagagttactaaatggcaggattaaaattttaaatcaagtttaacctattccacagtccactctctttccattataccctgtggaagggtcctcatatttctctctttataaaagtttaagctggatatgttggaaaacatcttttattataaaactatttcatttawttgaatcaccggtttcatatttttatctagtcatcccacctctagtcttagaccttctagatgccccaagtcctttatgcttattagtaggcatgtaagcaatagttattgcacacctacgtttcatctattagattatttatttcttaaggcaatggctac

SEQ ID NO: 799235 - DNA, 483 bp, Homo sapiens
tttgtgagttattatgttatttgagacaaatgttttaagttgaacagatggttgtctgttcaatctagtctgtgagctataaattttatttttctcactagagatttccctgaacatttagtgattttaagttatttttaagatttagrcaaaaaataattttatagaagaattgcaaattttggcatagactctaatgtcttttttatagcaaaaaaaaaatctacattttaggcaaaggattcagagtgattaaacctaagaacatttaacacaatgccaatcatatttggtaacatggtggaaatagtataatctttcatattgaaccaatgaaaacaggtgcagaagatattcagtcttgcatttagaacttcaaatgacttaaaatgccctcctgagaagcatactttaagataatgttagttagggggataatgtcaaattggtggccaactttttattcatctggtcaacaattct

SEQ ID NO: 799236 - DNA, 483 bp, Homo sapiens
tttgtgagttattatgttatttgagacaaatgttttaagttgaacagatggttgtctgttcaatctagtctgtgagctataaattttatttttctcactagagatttccctgaacatttagtgattttaagttatttttaagatttagacaaaaaataattttatagaagaattgcaaattttggcatagactmtaatgtcttttttatagcaaaaaaaaaatctacattttaggcaaaggattcagagtgattaaacctaagaacatttaacacaatgccaatcatatttggtaacatggtggaaatagtataatctttcatattgaaccaatgaaaacaggtgcagaagatattcagtcttgcatttagaacttcaaatgacttaaaatgccctcctgagaagcatactttaagataatgttagttagggggataatgtcaaattggtggccaactttttattcatctggtcaacaattct

SEQ ID NO: 799237 - DNA, 630 bp, Homo sapiens
cagccatttcaattcatttcctacgttattaaccttctgactataccattaactttatgcctagggagaccatatgtcacaatttgcctggggcagctctggtttatgtgtgctatttcaagattagaattcacagcatctmctttgatactagcttgaacattaaatcagaggtcacttaattgtattccatgccctgtcccattgtgtccagttttctagtttctagaaattcattgtctatttcatgactctttgccttttttaacagcatttatgccttccacctttcagcctatccttctctttgatgtctttctgggcattttctaatttctcagacacagtttacctcctctatgaagccatctttatacccatttctgataattttccatttttttctttgtcctgtccctgtacttttatatgccagtctcatagcaactaaaacttttctttttttattcctgtcttctcttattaggctataagttctcaagtccaggaaaggtaccttatccttcttgatatttacacaccccaaatggatcagagataacctggtcctttccatgatttggtctgaaaaggaaacaggtgaacaggcaacagcctgaggctccaggg

SEQ ID NO: 799238 - DNA, 618 bp, Homo sapiens
tttaggggtgaaggctgctgcaattcattgagaccagagcctttgaaagatagataagcatgcttgggtgcagtggttcacatgtgaaatgtcctacgaaacataaaagtgaaaggaggagacaaatataataaaaaatatatattcttgatgtcaaaactaaaatataaatattttggagacttttgtgtgtatttagatgctattctcatgctcttttttctggaaaaaataatacaaaacaaaaattrtttcacgagttctcaatttttgtccttctgtttttatcagataaatgctaataactttcatatctttcttctcctgcagtttcccatgtcttccaaatttatttcacatcattatcttacttttcctcaaggccgttttttctcttgactacagcaatgcagatttcaattctgccattgaattcccagacatattcgtcatccccattttcatcccccaccaccctgccattttcttcgtgttaacttgttttcctgactcacagaaatcaccttttcctgtatacatttttaggatgtcagactttattctaatgatttctcctagttgccccccaaaattgtattctacggtgtgattttaaag

SEQ ID NO: 799239 - DNA, 614 bp, Homo sapiens
ccacatgcaaaagaataaattaggtcctcaaaccatatataaaaattaactcaaaatagaataaagagctaaatataaaagcaccatgtataaaactctcagcaaaagtagatgtatatcttcataagtttgaatttgcaagatttcctgtgcctatcaaatcatgatagacctatcaacattcatttccagcactacttcattcaatgtattcagacttcagaaaatatctgcaactgtgcctataacactggtcctgttctcctgggaacagattcatttctgctgctatttcctgccctcagactttactgtgcgttattttctagtgattgccaataatttgatctgctccaatccatgcatgtccctgtccctgaactctcaacctcataatacactataaaatgcacattctagtcccaccctggmatgactctgttccagccctcagttattatgaaacatttctgaccataattgtttattccatgcataaaatattccaggcttaagttaagatttagaagtaaaatgtaaaataagcccaaaagatatcctatttttccaaactatagtggtttaagaagaaaaagcaaattcatttttcaggt

SEQ ID NO: 799240 - DNA, 614 bp, Homo sapiens
ccacatgcaaaagaataaattaggtcctcaaaccatatataaaaattaactcaaaatagaataaagagctaaatataaaagcaccatgtataaaactctcagcaaaagtagatgtatatcttcataagtttgaatttgcaagatttcctgtgcctatcaaatcatgatagacctatcaacattcatttccagcactacttcattcaatgtattcagacttcagaaaatatctgcaactgtgcctataacactggtcctgttctcctgggaacagattcatttctgctgctatttcctgccctcagactttactgtgcgttattttctagtgattgccaataatttgatctgctccaatccatgcatgtccctgtccctgaactctcaacctcataatacactataaaatgcacattctagtcccaccctggcatgactctgttccagccctcagttattatgaaayatttctgaccataattgtttattccatgcataaaatattccaggcttaagttaagatttagaagtaaaatgtaaaataagcccaaaagatatcctatttttccaaactatagtggtttaagaagaaaaagcaaattcatttttcaggt

SEQ ID NO: 799241 - DNA, 594 bp, Homo sapiens
tccacaaaaacataatgacaagcaaaagaatgactggcacacaaattttctaaccagagatagcaattagacttatagtcaatgcctacagtggtaaggtcaatattaaaaaactgagctggggtggtcaaaactaggctatgttcctgggaattatgaatcctggccttggaagaagggactatgggatatagtattgctttaagtgttcaccctccaatgtggtgttctgtatattgtcagcatttcttaatttgtgcaataaaaatctawtgtttgccaggcaattcaatttgagattcggctcaatgtttatggactagtttagaaataagtcagtcactgtgatagaaatttaaataaatacgagctctatatattctttcttctaattcagaaatctaaacatggggttttccattcacctttggcttattttcatgtggctcctttcacttacatgtttgcatatggctggttaaatataaagtggcatgaaaatcaaagttaaataaataataattaaaggggcgtagcaaaaacagcccatatcaatagggctttgtggagaggggacacagcagtaattgagac

SEQ ID NO: 799242 - DNA, 313 bp, Homo sapiens
aaaaggatgctgtagtgatcgcagataccctcccagcagcaggatggacacgttttagatgttgcacacgtcattttacctcacatcccattagtcaaatagctattccctggtgcacagaaggctgggaattgagttcctcttatggaaaatgtacccagytgaaacatctcagggtcttttcttgtagaagatatgggatatgcacgttgaaagaccactggtagtctctgccacaagcatctgactaaatatttcagaaaaaagctctgtagagttttaaacttgtgtgtgtgtgtgtgtgtgtatgtgt

SEQ ID NO: 799243 - DNA, 657 bp, Homo sapiens
taccaggcctgccagaacccaggtgcctgctctatcctttgcctcttagagaatgacccctggagccttcctcttctaatagcagcagcaggataggtggggcagaggaccacagatagggccatttggcccaggcctcatcacagaatcatcctaatcaaaatgcctttgggtctggccagacctgagagacacaggacaaagcccaggtgaggagccagggaagccaggagctgcctgtgcctcctcactcaggctctcagtaggccatcctggcctgggrccaccctgttactgtctcagtaaggctgggaacaggcttgtggtacagcttcagataagcagccatggctcccttagtcccctggggaagggcatgctgtgggcagacgaagaaaagagcacatggctctgaggctgctgagtgaaaggtttggaagctgccaaggctcggatgcaaaggtgtttaattgcaaaggtatttctggctaagtgatgttcctaagaacaaaggatctgttggggtagagcacagaagagtgttttgtcttccatgataagaacctgccccaagctctctgaacagacctgataagaatgttctctgctcattggatgccctgactgttccggcagagagaccatctgttttttcct

SEQ ID NO: 799244 - DNA, 602 bp, Homo sapiens
acagacaggcgattaatatgtattttgttatgtgtattatatactgtattcttacaataacgttaaagaaaaaatactaagaaaatcataacagaaagtatatttactattcattaagtggaagtggaccatgggaaaggtcttaatccttgtcttgtgttgaatatactgaggagaaggaagaggaagggttggtcttgctgtctcaggagtagcggaggcagaagaaaatctgcatatgtcattcargggtcagctgtactttccttgatagtttcacttattctaaaagattaatcctactttagaattatagaattggtatttgtaccccattcttgctaattatcttatagttttgtgtgtgtgtgtgtgtgtgtatatatatatatatttttttttccttctatttagtttaaagttcctgctgcaacaagtgcaattattaccaatggtaagaattcactataaaattatgtattacctcaaatttatagaaatggtgtaaaaggaaccaaattaattaaaattaaatacaaaaagccccaagtatatgtatatcaacataaatgatatacttactggtaaacactaagtcaggg

SEQ ID NO: 799245 - DNA, 602 bp, Homo sapiens
acagacaggcgattaatatgtattttgttatgtgtattatatactgtattcttacaataacgttaaagaaaaaatactaagaaaatcataacagaaagtatatttactattcattaagtggaagtggaccatgggaaaggtcttaatccttgtcttgtgttgaatatactgaggagaaggaagaggaagggttggtcttgctgtctcaggagtagcggaggcagaagaaaatctgcatatgtcattcaagggtcagctgtactttccttgatagtttcacttattctaaaagattaatcctactttagaattatagaattggtatttgtaccccattcttgctaattatcttatagttttgtgtgtgtgtgtgtgtgtrtatatatatatatatttttttttccttctatttagtttaaagttcctgctgcaacaagtgcaattattaccaatggtaagaattcactataaaattatgtattacctcaaatttatagaaatggtgtaaaaggaaccaaattaattaaaattaaatacaaaaagccccaagtatatgtatatcaacataaatgatatacttactggtaaacactaagtcaggg

SEQ ID NO: 799246 - DNA, 633 bp, Homo sapiens
tgtagccaatctggacaaagctgtcttttcagtttcaaaggtagtgattttgattgcatactacattctttactcaaaatattattattataattaccacccaaacagcaaatagccttaaagctgggatggtgcccgagcttcacttgagaattaacctttaagggtgagatttatatatttctaacactttcatacatggaaggctagcatatgaactgctggttggttctagagatggatttcaaaaaggagaagctcttcttggtcttcagtccactttacctcccatataaatatctatgcacttgacccagtaatgttatcattttcattataagtagaaggctacttgggaagcatcactggatcataaagcttttgatgaaccttctgtgtactcttamtaatcatgttcaaaattagtagaccaaattaatgaaaatgcatgaagttcattatgtcaaaatgccaataatgaagtgatttttctaccatcatttaaagtgggctaagtaaaatgtgaaataacattttggagagggatgagtgattttgttaactgactcatataacggcaagtattttaaagatcatgaataaatatattttttttttcttaatgacttagtc

SEQ ID NO: 799247 - DNA, 563 bp, Homo sapiens
tctgaatatgaccttataacagaaatagtcatgtttgctgatttcctaattttggacattgtactatggctatgtaagagaatgtccttgtttttagaaatacagaagtatgtagaaataaggaagtatcacagctgcaacttatactgaacagttcagcaaaaacaatgtagaagtatatatagagagaaagggataaattttaaagactaaaatttggagcttgatgaagagaatacagcaattctttgaactattcctgcaacttttctgaaagtctgaaattatgtcaaaatttaaaaattaaaattaaaagtgttggagtttttaaacatggctatgaattccatagtaatcccattggagaggtagtctacatccccaacccttgaatgcaratgggcttgtgtcttcttccaccttcgattgtggtgaaagatactccatagaacttcaaggcaaggtcatcaaagaccataaggctgccaccttgttccctagagagcttgctgttggatccctgagccaccttgagactaccatactggagagaccacatggag

SEQ ID NO: 799248 - DNA, 635 bp, Homo sapiens
agcacagttgagtccgtttgaggatttaatttcgttaatcttgaattagacaacttatgatgaatcctcatgctgactttggggaaaaggaggatcagaagttcaaggggaccatgacagcccctagtcagcacctagtttgaagccaagcacagcctttcaaaccctggaaggcagatgaatgaggccagctctgactgagcagcctgggcaaagtcagagcagccacccttctcaatccctcctcctagagcacaggccctcacagacccctccctatcaatgttcaaggaacactatttgaaataaasatgaatggttaaagaaaatgtacatggagcttaacgaaaatgaaatgcatcaaaatttgtgggacacagctagagcaatgctgggaggcaaatttatagcagtaaatacatacattagaaaagagaaaaaatatccaatcaaccgtttactctcccacctcaaagatcaagaaaaagaagagcaaaataaacccaccactaacagaagaaagacaacaataaagataagagcagaaatcaataaaagtgaaaacagaaaaacaactttaaaacccctaaaacacagaactggttcttcgaaaagatcaataaactgtatgaaca

SEQ ID NO: 799249 - DNA, 635 bp, Homo sapiens
agcacagttgagtccgtttgaggatttaatttcgttaatcttgaattagacaacttatgatgaatcctcatgctgactttggggaaaaggaggatcagaagttcaaggggaccatgacagcccctagtcagcacctagtttgaagccaagcacagcctttcaaaccctggaaggcagatgaatgaggccagctctgactgagcagcctgggcaaagtcagagcagccacccttctcaatccctcctcctagagcacaggccctcacagacccctccctatcaatgttcaaggaacactatttgaaataaacrtgaatggttaaagaaaatgtacatggagcttaacgaaaatgaaatgcatcaaaatttgtgggacacagctagagcaatgctgggaggcaaatttatagcagtaaatacatacattagaaaagagaaaaaatatccaatcaaccgtttactctcccacctcaaagatcaagaaaaagaagagcaaaataaacccaccactaacagaagaaagacaacaataaagataagagcagaaatcaataaaagtgaaaacagaaaaacaactttaaaacccctaaaacacagaactggttcttcgaaaagatcaataaactgtatgaaca

SEQ ID NO: 799250 - DNA, 641 bp, Homo sapiens
tttcccagggctgctccttgctgaaaaaaagaattcagtgatatttctcctatttgcttttgcaagaagagaaatatgcctctgttctgcccagccccacaggcagtcagaccttatggctatctcccttgttccctgaaaatcgctgttatcctattcttttaggatgcccagattgcayattgttcaaagacacatgttttacaaacaatttgcacatataacacaatcatcacagggtcctgaggtgacatacatccttagcttacgaagatgacaggattaagagattaaagtaaagacaggcataggaaattataagagtactggggaagtgataaatgtccatgaaatcttcacaatttatattcagagattgcaataaagacaggagtaagaaattataaaagtattaatttggggacttaataaatgtccatgaaatcttcacaatttatgttcttctactgtggcttcagttggtccctccgtttggggtccctgacttcccacaacagtttgtagacaacatggtcttttatatacagaaacacttaaaggattccactaaaaagctggtagaactagtaaacacatttggtaaattttcaggatacaaattatcgtacaaaaatcagtag

SEQ ID NO: 799251 - DNA, 631 bp, Homo sapiens
tttgctttcctcttctcatcagtagatgtgagagtgtgcatcctgccctgtcactgctgcagtgacagtacagtcagtccattctccctggtgatagccattgcagtcacatagccagccaaccccatccctgccaatgcacygcccatgccagtgtataccccatgccaacaatgggagtgaaaccaggcaatgaaaacaatggaaactcctgcaccccaaacaaccacccttaactgcagcacacagaaaaaagacacagacccgcacccaccagcaccctacccatataccaacaacactacaagtgtgacagcacacacagtaaccagcagggaccccctacagccccaagccacaatgccttcaccactgtcgtgaacatccccacagaggcaggtaccctagcacctgcaagaaccctgcccccagcccaatagtatgcaccctgccatgctgacactgctcttgacacatacaaacaagaatggaccccactgccaccacactgcaaaacactttgactgacaccacccatcagagtgtagtgaacaggggtcagggagcacctcagcctccatagcacagtggattcctaacctggaggagccaaagaacaaagtcaagcctg

SEQ ID NO: 799252 - DNA, 515 bp, Homo sapiens
cttatcagtttgcatttcaaattcaaccatgtctttgtgagtcttgataggtcattccatgttataattgtgtggtattccattgcatgggtgtgatgtaccacagtttatccatttaattattgaaggacatcttggtagatcacagatagtggatattatgactaaagctgctataattatttgaatgcacattattttgtgttgacatattttaaaatgtactagatcaatttttgaatgtgctgtagctggatcgtrtcataaaattatgtttatcttttaagattgtgagttagttttgatttttttcttagtgtttatactttatttaacctttctcaaacttacagtagaattttcaggactctcatcctatgtaagagttcaaatagtcttttctctccaaatgttttcacaattttgtttgtgtttctttgctttcctttttgacttttttggaggaagaccacagcctatgcacattcactatcttgaaaagattcttacaagta

SEQ ID NO: 799253 - DNA, 636 bp, Homo sapiens
caataataatcccccttcctcagagtattgacatatacacacagatgtttacaaatggtgttctctccaaatgtgagaatcgtagtaaccacagacacccaatagctgtatgtgtctgtgaaatcattcaccaaaattgggagatcrttctaggataacaaaatcaggaatgagtttgtctactatccaagagccaggtggatagaaagcataaattggccataatatgatgaaattggaagagatggatgattagcaggacaggtagtaaggatagtagaacgtggtgataataatagtaactaccactaaattgtcatgagaaaacaattaaatcagagactgcatataaatacttagcacaggctacagatagtgctcaaaatgctaaagtaacacattgttaatgaaagaaatagagacaaaatatcaatttcaagttgtttatggttaagaaagatacttgctttctctttaagatcttttatattatccttattttaactgtgtgccagaagtttttaggacaaagcaaatgcaaatatattatttgaatgaagtgggcagaaataataagatgggctgatcctgacgtttattcttatgtgataaaaatgagagttaatctaagcagaa

SEQ ID NO: 799254 - DNA, 636 bp, Homo sapiens
caataataatcccccttcctcagagtattgacatatacacacagatgtttacaaatggtgttctctccaaatgtgagaatcgtagtaaccacagacacccaatagctgtatgtgtctgtgaaatcattcaccaaaattgggagatcattctaggrtaacaaaatcaggaatgagtttgtctactatccaagagccaggtggatagaaagcataaattggccataatatgatgaaattggaagagatggatgattagcaggacaggtagtaaggatagtagaacgtggtgataataatagtaactaccactaaattgtcatgagaaaacaattaaatcagagactgcatataaatacttagcacaggctacagatagtgctcaaaatgctaaagtaacacattgttaatgaaagaaatagagacaaaatatcaatttcaagttgtttatggttaagaaagatacttgctttctctttaagatcttttatattatccttattttaactgtgtgccagaagtttttaggacaaagcaaatgcaaatatattatttgaatgaagtgggcagaaataataagatgggctgatcctgacgtttattcttatgtgataaaaatgagagttaatctaagcagaa

SEQ ID NO: 799255 - DNA, 625 bp, Homo sapiens
tctaaactggttattctagttaacagctactgtaatcttttattatggttcttagcttctttgcattggtttagaacataatcctttagctcagtgaagcttgttagtacacactttctgaatcctacttctgtcagttcatccatctcagcttcagccccattctgtgcccttgatggagaggtgttgcgatcatttggaatagaagagacattctggcttttggaattttcaggctttttgcattgcttttccctcatctttgtggatttatctgcctttgatgtttgaggctgttgaccattggatggggttttttgggctcttgtttgttgatgttgttcttgctttctgtttgtttgtttttcatctaacagccaggttcctattctkcaggtctgctacagtttgctgggagtccactccagaccctgtttgcctgagtatcaccagtggaggctgcagaacagcaaagatggcagcctacttcttcctctggaagcttcgtcccagaggggcactgacctgatgccagctggaactctcctgtatgagatgtctggcaacccctcttgtgaagtctcacccagtcatgaggcatgggatcagggacctgcttaaggaa

SEQ ID NO: 799256 - DNA, 624 bp, Homo sapiens
ctgcagggaggccctgtctggtgaagggggatggatccaggttccacctaaagaagcagtctggccatgatctgccattgctgctgtgctgtgctgtggggagtattgcccagtccaaacctcccagtttccctagtactgacggggaaaactgccaactagagctacagtaatggcagccacccctcctcccaggaaytcagtcgtcttaggcagactctaggatgctgtgctggctggcggggatttcaagccagtgggtcttagcttgcagggttccttgggagtgggacctgctgagtgaggctatttggttccctggtttcagccccctttccatgggagtggatggttctcctgcctcactggagttccaggtgccgccggtgtaggtaaaaactcctgcagctcagtgcctgcccaaacagccaccaatgggagtagctgctgtgggtctgcccagttttgtgcttgagacccaaggccctgatggtgtaggctcatgagggggatctcctgattcttggactacagaaatctgtgggaaaagcatggtacccccggtgggtaacagtccctcaccacttcccttgactgggggagggtggtccctttgtcccatgt

SEQ ID NO: 799257 - DNA, 509 bp, Homo sapiens
cttcaatagctgaatcaatcaagtggaagaaagggtatcagtaactgaagatcaaattaatgaaataaagcaagaagacaaggttagagcaaaaagagtaaaaagaaatgaatgaaacctccaagaaatatgggactatgtgaaaagaccaaatctacatctgattggtgtacctgaaagtgatgggcrgatgaagccaagttggaaaacactcttcaggatattatccaggagaacttccctaacctagcaaggcaggccaacattcaaattcgggaaatacagagaacaccacaaagatattccttaagaagagcaaccccaagacacataattgtcagattcaacaaggttgaaatgaaggaaaaagtataagggcagccagaaagaaaggtcgggttacccacaaagggaagcccatcagactaacagcagatctctcagcggaaagcctaaaagccagaagagagtgggggccaatattcaacattcttaaagagaagaaattt

SEQ ID NO: 799258 - DNA, 613 bp, Homo sapiens
ctccagccagtattaccttaaaacaaattcacttttggaatttttattaatatgaaaccataaatttccatttattctcaggctcatttgaattatttctcttactttcaagagagctcacccaattatgagtgagaacatacgatgtttggttttccatttctgagttacttcacttatactaatggtctccaattccatccaggttgctgtgaatgccattaattcattcctttttatggctgaktagtagtctatatatatatatatatcatattttctttatccactccttaattgatgggcattggggctggcttcatatttttgcaattgcaaattgtgctgctataaacatatgtgtgcaagtatctttttttgtataatgacttcttttcctctgggtagatactgagtagtgggattgctgaatcaaatggtagatctacttttagttctttaaggaatctccacactgtttccatagtggttgtgctagtttacattcccaccaacagtgtaagtgttccctttccacatccatgccaacatccgttatttttttattttttgattatggccattcttgcaggagtgaggtggtatcacattg

SEQ ID NO: 799259 - DNA, 621 bp, Homo sapiens
gatgttttgtcaacattgaataatcttatgggatactggtcccgtaagatcataatggagctggaaaattcctatcacctggtgacattgtagctgtcctaatgtcaaagagcaatgcattactcacatgtttatggtagtgctggtgtaaacaracctaatgtactgtcaggcacatataagtgtggcacatacaattatgtatagtacataatacttgataacgataaacaactatgttactggtttatgtatttactatactatacttttatcattattttagagtgaattcctttgacttattaaaataaaaagttaactgtaaaacagccacagatccttcaggaggtatttcagaagaaggcattgttatcataggagatatgatattgcccatgaagaccttccagtgggacatgacatggagggaagacagtgatattggtgatcctgaccctgtgcaggcctcggctactgtgtttgtgtcttcatttttaacaaagagttttaaaagtttaaaaaaattaaaatattaaaaataggaaaaaagctgttggaataaggatataaagaaaggtttttttgtaaaggtgtatgatgtatttgtgttttaggcta

SEQ ID NO: 799260 - DNA, 573 bp, Homo sapiens
ggtagctcacacctgtaatcccagcactttgggaggcggatggatcacgaggtcaagagactgagaccatcctggccaacatggtgaaaccgtgtctctactaaaaatacaaaaattagctgggcatggtggcgcgcgcctgtagccccagctactcagggggctgaggcaagagaatcgtttgaactcaggaggcggaggttgcagtgagctgagatcgctctattgcactccagcctggtgacagaacaagactctgtctcaaaaaaaaactattaaaatatatagaaaactagaaagaactataaaccacaagtacttttatccactgtccagaactaataaatatcaacactatcatactttacaatttgtctcttttctttaaaataaataaaatattacagrtagagttcaagttcctttgtagtcttcctcaaaccaattcccctccatccctacccagagccatcaatgatcatgaaattggtgtgtatactccccatcatgttcttatacattacaagtattcattcagtattgtttaggctgccttaaaaataagttaaatgc

SEQ ID NO: 799261 - DNA, 642 bp, Homo sapiens
gatgaagaggtaatgaaactattattaaggatgcctttgttctggttattttaaatcagattggtttgtagtttctcatattttactttgtagttttctgtggcattgtatgataaagcaaactttaatgaatgatgttggatgtttcagagaaatttgcaatgccattttcagcacttaaagcaattctcctatgttagaatgtgatatctatttccaccttttgcttaacaatctattgggcgcatctcctactttcagttgtaataaaatttaaattttttagcatttcaaaggcaattcaatcatcagttgacttctgtttaatatgaaaaatatagtcattctgactttgtggtttggaaaaggttrtagttcccaactttatattaatactttcattgtagttaaggcttaacacttcttttgattttaatattcttaacagatgctcaactctcaataactataataagatatacatttaagaaatatgtaaaaacatgccaatcctctccaagtttatttatagacctgaaattgagtatttatgctgtttactctgcagcaaatacaaatactgcccttaggtgttgcctttttacttgcaggttgtgtttcttgttatcatcataaattctt

SEQ ID NO: 799262 - DNA, 373 bp, Homo sapiens
aaactcttttgcttaaacaacatagaaatgcactatctcacttaacggtgagtctagaggtccagaggtggggcacactccaggaatcaagtctttaccatgttaccagggccccatattatttccatctttccattgtgtcacccatagcatcagctgattcctcttttggtcctaagatggctgctaccaraaatgctccccactttatacccagcaggagagagagaaaaaaaaaacctgctttcctcttcttcaaaagccacctgtttctcattaggctagtggttcacaactgggaacaattatgcctccacaaaggaaatttggtgatgtctggagacatttttggttgttgtgactgggagcagtg

SEQ ID NO: 799263 - DNA, 617 bp, Homo sapiens
gccgtccccctaggcttgacttgctcccaaaggagactttatccttaggggaactatgggacatgaactctgcagagcagtcttgcccattaggctgggtggtctgacctgagcacctcttggtctgctgacctctcccaaggccccagcattgctgggcctgcttgcagggcagcctttggtgccctgagggcccacatcatagctcctgcactggtgggccrtgcctgaccagcagagagctccagtggggtggtcctcaccactgcacaccagcccagcccaccttctccctcccaaaactgcagcttcccccaggtccaaagcaaccgtccacattgtttgcaaaacacgggtgagcaggttttgccttccttgcccctcctgcgtgtgtgtgtgtgtgtgtgtgtatgtgtgtgtgtgcaccctgccctgtcactgctgcagcagtggagcagtccatccccaccatcaactgccattgcagtgggagctttgacgtgcagagccagccagccctgcccctgacagcacccaccccttacgccaataccactaggggagtgaaacgaggcacagaaaagagtggatcctcccacgccctaagaaatcaacct

SEQ ID NO: 799264 - DNA, 617 bp, Homo sapiens
gccgtccccctaggcttgacttgctcccaaaggagactttatccttaggggaactatgggacatgaactctgcagagcagtcttgcccattaggctgggtggtctgacctgagcacctcttggtctgctgacctctcccaaggccccagcattgctgggcctgcttgcagggcagcctttggtgccctgagggcccacatcatagctcctgcactggtgggccgtgcctgaccagcagagagctccagtggggtggtcctcaccactgcacaccagcccagcccaccttctccctcccaamactgcagcttcccccaggtccaaagcaaccgtccacattgtttgcaaaacacgggtgagcaggttttgccttccttgcccctcctgcgtgtgtgtgtgtgtgtgtgtgtatgtgtgtgtgtgcaccctgccctgtcactgctgcagcagtggagcagtccatccccaccatcaactgccattgcagtgggagctttgacgtgcagagccagccagccctgcccctgacagcacccaccccttacgccaataccactaggggagtgaaacgaggcacagaaaagagtggatcctcccacgccctaagaaatcaacct

SEQ ID NO: 799265 - DNA, 617 bp, Homo sapiens
gccgtccccctaggcttgacttgctcccaaaggagactttatccttaggggaactatgggacatgaactctgcagagcagtcttgcccattaggctgggtggtctgacctgagcacctcttggtctgctgacctctcccaaggccccagcattgctgggcctgcttgcagggcagcctttggtgccctgagggcccacatcatagctcctgcactggtgggccgtgcctgaccagcagagagctccagtggggtggtcctcaccactgcacaccagcccagcccaccttctccctcccaaaactgcagcttcccccaggtccaaagcaaccgtccacattgtttgcaaaacacgggtgagcrggttttgccttccttgcccctcctgcgtgtgtgtgtgtgtgtgtgtgtatgtgtgtgtgtgcaccctgccctgtcactgctgcagcagtggagcagtccatccccaccatcaactgccattgcagtgggagctttgacgtgcagagccagccagccctgcccctgacagcacccaccccttacgccaataccactaggggagtgaaacgaggcacagaaaagagtggatcctcccacgccctaagaaatcaacct

SEQ ID NO: 799266 - DNA, 634 bp, Homo sapiens
ttgtgaggtctccccagccatgtgtaactgtgagtccagtaaatctatttcttttgtaaattgcccagtctcaggtatgcctttatcagcagcatgaaaatggactaatacaataaattggtaccagtagagtggggcgctgctgaaaagatacccaaaaatgtggaagcaactttgaaactgggtaacaggcagaggttgaaacagtttggagggctcagaagaagacaggaaaatgtgggaaagtttggaactccctagagacttgttgaatggctttgcccaaaatgctgataatgatatggacaatgaaatcaaggctgaggtggtctcagatgtagatgaggaacttgttgggaactggagcaaaggtgattcttgttatgctttaraaaagagactgacttagcctcctagcctacatctttctcccatgctggatacttcctgccctcaagcatcggactcctagttcttcagttttgggactcggactggcattccctcttcctcagcttacagacaacctactgtgggacgttgtgatcatgtgagttaatactacttaataaactgccatatatatatatatatatatatatatataaagtagtaataaactgccatatatata

SEQ ID NO: 799267 - DNA, 570 bp, Homo sapiens
cttacccacctgctagttatgtcacctgggagggtccagagtacacacacttcatcaaggctttgagaaataaattggcaaaggcagcatcaacatccataaaaaggctccatagtggcagttctctgcaaagaaataagtgatgctgccatggraatgagccccttgaattaaataggtgatgggatcccagagcaacaaggtacaagaagtgatcagaatgatttggcctatagaaatctttggtgagaactaatttatcatggggttcctaggaccataatgaactacctactaaagtcttatttgtgttgtataagcaaaataaacacataaaacccaaaaattggtctggagacagaggtccaacatgaatcactacaattgatagtcatgcttcctcaacaaattctcagacttgagtcgtattatagatctagatccctttttaaaagatatagtagacagaataatggcctccaaaggtatctacatcttcatttccagaacaaatgaatatgtcatggcaaaggggaaactaaggttacagatggaaataaggtattctaa

SEQ ID NO: 799268 - DNA, 570 bp, Homo sapiens
cttacccacctgctagttatgtcacctgggagggtccagagtacacacacttcatcaaggctttgagaaataaattggcaaaggcagcatcaacatccataaaaaggctccatagtggcagttctctgcaaagaaataagtgatgctgccatggaaatgagccccttgaattaaatmggtgatgggatcccagagcaacaaggtacaagaagtgatcagaatgatttggcctatagaaatctttggtgagaactaatttatcatggggttcctaggaccataatgaactacctactaaagtcttatttgtgttgtataagcaaaataaacacataaaacccaaaaattggtctggagacagaggtccaacatgaatcactacaattgatagtcatgcttcctcaacaaattctcagacttgagtcgtattatagatctagatccctttttaaaagatatagtagacagaataatggcctccaaaggtatctacatcttcatttccagaacaaatgaatatgtcatggcaaaggggaaactaaggttacagatggaaataaggtattctaa

SEQ ID NO: 799269 - DNA, 570 bp, Homo sapiens
cttacccacctgctagttatgtcacctgggagggtccagagtacacacacttcatcaaggctttgagaaataaattggcaaaggcagcatcaacatccataaaaaggctccatagtggcagttctctgcaaagaaataagtgatgctgccatggaaatgagccccttgaattaaataggtgatgggatcccagagcaacaaggtacaagaagtgatcagaatgatttggcctatagaaatctttggtgagaactaatttatcakggggttcctaggaccataatgaactacctactaaagtcttatttgtgttgtataagcaaaataaacacataaaacccaaaaattggtctggagacagaggtccaacatgaatcactacaattgatagtcatgcttcctcaacaaattctcagacttgagtcgtattatagatctagatccctttttaaaagatatagtagacagaataatggcctccaaaggtatctacatcttcatttccagaacaaatgaatatgtcatggcaaaggggaaactaaggttacagatggaaataaggtattctaa

SEQ ID NO: 799270 - DNA, 584 bp, Homo sapiens
ggataagaagaaaatttaatgaaatagaaaacaagtaaataataaacaaaaatcaacaaagatgaaagtttgttctttgaaaatattaatacaatcgggaaactcctagtgatatcaaagaaaataagaggagaaaaaaaccyacaaattaccaacatagggcatgagagagagagactataaccacagggtctacagacaatagaggacaacaagggactattatgaataactttatgccaacacataaagttgtagatgaaatggacaaattccttgaaaaacacaactcaccacaatggatagatagaagaataaataaaagacataaatagctatgtacctataaaagacaattgaaatcttaatttaaaacattttcacaaggaaaatccctagcccagatgactttacaagtgaattctatcaagtattttaggaagaaataattccaacattgggcaaactctttcacaaaagagaggagggaacaattcctaattcattgtataagcttctatgtcccaaacaccaaaacattatgataaaagacgtttcaagaaaagaaaatcacccaatgatga

SEQ ID NO: 799271 - DNA, 556 bp, Homo sapiens
gtcctttagttagtaaatctatttctcaccagggtatgggttagtaattctaaaattagattatctatatattgtatttccaggctctgcctgccgagagggcctagaagcaatgatatcccagcagcaatgggcacacccaactctcagatcttggttcctaaatactaccccccagagaagccagtgctctttggagaagtgctgaattccaggggtaaggcaagaaaagaaaaatacaagatgaacctgaactatctggtagtgtgtcaaaaattaaggaagggcttggaaaaagatgaggagatgttgaaaggacacaggagcaaaactgaagtagytcctaatggccaaagctggaagaatttgagcaacaaaataaataatgattgtattgggttacaatccagaggataaaataaatattcatgggcctctactgatataaataaaaaattgaataaatacataaataaaatgaggggaaaggggcagtgcttccttacaaagcattccaattaacatagagggaatgtaggaaaaagaaaagcaccat

SEQ ID NO: 799272 - DNA, 556 bp, Homo sapiens
gtcctttagttagtaaatctatttctcaccagggtatgggttagtaattctaaaattagattatctatatattgtatttccaggctctgcctgccgagagggcctagaagcaatgatatcccagcagcaatgggcacacccaactctcagatcttggttcctaaatactaccccccagagaagccagtgctctttggagaagtgctgaattccaggggtaaggcaagaaaagaaaaatacaagatgaacctgaactatctggtagtgtgtcaaaaattaaggaagggcttggaaaaagatgaggagatgttgaaaggacacaggagcaaaactgaagtagttccyaatggccaaagctggaagaatttgagcaacaaaataaataatgattgtattgggttacaatccagaggataaaataaatattcatgggcctctactgatataaataaaaaattgaataaatacataaataaaatgaggggaaaggggcagtgcttccttacaaagcattccaattaacatagagggaatgtaggaaaaagaaaagcaccat

SEQ ID NO: 799273 - DNA, 569 bp, Homo sapiens
aaagcctacccacaaatcagatgtacgtggaccttctctcgaaaatcatttccttgtgagcaaaagggtcttgataacggatacaggtgagaccacaaaggactctaagataccatttttagcataattctccttgcttgtygcccttgagaaggacagttttatacttatggaagcaaattcacttatgagtttaactattattgagttgaaattggagataagaaaacaataagcagatgtgaggatacagtagcagtcttaccattactttagataatataacctgctgcatgaaaacagaaagaaccgtattagtctggtctagtttgagtctggttctctggcattttctgagtcacaaggtagtttttacttcctgtttgagagtgcggtgtgtaggacactgagtctcccctaaaacatttgcagatgattgaggaagtaaaactccttaaaaacagaaaaacattactcataggtgtattgatttaaattttcaaaaaatacatgcagaaatagcccaatagtaagtgctgaaggaaaatgttgttttcctcgggatttgt

SEQ ID NO: 799274 - DNA, 622 bp, Homo sapiens
ctctaacaggtaagagttacaatatttgaagccataactacaagaggtaaggcagcttcataaaaggaacatgaattttggaatcagatatctaaatttgaatcctagttctgccactgtagtcttggtcaagttataagagtcagttcatttgtaacatggatataagatgcccaatacacaatgttgttgtaaagactgaacaaaataatacacaaaaaacacataggacagtggttgacattgtcaggtactcaatttatgtcccccagtcagttaactagatttatttctattaccatacttcaataccatcatcctatgcctcttcctaaaataatcatttttaaattytaataagaacacatatttgtatagtgcaggagtggataaactttttcataaagggcctgatagtaaatagtttaggcttataggccatagagtgtctgttgcaactcttcaactctgacaaagttgtaatatgaaagcagccaaatacacataaataaatgggcattgttgtgttaaaatataacttaatgtacaaaaaaaaatagctggccaggggcaatggtttgctgatccctgctgtagtactttctaaagcatattacttata

SEQ ID NO: 799275 - DNA, 622 bp, Homo sapiens
ctctaacaggtaagagttacaatatttgaagccataactacaagaggtaaggcagcttcataaaaggaacatgaattttggaatcagatatctaaatttgaatcctagttctgccactgtagtcttggtcaagttataagagtcagttcatttgtaacatggatataagatgcccaatacacaatgttgttgtaaagactgaacaaaataatacacaaaaaacacataggacagtggttgacattgtcaggtactcaatttatgtcccccagtcagttaactagatttatttctattaccatacttcaataccatcatcctatgcctcttcctaaaataatcatttttaaattctaataagaacacatatttgtatagtgcaggagtggataaactttttcataaagggcctgatagtaaatagtttaggcttataggccatagagtgtctgttgcaactyttcaactctgacaaagttgtaatatgaaagcagccaaatacacataaataaatgggcattgttgtgttaaaatataacttaatgtacaaaaaaaaatagctggccaggggcaatggtttgctgatccctgctgtagtactttctaaagcatattacttata

SEQ ID NO: 799276 - DNA, 622 bp, Homo sapiens
ctctaacaggtaagagttacaatatttgaagccataactacaagaggtaaggcagcttcataaaaggaacatgaattttggaatcagatatctaaatttgaatcctagttctgccactgtagtcttggtcaagttataagagtcagttcatttgtaacatggatataagatgcccaatacacaatgttgttgtaaagactgaacaaaataatacacaaaaaacacataggacagtggttgacattgtcaggtactcaatttatgtcccccagtcagttaactagatttatttctattaccatacttcaataccatcatcctatgcctcttcctaaaataatcatttttaaattctaataagaacacatatttgtatagtgcaggagtggataaactttttcataaagggcctgatagtaaatagtttaggcttataggccatagagtgtctgttgcaactcttcaactytgacaaagttgtaatatgaaagcagccaaatacacataaataaatgggcattgttgtgttaaaatataacttaatgtacaaaaaaaaatagctggccaggggcaatggtttgctgatccctgctgtagtactttctaaagcatattacttata

SEQ ID NO: 799277 - DNA, 590 bp, Homo sapiens
tattataggaaatgttggagactcagataaatggaaggcatatgcactatttaatgtgagataaagtacacacctccagcccactaagaatggggatcaggtcgccacatgttttgatctttaaaaaattagagaaacaatttaaattattatctgaaattttttgattttggtaaaaaatacagttttataaaatatgtggacaacaaacgagtttcacacctatatgttttataaactttcagtaaaggtaacaccatttacgttgcacaattatgtatgtcattgattgttaagtaggcactctctggctgcatgtgtgtcagagaaagggtgagaagagaaacttttgccctctgatcatcttaaagtttttgtttctgtctacttacaagtcccaagaggagaattaggatgtctcttyctgaataggataaagaatgacctctttaacacattgatggtatcatcctctaaggaacatacatttcttttattctctctctaatggaaaagtggaacaactttttcccatcctctgaaaagttctctgtatgttgaaatagttactaaggctctccttgttcacg

SEQ ID NO: 799278 - DNA, 621 bp, Homo sapiens
attatgaggggattctttttttctggaagtaggtttaattcaattgatttaattaaatcctattggctcagattgataaaataaggggtctgtcttctctgagaataccctgaggttgaaggagaagaaacatgtggaccacaaggggagggttaagtgagatggtgtgtgagaggcactttgtgaactgcaaagggctaggcagatgagacattgccacagccattgytaccatcattactttgtcccaagcacctctgggtgtagtcttggagagacaaagtgcaaacagaggtagagtttcctcccaggtcacaggcagctcctcccacctctgtagggcttccctctgcagctgctgtcagattccctctcaggtcccccaagcatcccctctaacttcctctccacagcccactaccctccccaacccagggcccctggtcactcacagtggttctctgcttgtctggcaaggaggcccaggggcctttttgaagactcctcatcatcaaggtgaaggtcttcagcctcccactgcccagaggccttgaagaagctggcacacatcccatagggacagcactggtaggcataaggcacctccaggatcctggtggg

SEQ ID NO: 799279 - DNA, 633 bp, Homo sapiens
agacaaacaaattggtgcctgccttttcatctctcaaatggaactaggtatcatccattccctggtttagaaaatcacgccagatcttcaaaagcggggggcgtgggggcaatgttaccatccagtagagtcactaacatgcatgttcctaagccatgttcctgcagcaattagtgtgtaacccaaagcaattatacatgacctccaagcccttttagtaattaccctatgaacttaccaatcattcatagcaattagctgggagctaatttgccctctaaagttcccactgggraggcagagttaaccccagtccccaattcctgccagggatgctatctcccaggtaattacagtgatggggctttgctgtctaattataagtgatgacttttctctgcttcttaaggcctgggaaatgagatgaatttatcccatccctgtgccaaagcatatgactgcatcatctaattgtcaaatatggtagaaattacttaagaaattcttgatttatattccagttatcaaggtatagttattatatgtgcatggcaagaaaataatggcttaattcctattttctgattatagtaccctggccctttagtgactctcagagcacttttcaagctc

SEQ ID NO: 799280 - DNA, 616 bp, Homo sapiens
aagcttcaaatttatctacctcctctccttccactttgtatgtctgcaaatagctgtgaaagtgtcaccagaattggttctggggttacaaatacattttagcaagtaggcaaatttgcaaatatagaatctgtgaataatgaagattcattgtacatttttattctccacaaagattacaaagtgtataatagtccatacatttgtgttactttgatactcttattgttgctattgttgttactcttgtgtttgccacagtgcatcagttgacaaatcattaaatatgaaatctttggtcagtaggctttcaaacaaatcttttcrtcttaaaattgtcaatagtgtgcactaaaaagtgtcatttaaactactgcaggaggccaggcgcagtggctcatgcctgtaatcccaatgttttgggaggtcaaggcaggcagataacctgtggtcaggagttggagaccagcctagccaacatggtgaaaccttgtctccactaaaaatacaaaaattacccgggcgtgctggcatgtgcctgtagtcccagctactcaggaggctgaggcaggacaattgcttgaacctgggacattgcagtgagctgagatcgtgc

SEQ ID NO: 799281 - DNA, 610 bp, Homo sapiens
acatgtatgaagtgtttcaaacagtgcctggcaaaaaacagaagtctaataaatgttagcttctactgtgattcctcagaattatggcggcaataaaataaatgcatttgcatcaaaatcacctggtgatgggggaagcttagtaaatgcagattcctgggcctccatctcagagtttctaatttagtaggtctaggtggagcttgggcttctgctattttaataagcaccygggttggaggtctttttaaaggggtggtggctggcgaaaagttgtgggtgatgaagttagaaagtgaaagtaatttctggagagtacctgagaccatctaattaaagcatttcagtgaataaatgggtcaaattggtttctgatttcatgtggacaaaaatgagggatggagtagaagttcgatcttgcagtttgtcatggtggtgataagtagaaacagtcaatactgtgctagttaatcattatgtcatattctcttctgataaccagcactgagcatttctagggagaattcagcttagatgctggtagtggggatatttagacacagcaatgagttaaaaataaggatgtgagctctctccctcttcctcttat

SEQ ID NO: 799282 - DNA, 610 bp, Homo sapiens
acatgtatgaagtgtttcaaacagtgcctggcaaaaaacagaagtctaataaatgttagcttctactgtgattcctcagaattatggcggcaataaaataaatgcatttgcatcaaaatcacctggtgatgggggaagcttagtaaatgcagattcctgggcctccatctcagagtttctaatttagtaggtctaggtggagcttgggcttctgctattttaataagcacccgggttggaggtctytttaaaggggtggtggctggcgaaaagttgtgggtgatgaagttagaaagtgaaagtaatttctggagagtacctgagaccatctaattaaagcatttcagtgaataaatgggtcaaattggtttctgatttcatgtggacaaaaatgagggatggagtagaagttcgatcttgcagtttgtcatggtggtgataagtagaaacagtcaatactgtgctagttaatcattatgtcatattctcttctgataaccagcactgagcatttctagggagaattcagcttagatgctggtagtggggatatttagacacagcaatgagttaaaaataaggatgtgagctctctccctcttcctcttat

SEQ ID NO: 799283 - DNA, 648 bp, Homo sapiens
caggtaacaaagacgtaggtaataaaacagcatgtggtaaagaagctgaccaaaacccaccaaaacaaagttgatgacaacagtgacctctggtcatcctcactgctcattacacgctaattaaaatgcattagcrtgctaaaagacactaccacccgcaccatgacagtttacaagtgccatggtaacgtcaagaaattaccctatatgatctaaaaaggggaggaaccctcagttccaggaattgcccacccttttccaagaaactcatgaataatccaccccttgtttagcatataatcaagaaataactatatgtgtccttagttgagcagcccatgacactgctctgcctatggcatagccattctttattcctttactttcttagtaaacttgctttcactttactgtatggactcaccccaacttcttttttgcatgagatccaagaaccctctcttgaagtctgaatcgggacccctttctgataacaaaactatacaaaacagtactttgtaagaatcaaaataagaaaatgtatgtgaaaacattttgtaaattagaatgcattatataaatacattctattattcaaaactatttttataatgcatattatatgctggcactatgttgtgaaataag

SEQ ID NO: 799284 - DNA, 650 bp, Homo sapiens
tctgtcacccaggctggagtgcagtggcgtgatcttggctcactgcaacttctgcctcctgggttcaagtcattctcctgcctcagcctcctgagtaactgggatttcaggcatgtgccaccatgcccagctaattttttgtattttttagtagacacggggtttcaccatgctggccaggctggtctcaaactcctgaactgcccacctcggcctcccaaagtgctgggattacaggcgtgagccactgcatctggacgatttgttattaagagcctttactattaataggtaataagtatccctataagcatatggattatcacttaaagagatgtttgaaatagaggtattcatggatagtgacatgtatctttcattttagttaatgacagctagttacaggctatattaycattcattctgaactaaagctccatttttttatgttatggatgacgatagaacaattggtttcaatacactaacagtaataaattaaattgatggttggagagaatagctacatgttcaaaagtaggccacttctttactacttaaagaacatccaacagaggcaagatgatgggagactggaataatatttatgagaaaatgcttaacagtggaaattcctaagtatgtcagtg

SEQ ID NO: 799285 - DNA, 617 bp, Homo sapiens
tgattatacagcttggcttccccaatatagttcttgtttaaatataaagatatatctttatatttaaaataggtttttggaggtaccataataccataacacagatagattaaaaagaaaatgatggtcatggaaaaagctataacataataacacaagacccaaatataagctacctataaaagcctgacttcacctataaaggcatgcatagactgaaagtgaaaggatgaacagaaacattccacacaagtagaaaccaaaaacatgcaggagggctacacttatattaagcaaaacagacttcatggcaaaaatcataaaaagagacaamgaatgtccttatataatgataaaagataatcaagagaatataattgtaaatatatatgtacccaacatgggagcatccatatatgtaaagcaaacattatcagagttatagagtgcattaaactccaatacaataatatctggttacttcagggccacactttcagcattagacatgtcatctagatggaaaaaatcaacaaaggaacatcacacttaatctgcactataggctgaatggacttagacatttacagaacatttcacaccacagctgtgaatac

SEQ ID NO: 799286 - DNA, 602 bp, Homo sapiens
tcctttgcgttctatcttcaggactcagttttcttcctctgttctgagtctaaccttcaggtggcaggtctttatgcggaaaaaccctcccgctaatcctcaccagaggtactttacgggtagcattggtgttaagaaatgtgctgctacctgtgtacattgctcttggatcagggttgtagggctagggcatttggcatcctcagaggtttgcattacgtgggagtgagacattrcttctctttctgtttttgttgttgtttgtgtttttgaggcggagtttcgctctggtcgcccaggctggagtgcaatggcacaatctcagctcactgcaacctcagcatcccggtttcaagcgattctccagccttgcctcctgagtagctgggattacaggcatgcgccaccacgcccacctaattttgtatttttagtagagacgagggtctcaccgtgttggccaggctggtctcgaattcctgacctcgggtgatctgcccacctcggcctcccaaagtgctgggattacaggcgtgagccaccgtgcctggcatctcattcattctcagagctaaggacctatttcaatgtgattaagtgct

SEQ ID NO: 799287 - DNA, 609 bp, Homo sapiens
cttgcgagcatgggccttacctgcaccccctgcttccagctcaggacctggcccagggggaatgttccctaaagcagtggtccccaacctttttggcaccaaggaccggtttcatggacaataagtttttcatggactgggggaagggggatggtgttgggataattcaagcacgttacatttattttatttatttgttttgagacaagattctcgctgggtcacccaggctggagtgcagtggcacgatactggctcactgcaacctccacctctggggatcaagcaattctygtgcctcatcctccatagtagcttacaggcatgcgacaccacatctggctaatttttgtatttttagtagagacaggatttcaccatgtcaaccaggctggtctcaaattcctgagctcgaactcctgagctcaagccatcctctccttggcctcccaaagtgctgggattacaggtgtgaatcaccatgccccacctgcattacatttattgtggactttatttctattattattacattgtaatatgaatacaactcaccatagagtagaatcagtgggacccctgagcttgtttttctgcaactaggcagtc

SEQ ID NO: 799288 - DNA, 632 bp, Homo sapiens
tttacttcaaagtcttcttcattcattaccagataacattagtcactagtatttactgggcatctagatactttacttggatatactaaaagtggcttttttcactacatcaatttcatgaactatgccgtatctcaggaggtatatttagatggtaaagtacagttcacttccatgttaccatactacctcytgcattattccagtttagaaggaaacagatggtaaaaagaaacttcaaacttcaagaggcttcagttggctggtcttgtggtcaaatacgaggtctaagttgccccttatagtattcacctctacctccaacaaaaatcaacaagacatacgttaggagaaacaagacatggtgtcctattttgtgctcaaatctatagccgatgttgcaagaagcaggatcattttacttttcatcagttacctaaggccataagtgaaagtctggcttaactggcactatatttttgtcaagtttagtgtcatctatagattggctctctgtggtccttggacctgcagcctttaatcgggctgtacctgggtaactagattactttttgtctactaggtagtttctctggctctagtccaattcccctccaatacatactcaaaca

SEQ ID NO: 799289 - DNA, 617 bp, Homo sapiens
taatacaccaaacaaatgagaaacaaaccataagctgctatatactcatctgcatttctttctttcttaacaattagtgaaaccaggtgaaagaatagattgaaattaagtacctgttgctgctttttcttgcgaattagcccattcgatattagacttcgggatattttggtggggctaagatgaaaagatccacctcgtgatggaattgaccttcagcaggggacagtgaggtgtctgcggttgttcctcttgtgaacaacgccttaaaggcgagaaacagcctactgtacagtgtgccagggaaagcatcacatcggtgggcgtcggtggcaacaccacttacacttcaccctgattttgtttcctccttgcacrtgctcctttgacagggcaggctcccaagcaggtgtgcagtcagggccacaagacacaggcaccccatcccatctcagagtctgacgtcccctcctcccctttgtctctaagcctcatgtaactgagcttatagccgaccatacagaactggcaaacttggtgagatacctttattttttatttcttaaacaagattttaaaatttcataagctctcacgtatcctaacgagaaggcagg

SEQ ID NO: 799290 - DNA, 629 bp, Homo sapiens
agctacccaggtgtccatccagggacaaatggacaaacagaatgtggtgtactcatgcaagggaatattattcagccacaaaaggaaggaaattctgacacatgtgacacaaatggacaaatcctgtacaattccacttacatgaggcacgtgggagtcaaatgcatagagacggaaaatgaatggaggttgccagggtctggtggaggtgagaatgggtacagagtttcagatttgcaaaatgaaagaactctggagatggatggtgaccatggacttccacgtcagcctatcctgtacccctaaacaaggctggtcacccatcacatctcttgaaagtcatcacacccattctgtcctgaatgttgggaacctaccayttgttcttgacactcttccctctctcctatcagttggtcaccaatttgtatgctttttgcttcctcactgttcttcaaacccctccacagattcaccaccaccctagttcagtctgctgacctctctcctaggactgcagccacagcctccctggagcccctgacacctgcttctcccccactcacatctctttcccaccacgggatttgtttcatatgaacataaacatggtggtgacctctgccacc

SEQ ID NO: 799291 - DNA, 488 bp, Homo sapiens
tcatgtgctgtagtccttgggattcattacactttcacttggaagatcatctgtagcattgaacacattgagaccttgtactgcttttggtttatattgtttactaattacactgccgtgaaatggtcttcctgtattccwttccgccaactgttcctgcttatttaaggcttttgctttcccttgtggtttaattatccagctttttcctctttgacagcttaaaagcattaagagcttaatctttaacaactcaaccaacccatttatatactggcaaataagaacttaatagcttaagagggttttttgtttgtttgtttgtttgtttgttttaagaaatcactctctagtaacaggagacagcgatttgttttgatttctagaccccaatatggagagaatataaggcagttctcttgtggaataggaagtcaggaagagcgcaattactgggacatattactaatcttagaaagttatattct

SEQ ID NO: 799292 - DNA, 347 bp, Homo sapiens
tccattccaatccattcctttcctttcgcttgcattccattctattcccttctactgcatacaatttcactccattcgttcccattccattcaattccattccattcaattccattccatttgtttccattctcttcgattccatttctttatattccatgccattcgattccattctattggattgcattacattcgtgttcattccattccagaccattccatttgactccattcctttcgagccctttcaatttgagtccattcctttccagtccatttcactccagtccattactatccattccataccattccatccattccatcccattccatyccattcc

SEQ ID NO: 799293 - DNA, 646 bp, Homo sapiens
catttgtttccattctcttcgattccatttctttatattccatgccattcgattccattctattggattgcattacattcgtgttcattccattccagaccattccatttgactccattcctttcgagccctttcaatttgagtccattcctttccagtccatttcactccagtccattactatccattccataccattccatccattccatcccattccattccattccattccattccattcaattgcattccattccattccattccattgcactacactcmattccattacattctactctatctgagtcgattttattgcattagattctattccattggattactttccattcgattacattccattcatgtacattccattccagtcaattacattcgagttcattacattacattccagtatattccattgtattcgatcccattcctttcaattccatttcattcgactccattatattcgattccattccactcgaatccattccattagaggacattccattccaatgcattccattccattccatagcattccattgcattcgattccattccatttgataccattccatttgatgccattccatgacattccattccgttccaattcattcca

SEQ ID NO: 799294 - DNA, 550 bp, Homo sapiens
tttccattctcttcgattccatttctttatattccatgccattcgattccattctattggattgcattacattcgtgttcattccattccagaccattccatttgactccattcctttcgagccctttcaatttgagtccattcctttccagtccatttcactccagtccattactatccattccataccattccatccattccatcccattccattccattccattccattccattcaattgcattccattccattccattccattgcactacactccattccattacattctactctatctgagtcgattttattgcattagattctattccattggattactttccattcgattacattccattcatgtacattccattccagtcaattacattcgagttsattacattacattccagtatattccattgtattcgatcccattcctttcaattccatttcattcgactccattatattcgattccattccactcgaatccattccattagaggacattccattccaatgcattccattccattcca

SEQ ID NO: 799295 - DNA, 493 bp, Homo sapiens
actccattccattacattctactctatctgagtcgattttattgcattagattctattccattggattactttccattcgattacattccattcatgtacattccattccagtcaattacattcgagttcattacattacattccagtatattccattgtattcgatcccattcctttcaattccatttcattcgactccattatattcgattccattccactcgaatccattccattagaggacattccattccaatgcattccattccattccatarcattccattgcattcgattccattccatttgataccattccatttgatgccattccatgacattccattccgttccaattcattccattccgtttcatgaaattcgagtcctttccagtacatttcattccaatcccatccaatccaatctactccattcaattcctttccattccatttgatttgattccattgatttgattccattcagttt

SEQ ID NO: 799296 - DNA, 574 bp, Homo sapiens
attccagtcaattacattcgagttcattacattacattccagtatattccattgtattcgatcccattcctttcaattccatttcattcgactccattatattcgattccattccactcgaatccattccattagaggacattccattccaatgcattccattccattccatagcattccattgcattcgattccattccatttgataccattccatttgatgccattccatgacattccattccgttccaattcattccattccgtttcatgwaattcgagtcctttccagtacatttcattccaatcccatccaatccaatctactccattcaattcctttccattccatttgatttgattccattgatttgattccattcagtttgattccattccgtgaaatttcgttccattctattccattgcattactttccattcaattccattccatttcatttcagtccattcgcttcctttcctttcgattcaattccatttgattccactccattctatgcgatttcattccaatcgattcaattccattcgatgacattcctttcgtttcc

SEQ ID NO: 799297 - DNA, 568 bp, Homo sapiens
aatccattccattagaggacattccattccaatgcattccattccattccatagcattccattgcattcgattccattccatttgataccattccatttgatgccattccatgacattccattccgttccaattcattccattccgtttcatgaaattcgagtcctttccagtacatttcattccaatcccatccaatccmatctactccattcaattcctttccattccatttgatttgattccattgatttgattccattcagtttgattccattccgtgaaatttcgttccattctattccattgcattactttccattcaattccattccatttcatttcagtccattcgcttcctttcctttcgattcaattccatttgattccactccattctatgcgatttcattccaatcgattcaattccattcgatgacattcctttcgtttccattccattcgagtccattcaatttcagcattcgtgtccattctattcgagtccattccattaccgtctattctattcccttccattcctgttgattcaatttcattcccttcca

SEQ ID NO: 799298 - DNA, 519 bp, Homo sapiens
cattacattacattccagtatattccattgtattcgatcccattcctttcaattccatttcattcgactccattatattcgattccattccactcgaatccattccattagaggacattccattccaatgcattccattccattccatagcattccattgcattcgattccattccatttgataccattccatttgatgccattccatgacattccattccgttccaattcattccattccgtttcatgaaattcgagtcctttccagtacatttcattccaatcccatccaatccaatctactccattcrattcctttccattccatttgatttgattccattgatttgattccattcagtttgattccattccgtgaaatttcgttccattctattccattgcattactttccattcaattccattccatttcatttcagtccattcgcttcctttcctttcgattcaattccatttgattccactccattctatgcgatttcattccaatcgattc

SEQ ID NO: 799299 - DNA, 483 bp, Homo sapiens
cagaagcttaaaaatcaacagaccagtgcttaaaactcaaccacatgacacttgtcccattctgaaggggatttacctttaagaagttactgaacttttgtttctagcaggtcagatggaaaggaaagcaggcaagaggaaggatagagkcctgagggtgatggaggaacataacacaggagataaggaatagtgggataaatgctgtatctttcaaattagaatgtgaaggcatctgaaaggcaaatggttttaacattttatatttttaatttgccttggctagcaaatcttttaaggaaggaatttttagaatctggattaaaaaataaattttgtcatagcaattaggaaatatagaccattggatgtatgagattttgcttctttccattttaaggtacctttcaaacagttttatttatataaaaaattatccaaagttgccattgcaagtctaaaatatccttggtgaaatcatgc

SEQ ID NO: 799300 - DNA, 601 bp, Homo sapiens
tttctgttgactttagatagcctgatgactatatgtcttgctgaagatctttttgcaataaatttcccaggagtcttttgagcttcttggatttggatatctagatctctagccagaccaggaagttttcctcaactattccctcaaatatgttttccagatttattattttcacttctccctcaggagaaggaaagccaattattgttattcattttatgtatttccatatttcttagagactttgttcatttttattcttttttatttttgtctgattcagttaattcaaaagccttgcctttgagctccraaaattctttctcctagttgttctagcctattgttaaacatttccacggcattttataattattgcccaagtgtatcttttattttcagagtttctgattaatttttctttacgatatcactctagaaaatttttcattcatatcctcaactgccttctaaatttctttatgattttttttttgcctttctctgatatctccttgagtagcttaataatcaaccttctgaatttatctggtatttcaaaaatttcatcttggttgggtccactgctggagaactagtg

SEQ ID NO: 799301 - DNA, 578 bp, Homo sapiens
caagaggaatttgaaaactacatgaatacatgaaaagtaaaaattgtgcccctgaataaccagtggatcaatgaagaaattaagagaaaaattagaagatttcttgagacaaatgataatgaaaacacaacatacgaaaacctatgggacacagcaaaagcagtactaagatgaaagctgatagctctaaatgcctacatcaaaaaagagaaaaaacttcaaatatacaatctaatgaygcatcttaaagaactagaaaagcaagagcaaatcaaacccaaaactggctgaagaaaataaataataaaaaatagagaagaaataagtgaaactgaaataaaaaatagaacaaaagtcaacaaaacaaaaagtagtctttttaaaaagttaaagtaagtggacaaatatttagccagactaatagaaaaagagagaagatgcaagtaagattagaagtgaaaatggagacattacaactggtatttcagaaatttaaaggatcattagcagctactatgagcaactacataccaacaaattggaaaatctagatacaataaatgaattcctagacacat

SEQ ID NO: 799302 - DNA, 628 bp, Homo sapiens
acctgtgacattaataattctggtgaaacaggtgcttcctgggaatttcaaacatttgaaaataaagtgataggccggacgcggtggctcacgcctgtaatcccagcactttgggaggctgaggcagatggatcacgacgtcaggagatcgagaccatcctggctaacacrgtgaaaccccatctctactaaacaaaaccaaaaaaattagccgggcgtggtggtggacgcctatagtcccagctacttgggaggctgaggcaggagaacggcgtgaacctgggaggcggagcttgcaatgagcctagatcgcgccactgcactccagcctgggcgacagagcaagactccatctcaaaaaaagaaaataaagtgatacttcgagggaattagttgtgtcacagataaaaatagattgtgcttcactgcactcattttaaaacatagtgactgtcttcaatgctactttacaagtgaggaccagataattaactgaagtttctttctcaagcctgattgcgttgtttctttttcttcactactcttctcctttactgtcccttcaccatttaggaggaggatatgcttttctacacatctgttccttaggaggatggttgatacagct

SEQ ID NO: 799303 - DNA, 649 bp, Homo sapiens
cagagttgtagcgcctttaatgcctcaataaaagaaaattgtcattatctgatccatctggtggttctctggaagacctatttacaagactgtctgtatttaacctaacttggggctgattcagtgtcactgcaaaagaccttttccccctgagatgggtttttgttgaaaatatttaaacgtgattgtttagctatttggctgcctgaggtaatggataacagctggrgcaaacaataggttaaacaaaaagcttaaaaggaaaaactgaggagtgagatgtttacagggattttgaaaagccctggcatatttccggggaatttagaaggtcatgtgcatgtgtagggctctgtgcatgctaagagttttagagcaagtagctaggcagacaggagcagggcaggagtgggcctcccaccccaccaggaatgtcaggcaaccatcaggtgatggtcagatagttgttgaactgtctgtctaaaataataattggttgcagccagtgccagggaaaggctggctcccaatagacacaaaacacctgaaactggtgatcagcagcttcctgataagatctcaggagctgggcgagtaggctcaagcatgcgcactaaggggcaaaatgatgaagtttagctggtatatg

SEQ ID NO: 799304 - DNA, 649 bp, Homo sapiens
cagagttgtagcgcctttaatgcctcaataaaagaaaattgtcattatctgatccatctggtggttctctggaagacctatttacaagactgtctgtatttaacctaacttggggctgattcagtgtcactgcaaaagaccttttccccctgagatgggtttttgttgaaaatatttaaacgtgattgtttagctatttggctgcctgaggtaatggataacagctggggcaaacaataggttaaacaaaaagcttaaaaggaaaaactgaggagtgagatgtttacagggattttgaaaagccctggcatatttccggggaatttagaaggtcatgtgcatgtgtagggctctgtgcatgctragagttttagagcaagtagctaggcagacaggagcagggcaggagtgggcctcccaccccaccaggaatgtcaggcaaccatcaggtgatggtcagatagttgttgaactgtctgtctaaaataataattggttgcagccagtgccagggaaaggctggctcccaatagacacaaaacacctgaaactggtgatcagcagcttcctgataagatctcaggagctgggcgagtaggctcaagcatgcgcactaaggggcaaaatgatgaagtttagctggtatatg

SEQ ID NO: 799305 - DNA, 593 bp, Homo sapiens
atcccagaaaaaataaaaaattaaaatagctatctcatattgcagaagcttggcttgaaaaagagatcaaagggggcagccaggggttagcaattactttatacaatgacagtaagactcacattctctcccagtccttatggctccaagtaaacatctgakctccctcaacatttacacactgtggtttctatggttttggatgtttgtatttcaaaatgacattaagaaggaataggcataagggtatggaagaccaggaaaggtaaaggaaaacaacttttacaggtcattcagatttctgaacagttccaagggagaaataagccaggtaaaaacatgtgctttaatacagcacccaaacagcagtgaaggcaccactatgtgaggcatatatgtagaatcccagttcaccctccaaattacaatagattcttaagagaggttggtccaaaggtagtgagttatctcaattggctgttcacagtcagttacagatcaaactcctttttctactctttcctcccatctcactactgcatgtgactagtcttaaaaaaagaaaaaaagagagagtgcatgattctgtattg

SEQ ID NO: 799306 - DNA, 608 bp, Homo sapiens
atagcattttgtgtaggacatcctcaatagacataaaagtaaaataagaaaaatttctgtcacataggaaaatattataaaaacaataacctctgattaaaaaaacaggttatttcaattgcacttagagaatataaaatttaggaaattaaaagatgaccaacttctaattttactttagaagatattaataatcaagatacagtttaaacattcacagtaaaagaaatttagatataattatgtggtatagcaaagaacttttaaattttttgttaaattgkgatgccataaaagttagatacttctagttcataaggcaaaaaaaataatctgcctaagaattagattcagtccagagaacaaaaacctaagggataagtaactgaagtaataataaagacaaattgaaagtataaaacatctttgctataaagcattataacaaagttaatcccaaatgttctagtttgataataaatgtaaatggtttatatttaaatgtaaacctctgcattagagggcaaacaaactcagattagctgaaagcaaagcaatagcgaataaatgcaatagttttaggcattgtgcaatgtataaaaacaagc

SEQ ID NO: 799307 - DNA, 466 bp, Homo sapiens
gcaagtacagccagccattctttgagtaataagtatctctctctcaagatttaacatggagagtaaaatctaattacattttcatccttaactatatttctatttcctatctacactaaagagtgctgctttcggctctctaaattttggtcacattggtttcaaacactatagatttttctctgcaatattcactcataatctttcattctatytgaagttaaatttagattccataaacattatagtatgcattttattcttcaaagcacctgtgtgcccacatatgcaggtaagtgtatccatgtgttgttccatttgtgtgtggatcttcgtgttctctgtaggaatgtctgtttaattcataattaaagaataatacatatgctacatatgcgcatagctcagataaaacaacagggaaggagaagaagatggtacattgattaatggtctaaaagtctaa

SEQ ID NO: 799308 - DNA, 446 bp, Homo sapiens
caaacaagatctggaatggacctccagcaaactccaacagacctgcagctgagggacctgactgttagaaggaaaactaacaaacagaaaggaatagcatcaacatcaacaaaaaggataaccacaccaaaaccccatctgtagaccaccaacatcaaagaccaaaggtagataaaaccacaaagatgaggagaaaccagatcaggaaagctgaaaattccaaaaacctgagagcctcttctcctccaaaggatygcagctcctcgccagcaatggaacaaagctggatggagaatgactttgatgagctgacagaagtaggcttcagaaggtcggtaataacaaacttctctgagctaaagaaggatgttcgaacccatcgcaaggaagctaaaaccttgaaaaaagattagatgaatggctacctagaataaacagtgtagagt

SEQ ID NO: 799309 - DNA, 619 bp, Homo sapiens
ccatcaatgatagactagattaagaaaatgtggcacatatacaccatggaatactatgcagccataaaaaaggatgagttcatgtcctttgtagggacatggatgaagctggaaaccatcattctcagcaaactatcgcaaggacagaaaatcaaacacagcatgttctcactcataggtgggaattgaacaatgagaacacttggacacaggaaggggaacatcacacaccggggcctgtcatggggyggtgggagtggggagggatagcattaggagatatatctaatgtgaatgatgagttaatgggtgcagcacaccaacatggcacatgtatacatatgtaacaaacctgcacgttgtgtgcaggtaccttagaacttaaaatgcaataaaatatatatatataaaatatatatattttatatatttttttaatatatatattttgctgatgtaagaagaaattttatatacatatatgtagcaggtgatctttatttacagataagattacataatttgaaaatccaactttaataaaaaatccaactctaataagagaatgtacttagatacaaagatgtaagacaaatatacaaagaaatcattagttttc

SEQ ID NO: 799310 - DNA, 505 bp, Homo sapiens
gcctccttaagttctctggacccgtttcctcatcagcaaacagggagaatgatagcaacttcacaaggttattgtaaggctcaaatgagataaagtatttaaagcaaaaaaaaaaaagtgttcttaaaatcaatttcaagaaaattaagtcacaaagtaatgtctgttgtgggattccttttttgtcaagataacagatcttatctcacttaccaytgcctgaacaaaccaggacattgtccatctgggatggtttttgtccaaacaggaggcgatagttattaattaaggaagcgagactgggtttggactgtggcatacgacgagaggatttggctagttcttagtaaaaggagaccatagcaggcatgcagcattatgtacagatgccctaagagactgagaaacaaggaaaatggggttggaggcattttgaggggaggagcaagtgtgagcatgagcccaaccctgagatccttcaagagcccagttctagttgcaggcc

SEQ ID NO: 799311 - DNA, 612 bp, Homo sapiens
actataatatcaaaaagcagtaccatttagtattagtctgaaagcaactagtgaacgcattaatataaccaacaaacaacctttcacgaaatacttagagattagggccataaactacaagctagtgttcttttcactttgaaatgaaagatcagaggttccatataggccttaattagactcatagtctagaatttttctttctttctctaattaagaggatcacgcaaaaacactgaagtagtagtgccaagatgattccagccaggtagcccagtgcaacacacacaaaaatagttcacagagataatgttacccaattatgaattcagagagactcaatgtacaacatatttcttaagacacagctacaagacagagagtagggcatcatccataaaaggwtgggcaaaagatgagggcctcaaagccaggccaaactgggtggtttttcacctagaataatataaggtagtctgcctagaggaacaatctctatcactgttgaggaagaaagccaaggtatataaatgaagaagaggttctaagtgtcaggtccaacgtaaatggtgaggtcataaaaagcaaaaggaatttctaggccagacatga

SEQ ID NO: 799312 - DNA, 608 bp, Homo sapiens
aaagacacagaatggcaagctggatgaacagctgagacccatcagtgtgctgtgtttaagacacccatctcacgtgcaaagacacacgcaggctcaaaataaagggatacaggaaaatttaccaagcaaatggaaagcagaaaaaaagcaggcattgcaatcctaktttttaacaaaacagactttaaaccagcaaagatcaaaaaagacaaagaagggcattacataatggtaaagggttcaattcaacaagaagagctaactatcctaactatatatgcacccaatacaggagcacccagattcataaaacaagttcttagagacctacaaagagacttagactcccacacaataatgggagactttaacaccccactgccaacattagacagatcatcaagacagaatattaataaagctattcaggatctgaactcagctctggataagtggatctgacatacctataaaaatctctaaccccccaaaacagaatacacattcttctctgtgccacatggcactcactctaaaattgatcccttctaattgttttactaattggaagtaaaacactaatcagcaaatgcaaaataactaaagtc

SEQ ID NO: 799313 - DNA, 615 bp, Homo sapiens
ctgcccttctgccccgtttactatgacaacctccctcatcgcctttgagtttcagtcaaatcccactttctcgttcaggtctaacctcaatgccctattaagagtaacaacccaattcccttacctgctctagtttttcttttcctgtatcatatatcagcttgtaccakactgtagaaattacttctttgcttttaaaagtagaaagtaatcatggcggtatgtgtggtggggggagaagtgaagactttggcagagcaagaaggcaggattatccactgaagggatgcaaaaaactccctagagcagaaaactccatgtggtttttgttatacttaaaagaaagcatctcatgtctacaaagcatgatcttacttgtttgaaatcatagtagggcaaaggcagccaccctctctggcagaaaacaaagctttgggaaggactctctcaagctgtaggggtgatggtggatggctgggctggccagccagatctgtcaaatccaccatggccgtcaccatcaccaacgggacaggagtcacagcctgatctggctggctggctctccatagattcttcacattaggcaaccataacatgctgctccacacacag

SEQ ID NO: 799314 - DNA, 673 bp, Homo sapiens
ggggtccacccccatgatccaaaaccttccaccaggccccaccttcaacactgggggtcatatttcaacataagcttcggaggggacaaaacatccaaacagtatcactccccagtgatttaccaccacatcactaaagacccattcacaattctttttacccagtacatcatgacatccgtctttcagcaaaaacttaccagacatactaaaaggcaaaaaacamagtgtgaaaagattgaacaagcatcagaatcatagtcagatacagcagaaatattggaatcattcgacaagaaaatttttgaaaatgatgaataagctaaaggctttaatgaaaaaaggacatgaaagaacagataagtataagcagatgaaaattctaagaaagcaaaagtaatgctagagatcaaaatcattttaacagacttgaataatccttttgaccaacttattaggagactgaacacaactgaggaaaaatctcagcttgaggatacgacaacagaaacttctgaaatgaaaaagcaaagagaacaaagattgtaaaaaaaaaaaaagaatatccaagaactgtaggacaactatgaaagatgtaacatacatataatgggaatattagaaagagaataaagagggaaaggaacagaagaaataatattcaaaacaataa

SEQ ID NO: 799315 - DNA, 630 bp, Homo sapiens
agtattacgtagtctgagaagtcagtctcatgataggctctgtgcaagctggagaccctgggttgcaggtagcctggctcggtccaagtctgaaggcatcagagccagggaagccaaaggtataactctctgtccaaggctaagtaaggtgggagagscttagaagctgctggcacaagtcacagagtccaaagaccaaagagcctagagttttaatgtccaagggcagggtaagaagggtgtccccactccaggagcaacagaattcatattttatttgcctttttgttccacagggacccccagcctactggatgtttctgatcaccttgagggtgaatctttccaatcagtccactgaggcacatgccaatctcctcggaaacaccctcacaaatacacccagaaataatggtttttcatctatctaggttatttcttaatccagtcaaaatgacaccaaaaattaaccatcacactaatgcttaatcaaaaggctggtgagatgctacctctttaggtagattctggtaaatagctgggaactattgataccacaacctctcttccctcccaaagaaatactgatactttggaactagttttcttccttcttattcttattccaac

SEQ ID NO: 799316 - DNA, 626 bp, Homo sapiens
gatgatattaaaaatagggtttttcacaaggtaagcaacagggaaattacatttcctagattcaggtcccctgcacaatttccaagtggtgtagcatcaacatcaggcaagccgtttgattttatgacaatgtgtttacaaatatattaagggtggaattttcagcaccctgaatgggatttgagattcagttcttgcttatcatacccatggatgcttatctatagttgtgtctcttggcaagatgataaaaatgagtccagtgtttatttttgttcctctttggtttaaactatccccccaccaaaaaagcaaacaaacaaacaaacaaaaaaaaccatttagattatattttaagtgmcaaaaggacacattaattaaaggttatggagtgaatgttccagcaaaagatgtcactcatacagcaaagcttcagtaaggagtcatttcttgaatactgagaagtcccaaataaaatacaaatgtaaacttgcagtagcttatcaaaactaacatacatctcatgaactattcaacagttctccgttacatagtatgaaattaaaattcgtatgttttactctaaggtctagtccccgttgtctcatatttttgatggataaaca

SEQ ID NO: 799317 - DNA, 418 bp, Homo sapiens; identical to SEQ ID NO: 791616

SEQ ID NO: 799318 - DNA, 621 bp, Homo sapiens
gtttaatatgtttctgcttatgtgtatatacaggtgttgtgatgtgtgttgtatctaacatgctatcaaattgaattataaaaaaatggctctgataaactaaacagataagaccaaatacttctcaagttcacataacttggtaatctttgggtgaatgggactagtctaaacttattagtttgttggtaacattgtgtcttttaaaatttaactttaaggttcttacctaggtgagatgctaaagtttgcaggctttagaattgctaacagaaaagtggctttacatagtgattggctatacatggcattttagttgtaaaaartaaatgaaccagtcggtagaaaagagagatgtggaaaaggttatagatacaaaaatgtatttttggtaacataggatatagaaagtaattttaaatgagggaaaatcttgtatggtaaatcttatcctagaataaactgactggtatttaagagaaaggtggtataagacaagtcagaaaggccaaacatgtcatagatgatctgtgtatgtcatgataaggtttgtgaagaggaatttatgaaaaaaaattgtgtgtgattaaactagctataattaacatggaattgcttata

SEQ ID NO: 799319 - DNA, 599 bp, Homo sapiens
gcacatacactgtaggttagtgatgaacatcagcagacaggcctgctcttgagatttttgtctaactgaggagcgtcattaccatggcagtattgttctgttttatgtgaaatgtgttggatatttatgttgagtttaagatatctggcacgaagctttcctcacacagaagaaaattttcacaacttttgcagattctcagtttgttttcttttattacaaattaaaacattttgatttagattttctgtttcacaattttcatttttatggtagaacatgwtaaggcagctacaaggtcatgactaagaatacagagtccagaagcagacaggctgtgtgactgggggcggttatctctgtgctccagctacagcatctcaaaattggagagaatctaaatgatgttctatgtagttggtcgcctttgtcatgttatattttcagatgagagccaccttgttttctgcacagacatatcctagtcagtgattcttctccttcccatgttggtttttgatggtttcatttttgaaaagggagaccagcttttcattcgctttttcagcagaagcataaggtaagacataaggggtaag

SEQ ID NO: 799320 - DNA, 585 bp, Homo sapiens
gtatattacaaaaattatctggtgttatcaacagagcaatcatgaaataccacaaaccagaacaagtggtctcttactatcttgaaatccacagatttttgcagcaatttccaaaattatattactaaaagtactttacttaaaaattgtttaccaaataaacttcctacattttacaagacaatagacagaaatgtatttaactgaagtgtcttaacaatagctaatgatccttcccaataatatgctaagtagaagcattaaatattaataaatttcattccatctcattcaaaagtcgacttttttatctctttattattcaagacagttctgacatacttaaacctagacacttttaaacttccgttaaccactgaagagtttactattacaaagtttaaacattaacatattctaagtttrtagtctaatttaatacaagtttttaaggcaatcattttacactttggtaagttatatcaaatgccttattgaagtttgtttcttattcatattttacaaacatccctaattcacagaatttcactgattgtaaaatttccccaatcagagatgtgaagg

SEQ ID NO: 799321 - DNA, 614 bp, Homo sapiens
ccctcatagggtcacctagctctcagcagcacatcagccttgcccgggaaggcaggtgggtagtgcaggccagggaccttgcctcacaggcccactgttccacagttccctgtacagggcccatgcttagagcagctcttttagggtcaggctactgttgactgggaagccccgaaaagattgggcctgagtcatcctggcaccatagttactgtctggagacttaagggatgagtctcatttgtgactttcttcagattctgcaaaatttatagcctgtgagtctgtcctgcctcccaccctcctttcctcatgggcccagactccgccccracactgccccagttttgcctctcacccacccagcaaaccctacccagggacagtctgatggcctcaccttctccatgcctacccaggctactgagtgccactgggttctcagcactgccagactgttcagaactgtcatctccctgttccacccaacctccattcaaccctcactcccctctcaaacccctgcccactcccctcagcaagtgactttggccctcactccatggggactacagagatgcattcctcctccccaccttgctctcccagcttct

SEQ ID NO: 799322 - DNA, 617 bp, Homo sapiens
cttggtttcctagacccctaatcccccatataagaaagcataccacccttctagagaaaccgtgtggtgagggctgagactacatagagatagggacccagctgaggccagtcttccaaagatacacaccaaagccgtagatatgtcttgtggagcagaagaatcacycagctgagaacctgcccaaattcctgacccatgaagtcatgaattataacaaaatggttgttgttttaagctactaagttttggaatatttcttacacatcagtaaagaccagaatagcattctttttcaggaactctacatattagtaaaattaatcatttttcagatgtaatgcaaacatatttttcctagatgttttgactttgtttattgtttccctttttagtcatgcataattttatttttatgtagttgcatttatcattctttttttcccctaaaaaccagctagagcatacaattgaggaaaagatagaatttttaagaagaagagagatgaaatagctaaggttgaacttaagaaatcacaaggtctatatgaagacaaccaaaaacttttgaaagattcaaaggaaagtttgaacaaataaaaagacatcatgtactt

SEQ ID NO: 799323 - DNA, 680 bp, Homo sapiens
gtcccagggctgaggattcagctggatccacatggtcttgagggttggcatgaggagggggaagcttttttgaatcgctttttgatcacataatctgccattttaagagtaagatttgctttatggaaatcaattcattaataaaaaatgatattcaagttgcaataccatttcacagtgaaatattttgagtacaattttgttgctagaatagtcatgggcaagagttttatgcaaaatgtttcaattatgttaataaataagacaatgctacaagagtcttgtgtcttggtcaagaactttctctgtgaattgcagcattaatcactttttcttcataattttacttgacaggagacaacagttgtaaaratgtacttagaacaagcagtttcctgcctggttcagctgatgccacatgtgttatataaaagtatgtacagccacatccaaggatgataaagggaagaataattagcaaatttgtaaattgtgcctccgttttcttagttttgaaacattaaatcttacatcttgactaatttgcatagtccagtgttggttaactttggctcctcaatgaaattagtattttatgaaataaaattatatttgtgaaaatgaaaaacttgaacaactttttagcttgaaagatcttaactaaaacagaacttgttaaa

SEQ ID NO: 799324 - DNA, 565 bp, Homo sapiens
ttaacaatgtaatacggtttaattcctcatctctcccctctcctgccataaacttctgaatactcaaaatatggtattcattatctaatataggcagtgatttaggccacaagctataaaacacaggaaacatgctaraaaatgtaggttgtgtgaatgttgctaatagaacaaacttggatgaattaatttctctgtcccttctattgttactctctaccctcccaagtctatttcatatacccaacaagagaccttgtgatgttttcagcagaggacctaggcctcttttgctttgtagaaacagacacacaaatcagttaactgaaaaactgactcgatgtcctagagactactaaatagtagaaaacaaagataaataaaactgcctctacttttaggagctcacagtggaagagatagacaggtaaggacatttttgccaagaaaaaagaaaaaaaaaggatacttttgcaaatagttttgttatatcaagtttctggtctcttctttatgtgatataaacactgtccatacaaacacacctccttaaaactcagtgcta

SEQ ID NO: 799325 - DNA, 565 bp, Homo sapiens
ttaacaatgtaatacggtttaattcctcatctctcccctctcctgccataaacttctgaatactcaaaatatggtattcattatctaatataggcagtgatttaggccacaagctataaaacacaggaaacatgctagaaaatgtaggttgtgtgaatgttgctaataraacaaacttggatgaattaatttctctgtcccttctattgttactctctaccctcccaagtctatttcatatacccaacaagagaccttgtgatgttttcagcagaggacctaggcctcttttgctttgtagaaacagacacacaaatcagttaactgaaaaactgactcgatgtcctagagactactaaatagtagaaaacaaagataaataaaactgcctctacttttaggagctcacagtggaagagatagacaggtaaggacatttttgccaagaaaaaagaaaaaaaaaggatacttttgcaaatagttttgttatatcaagtttctggtctcttctttatgtgatataaacactgtccatacaaacacacctccttaaaactcagtgcta

SEQ ID NO: 799326 - DNA, 617 bp, Homo sapiens
ttagctggtcaaagcgcctatctattaaaagtcccacgtgtaatttcaagcaagcctttcccaacatctctataaaaatgcatttttactagcccccctctttatttcttaatgctgcaacttctacaattacttttaaaagactcatttattcattcattcaaacaacaatgcaacagaaattttaggagcacaaagtgcttggcaaaacggtagagtgctgtacgttacgtgcaggggggaaaaatgcaccaccgtagttactgttctcaagaactcacgtcccctgttcattcaaaccattaaaactaggagcatcaggccgggcgcagtggctcacgcctgtaatcccagaactttgggaggctgaggcaggttgattacttgaggtcaggagttcgagactagcctgccaacgtggtgaaatcccgtctctactaaaaatactaaaattagccaggcgtggtggtgcakgcttgtaatcccagctactcgggaggctgaggcaggagaatcgcttgaacccaggaggcagaggttgcagtgaaccgagacagcaccactgcactccagcctcggtgacaagaacaaaactccgtctcaaaaaaaaaaacaaa

SEQ ID NO: 799327 - DNA, 585 bp, Homo sapiens
ttccgcatcttaaaaggaaaatttgttcggctaaataaacatcataaacagtttcactgtcaatatatatacccactaaaaaatatataaacatgtataatatatacgtggatttgtgtacactacaactgacttggtcttagatccataaaaacatatacgtccactcaggtttctctacatgaaagcaaacacaatagctttgggcatttgaatgtccttggaaactattcatcatagtagattaatccatgagatatctctgaccaattataaaatatctatttgacgtaacactaccattttcagacatttgtgcataaaccttcgaagcctgacagtcactgatcatttatttcatgtgactcatagaaagtttgaatgcatcagtttaccagttctacctctgagtggttktgacttcaatgttgtgatagattacaattgccttagaaacaccaaagaagacattccatctttctctctggctgcgtttattctatcagtcttactgcaaaaatcctactatgtttcatgcctctcatccatttttaggagttccttacaaagtaggaaatgtgcatt

SEQ ID NO: 799328 - DNA, 536 bp, Homo sapiens
cacaagggcgggcaaaggagggagaggggcgggggcagtttccagtcctgctggaggagcaccattggacacctgccctgttgcagacagggactgtgcctgaggtcacagggacaggacaagaagaggggacgggtggggacagcaggcatggcagaattctgcctcctgggtctttcctgcaccctgtgcctcctccagctcgaggggcgtctgctgcacctgcctcccatccctgcaygcttgggcccccctgggatctctctacacgaggccaaacagaaggcgctgcctcccgccccctcacacctggcttcctgaggaaccttcccaggcctcggggagaccctgtggctgcccctgtctctgcctccctccatggtaggaagaacagctgctgaggccaagacccccagaggggctgtggggcgggaatctccaggctggagatgagagggcagggccaggaggggtcactggaggctgagcttttggaggtgcgagtggagaagaattcatttttaagttcatcaccg

SEQ ID NO: 799329 - DNA, 536 bp, Homo sapiens
cacaagggcgggcaaaggagggagaggggcgggggcagtttccagtcctgctggaggagcaccattggacacctgccctgttgcagacagggactgtgcctgaggtcacagggacaggacaagaagaggggacgggtggggacagcaggcatggcagaattctgcctcctgggtctttcctgcaccctgtgcctcctccagctcgaggggcgtctgctgcacctgcctcccatccctgcatgcttgggcccccctgggatctctstacacgaggccaaacagaaggcgctgcctcccgccccctcacacctggcttcctgaggaaccttcccaggcctcggggagaccctgtggctgcccctgtctctgcctccctccatggtaggaagaacagctgctgaggccaagacccccagaggggctgtggggcgggaatctccaggctggagatgagagggcagggccaggaggggtcactggaggctgagcttttggaggtgcgagtggagaagaattcatttttaagttcatcaccg

SEQ ID NO: 799330 - DNA, 536 bp, Homo sapiens
cacaagggcgggcaaaggagggagaggggcgggggcagtttccagtcctgctggaggagcaccattggacacctgccctgttgcagacagggactgtgcctgaggtcacagggacaggacaagaagaggggacgggtggggacagcaggcatggcagaattctgcctcctgggtctttcctgcaccctgtgcctcctccagctcgaggggcgtctgctgcacctgcctcccatccctgcatgcttgggcccccctgggatctctctacacgaggccaaacagaaggcgctgcctcccgccccctcacacctggcttcctgaggaaccttcccaggcctcggggagaccctgtggctgcccctgtctctgcctccctycatggtaggaagaacagctgctgaggccaagacccccagaggggctgtggggcgggaatctccaggctggagatgagagggcagggccaggaggggtcactggaggctgagcttttggaggtgcgagtggagaagaattcatttttaagttcatcaccg

SEQ ID NO: 799331 - DNA, 536 bp, Homo sapiens
cacaagggcgggcaaaggagggagaggggcgggggcagtttccagtcctgctggaggagcaccattggacacctgccctgttgcagacagggactgtgcctgaggtcacagggacaggacaagaagaggggacgggtggggacagcaggcatggcagaattctgcctcctgggtctttcctgcaccctgtgcctcctccagctcgaggggcgtctgctgcacctgcctcccatccctgcatgcttgggcccccctgggatctctctacacgaggccaaacagaaggcgctgcctcccgccccctcacacctggcttcctgaggaaccttcccaggcctcggggagaccctgtggctgcccctgtctctgcctccctccatggtaggaagarcagctgctgaggccaagacccccagaggggctgtggggcgggaatctccaggctggagatgagagggcagggccaggaggggtcactggaggctgagcttttggaggtgcgagtggagaagaattcatttttaagttcatcaccg

SEQ ID NO: 799332 - DNA, 556 bp, Homo sapiens
taaaaagacctataatgaaagtatgccaaagtttctactaaagggagtgagtccctcttgtaaaacggtagataaggtctttactcctgacatctccattgtagaggcaaagaggatattataatgaatgtcttatggctgctgcttttagggttgatgatatgagttacataatacctagcaytcattctacttactgacactggccatggactacttggattgtagattcagtttcctgtgctcaggtcctgactctaactaaactgtttctccttagagcaaaggttaatcccatttctttgtattacctgaagcttgtacctcagaccattgcacaaagtaggtttctcaaaaatgtttaattaataaagatataagacatctattattttgtgtgtttaatacctctcaataacttctagctcagtgccaccttcccttatccacatggttacaatgagttggggcagccatgttcaaacactgagagcccagacccttgaccaaatccaaagatgatttgggggaaggcactaattcaagctgcacaaac

SEQ ID NO: 799333 - DNA, 624 bp, Homo sapiens
cttgtgccttttggcactggtcccattctacagggggattaagctccaaagtgaatgcgttattacatgcacacctgatgctattcctctgggttgtacctttgttggtatgacaacttttatttttgaagttttaacacttgagatactctatttttaaaaatactgcagaatgatggaaatgttctttttctgtggcttatacttttgaaagtcatattatacttcttaataaagtaacatttaaaatatttttttaataaactatgactctgaggtagtcctaacttctagcctctcttttcccaatatcctttttgttcctgttttcgtttttttagagacagggtcttgctctgtcacccatgctggagtgcagtggcacagtcataactcacttgaacttctggggtcaattgatcctctccactcagcctcctaagtarctgggattacaggcatgtaccaccatgcctagaaatttaaaaaaaaattttttttagagatgggggtctcactatgttgcccaggctagtctcaaactcctgggctcaagcgatcttcccaccttggcttcccaaagctctaggattacaggcatgagccactgtgactggcccccaa

SEQ ID NO: 799334 - DNA, 508 bp, Homo sapiens
ttaagatatttgggaaaataggccaaatatcttctcctaaggagaaacagccaatagagagggagaacttgaagatacagggtagtggggatacatgtgatggtggaaggtcttgggaaggatcaagaatgtttctcaattttagctacacattgaaatcccttgaggaactttgaaaaaataaatgcctggcccacttgcaagagattctcatttaattaaaacttgagaatgaagaatgagaaagaaggtgtaaatataggtaagtttgtaggagaggaaataaayttataatcaattttaattatccactagaagttctaatacctgcccttttgcctctactaagcacttatctgagtccattttctttgcttttagttggtagatacttagggaaggcaaattccattagtgtgactatgtccagttaggattatttgtatcctacctatgtagggtggaaggaactggaccaaagatgttttctaccatactacctacaaaa

SEQ ID NO: 799335 - DNA, 603 bp, Homo sapiens
gtttgaatatatcagtttatctgctctcctgttgatggacaactatccctttccagtttttggcaatgatgaataaaactgctgcaagtcctttggcggacatatactttcacttccgttgggtaaatacacagaagtgaaacaactggatgaacgaataggtgtatgtttacttttttatgaaaaacttgagggccttttcccaaagtggttgttcagtttacatcagcaatgttcagtggttgttcagtccatyggcaatgttgctccatgtcctctccaacatttggtgttgtcattttaattttagtcattctagtgtagtagtattctcaatgaggtcttaacattcatttctcccatgataacaatgttgaatactttatcatgtacttcttagtgattcatatatcttcttttgtaaagtatctgtatttttgagttgtaagagtattaagatacattctgaatataagttcagatatatgtgttgtgattattgtatcctggcctatggggtatcttaatggtatcttttgatgaacataaagttctaattttttgaaatctaatttatcaatatttttgttatatggttagtgc

SEQ ID NO: 799336 - DNA, 603 bp, Homo sapiens
gtttgaatatatcagtttatctgctctcctgttgatggacaactatccctttccagtttttggcaatgatgaataaaactgctgcaagtcctttggcggacatatactttcacttccgttgggtaaatacacagaagtgaaacaactggatgaacgaataggtgtatgtttacttttttatgaaaaacttgagggccttttcccaaagtggttgttcagtttacatcagcaatgttcagtggttgttcagtccatcggcaatgttgytccatgtcctctccaacatttggtgttgtcattttaattttagtcattctagtgtagtagtattctcaatgaggtcttaacattcatttctcccatgataacaatgttgaatactttatcatgtacttcttagtgattcatatatcttcttttgtaaagtatctgtatttttgagttgtaagagtattaagatacattctgaatataagttcagatatatgtgttgtgattattgtatcctggcctatggggtatcttaatggtatcttttgatgaacataaagttctaattttttgaaatctaatttatcaatatttttgttatatggttagtgc

SEQ ID NO: 799337 - DNA, 609 bp, Homo sapiens
aagcatttacaaggcattataacaaatatcttatacttggtaatctcgctcaaatcatctcaatgaccttctatgtaagggttattatctcattttacaaaaaggaaactgaggttcgaagatttacctaaggtcatataaagtctgactccagaagtccaattataccattttgtcatccttaaaaaagtgatttattggtctctgatactaagttattcttcagtgtattatattgctgttcttcataattccattaacaaattgggtgtcatttcagggcccagtattaaataatgatctttcttcctcagtttgctgtacacagggaaaagacagaaaaaaattcctatatgacaagtttttgtttgtrtccaattacagagttccataagactatgatttgaatattgtggtacaacttaaatttggcacattatttaattatccaaagtttattacatgtttgagtgcacattaaagagattatttggcataattgacaagataaaatttctgtaccttatttgactatcaggtgtatatgtggtatatttatgtatgtgtgtgtatagacacacatatactcctaaattaaatatatttgta

SEQ ID NO: 799338 - DNA, 603 bp, Homo sapiens
tcttatatacatttttaaaagtttattcttgggtgaaatatgtgtgtgtgcatatacacacatatacatgcgtgtgcatgcatgtatatgtgcatgtacatatgtatatacacacatatgcacacatgtatgtgcatatgcatatatacacatacatacacgtatgcatgcacacatgtgtatatacacatatgtatgcatatacacaygtatatgtatttatgtatatatgcatacatatatacacatatacacatatatacatgtatacatagatgtatatgtatggaatatgtatgatgtgtgtatacatacataacacacaaacacgtgtatatttgctataatttgtacttgcatcagatctttttcttcttattttattttcgaactgcttattaatagtaatattcagtcactcaacaaatacttatatgctactgtgtgccaggcactgtgccagacacaaggaccatactagtgtacaaaacagacacggtctatatatactattgatcatttctaaaatattgatcatccttgcatttctggaacaggttctgcttgggtatgaaatattattttagtatattgtactaatga

SEQ ID NO: 799339 - DNA, 603 bp, Homo sapiens
tcttatatacatttttaaaagtttattcttgggtgaaatatgtgtgtgtgcatatacacacatatacatgcgtgtgcatgcatgtatatgtgcatgtacatatgtatatacacacatatgcacacatgtatgtgcatatgcatatatacacatacatacacgtatgcatgcacacatgtgtatatacacatatgtatgcatatacacatgtatatgtatttatgtatatatgcatacatatatacacatatacacatatatacatgtatacatagatgtatatgtatggaatatgtatgatgtgtgtatacatacataacacacaaacacgtgtatatttgctataatttgtacttgcatcagatctttttcttcttattttattttcraactgcttattaatagtaatattcagtcactcaacaaatacttatatgctactgtgtgccaggcactgtgccagacacaaggaccatactagtgtacaaaacagacacggtctatatatactattgatcatttctaaaatattgatcatccttgcatttctggaacaggttctgcttgggtatgaaatattattttagtatattgtactaatga

SEQ ID NO: 799340 - DNA, 598 bp, Homo sapiens
cacagagaggtacctcttcacacctattagaatcaatagaattaaaaatactgggctgggtgcagtggctcatgcttgtaatcccagcactttgggaggctgaggtggcagatcacttgaggccaggagttcgagaatagcctggccatcatggtgaaaccccgttgctactaaaaatacaaaaattagtcgagcatggtggcaggcgcctgtaatcccagctacttgggaggctgaggcaggagaatctcttgaacccrggaggcagaggttgcagtgagccgagatcatgccattgcaatccagcctgggcaacaagagcgaagctccgtctcaaaaaaaaaaaaaaaaaaaaagagactggccgtacgaagtattggtgaggatgtgaaggaattagaattcccattcactgcgggtgaggatatataatggcacagccatttcaaaagcagtttggaagtttcttaaatgcttaatattaatatagctatcacgtaacagaaacattccactcagatatttacccaagaaaaatgaaatatatgtctgcaaaagacttgtgcatgagcgttcatagcagcttcatttggaatag

SEQ ID NO: 799341 - DNA, 589 bp, Homo sapiens
ttctgttcttttccctttttcttggtcagtggattagccaagattgatttttctgcatggctggggaaggcctaaggttaaaagataaaaaggtggattccttttaaatgtaatttagattttttttcccctgcccttagttctgatatcaaccacagaatcrcgtcaatgttccagaaacacctgggccctagctacagctgctggggtagggcaaacctacacttccagcatagcacagctggggcggtctaggcagatttgccatcaggtgtcattctctctctctctttctctccatctccccctccagcccccagctctttctgccaccctacccatttttttctctcttcttttctttctcctattctgcttgcaaaatgcagctagaggacacacatgtttattctactccattgttctttcaagtcagtgtgtatttatcttttgcaaactaaagagctcaagggagaactgtttctgagtctaccagatgacaaaaagagccaatcgattgagtcggaaagcctgtcaattcagcggaacatcttaggcatgagtggggtgtgaacaaaacaggattcaa

SEQ ID NO: 799342 - DNA, 704 bp, Homo sapiens
tgttaatttttgtctttcttggtgtggggaggaggacacaattgtcttttgtacatctatctcctgcttttaggcaaattgaggaaaggtaggtaacgttttctttatctgcctcctcccagttgcactcagttcaaaacaatttttatgttaaagagatatatttttgtaagcaatgagaaaaggactccctattttataaatggtgctgggatagctgactagccatgtgtagaagaataaaactggactcctacatttcaccatacacaagaaattaactcaagatgaattatttacatggaagatgccaaactgtaagaatcctacaagaaaacctagggaatattattctggacatcagccttgggaaggaattgatgactcagtcctccaaagcaattgcaacaaaaccaaaaattacctaattaaattaaagagcttctgtaaagcaaaaggaacaatcaacagagaaaacagacaacctacaaaatgggagaaaatgttcacaaactatgcatctgacaaaggtctaatatmcagaatccataagaaatttaactcaaaaagcaaaaaacaaataaccccatataaaaatgggcaaacaacatgagcagccacttctcaaaagaaaacacacaagtagccaacgaatgtgaaaaaatgctcatcatcactaatcatcagagaaatgcaaatcaaaa

SEQ ID NO: 799343 - DNA, 590 bp, Homo sapiens
cagttctgcctttcttgccccagggatccctgtggggtcgggctaaggccaagctttgcctcaaccacaccctggctttagctcttcccctctggcttcccgccctccctcacaggtgtctcctgaaattcctctttcaaaaaattcctaactgggcacagtgatgcatgtctgccrtcctagctacttgggaggctgaggcgagaggactgcttaagcccaggagttcaaacccagcctgggcaatttagggaaaccctgactctaaaaaataaaataaaatatttatttttaaaaaaatcatccaggctgggtgtggtggctcacgcatataaatcccagcactttgggaagccgaagtaggtgaatctcttgagcccaggagttccagactagcctgggtaacatagtaaaactccatctctataaaaaatataaaaattagccaggtgtggtggtgcacacctgtagccccagctacttgggagactgaggtgggaggatcacttgaacgtgggaggttgaggctgcaatgagctatgattgcatcactgcactctagtctgggcaacagaggtgggtacatgcag

SEQ ID NO: 799344 - DNA, 707 bp, Homo sapiens
ctaaaatgcttttccttagatgtcaatatgacttcccacttacttgggatccctgctcagaaacacattccttggccattcatgtaagatgcactttccactctcactctctgatattttactctgctttattcctccacctagtatctcacacacacgcgcgcgcgcgcrcacacacacacacacacacacacgactccctcctggcatctaccattattgtctccccctaccagcatataaacttcttgagatcaaggactttttgtttttttctcttctaatattgtaactctggtgccaaacacatagcagacgttatagaaatatttgctgaatgagtaagtaagtgaatttcaactttgagaaagtgtgggcctcccagggctgctcctgagccttgatctgcagagattaaaaaaaaaattataatagtgatgatgatggtaaggcccattacttgacctggagacacaagtgaggctatgtctctttagcatttaatctttagccctaacctacccagactaatgatgatctagtatttctctttgtgctgaattatgactgagcaccagggatttactcagtccagtggagtctgtcctgcttccagaacccctacagagagaacagaggatctgattagtcactagcagacttctgtatcccaatgcccttgatcctacagctgccacacagatggt

SEQ ID NO: 799345 - DNA, 658 bp, Homo sapiens
atcctatagcgctggaaaataaactatatctgtaggtgtgtggtgtgaatttgaggatgtggtaaacgggaaaagataaaagtggtctacttattgcttttcactttgcagagcatataatatgatttcccatggtacatatcctccattcattccctcagacctgactcagagtctcttaaaaccacccattcccctaagtgtctaccttgagcccactgccttcctgatttgcatcctaaagacagttgcccataatttaactaaccacattgttcctctccaaggaattccacatccagtggaacattgctccagtcgtaaggtaacgggacgccagagactatcttcctgtyagaatcttgagtcacccagggcacacgtgtcaacagggtttaaagctttgtttgtttgcctccccagacagacgttgaaacagaatctcccaccaccaaactgcctagacaaccaagcaactcagtaaccacttactaaagctaacagtcttttggcattcagtttcccaccagatgaattatagcatagtgtacagtgaattcattcagatcactgaatgttaaatgtggaggcccttagtaattacctagacaccattgtagcaggaagggaacaaaatgcaaagaatgaatgcaagcaa

SEQ ID NO: 799346 - DNA, 436 bp, Homo sapiens
tcttctgtggaggggccattcagagctgctatttgggctggctatttccactgttgttggcaacagcctgtattcctgggcattgacctgtcccctgctgctagggctgcagctgggcaactcaggtctctctctcctcttctctctctctggtatctctccctctttcccccaccctctcatttccccyagcctctcagctttatgagggcctgggatgcttactaattcagtcttctctctgacctctcaagtgccacagatacatcacctccagtctctgccctggtctctgtcctgtacctggctctcaccccttgctggagggtcctatggaaagtttactgcttctcaactcaatggctttccatgcctcctcagagtcatgtgggaaatttggggcacctcatcacagaaaatagaagtggctttgaaa

SEQ ID NO: 799347 - DNA, 632 bp, Homo sapiens
aaccaaggagatagctggatgtgaaaagtctgccatcactggatgtatgtaagaggacactgaacctgtggggcattctagaagggattcctgctctgtgggagggaaacttaactaggcaccagagtcccttgcgagtttataatttgacagttctgggtttcttatagcaaataccttgcacagtacagaatgcataatatatgcacagcaaaaacatgacgattattaccaaacattctgtgcccactaaagttgccatagagataattaattctcttcttacttctatgagtgtcttctttcttcatattgacactccattcattttatttctccctgcctgcagtagcccaggggatgtaasagccctgtttccaagcatgcgggaacccccagtgtttgacacaaggggggcttctaggaggccaggcttggcaatggggaagaatatggctgtagaagccatggaggggcacggcttggaccatccttcaagaaacaacttgccgtaggtgcaaggagtacagtgagctgactcctccagatactagctcctttaggactcatctcggctttcttgccgaggtctcagaagtcccagatagccccttgctaatggctgagcatgg

SEQ ID NO: 799348 - DNA, 574 bp, Homo sapiens
cacagggcaaaccttattcttctagttaaattccattatccccaaatagtaaagttataccatttccatcatatttcagctgtgcttcgggccctgaaggaaggagctcacatccatattagggataaagatatgcgtctgcagcctggaaaacaggatgctggagatgtccagctgagctcgagtggggcaagaatgcagagcaagtggcytgcaggggatgacacgccaccacttaagaaacctgtacacattcctcaggagtcccagaaatgccctagagaagagaactttcttgaagaatgcacttcctataatgaatatgacaccaaaaatgcaggcaacaaaaccaaaagtaaacaagtgggacgatgtcaaactaaaaagcttctgcacagcaaagaaaacaatcaacaatgtgaaaaagcaatctatggaatgggagaaaatatttgcaaatcatatgtctgataagaggttaatctctaagacatataaggaacccttacaactcagtagtacaaaaaaaaaaaaaaacaccctgataactcaatttaaaatgggttaagaactt

SEQ ID NO: 799349 - DNA, 574 bp, Homo sapiens
cacagggcaaaccttattcttctagttaaattccattatccccaaatagtaaagttataccatttccatcatatttcagctgtgcttcgggccctgaaggaaggagctcacatccatattagggataaagatatgcgtctgcagcctggaaaacaggatgctggagatgtccagctgagctcgagtggggcaagaatgcagagcaagtggcctgcaggggatgacacgccaccacttaagaaacctgtacacattcytcaggagtcccagaaatgccctagagaagagaactttcttgaagaatgcacttcctataatgaatatgacaccaaaaatgcaggcaacaaaaccaaaagtaaacaagtgggacgatgtcaaactaaaaagcttctgcacagcaaagaaaacaatcaacaatgtgaaaaagcaatctatggaatgggagaaaatatttgcaaatcatatgtctgataagaggttaatctctaagacatataaggaacccttacaactcagtagtacaaaaaaaaaaaaaaacaccctgataactcaatttaaaatgggttaagaactt

SEQ ID NO: 799350 - DNA, 574 bp, Homo sapiens
cacagggcaaaccttattcttctagttaaattccattatccccaaatagtaaagttataccatttccatcatatttcagctgtgcttcgggccctgaaggaaggagctcacatccatattagggataaagatatgcgtctgcagcctggaaaacaggatgctggagatgtccagctgagctcgagtggggcaagaatgcagagcaagtggcctgcaggggatgacacgccaccacttaagaaacctgtacacattcctcaggagtcccagaaatgccytagagaagagaactttcttgaagaatgcacttcctataatgaatatgacaccaaaaatgcaggcaacaaaaccaaaagtaaacaagtgggacgatgtcaaactaaaaagcttctgcacagcaaagaaaacaatcaacaatgtgaaaaagcaatctatggaatgggagaaaatatttgcaaatcatatgtctgataagaggttaatctctaagacatataaggaacccttacaactcagtagtacaaaaaaaaaaaaaaacaccctgataactcaatttaaaatgggttaagaactt

SEQ ID NO: 799351 - DNA, 601 bp, Homo sapiens
tgaagatgtgtacatatatttcctaagtattgttaagtgaacagagcaggttatacaattggaacaaaacaatccattctcattaaatatatattatacatatttatatatacacacaaagtcaatgaaatagactgaaaagatgcatatttaaagtaatagcagtagttgggattatgcgatttaattttcttctctatgcttttccacattttctaaactttctacaatgagcaatgattatttttatagagaaaaaagtttttaaaattatctatgcacaacaaggtttgaatggatttaaaagaaatagaggatccacttactcctcctcggtcaattatttctgcataagctttgccaaaccctgaaaatttcccaagagatccacagactcttgcaattccacaacatcaaaaaagtggcaarattcaataggaatgtaattactgtatatcaaacaccttctaggaggcaggcaccttgctgagctaagatacagcccttgccctcaagtagctcatgatcttgtgggaaaggaaacaaattcatacaaaaatagctctcatcccagtcagtctgataaagtcccattagcaag

SEQ ID NO: 799352 - DNA, 644 bp, Homo sapiens; identical to SEQ ID NO: 769271

SEQ ID NO: 799353 - DNA, 625 bp, Homo sapiens
ttacctggatcctcgagagagtggcattaaattataaaagtaataaactaaggataagattaagttgcagacagcatcagcctcctagaaaaaaaagatacagactcataaatactataaagattacaaactaatttttcattaggtgacagaacacacaagaataatctacatcaagaaraggattgttttcttcctcccccataagaatctacttttcaaattcttgaatattctatacccttttgtatcatttttttccaatttagttcaatttagagcaatgttttcccagctgtttcttaaactgcaactcttggataaacataaaaatctcagtctcctttaacgttatttgaaatgtcaaaatatatattgtgactaaaattttaaaaggcatttattaacaccaaatatgttctctcaaacaacatgtaccttaccccaaaagatctgggtaagccccttcccctactccgcattgagatttggatgatgctcaattatgtgtataaacttagatgtttaattatatggatgcagtgattaaatgttggagaaataaggtgacttttcaagggtaaggggcacccgtccactgcagaacacagagaaggggcgtggt

SEQ ID NO: 799354 - DNA, 498 bp, Homo sapiens
gaataccaatgaccaaccctaaaatcccaatgtttttgactcttcaattccacctcaccatactccactcaaaaattactctcagcaggctgcaatccttgaccccctatattatgcggtggggttcaaagtcaaccagctgaggtgccactaatctttgtccagtcaagcaggaggctgatgaactatgactgcagcaactgccttgtcactatttcacattctgggttgtatcasatgttgcttttcctgcaatgtgattttttttcttgattttatcttttaaatcaaaatttggcatctatacacaaagatgtcaaaattaacctgaaagataactttgaaccattaaaatagacaaattatcggacacagattagagtcttccatggtctttagctctgtcctctatggtaagaagagctgaatgacaacttctaagattccagatgctctttaagcccttttgtgtaacaacttttaactcatgagtcatga

SEQ ID NO: 799355 - DNA, 498 bp, Homo sapiens
gaataccaatgaccaaccctaaaatcccaatgtttttgactcttcaattccacctcaccatactccactcaaaaattactctcagcaggctgcaatccttgaccccctatattatgcggtggggttcaaagtcaaccagctgaggtgccactaatctttgtccagtcaagcaggaggctgatgaactatgactgcagcaactgccttgtcactatttcacattctgggttgtatcagatgttgcttttcytgcaatgtgattttttttcttgattttatcttttaaatcaaaatttggcatctatacacaaagatgtcaaaattaacctgaaagataactttgaaccattaaaatagacaaattatcggacacagattagagtcttccatggtctttagctctgtcctctatggtaagaagagctgaatgacaacttctaagattccagatgctctttaagcccttttgtgtaacaacttttaactcatgagtcatga

SEQ ID NO: 799356 - DNA, 527 bp, Homo sapiens
aatattttaaacaactttatgtcaacaaatcagacaacttagatggaatggaaaaaatcctagaaaaagataaattaccaaaactaccttcagagaatactgaaaatctgaatagacctatgcattagtccactgtcacagtctaataaagacatgcctgagactgggtaattgataaaggaaagagatttagttgacttacagttcagtatggctggggaggcctcaggaaacatataatcatggcggaaggtgaaggggaagcaagayaccctcttcacaaagcggcaggaaggagaagtgccagcaggggaaatacaagacacttataaaaccatcagatctcatgagactcactcattttcatgacaacagcatgggggagactgcccccaagattcaattaacctccacttggtcctgcccttgacatatgaggagtataaggattaaattcaaagtgagatttgggtggggacacagagccaaaccatatcaacctacaacatgaaacatatcataccata

SEQ ID NO: 799357 - DNA, 487 bp, Homo sapiens
aacctccaggagctagagaacaaagccaggggctcagtaccagctccccagagttagagcacacacatcaggagtgctgagctgtgccctggagccctaaaatcttccagaaatgaacccagtcaactgaacctaccttataccacaatcaaacccccaagataatcaaagatgataaagaaaaaaaaaagtcaatccattcagaggagaacaacttcaaagatrggaggaatatcacctcacacagatgagaaagagctagcacaagaactctggcaactcaaaaagccagtgtcttcttacctccaaataactgtactagttaaccagcaatgatttttaaccagaccaaaatggctgaaatgacagaaatagaattgagaatatggataggaacaaagaccactgaaatccaggagaaagttgaaaccctatccaaggaatttaagaaatacaataaaaatgatttaagagataaaagaaaaaa

SEQ ID NO: 799358 - DNA, 607 bp, Homo sapiens
caaaaaacagttgctatgtttgagtatggggaggaatcaaagggagagtgaggaaggttggtgggatctgagaggtgagaaatgtctgacaaagtttcctttccagaagtttgcatatgagttgatttcttattctgatctgtgtggattgkgacagggaattatttccttctagaaaaacctctgtagagtgttggttgtctttagctttagtttgtctcattttggtgcattttttatgcttctatccataggaagttggaaagggtcacatcccaaaactgaaaagcaaaaccaaagtctgcatatgaaactatgaggttgtgtgtctgtgtctggaagaaagttggaggtggataacgtgcaaggacttaaatagagtgcactttgttcactgctgccttcttcagatttgaagatcacagatggggtttgataacgtggtgccccagcccaagaaaagacgacaataaaataatgaaggaggaacctaagagcagctaagcatgcctaaagtaggaatatatttctagctcatttcttccccactcataactattgaaaagcagctggctgtttctttaatttaatcctttgtctatcttag

SEQ ID NO: 799359 - DNA, 623 bp, Homo sapiens
actctgctgttatagcataaatcagccatagacaacacataaatgaatgagcatggctggattccaataaaactttattttggacattgaatttgaatttttatgtgtcactaagttctttctttctctttcttttctttctttttttctttctttttctttctttcttmtctctttccttccttccttcttcctttcctttcttttccctttctctttctctctctctcctttctctctctctctctctctttttctttcttcttggtctcagtccatcacccaggttggagtgcagtggtgtgatcacagctcacagcagcctcgacctcctgggctcaagccatcctcttacctcagcttacaggcacgcaccaccatgcctgtctattattattattattattttgtagagtcaggttcttactgtgttgcccaggctggtcttgaactcttgagctcaagcaatcctcccacctaagcctcccaacgtcctgggattacaagtgtgagccatcacacctggtgacatttttttcaaccacataaaaatgtaaaatttactcttatgtcacaggtgttcaaaaacaagtggccaacaatgctagaatttaatatagtat

SEQ ID NO: 799360 - DNA, 546 bp, Homo sapiens
atattttgtttccctcttaatttctactttgaatgttgggttatttagaagtgtattaatttccaaatacctggatacttttctggatattgtgtttctattgctaacgaagattcctttgtaatcttcggaatttcggtctttggaattgcctgtgacttactttatggcccagcatatsgtctatcttggtgaacattccatgagcacctgaaaaggagttttataaatgtcaggtcaggatgaccaacagtgctgttcatatcttctatgttttttgtttgttttttaatatctagttattaatattgaaagggaatattaaaacctcaaactatgattgtgtatttatctctccctatcaatcagtttttgtttaatgggttttgaagctcttgtattaggtgtatacagttttgattgttatgtctttctgatgaatttgtcctttcatcattataaactctcctaccaaattgctttgtggtatcacttccccttcagattgaagaacttctttcagcatttcttgtcatacagatttgt

SEQ ID NO: 799361 - DNA, 601 bp, Homo sapiens
ttttttttttttttttttgagacaaggtatcactctgtcaaccaggctggagagcagtagcgtgaccacggctcactgcagcctcgaactcctgggctcaagcaatccttccacctcagccttacaagtagctgggaccacaggcatgcaccaccatgcctgcctaatttttgktatattttttttttaatagagacagggtcttgctcttgaactcctaggctcaagcaatctgcccacttccgcctcccaacgtgctgggattacaggcatgagccactgcactgggccctaactcttttctttgtaagagatggagcctcgttgtgtttcccatgctggagggccgtggaaattcacaggtgcgatcagggtgcattactgcctccaacttctggcttccagtgatcctccttcctcagcctccagagtagctggaactacaggcccgcaccactgtgcccggccacaaactaattttatctttggaaagcatagggataaagaggtataacagctattattactcatgtaaggaaagttaatacagatgagaatcaggaacttttattaggtcagattctggtacaagaaaactaat

SEQ ID NO: 799362 - DNA, 606 bp, Homo sapiens
ttttctgctcctctccctcctctcaccctctaccctcaagtaggccccagtgtgtgttgttctcctctttgtgtccattggttctctttattcagctcttacttatcggtgagaacatgtagtattcggttttctgttcctgaattagtttgcgaagaataatgacctccagctccatccatgctcctgcaaagcatacgatttcattctttttaatggctgmatagtattccatggtgtatatctaccacttaaaatgtggtagactggtctgccattcacgggcatttaggttgattccatgtctttgctattgtgaatagtgatgcaatgaacacacacgcatatgtctttatgacacaacgatttgtattcctttgggtatatatccagtaatgagactgttgggttaaaaagttccatttttagctctttcaagaatccccacactgctttccacaatggctgaactaatttacactcccaccaacaatgtataagtgtttccttttctttgcaacctcaccagcctctgttagttttttacttttttataatagtcattctgactggtgcgagatggtatttcaccgtggttttgatttg

SEQ ID NO: 799363 - DNA, 621 bp, Homo sapiens
atgatactgaaatgcacgtccgaaatgctgcctggagcttgtgaaggacagtcctgagtgagtgagttaacaggggcttcttaactgtgcctccctttgtttaatttggattaagtgattctctttaaattaaggaaatgcccctgtcaggactttaaaaatgttatatatatatacatatatatgtatatgtatacatgtataatcagaagatcaaaaagcatttttatctgttgacacaggtctaattcctgaggaatttgtaactctgccttgatacgcccaccrcacccccacccccacccccagctttggcattgaaattcttgtgtgtggtgcgcttgaaaggaatcccatcctgcctgcgtctgcggaggctcccggcccgtgtttggtcagcaagcaacagtgggtggtcgggctgctgtgcaggacaacggcccgctgtgcgcaggaaaatgtgttcaaaggtgtttaagggccatgaggaagtcggccacccttctgagagtctgaggctgcagatcagtgttccctacactattgtagactgtgagaaaacttgctgtagtaggcatgaaggatgagaaaatacagtaaccttactcacctggctccgcg

SEQ ID NO: 799364 - DNA, 588 bp, Homo sapiens
tacgtgtaatttgctctgcagatttgggcatgctttgaaactgtgtgccctcttctgaagagctagaggaaagcgcagggctgtaggaaggagcagaggagctggggacacttgcttcccttgccggtctgcaagtgaaacscagaagctggattgaattctgggaagagttctggggcttttgatagctatttaatctcacacaagaaagcatgatagtttttaaacacaatttatttgaattttcttatttttcttgttataaaactatcttgttgtattaagagcccatccgttaaaaatttagatgaagtttccaacagtttaaaaaatagtcagttcttcaagccagtgaaggccatgtgaaataacaaatgtgaatcaaaacagtgaaatcagccgttgctctcaccacaaagcagttttggtctgcgtgtgcaggaaagagttaaggtttctagttaacgaaatggttaatagtaggttaagatctcacctttagatatatcttaaatatagtgtatttttagataaaaatctttaaaacagccaaataattgatgaatattaagagtcagcattttaaaa

SEQ ID NO: 799365 - DNA, 623 bp, Homo sapiens
gaaactgcttaaaggggatcctcttcatgtgggacagaagatcagagaactcctaagacaaggggcgggctcacatcattccttggggacatctaagagtcaggactgaatgaaagatcattggtgaggtcatttaaaaataaatgtggccctttccccyggctggcagcgcagaggccgcaggatgcctggagttactgtaaaagatgtggaccagcaggagttcgtcagagctctggcagcctttctcaaaaagtctgggcagctgaaaatccccaaatgggtggccaagcataaagagcttgctccctgttatgagaactggttctacacacgagctgcttccacagcgcggcacctgtacctctggggttggctccatgaccaagatcgatgggggacatcaaagatggcatcatgcccagccacttcagtcgaggctccaagagtgtggcccgccaggttctccaagccctggaggggctgaaaatggtggaaaagggccaagatgggggccacaaactaatacctcagggacagagagatgtggacagaatcaccggagaggtggcagctgacaacaagaagcattagaacaaaccatgctaggttaataaattgcc

SEQ ID NO: 799366 - DNA, 583 bp, Homo sapiens
acaacagaaattaattttttttttttcacaattcgtgagtccagaagcctgagattaaggtgtcagcagggttggtttcttgtgaggcctctctccttggcttacagacggctgccttctctctgtgtcttcccatgatctttctcgatgtgtgtccgtgtcctagtctcctcttcctataaggacaccagtcatatggaattagggcccacccaaatgacctcattttaacttcattacctcttagaagaccctatctccaaatacagacatattttatctgttttattgtacttggctttattatgcttcacagaaactgcttttttcacaaattgagggtttgtggcaacccagcattgagcaagtctattggcatcatttttccaaatacatgtgctmacttcatggctttgtgtcacattttggtaattctcataatatttcagacttgttcattattttttctgttatgataatctgtgataagtgatactcgatgttactattatgattgttttggggtgccatggactgtacctatataaaacagcaaacttaattgatgaatttgtgtgttctg

SEQ ID NO: 799367 - DNA, 612 bp, Homo sapiens
gttactgttgtccatggtgccctgtgcatggaggctgacagcctctgacaggccctgcccttctgctgacccccaggctcgtgaagggaggcagaagggcactgcttataaagcataaaagtgggacatgccttcragcccagttttctaacctttgtcctcacaagattgcacaaatcacttggttccatgcctgaaacacatgcttcatgcacagggagagtctgtcatacttttgagggagtgttacccatctaggagcagagctgctgatcagcgcattttcctaggtacgcatcacaattcatgcacaaatagattctcaacacttggggctgagtattggaaggtagctggggaatgggacttcattttggcaacaataaattccattttttctagagttttctaaagaaattcatagaatcatcagaggcttgaatggtaagaggttaaaagatgaagtgacattgcacttaggctgtgtcagtgaatgactggctgaggcatctgtttccctgttttctcattgctgaaaaatggtatgctgccttttgcaaagtctttattttgtatctttatcttaaagtggaagataaagactttgaaaaa

SEQ ID NO: 799368 - DNA, 467 bp, Homo sapiens
gtctacccgtcccagctacagcctgttataaaaaggtggccatactgttccttccaaaatcgcccaatgcctcccgctgtcactcagagtgagtgaggttcccctagtggcccctaaggactgctgtgatcatggtctgtgcctctgcacctctccagcctcatctcctaccaccttgcctccctggctcacccactgcagccacactactgcctygcgcctacttaccgtcactctccatccgccaaatatggccatgtccgaattcccagaagctgcagattactttatgtgacaaacggacttgcaaatgtgattcaactaagaattttaaaatgaggagattatcccggattatccttgtgggtccaatctaatcgcaaagttccttacaagagaaatgcaaggagagtcggaagaaggcaatgggatgatggaaacagggcgagaagaggtgatgtgatgtg

SEQ ID NO: 799369 - DNA, 758 bp, Homo sapiens
agaagacccaatttcgttttctcagccttgaaaaaaaatcaatttgaacttgctgctggctgagttatatgttcaagctcagaccgagctgtaattggaaaggagtctgtcttttgtaatccccaggccaaaaggggaaatgaaaatctttttcaaatggcagagtaaggcaggaaatgttctctttattgtactcccataaaaaaataaacctacccagtaattataccacacacacacaatagtccaggccctcacccaggaagccacaacctgagatgaaggagtcagtggttattttcaaaaagggaatttttccaagccctaccatattttctctcacaagttcctttgcatttacaagagacagattgcccaccctgcttttctgcctgactggtggaagtcagacaacctgcatactggtcccagttgttctgcaagatgaatgtgcccttgagcaagtcactgtctcgatctggcattctgcacccttacctatgaaatgaagggacaactagacaatgcctacatctgaattctctgattctctttatrctcacttgttcattgggcacaaaggagtcagaggtgatccctgcttatgaaaagctctaatgtaaattctccactttatgtctaggagaaaaaactgaaagtggccattataaaaatacaaaactgccccattggtggactccaaaataaatgaggtacagaaattgttctttttcctctactggatcctttctgtaagt

SEQ ID NO: 799370 - DNA, 456 bp, Homo sapiens
ttgtagatgaggtgttactagaacacaggtatgtccatttgtttacatgttgtctacagctgcttttatactacaaaggcataactgggtagctgcaacagagactgtatagcctttaaggtctaagacattcaccctgtgactctttacagaggacatttgctgacctcaacctaggctatgagagctccaaggccattcaccaagtatattgtaaactccctgagagcagagtccytttggaacctcccatgggacctcacacagtgaggtacacaagagaatcaaagaatcaacttttagagctgaaagggacctcgggtatcattttatccaacccttttattttagagatgaagaaacccaagctgccagttgaaaataacagaatggcagaaagcagaaccaaaaatcaagtttcctaaactccactgtaatgctctattacttgacaat

SEQ ID NO: 799371 - DNA, 614 bp, Homo sapiens
acaagagtgaaactaaaaaaaaaaaaaaaaaaagaaaagaaaagatataatattccaatttcttcttcatgttttggtttgaatacttcggtaaaaacaaattttcgctcatcagctgtttggttgcttattgctacagttcgcatagggaaggcatgataaatgttacagtttttccctgtattttttatttattccctttactacttttatgtatgtatttatttatttaaaattaaaagttagctcaatatctttcaaaaatgacagtttttgtcactaatgaacttatagatccatacatgttttaatccgtgtgcaattattattcctactgatgctcagactgtccaattactgtgtcatttaaattatctttattctctagcttttccacatcatttttgttttwcttatttcaaatatcctggatttattttatagggatttttttctttggttttttaaaattagaaattcctctttttttgagcctttagtttcttttatctgccaaaggagtaactagttaccattatgaacacattatgtaatctctgtttattacaaatatactaatgtttaacccttttataaaaactagcataattttt

SEQ ID NO: 799372 - DNA, 629 bp, Homo sapiens
tttttttttttgtagaggtcttttaccttcttggttaaattaattctaagtattgtaaatggtgttaccttcttgatttattttccacctagtttgttgtttgtgtatagaagtgctaccgacttttgtgtgttgattttgtaacctgaaactttgctgaattagtttatcagtactaagagttttctggtagagttgaagtggtgtcattcctctagggtaatacccgaggttctttgcctcacaccaaggaaatcaaggacacagacacacaaggagtgaaattaagagcagaggttgccaggcatggtggctcatgcctgtaattccagcactttgggaggctgaggcgaatggatcacctgagatcaggagcttgagaccagcctggccaacaaggtgaaacgccgtctctactaaaaatrtaaaaaattagctgggcctggtggcgggcgcctgtaatcccagccacttccgaggctgaggcgggagaattgcttgaatctgggaggcggaggttgcagtgagctgaggtcgtgccattgcaccccagcctgggtgacaagagtgaaactgcagccccccacccccgtccaaaaaagagcagaggtttaataggtgaaagaaag

SEQ ID NO: 799373 - DNA, 617 bp, Homo sapiens
acatcttttatgcatgatgtccatattttggaatttttaaattactttctgatgataagttcttggaagcagaattactaggtcaaaggatacaaacccttagagtcctcttgggaaacagcacattgctttccagaaagttttatactcctgcaagcagtttatgagatttcctgtttcattgtgctcttatcaacatgattaggcaaagaaattatttttgctaacttgatagtaagaaaaattactctactactgtttcaattttgcctttgttaagtaacaagatgaacattttccatctgttttttatttatttatatttgctgtattgtgagttgtcttgtgtcctttgyccatttctattctgaaatcttcatgtttttcgaatcaatttttataagctctatgtttcagaagatattagatgattatctcttattttttactgtagatctttctatgtagatgtttgtattttagtctgtgcccttcttaatgttcagaagtttaccatttttctgtggtcaggtctgttatcatttcccatgggatttcttacatgacaaactcacagtgctcttcaacagcagtgattaaataaatattcagctatt

SEQ ID NO: 799374 - DNA, 641 bp, Homo sapiens
cctatagatataaatctttactcaggacttatttttgttaggtaattttgctaggtattaacaaagattctctttaacaaaactttattcaggctgccctgaggtctttttcaagtaggccttgacttttagacttccatgtttgtctctggattgtctaattttggaaggaattctgctaagtcagtttagctagaatctctcatctttgatatctgatcaccctctgtatcagattgggttcctcatgctccaccatcccataggtggtgtctcatcaccccagcctgccttcagcaagaatcttgtcacaatggcttagccagcatccccctttccactgatgtttcctcttagtcatttcccatctactagcccctaccctctccttggctataaattctcacttgcccatgctgtattcagagttgggcccaatctctctctcccctactgcaaaatcccattgcagtggtgtctataactattgcratagtcccccttttccttgaataaagtctgccttaccatatttaacaagtatcattgaataattttttccctttaacagtataaagttaaaagtagacaattattttagctcagtacttcgaaaacataatgccatttacttttggctg

SEQ ID NO: 799375 - DNA, 478 bp, Homo sapiens
accagagtttagtttcaaagaattacttgatgtttgccttaatttcattgttcacccaaaagtcattcaggagcaggttgtttaattccaagtaattgcatagttgtaagcaattttcttagtgttgattgtttattgcactgtagtccaagagtaagtttggtatgatttcagtttttttttatttgctgagggttgttttgtggccaatcatgtggttgactttagagtatgtgctatgtgcagatgagaataatttatattctgttrtttttggatgcggagttctgtagatatctattaggcccatttagtcaagtgttgagttcaagtcctgaatgtttttgttagttgtatgtctcaatgatctgcctaatactgtcagtgtcatgttgtagtatcccactattattgtgtggttatctacatctttttgtaggtgtttcagaacttgctttatgcatctgggtactcctac

SEQ ID NO: 799376 - DNA, 626 bp, Homo sapiens
ttaactataatggcaaattattcaaacattttaactccctactaaccttctccaaatgtgaaccatttactaaatgacagatttttttttttttaggattatggcttaacttactggtctcagttatatatcttctcattttgccacaaaatgctagtaaaaactttcatttagcaagtgcttacaatatgataggtatatttccaaatattatctttactctaaacaacagctcatgtttccaaaatggcagttccagatgtcagagatttttttgactaatccatgctgtctcagcatgttttctcatatcttgaaactccttctaacttcatatattatgagaaatcatgaaaggaacctcttatctgcccagaaaatctcaccatatctttgggaaaaagaaataatatctacctcattcgtaaatgttgtgattarttggccaatgtgtaatattaataatagcaaacatctatggtgcatgctttattatgtgagatgttgtattaagtgtttcaaacatctaatttcagttttcacaacttcatacaagtattttgttatcctcactttacagatagagaaatggaaactccaaaagattaagcaagaagcccatagga

SEQ ID NO: 799377 - DNA, 625 bp, Homo sapiens
aaatgttatgcatatgatataatgatctttagttcaaaaatacttactgtgcagatcttaatagaaaatctagagttttaccttcatggtgacatttgtcacttaactgggtgagaaagatgatatgaaagcattctcacatgggggtcatagtaaaataactgaaggagatacagatgaggccaataaaagcaaaaaatcccatatgatgaactgttcagatgtgtcagtaggaaagaataagttctttaaatacttatgtcagtattgttgctattttgtttttaatattaataaatattactmttttattttaatatttaattaatattaaatttttaaataatttttaaaaatttaaattatttaaatttaatttaaattatttaaaatatttttatttaaatatttaaattaatttaatttaaataattaaattaatttaatttaaataattaaattaatttaattatttaaaaattttaaataattaaattaatattaaattaatattaaatttaaaattaatattaaatttgttgaggctgcttttggaaatcaataacttgattttcattatcattttaaagaacataaggccatttattgatttaaggtgactcga

SEQ ID NO: 799378 - DNA, 630 bp, Homo sapiens
tttgggttttatttatttatttatttgccttcatcttatagttgagaagttgtagacagtcatataactaagcaaatggtgcatcaaaatttgagcccaggtagtctgaatacaaaatctggattactctaaacttgcaagatagaatgatgaattaattcttaaatattgtgtttgcatcaagtttgattttggtttaaggatagttttcatacctagaataaaaaacatttcctcctcaagtggaacatcactccttggttttagccatctttcatcagaatggaactaaaattaaaaaaatgaagttgctctatgatatgatcgtgacaaattttaacagtaatttttttcatatttaaaacttgataaaacttttttctgactgattttgaccatttaaaaagaaagccagatgttctctcatcattcatggcagaaaaaggtttttgtttattacattattayatgaaaatttatgcttatacaattgggaaagtttcaaaaatttaaaggtttgaatatgatacattgcaataattgtgacttaaaattttgtaatgaccaggtgacaccttttatgggaaagtgagaataaattctgatccctattatgcagggaaacagaag

SEQ ID NO: 799379 - DNA, 590 bp, Homo sapiens
agtagagaacagcacatgacagggaacttcggtggcctcctgagggtgcagcttcaaggaactaaattgtgccaacaaccaatgaaactgactatacataatctgtaccatcatttgtggacttggactttgaagttggcccagcatagcatgaattcttagctgtgtaactcagtcattgtatatgacttgggttawtttttgaagtcttcagtgaattagtgcctgcaatggaaaaaaaaaaaaaagccaaccatattaatagcctaacagtgttgctctgaggactggagataatgtatgcaaaatgtctggcacacagtagattctccattacagttattgggagggggaatgagtggaggtcactggcctcttcaagcctctgcctttcatctggtaataacacccacacattgttgagaagattaaataagataacagaaaggaaaatccttaaggtctcaataagtgctcattgaacagtggctatccaatgctcatactaccttttctctcataaatatacatgtacatatacatattttcacatatgtatatatttatatacctataaatagagagacaga

SEQ ID NO: 799380 - DNA, 590 bp, Homo sapiens
agtagagaacagcacatgacagggaacttcggtggcctcctgagggtgcagcttcaaggaactaaattgtgccaacaaccaatgaaactgactatacataatctgtaccatcatttgtggacttggactttgaagttggcccagcatagcatgaattcttagctgtgtaactcagtcattgtatatgacttgggttattttttgaagtcttcagtgaattagtgcctgcaatggaaaaaaaaaaaaaagccaaccatattaatagcctaacagtgttgctctgaggactggagataatgtatgcaaaatgtctrgcacacagtagattctccattacagttattgggagggggaatgagtggaggtcactggcctcttcaagcctctgcctttcatctggtaataacacccacacattgttgagaagattaaataagataacagaaaggaaaatccttaaggtctcaataagtgctcattgaacagtggctatccaatgctcatactaccttttctctcataaatatacatgtacatatacatattttcacatatgtatatatttatatacctataaatagagagacaga

SEQ ID NO: 799381 - DNA, 573 bp, Homo sapiens
atagcctcatcaacataatatcttttgactttttaatagtagccattctgactggtttgagataatatctcactgtggttttgatttgcatttctctgatgattagtgaggttgagcattttttttcttatgtttgttggctgcttgtatgtcttcttttgagaaatgtctgtttcctttgctcactttttaatggggctattgttttttgcttgtttgtgtatattccttatagattcttgatatgagacygttgtctgacgcatagtttgtgaatattttctctcatgctgtaggttgtcagtttactaaattgataatttcttttgccatgcagaagctctttagtttaattaggtctcatctgtctatttttgtttttgttgcaaatgcttttgagaacttagtcataaattatgtcccaaggccaatgtctagaagggtatttcctaggttttcttataggattttaatctttttatgtattacatttaggcattttatccatcttgagttaatttttgtatatggtggcatgtagttgttctatttttattcttctgcatgtagtaa

SEQ ID NO: 799382 - DNA, 573 bp, Homo sapiens
atagcctcatcaacataatatcttttgactttttaatagtagccattctgactggtttgagataatatctcactgtggttttgatttgcatttctctgatgattagtgaggttgagcattttttttcttatgtttgttggctgcttgtatgtcttcttttgagaaatgtctgtttcctttgctcactttttaatggggctattgttttttgcttgtttgtgtatattccttatagattcttgatatgagaccgttgtctgacgcatagtttgtgaatattttytctcatgctgtaggttgtcagtttactaaattgataatttcttttgccatgcagaagctctttagtttaattaggtctcatctgtctatttttgtttttgttgcaaatgcttttgagaacttagtcataaattatgtcccaaggccaatgtctagaagggtatttcctaggttttcttataggattttaatctttttatgtattacatttaggcattttatccatcttgagttaatttttgtatatggtggcatgtagttgttctatttttattcttctgcatgtagtaa

SEQ ID NO: 799383 - DNA, 663 bp, Homo sapiens
atggatcccactctttctccttagctcctggtggctgctggcactcctgggcatgacctggcttgcagcttcataactccattgtcacatggcgttccccccgtgtgtctctccttatgtggcacttttctttctgataaggataccattcatattggattagagcccacccgaatgtcctcatcttaacttgattacatctgtaagaccctatttccaaataaggtcatattcacagctactaggaattaagacatcagcctatcttcagagcagattacgattcagyccatatcaagcaccacagagccttgataataggtctcccctccctaaatctcacatcactcatctacgttcacagtcccttggggcacctcctgtgccagaccccacagccagccaagtgcagtccctgcctccatgaggttttggtcaaatgggaggatgcacattaaatgagtaacgctcaaggaaacgtgcacatgcagactgtggtgcatgctgtgaaggaatatacatgggacagaaaacctgccctttggactggggtctagaaagcctgccctgaggaactcacactccagctgagatagggaggccctgccaagggagaaatgcaggcaggaggggagagcagatgcacattctcagggagggaaa

SEQ ID NO: 799384 - DNA, 676 bp, Homo sapiens
cctttggatcccttcctctacattaaaccaagggagatcaggcatttctagctcactcacagtgggccatcttttaatccatatttcagctaaccaagcaaataaactattagaaccttttttaactccccaagctgcaacattaaatgcagagtgatatggtttggctgtgcccccacgctaatctcaacttgaattttatctctaagaattcccatgtgttgtgggagggacccggtgggaggtaattgaatcatggggcctggtctttcccatgctrttctcatgatagtgaataagtctcacaagatctgatgggtttatcaggggtttccgcttttgcttcttcctcatttttctcttgctgctgccatgtaagaagtgccttccaccttctgccatgattctgaggcctccccagccatgtggaactgtaagttcaattaaacctctttttgttcccagtttcatgtatgtctttaccagcagagtgaaaacagactaatacagtaaattggtaccagaagcagggtgttgctgaaatgatacccaaaaatgtggaagcgactttggaactgggtaataggcagagattggaacagtttggagggctcagaagaagacaggaaaatgtgggaaactctggaacttcctagagacttgttgaatggctttg

SEQ ID NO: 799385 - DNA, 612 bp, Homo sapiens
tcacatggccaggaactgcagctgtgatcagagacgaagcagaatcgtggtcacgtgggctcaggcttaggagtgactgcagctctgtgaaagtgaacttgcccagtgaaacatcaggtgtgatgagacacacaaacatgaagatgactgtcatgaggaagaagttttcatacagatccctggaaacaggaggcagggcaggctgtgcagggccacacggagaagtaccaggttggtcaggaggcagagggagcacaggggaaacatggactcgagtcttcactggggtttctgctggaagaaatgggtaagtccgggtcagcaggctgaggattggctggtttgaatcatttcagtgggctctagggtacaggggctgtccctggctgtctggtmcctgccctggggtgagggcaggtggatggtggcccagagtgcaagggccccagagaggaggtggtgggtgtgggctctgggtggattggtctgcattggaagggtgtgatcacagaaatttgctagcccaggtaggggcagtgcagtcctccagcgtcagcaagggtcagatgtcaaagcaccagaacacagaaaagacaggcctggttaagagca

SEQ ID NO: 799386 - DNA, 553 bp, Homo sapiens
ctgcaaacactgctattatctcatattattatctcctccatgggtcaggatctgctcagggtctcataaggcagcaataaggtgccagtcaggctgcggtctcacctggagctctgctaaggaagacccacttctgagcttattcaggctgttggctgagtttacctgcttgctctgggtcctggccaagcgggccctctgtcggccgctcacaacatgcaactggcttcttcaaggctggcagaacttctctgacctcagggaagacctcagtcacttttttttttctttgagacagagtcttgctctgttgcccgggacggagtgctctggtgtgatctcagctmactgcaacctctgcctcttgggttcaagtcattctcctgcctcagcctcccgagtagctgggattataggcatgcgccaccacgcccgactaatttttgtatttttagtagagatggggtttctccatgttgaccaggctggtctcgaactcctgacctaaggtgatctgcctgcctcagcctcccaaagtgctgggattacaggc

SEQ ID NO: 799387 - DNA, 619 bp, Homo sapiens
aaaacttggaaaccaatggaatagtccttttctaaagcaaagacctccagctcaaaaagtaccaggaatctaaggaaacctgttgacacagtatggtcattgacaggtaactgccacaagagggcaaaattctcaggaaaaggaatgatgttgatccaagtctgaaatctcacttttgccttytccacttagaatatcctttttcttttagatattgtcttgatttttcaatttaataagagctaacttataagagtgtggttatttctttggcctgaaatctctcccaccctttcctccctccctccccctgttaactcacattcatattcagttgtcacctaagatattatttccttagagaacctcacctccctggactaggtttgttccctgtgcactcactcccagagcatcttgcccttagccatcaaaatactttacactcttgaagtttctaacttctagattttaagcttcatataagggcaagggaccatgttgatcttttttgcagttcaaacctagaggccagcccagtgtttgagtcacagtgggtattcaataaacctttggtcaatgaataaattaatggtagattttagggggaaaacatctt

SEQ ID NO: 799388 - DNA, 596 bp, Homo sapiens
gtaacccgctggggtcccccttacatagtgtggaagctttgttctttcactctttgcaataaatctggctgctgctcactctttgggtccacactgcctttatgagctgtaacactcactgcgaagagctgcacttcactcctgaagccagcgagaccatgaactcaccaggagtaaggaagaactccagacgcrccaccttaagagctgtaacactcgccgcaaaggtctgcagcttcactcctgatgcagccagaccacgagcccaccagaaggaagaaactccgaacacatcctaacgtcagaaggaacaaactctggacacgccacctttaagacctgtaacactcaccgcgagggtccgcggcttcattcttgaagtcagtgagaccaagaacccaccaattctggacacagcatgaatattcataaggaggtggaaagaggtgttgctagtaagagtgttctaggtggtcctctgggtacacatgcacagtaactacatgctcgttcgtacatcacatgtctcattagcatcttaaatttccacccagggatgtgatttttttactattataatgagcagttagtttgag

SEQ ID NO: 799389 - DNA, 596 bp, Homo sapiens
gtaacccgctggggtcccccttacatagtgtggaagctttgttctttcactctttgcaataaatctggctgctgctcactctttgggtccacactgcctttatgagctgtaacactcactgcgaagagctgcacttcactcctgaagccagcgagaccatgaactcaccaggagtaaggaagaactccagacgcgccaccttaagagctgtaacactcgccgcaaaggtctgcagcttcactcctgatgcagccagaccacgagcccaccagaaggaagaaactccgaacacatcctaacrtcagaaggaacaaactctggacacgccacctttaagacctgtaacactcaccgcgagggtccgcggcttcattcttgaagtcagtgagaccaagaacccaccaattctggacacagcatgaatattcataaggaggtggaaagaggtgttgctagtaagagtgttctaggtggtcctctgggtacacatgcacagtaactacatgctcgttcgtacatcacatgtctcattagcatcttaaatttccacccagggatgtgatttttttactattataatgagcagttagtttgag

SEQ ID NO: 799390 - DNA, 596 bp, Homo sapiens
gtaacccgctggggtcccccttacatagtgtggaagctttgttctttcactctttgcaataaatctggctgctgctcactctttgggtccacactgcctttatgagctgtaacactcactgcgaagagctgcacttcactcctgaagccagcgagaccatgaactcaccaggagtaaggaagaactccagacgcgccaccttaagagctgtaacactcgccgcaaaggtctgcagcttcactcctgatgcagccagaccacgagcccaccagaaggaagaaactccgaacacatcctaacgtcagaaggaacaaactctggacacgccacctttaagacctgtaacactcaccgcgagggtccgcggcttcattcttgaagtcagtgagaccaagaacycaccaattctggacacagcatgaatattcataaggaggtggaaagaggtgttgctagtaagagtgttctaggtggtcctctgggtacacatgcacagtaactacatgctcgttcgtacatcacatgtctcattagcatcttaaatttccacccagggatgtgatttttttactattataatgagcagttagtttgag

SEQ ID NO: 799391 - DNA, 637 bp, Homo sapiens
gtgactaaatcacaagggaagacccctcatggatgggaccagggctcttctaaaaagactgggggagtgggtttgctccctctgactcttctaccatgtgaggatacagcaagaaggcccttaccagacaccagtgctggcatgttgattttggacttcccagcctccagaactataagaaataaatttctgttgtgtataaactacccaacctcaggtattttgctatagcagcgtcaatggactgagacatgccccaaacaaaaaaaatgtaagagaaaggaaaaggctgacaccgtgggtttcaatgcwggcttgagagccaggtgtctcaatagccatgtctgcacattttcagtccttgtagtgaacaagaggaatcttgggctggccagaatccataacaccttgttctggaaacagcacccagctttctttctttaaaaaaacaaaaaataaagatggggtcttgctatgttgcccaggctggtctcaaactcctgggctcaagtggtcctcccacctcaacctcccaatgtgtccagctttctttccaaggttccctgttcccttggagacaatcagctgggactgctgctccgcggcctgccctccccttgtctagaggtaggcatgc

SEQ ID NO: 799392 - DNA, 611 bp, Homo sapiens
tttaaagtccctgcacccaggcccggatccaatcccccacaacaagacctccccaacctcactgtgcctcaccacaggccctaccacgctacaagatgccctcccacaccctaccccagccctgccataggccccacctcattccaggcctctccagggccccaccccatcagaagctccaccccaggccatcctgcctcactcagcactcaacactcagctttgtatctcctgctgtgacctcctccatctccaactggggtcctggcattcctatgcccaaggtcccaccatgacccccgtcactctcacttcccagctgagtgaacctggacgaggcctcagttacctcctctrcaggatggggtgcctgcctgcacttggagatcagccttcccagctgctttgtggagtgcctgccacgtggggtgggaccacaaaccagagatacaggggtgcacccaggggactattcctggccaccaccctacaacacaatcccagaggccagctctttgcattttgtaggggattttcctactgactccccactcggtgtccccatggcatggctttatggtgtctttcctcctgttccaggactagctccc

SEQ ID NO: 799393 - DNA, 611 bp, Homo sapiens
tttaaagtccctgcacccaggcccggatccaatcccccacaacaagacctccccaacctcactgtgcctcaccacaggccctaccacgctacaagatgccctcccacaccctaccccagccctgccataggccccacctcattccaggcctctccagggccccaccccatcagaagctccaccccaggccatcctgcctcactcagcactcaacactcagctttgtatctcctgctgtgacctcctccatctccaactggggtcctggcattcctatgcccaaggtcccaccatgacccccgtcactctcacttcccagctgagtgaacctggacgaggcctcagttacctcctctgcaggatggggtgcctgcctrcacttggagatcagccttcccagctgctttgtggagtgcctgccacgtggggtgggaccacaaaccagagatacaggggtgcacccaggggactattcctggccaccaccctacaacacaatcccagaggccagctctttgcattttgtaggggattttcctactgactccccactcggtgtccccatggcatggctttatggtgtctttcctcctgttccaggactagctccc

SEQ ID NO: 799394 - DNA, 613 bp, Homo sapiens
gatcagtttttaaggacaacttagtgggtggggaaagccagtgagccagaaatgctgattggtcaggtcagagatgaaatcatagggagttgactcttcttgtgcagagtcagttcctgggtgggggccacaagatcagatgagccagtttattgatctgggtggtgccagttgatccatcatctgcagagtctgcgaaatattttaaacactgatcttaggagcagtctagggagggtcagaatcttgtaacctccagctgcatgactcctaaaccataatttctaatcttgtggctaatttgttagtcctacaaagacagtctaatccctaggcaaaagggggatttgccttgggaaaggcctgttatcgtctttgttttaaactataaactcaattcctcctaaagttagttcagcctatgsccaggaataaacaaggatggcttggaggttagaagcaagatggagttggttagatcagatctctttgactgccttggttacaattttgcaatggaggtttcaatccctccatttgggttttataacaccttaatcttaaggtgttggctaaagaagatggaaaaaggacaaaatctgctgtaacttct

SEQ ID NO: 799395 - DNA, 553 bp, Homo sapiens
atcaggaaacaggttattaaagtggggcctcactgaggttcttttgtgattaaggtgttagctgatgacaggttctcaaaatattttgtacagaggattttagagtaaaatctcacttgccaatgtttcggagagattgaaagttttttccttgagagaaccctggcttttccaggagaggccaggtgcttaggcccgaagagatcactgttttatttgagagaaaaaagatccaactctcagactttcacaatggaaactttctctstcagcctctttgttttggttttattctcaggaaggaaagcttcttcccaagagatggccaaatggcaaatggccaccagtagctcctggtttatatcctaccagcttggtgatctcagcggaaagaagactttttctccaaaagctctgaaaacagttttgaacttgagtccttttggtgcagcctgagttacatttctatggcatgagtggagtgatacacacacacacacacacacgcgcacatgcacactccttctcacacacacacacacacacacacaca

SEQ ID NO: 799396 - DNA, 653 bp, Homo sapiens
ttagatgtaaaaggaaatatcctaatggtttgcatatgtgctgtatgcttgtttgattcctttcctcttttttattcccttatagtgtgactataactggcatgattgttttctttttgttgagttgaccatttgatggaattctccttctctttgaattttggctgtacttatgatctctaacataaatggaattctagagaaggtaggaaatttttagttcacttagtctgcaactccacaccctaagcaagaattccctctataacattttggaaaatgttatttgggctctatttaatcctttcagtaaggtggtcttcatttcttcacagggcagccaattttgtacgtatgcattctttcttattatgagccaagttcctctcctgtattctccccctctcctactgccagcccattgctccttgtttggtgctctaccacacatgcraaatgtgtttacttcttctcccatgtgacagctgtttcagtgatttgggattagctttattgaagactttttataatcaagacatcaacacaacaattcttttaaccattcttctcactttctggttatcaatatttaagaatccaggttattttcaaaatgattacagggtagctctcatacttattaatcttgtcca

SEQ ID NO: 799397 - DNA, 606 bp, Homo sapiens
acaaacacacaatgtaccagaatctctgggacacagctaaagcagggtttagatggaaatttatacaactgaatgcccataggagaaagcaggaaagatctaaaattaacaccctaacatcacagttaaaagaactagaggactaagagcaaacaaattcaaaagctagcagaagacaagaaataactaagatcagagcataactgaaggagatagagacacaaaaaaacccttcaaaatatcaatgaatccaggagctggttttttgataagattaacgaatagatagactgctagccagactaataaagaagaaaagagagaagaatcaaatagacacagtaaaaaatgataaaggggatatcacaactgatcccacagaaatatgaactaccatcagagaatactataaacacctctatgcaaataaacyaggaaatctagaagaaatggataaatccctggatacatacacacccccaagatgaaaccaggaagaagtcgaatccctgaatagaccaacaacaagttctgaaattgaggcagtaattaatagcctaccaatcaaaaaaaaagcctaggaccagacacattcacagctgaatt

SEQ ID NO: 799398 - DNA, 629 bp, Homo sapiens
aatgacctcactgtatgtatgcctcttccttattgatttattcgattaaaaatatgttgagtcactgctgtgtgctgaactcgttccagatgttggagagagacagtgacgcaaaggaccagacctggttctcacagagtctacactccggtgtgaagggtctgaaagtatgtgggaagcgggagagaggaagaaagaggagcggaactgccgacccactctatgggaactctgtattgaaccatttgaggaagggccaggctgtttcccaaaagcagctgcaccattttgtatttcaccaaccaagcgtgtggggtgcaatttctctacatcctcgccaacacttctctaacattttgattgtagctgtgatgagatgcattctaaatttctgatataattacttctcaaacaaaaccatcgaatcatgtcaaatcaatctgacttaaaagaraaagtctttttttaattaagttaaaaatttattgacattctgattgtgaaaaactctaacattgcttttaatttatcataggagttacttcccaaaaatgttaatcacagctggattgaaagagtctttgggaaatggggcaatgttgtttatgtaggtataccacattataagt

SEQ ID NO: 799399 - DNA, 627 bp, Homo sapiens
gtgctaagtgaggaagctcaactattttctcgcaatggaggggagggggttacattctgctcccctattcgagtcaggtctggaaattccacatgaaagctaaacaggtcctttcggacccatgaaacatgccccttctgtgtgttcctgggctgagcactcacagggacagracggaaggatgccctgggcctggggtttaacaggtggctaagagcccgaggggataccagctttaactcttccctccctattctgcagaaaggacacttacaagccaaggttcattactcatctacttaaatatgtcaccactgtccttactggaaacattgtctttcttaatcagttattatgtattagcaaaaaactgtggacaggcattatgaggaagagtctggcttatgtcacctatttccatagagtccacatgagtggtgtagacccctgattctcccattttatcctgtaccagaattccctgaggagtctgttagcttcctggatcccacccccagagtttctgattctgcaggtctggggtgaggcccaggaatttacatgtctatgttcccaggtgaggctggtgttgaagaagtgagttcaagaacaatggtgacaggatgt

SEQ ID NO: 799400 - DNA, 627 bp, Homo sapiens
gtgctaagtgaggaagctcaactattttctcgcaatggaggggagggggttacattctgctcccctattcgagtcaggtctggaaattccacatgaaagctaaacaggtcctttcggacccatgaaacatgccccttctgtgtgttcctgggctgagcactcacagggacaggacggaaggatgccctgggcctggggtttaacaggtggctaagagcccgaggggataccagctttaactcttccctscctattctgcagaaaggacacttacaagccaaggttcattactcatctacttaaatatgtcaccactgtccttactggaaacattgtctttcttaatcagttattatgtattagcaaaaaactgtggacaggcattatgaggaagagtctggcttatgtcacctatttccatagagtccacatgagtggtgtagacccctgattctcccattttatcctgtaccagaattccctgaggagtctgttagcttcctggatcccacccccagagtttctgattctgcaggtctggggtgaggcccaggaatttacatgtctatgttcccaggtgaggctggtgttgaagaagtgagttcaagaacaatggtgacaggatgt

SEQ ID NO: 799401 - DNA, 593 bp, Homo sapiens
ttcagttttgcaactagaggactctgatgcatttttcactatgccaattgcatttttcagctccagaatttctacttgattctttttaattacttcaatctctttgttaagtttatataatagaattccgaatactttgtctgtgttgtgttgaatttctttgagtttcctcactacagctattttgmattctctgtctgaacggtcacatatccttgtttctccaggattggtacttggtgcgttatttagttcatttggtgagatcatattttcctggatggttttaatgctagtagacattatttgatgtctgggcattgaagagttaggtatttattatagtcttcactgtctgggcttatttgcagtctttcttcttgggaaggctttccaggtatttgaaaggacttcggtgttgtggtctaagcttcttctggtttgggcggcaccccaagcctggtaacacttgtttcctgcagacttgtagaggtaccaccttgatggtcttggacaagatctgaaagatttctctggattaccatgcagagacttttgttcctatcccttactttctcccaaagaaatggagt

SEQ ID NO: 799402 - DNA, 598 bp, Homo sapiens
aaaatgcccaggtgggtttgaaaggcataatcctattaccttactgcccagatttaccacttttttcaccaccctgctctgggttttgagcaggacccaggagcccagcagataacacttgctttggggcgtgtctgtacttgaattaccaagggaaggaagctaacaggaagttctcattgtgagttggtagctgatactgggatataattcccttcttccttctccacagcactgggctacttatgcccagggttcactgagatgtagtgtgtcccagctgcactttataaatacctyatttcaagggtggttgatacctttactcccaaatttctcaactggaacctatttgtaaggcatatagtcagagacaggaaaagtttttgattataggagaaaatccatgaatggcacagacctgagtggttcctctgagcatcaagaggccaaacacctgtttacaagaagaaaaattactgaacaaatggccttatccattacccatgttactgcattttcatgcctgactgaaccatatggttttcagtctcagttctcttcctacaatgtggcctttagaacttccttgaaggcc

SEQ ID NO: 799403 - DNA, 596 bp, Homo sapiens
tttttctatttttagtagagttggggattcactatattggccaggctggtctcgaactcctgacctcagatgatctactcgccttggcctcccaaagtgctgggattacaggcatgagccactgtgcctggcttttttagttatttaaggtgcattgttagattgtttatttgaagattttcctctcctttgatgtaggcacttataaacttctctctgagtactgcttttgctgtatcccataggttttggtatattgtgtttccattatcatttgtttcaagaaatttttaaatttccttcttaatttcttcattgacccactggtcattcaggagcayattgtttaacttcaatgcatttgtatagtttccagaattcctcttgttattattttctagttttattccattgtggtcagagaagatgcttgatattattccaatttttttgaatgctttaagacttttttgtgacctaacatgtggtctatccttaagcatgatccatgtgctgaggaaaagaatgtgtattctgcagctgttgaatgaaatgttccataaatatctattacatccatttggtctacagtgcag

SEQ ID NO: 799404 - DNA, 524 bp, Homo sapiens
tgtgggcagtcagtagtctccccgacttggggaaagaggaataagcataggatgaggcgtgagccttgagagatgggtggggcttggcccacttctgattcccctgcgtagaagatgtaatgagttttaacacttctttatatgtttttcatcagctacatctggtaccttggctggcattatgggaatgaggttctaccactctggaaaattcatgcctgcaggtttaattgcaggtgccaggtactttcattctattactcttctttaccatgtagagttcagtttattccccaggatacyttatgcattcaaaaccttacttgtttcaggatatctgatgctatgtatcaactgacatttgatatatacactaataggaaatgtttcaaaaacaatagctagtttaatgtcaaaatggcatgagtatatccattcaccgtggaaatgggtttgttctcatatttgctttccagtccatccaaactcctccctatatggtggcagaagttttagtgcaaagc

SEQ ID NO: 799405 - DNA, 620 bp, Homo sapiens
aattactattatcatttattaagcatattttgagtgccaggcacattatgtctactccttattacaattacacaaggtaattattatcatcttcatttcatgaaaagggaaacagaagtttagaaatgttatataatttgcccaaaatcacacactctaaattgctaagctgaagagtgaactgcaggagtgatggattctaaagctcttactctgtctacctatactttctcttacactacatactatacggaagtgtttccttttttttttttttttttggkactacgggagtctcacaatgttacctgggctgatctcaaactcctggcctcaagcagtcctcctgcctcggcctcccaaagcactgggattacaggcatgagccagttcacccaaatgggcaatgttttctaattattttgtgtgcattagtctctgctgaatttgttcatgaaatcagatactatataatttaagagttgtattcagtcactagttctggagatacaggagttgaggccaggtgtggtggcttatacctgtaattccagccccttgagaggccaaggtgggaggattgcttgaggttgggagtttgaaaccatcctgggcaacat

SEQ ID NO: 799406 - DNA, 644 bp, Homo sapiens
taagacttgtttaatgacctaacatatggtctaacctagaggatgctccatatgcattttagaaaaatgtatattctgatgttattgggtgaagtattctttggtctgttaagtccaattgatctatagtgttgttcaagtcatccatttccttattcaccttttacctggttgctttatccattactgaaattgggatatgaatgtctcccacgattattgcagaacttttttgmccttcaagtctgtcaatatttgcttcttacacttaggaactctcatgtttggtacatataaatttatagttgttacattttctttgtataacccttttatccttatatattgttttccttgtctcatttaacagtttcaaaagcttattttgtcttatattaaacatccctgttctgttttggttactatttggacagaatatcattttctactctttcactttaaacttctatgtgtccttagatttacagtgagtgtctcttaaagacagcacatagttggttcctgattttttatccattcagctaatctatgtcttttgattgaggagtttttatccatttacatcctgaataattactgaaagaggaagaactattttaatttgttgttttctgtatgtcatt

SEQ ID NO: 799407 - DNA, 636 bp, Homo sapiens
caagttctacttcaacattcttaaacaaatatagatgaaaacttttgtctctatttagacttcccactgagcttcattaattcatggctgtctggcccttttggtccccgctggaaggccatagctgtaatgatgagatacaaactcaactgaatattcaacttcacaacctggcaagatgcctggagcaaggcagtgacagctcgctattcacatttctatgtaaattttgacacttactaactgaaagagtagatcatctgatcattgcctccaagagcaactgtagagaaagcggagattctgatggagataagactttttcttagggtgcaaggcaaggtcagagagctatatttaactyttgccaaatctactaaagaggaagaatactatagtactccgtaaagatttgtgtttgaattatggtttgaggttgcattttaagctgccacattttatttttccttattatttgctattattaagaactttgagaactcttggctaaaaatcttctttaataagttccattaatatgatatatgtgatccagcttacacttctatagtcctaaatgggctagttactattttgaaccttgcatatatattaactcctttgcttctctattga

SEQ ID NO: 799408 - DNA, 610 bp, Homo sapiens
aggacattgaaatggaactgggtccctggaggacatgaaggaagctgaaacagagtgtgtgggatctaagaaggaaaaatttgtatttttgtgtacttttggttttcgatccttatactgatctacttgtatcaagaggaatagaataartcaagttgatatgagaaaaaagaaaagtgattttcaagggctttggagggggtgggggtacacaatggtgcaatcgtttctggccactcctgagccagcaaatgagaaaagaatcctcaggagtgttaatagcgcctggagtgctgtgtgtggaggatgagtgggctcaagctcagagatttgcttttgtgtttcatctgaaaccaatcagtaagcgaaaaagcagaaagctcttttggcatctattccaccattgacactgggagaaggaaagaggatttatacatagagacccccattaacactaatgaaaagtaggcgggtaaatcccatgtgtacgaggagcaaacactgtcctttgtgtgggggtaattaagagctaaagagagcttacagttgctcaccactgcacacatgctcctggtgaaagctccttcacagcagtgttgcagtggctttc

SEQ ID NO: 799409 - DNA, 599 bp, Homo sapiens
aacccgtcttgattaaaaatacaaaaaacttagctgggcctagtggtgggcgcctctaatcccagctacttgggaggctgaggcaggagaatcacttgaacccaggaggtggaggttgcagtgagccgggattgcgccattgcactccagcctgggtgacagagcragactctgtctcaaaaagaaaaaaagaagctgaaaacaagtgcctcttaaaacggaggccagatagttcattgagaagcataatcttttaaattctatgccaattaaatgtattgccagctaaaaatatttttttctaagttaaatatttatcagaccaagaatgaaactattaaaacatgtttggtaaaacacagtagattaccatgtatgtaaatctccaatctccctcagaacctccattaagaatgagtaattatttttaaaatcataaatccacacaaatgaagagaatgaatgggggagaatcatttgagtactatgagatataaataaaatgtgggaaattggagaacagatgaatagatggttagaaagccattcaaagctgaagctcacgcctccataagtagaggccaaattacaattcacat

SEQ ID NO: 799410 - DNA, 638 bp, Homo sapiens
caggggagaagctgcaaacaatttgtggtcatgtttaatctgctacatatatcaaaattgactctaatcttaaccaatttataagttaagtgaatttaaggtggcatcctcataatttttattaggaagtctgatggtagtttacactcatctcttcgtatctcaggtccctgtctccggtcactcatatttacttttaactaggggccatggtattttttttctaatttttgtatatgtctgtttctttacaacattgaaagtttcaataggagtagaactcatgtgatgttcactctcttatcttgcacaatgatttactaagtcgaaggtacaacaaaaagagcagaaaagttctcaatacattttccctaaagccattaataaggtaaaagaaagaggacagcaacaatgcaagaaggtgcatttgaaatattccaagtaagatatttyggaacatgtaaaacagtggttttgaaaatgcaggcaaggaaaacaaagaaaataacaaaatgtcaaatgttagctaattataggatagaaagtaagtttggtgtctgcatctgttaaagggaaaaaaatccagctatttcttgacttttaattattctagtcagcattttcattaggtttaattt

SEQ ID NO: 799411 - DNA, 658 bp, Homo sapiens
agcaccatgaaagcagactaatgagccttcctactccctactatagttaatgccttttcaaactgcatatattagctccagcacatatattcaaggatggcattcttccccacttccccaatcagatgacagaccccacacctaccctcatagtcccacagttccctatactgttcttccaaagtactaatcacaagttctaatggtatttgtaagagattatttgatgaatgcctacctcttccactatactgcagctctctgaaggaagggcaatatatgtagtgttattaaatgtgcctcacaaacctagtacatttcctggaacccagtatggacttaatatatattcattaaatgacagaatgattttcccattggtgccatctcatttgacaccataaaatgagaattataccttacaagctgtgacttcattggtatctccctcatggttatatttttwtaaaaaaaatcaacttgaggatttaatttaaacattgcagcaaacatccttttggggattttcatagtttggtcattcattcactcattcattccacaaacaataattgagcacaatggcttcctctccagggctctgttagttctgtccactctccaatctcagcattctacattttttttcaacaaacta

SEQ ID NO: 799412 - DNA, 658 bp, Homo sapiens
agcaccatgaaagcagactaatgagccttcctactccctactatagttaatgccttttcaaactgcatatattagctccagcacatatattcaaggatggcattcttccccacttccccaatcagatgacagaccccacacctaccctcatagtcccacagttccctatactgttcttccaaagtactaatcacaagttctaatggtatttgtaagagattatttgatgaatgcctacctcttccactatactgcagctctctgaaggaagggcaatatatgtagtgttattaaatgtgcctcacaaacctagtacatttcctggaacccagtatggacttaatatatattcattaaatgacagaatgattttcccattggtgccatctcatttgacaccataaaatgagaattataccttacaagctgtgacttcattggtatctccctcatggttatattttttwaaaaaaaatcaacttgaggatttaatttaaacattgcagcaaacatccttttggggattttcatagtttggtcattcattcactcattcattccacaaacaataattgagcacaatggcttcctctccagggctctgttagttctgtccactctccaatctcagcattctacattttttttcaacaaacta

SEQ ID NO: 799413 - DNA, 534 bp, Homo sapiens
gacccacactgccatcagcctttccacctttgtctgaggagataaaccctgtgctgcctgaggcaacagtgatggcctcccttgaggcagtttccaggcaaggtaaagttgattatcttcaggagccaccwccaacacccctgtttccttctagacctataactagactaaagtccaggcgagcctctagaggtgaggttgagagtgtgacccatgagatgttctacacccaaaaagaattgcttgagtttaaacagaaatctggagaacaggcatgggaatggatattaagggtgtgggataatggttgaaggaacatagagttggatcaggctgaatttattgatttgggcccactaagtagggattgttcatttaatgtttcagctgggggagttaaaaaaggttctaatagtttatttgcttgtttagctaaaatatagattaaaagatggcctactacgagtgagctagaaatgcctgatctcctttggtttaatgtagaggaagggatccaaaggcttaggaagattg

SEQ ID NO: 799414 - DNA, 543 bp, Homo sapiens
tatcccctccctgacccacactgccatcagcctttccacctttgtctgaggagataaaccctgtgctgcctgaggcaacagtgatggcctcccttgaggcagtttccaggcaaggtaaagttgattatcttcaggagccacctccaacacccctgtttccttctagacctataactagactaaagtccaggcgagcctctagaggtgaggttgagagtgtgacccatgagatgttctacacccaaaaagaattgcttgagtttaaacagaartctggagaacaggcatgggaatggatattaagggtgtgggataatggttgaaggaacatagagttggatcaggctgaatttattgatttgggcccactaagtagggattgttcatttaatgtttcagctgggggagttaaaaaaggttctaatagtttatttgcttgtttagctaaaatatagattaaaagatggcctactacgagtgagctagaaatgcctgatctcctttggtttaatgtagaggaagggatccaaaggcttaggaaga

SEQ ID NO: 799415 - DNA, 558 bp, Homo sapiens
gaataccctctcttcattgtttttcaaaatcatactggaagtcttagttaatgcaataaaacaagaaaaggaaataacagatttactgattaggaaataaataaaactggttgcaaatgacatgaatatatagaaaatccaaaagaactgacaaaattctcctggaactaatcaacaactacacatggtgaggttacatgatacaaggttaatatacaaaaggccaatattttctacataaatttagtcttaatgttrtcaataggttttttgaaactgtgactttaagtgaaacgatgtaacatcatttcatttagtatagttttgttaaaatgttcatgagagaaaaaaaatttttttaattcatatgtcctttcacttaaagttgcagtttcaaagaacctattaatgatgttaattgaagacttattgtacctgcaataaaattgaaatttgaaataaaaacaatatcatttgtagtagcacactccaaaaataaaatatgtagatataattttagcaaaatatttacaaggtctatgcaagaaaaaccacaaa

SEQ ID NO: 799416 - DNA, 602 bp, Homo sapiens
caagcagaatacctactatgtaatcaatgctttctcaattaataaatttgtagatggcatccaaagatcagaacttgggtatgggagttggaaatagaaatatttgagtatctggatgatgctaaatagccaggtcaaaaaatactaaaattatgtttcaatgttttctatgtatctagatcattgaactttgggtgaataggctcaattggaaaacttgggttaaggtgttccaagataggaatggaagttgaagattctgtagagtttgaggggctttataaaatagaggatgactataaagtaagtggagatttgagagatawaggaggcagtgctagtaccttcaagtctctaggttggaaataaaaaataaacaaataaaagagttatcttgttggctctaggttgaggagagtcaagaactccagattctatacccaaaatagtggtaaagcacaactaagcagatgtgatggagcctctaatctttcaccaatctcatatgtggatcaatactgaagcaattttgcaaggggattctacaaaacccacagcatggatgtggatatcaatttgcaaaagacctcacccccaactct

SEQ ID NO: 799417 - DNA, 626 bp, Homo sapiens
cacatctgtaatcccagcactctgggaggctgagtcaggcagatgacttgaggtcaggagttcaagaccagcctggccaacatggtgaaaccctgtctctactaaaaataccaaattagccaggcattgtggtgcatgcctgtaatcccagctactcgggaggctgaggcaggagaatcaatcacttgaaccaggaggtggaggttgcagtgagccgagattacgtcactgcactgcakcctggaaaacagagtgagactctatctccaaaaaaaaaataaaaagtcaaaaacagtgaaaaacaacagacgttggtgaggctgtggaaaaaaagggaatgagtatacactcctggtgggaatgagattcgttcagtcactgtggaaagcagtttggagatttctcaaagaacttaaaacagaactaccatatgaccctgcaatcctactactgggtatatacccaaagaaaaatagctcattctaccaaaaagaacacatgcattcatatgttcatggcagcgttattcacaatagcaaagacattgaatcaacccacatgctcatctgcagtggattcaataaaaaaaaaatatggaacatatacatcacagaatactatgcagc

SEQ ID NO: 799418 - DNA, 616 bp, Homo sapiens
taactaggaagcatttgtaggaaaaaagtgtatgtgatattaatcaagttttttttcttgcatttctattttgtctggagcaaacagtagctcaagtgagcacttaaaaatggcccagaaaacaaatgatcgaagtcttggcttttgagttccaaaataaagtcctaaaatttacagaactgataaaggtcttaaaagccttttrtttgcaagtgaaaagttttctctactttaaaatggttgtcttaaaaaaaacgcataaaattgtcattaggaaaattaattttaaaaagatctcaaataataaggagatatattactacaaagtagtctttactaaatttttttaaacattttgtcttttgcaaagtaaattttaagtttttttcctctaggtcatagttattcatttatctttctagtttttctactttattttgccaatagaactttagaaaacaattcatcagaaaaatctactttgctttgatagagatcctagcactctttaaaaaactgcttctataaatacacctgcctcttccaattctgtactattccttgttagatttcccctaactgaaatttctcctcatccctctttgcttaaataaat

SEQ ID NO: 799419 - DNA, 613 bp, Homo sapiens
caacctgctcaggtccccttccacactgtggaggctttgttttttcactctgcaataaatcttgctgctgttcaaaaaaaaaaaaaaatcaagggatttgttatggaagaaggggagaaggcatccaacttctgcagcaatctgtgaagtatgagcaccttgacgtggaacaaagccagcagcgttatctggcagttattcttacaaaaaacctccaattctcttccccacaacaacaggtcctctccccaccacccaaactcccgccctcagcctcmcttctgtcaaaatcccaccctgtcttgcaggcccgtgagggtccatttaaactaacagctattgcgatgtcacactgtccaggcacaagacacacaaaaataaaattatttctactctcaagaatctcactggaaagtaagagactgccaaattactgagtgtgaggctgtgcctggctcataagaaatgctcagtgagggccaggcacagcggctcacacctgtaatcccagcactttgggaggccgaggcggtcagatcacaaggtcaagagttcaaggccagcctggacaatatggtgaaactttatctctactaaaaatacaaaaattagc

SEQ ID NO: 799420 - DNA, 613 bp, Homo sapiens
caacctgctcaggtccccttccacactgtggaggctttgttttttcactctgcaataaatcttgctgctgttcaaaaaaaaaaaaaaatcaagggatttgttatggaagaaggggagaaggcatccaacttctgcagcaatctgtgaagtatgagcaccttgacgtggaacaaagccagcagcgttatctggcagttattcttacaaaaaacctccaattctcttccccacaacaacaggtcctctccccaccacccaaactcccgccctcagcctcacttctgtcaaaatcccaccctgtcttgcaggcccgtgagggtccatttaaactaacagctattgcgatgtcacactgtccaggcacaaracacacaaaaataaaattatttctactctcaagaatctcactggaaagtaagagactgccaaattactgagtgtgaggctgtgcctggctcataagaaatgctcagtgagggccaggcacagcggctcacacctgtaatcccagcactttgggaggccgaggcggtcagatcacaaggtcaagagttcaaggccagcctggacaatatggtgaaactttatctctactaaaaatacaaaaattagc

SEQ ID NO: 799421 - DNA, 630 bp, Homo sapiens
ggcactctacaaatgcctatggaataaatgagtgaatgtttaaagaatgaatttaaaaagggaaggaggagagtagaataataaagttagattatggtaagtcaccaaatacaaaagtaatttatgagaaatattttcattaagtataatttataaaagcaaaatcctacttacgtttcacataatccattggcatataaaatatctctcattcagaaatattttttcattctgagattaagacaacctcctgtagtgtttgagaattctggtttcaaagtctcatagctgtgtgatttaggttagtgtatctctaactttaatgtgcgtatgaatacctaagaatattgttatttgcatattctgattttgtgggtgtggggwgtagggtgcggcttgagaatctgcgtttctaacaagttcccaggtgatacggatgccgctggttcatggatagctaggctctagggcaaaagacacctatctctgcacctctgtttcgttaacttaaaaacaaaagaataataaccatgttttgctgggttgagaagataaatgaaataatacatgaaaagcactttaaacaatatctaccatctagaaaacactctttacgtgttatctattatt

SEQ ID NO: 799422 - DNA, 618 bp, Homo sapiens
cccagcatgagcgatgcagaagatgggtgacttctgcatttccatctgaggtaccgagttcatctcactagggagtgccagacagtgggtgcaggacagtgggtgcagcccaccatgcaccagccgaagcagggtgaggcattgcctcactcsggaagtgcaaggggtcagggagttccctctcctagtcaaagaaaggggtgacagacggcacctggaaaatcggatcactcccaccctaaaactgtgctttttggatgggcttaaaaaatggcacaccaggagattatatcctgcacctggctcggagggtcctatgcccatggagtctcgctgattgctagcacggcagtctgagatcaaactgcaaggcacaacaaggctgggggaggggcgcccaccattgcccaggcttgcttaggtaaacaaagcagccgggaagctcgaactgggtggagcccaccacagctcaaggaggcctgcctgcctctataggctccacctctgggggcagggcacagacaaacaaaaagacagcagtaacctctgcagacttaaatgtccctgtctgacagctttgaagagagcagtggttctcccagcacgcagctggagatc

SEQ ID NO: 799423 - DNA, 618 bp, Homo sapiens
cccagcatgagcgatgcagaagatgggtgacttctgcatttccatctgaggtaccgagttcatctcactagggagtgccagacagtgggtgcaggacagtgggtgcagcccaccatgcaccagccgaagcagggtgaggcattgcctcactccggaagtgcaaggggtcagggagttccctctcctagtcaaagaaaggggtgacagacggcacctggaaaatcggatcactcccaccctaaaactgtgctttttggatgggcttaaaaaatggcacaccaggagattatatcctgcacctggctcggagggtcctatgcccatggagtctcgctgattgctagcacggcagtctgagatcaaactgcaaggcrcaacaaggctgggggaggggcgcccaccattgcccaggcttgcttaggtaaacaaagcagccgggaagctcgaactgggtggagcccaccacagctcaaggaggcctgcctgcctctataggctccacctctgggggcagggcacagacaaacaaaaagacagcagtaacctctgcagacttaaatgtccctgtctgacagctttgaagagagcagtggttctcccagcacgcagctggagatc

SEQ ID NO: 799424 - DNA, 563 bp, Homo sapiens
ttgaccctgtcacttggctaaattctcatgattcccaagggccaagacttttttggccagggttcattcagttgaaagtgatcaacccaaactcaaaccagctatgccaaagaggaggtttctggagggattgggaagccagggtggagctggccaggtccaggaggacatgctgtgtcttgaggacttgatgcctccatctgcgctccttgtgcctgggaacacacactcagggaggtgctctccacacagtgggagagagaacagccccaagccctcattctgagcagggagcagagactccctctcccagagccgatatgtmaagtctatttattctttcaacaggatgcagggagcccctatcgtggtcaggcaccagggatacagccataaacaaaacaaatgtaaatcccatgctcttatggaataaaacgttctattggaagaagggtggagaacaaataaaaagctaaatgagtaggtaaaatgtatagtatgcaacatagtgataatcacaaggaaaataaaacaaggaagggagataagagtgccaggagtta

SEQ ID NO: 799425 - DNA, 655 bp, Homo sapiens
ggacagagtgatgttcatgattccgtctaattcctagcaacacaggctctcctgctcccatttcctggttttttgatgtgctaaataggaaaaaaaaatagatctccttggtgtctaggtgagacccctgttcccaacagtggtctataatgtcttctttcataatagctgttcatataagaataatttgtttcatgtttggtatcccaccagactgtcagctatacaagggcagggcccatgtctactttgcttacttgtgcacccccaatacttacacagagcttggcacatagtaagtacataataaatatttgttaaatgcatgaataagtggacaattacaataagcagtatgtacagctaccaacgtgtttccttttctactagacccttttcttacatgcactgataggatctattagtagccagagaatgacagatatgtcatatcttgtgaactttctaggtcacctccattttgtgagtatatcagggaagacraattctataacaaacaattccagaatcctggtgttttaacatagtaaaagatcatttctcatgcacatcacaatacagtatgcactggtgttggagagtgaagcagggtccatgtcctggacaacctactcacagaggaacctgggcttct

SEQ ID NO: 799426 - DNA, 580 bp, Homo sapiens
catgtacaatatgtatctgccaatttttggacctttctgactcaccattgttctgtattaaaaattcatactgcacaccaccttcacacatggatttctctctctctctctttctttctttccctccctccctctcttttctcttttttctytctttctttctgtctgtctttctttctttttctttcttttttttagacaggatctcgctctgtcacctaggctggagtgagtgctgtggcacaatcatagctcacagcagccttgaactcctggccttaagccatcctcctgcctcatcctcccaaggggaccacaggtgtgcaccaccacaactggctaatttttttttttttttttttgtagagtcagggtctccctatgttgcctaggctggtctcaaactcctgggcttaagcgatcctcctgccttggcctcccaaagtactcagattataggcataagccatcatgcccagccacccatggatttctgattatgtggcccaccatggaaataactcgagtaccccttcaaatcttgctctgatctaaccagtaattaatcctgttacttaga

SEQ ID NO: 799427 - DNA, 580 bp, Homo sapiens
catgtacaatatgtatctgccaatttttggacctttctgactcaccattgttctgtattaaaaattcatactgcacaccaccttcacacatggatttctctctctctctctttctttctttccctccctccctctcttttctcttttttctttctttctttctgtctgtctttctttctttttctttcttttttttagacaggatctygctctgtcacctaggctggagtgagtgctgtggcacaatcatagctcacagcagccttgaactcctggccttaagccatcctcctgcctcatcctcccaaggggaccacaggtgtgcaccaccacaactggctaatttttttttttttttttttgtagagtcagggtctccctatgttgcctaggctggtctcaaactcctgggcttaagcgatcctcctgccttggcctcccaaagtactcagattataggcataagccatcatgcccagccacccatggatttctgattatgtggcccaccatggaaataactcgagtaccccttcaaatcttgctctgatctaaccagtaattaatcctgttacttaga

SEQ ID NO: 799428 - DNA, 659 bp, Homo sapiens
cctcagttacactttccccactatcttgtaattaattttttcatatctgtcctgtcactagcctatctgtactcccaaccagggcatatggcagggatggcagggtctcaacatttatttcatggaactggaaattctcccagtgtgtcatggtggtatacatgagaaccattaggatgtctacagggaagaagatccaccaaaagaggagtttggatgttgctggatgaagggataaagcatggtcctgaagttgatggcagtgacactcctgcagcctgaactagagcygtgggttctcaataggatggcaggaccacccaggggcttttaaaaatggaggcggagtgcagctggcatttagtactcaggggccacagtggaagtaaagtcctgtgcaaagaagaatgctctcgtccaaaacgccaatagggcccccagttagaaacactactcaaggataaaatgtgttttctctgtgaagactgaaaatgggctgggcgcagtgactcacgcctgtaatcccagcactttgggaggccgaggcaggcggatcacgaggtcaggagttcgagcctggccaacatggtgaaaccccgtctctactaaagatacaaaaaattagccagatgtggtggcacgcacctgtaatcccagct

SEQ ID NO: 799429 - DNA, 659 bp, Homo sapiens
cctcagttacactttccccactatcttgtaattaattttttcatatctgtcctgtcactagcctatctgtactcccaaccagggcatatggcagggatggcagggtctcaacatttatttcatggaactggaaattctcccagtgtgtcatggtggtatacatgagaaccattaggatgtctacagggaagaagatccaccaaaagaggagtttggatgttgctggatgaagggataaagcatggtcctgaagttgatggcagtgacactcctgcagcctgaactagagccgtgggttctcaataggatggcaggaccacccaggggcttttaaaaatggaggcggagtgcagctggcatttagtactcaggggccacagtggaagtaaagtcctgtgcaaagaagaatgctctcgtccaaaacgccaatagggcccccagttagaaacactactcaaggataaaatgtgttttctctgtgaagactgaaaatgggctgggcgcagtgactcaygcctgtaatcccagcactttgggaggccgaggcaggcggatcacgaggtcaggagttcgagcctggccaacatggtgaaaccccgtctctactaaagatacaaaaaattagccagatgtggtggcacgcacctgtaatcccagct

SEQ ID NO: 799430 - DNA, 631 bp, Homo sapiens
ggcttaaagagatctaaagtggtttctaaatatcggcattcttgatgcctcaaatcgtttaaactttcagggtgaatcttaaagtttttgaaaattaaaaaaattatacatatatattttgggttgatacataatgttttgcatatttgatggttacatgtaatttaaatgcaacgtactctagtccacctaaaactccatggatccaacacctacggattcttgaacgtgtgtttctaagttgtccattgttcaagtttcccgtttccatttaattcttgatccatcagatcttgtctctagctacaggtcaccgctttccacctcaccccaccctaaatgtcccagctcccttattcattaattccataaaactcctgttaatacagggctttctcgaatatayggatataagttctgaaggttcgagggtaatagcaagatcacattccacttgacagagaaaagatttttaaatgaatgttagacaatgctgtttttaaaaacaccaaggccatttctgttgctgggaatttcttactggctgttcactcccaccacgtgttataggcacctgatattgcctccagcctgttagtctctggaactacttatagcttcacctcactcc

SEQ ID NO: 799431 - DNA, 631 bp, Homo sapiens
ggcttaaagagatctaaagtggtttctaaatatcggcattcttgatgcctcaaatcgtttaaactttcagggtgaatcttaaagtttttgaaaattaaaaaaattatacatatatattttgggttgatacataatgttttgcatatttgatggttacatgtaatttaaatgcaacgtactctagtccacctaaaactccatggatccaacacctacggattcttgaacgtgtgtttctaagttgtccattgttcaagtttcccgtttccatttaattcttgatccatcagatcttgtctctagctacaggtcaccgctttccacctcaccccaccctaaatgtcccagctcccttattcattaattccataaaactcctgttaatacagggctttctcgaatatacggatataagttctgaaggttcgagggtaatagcaagatcacattccacttgacagagaaawgatttttaaatgaatgttagacaatgctgtttttaaaaacaccaaggccatttctgttgctgggaatttcttactggctgttcactcccaccacgtgttataggcacctgatattgcctccagcctgttagtctctggaactacttatagcttcacctcactcc

SEQ ID NO: 799432 - DNA, 623 bp, Homo sapiens
acctccttttatttaaaaaaactgtttaattatcacatttgagtgtcttctttttctggcacatgcagctatgtagattaaaggggtaactgtactttaaaaaaaatcaataaatcagacttttcattacttcktctggtctcttccttatccctttggtccaaatgtattatgcagtattgaaatatggtggtaattcatgagggctaataatctcatgtattgagtacttaggtgctagagtttggcatgcattgtctcatttaatctttattattacccacctggaagataagtattattatctcaatcttccacacaagaaaactgaagtacagatgtgtgaaggaacttgcccaagagcccacagccggcagcctgtgtgggactggagcctgcattcttcattctcagtgcaaaatcaaacagtgaattcctggggtcagagcagttggtcttaaagtgggtcaccttccctgcttctactggttgtttctccctttcctgattgccttctctcttccttctcattttcttgtttgcgactttgacttcacctcatcactcttcaccctttgtcctttactcagccttctactgtctcatgagctggattttctcct

SEQ ID NO: 799433 - DNA, 623 bp, Homo sapiens
acctccttttatttaaaaaaactgtttaattatcacatttgagtgtcttctttttctggcacatgcagctatgtagattaaaggggtaactgtactttaaaaaaaatcaataaatcagacttttcattacttcgtctggtctcttccttatccctttggtccaaatgtattatgcagtattgaaatatggtggtaattcatgagggctaataatstcatgtattgagtacttaggtgctagagtttggcatgcattgtctcatttaatctttattattacccacctggaagataagtattattatctcaatcttccacacaagaaaactgaagtacagatgtgtgaaggaacttgcccaagagcccacagccggcagcctgtgtgggactggagcctgcattcttcattctcagtgcaaaatcaaacagtgaattcctggggtcagagcagttggtcttaaagtgggtcaccttccctgcttctactggttgtttctccctttcctgattgccttctctcttccttctcattttcttgtttgcgactttgacttcacctcatcactcttcaccctttgtcctttactcagccttctactgtctcatgagctggattttctcct

SEQ ID NO: 799434 - DNA, 633 bp, Homo sapiens
caggactgagaaattctgtttctttatggctgctggctggatgtcagcctcagctcctagaggccaattatcattccttgtcatgtgaggaagcaacatggccatttgcttcttgaaaggtaacaaggaagtgagagactcctggacaagtgctacagttttatctaatataatcacataatgatatatgccatcacttttgctgtatttcattggttagaagcaagtcacagttcatgcttacaatcaagaggaagggataatacacatatgtgactaccaagaggcaggaatcctggaggccaccttaagatatgtctaccacaatgactgagtagggtttatttccagaattcaaggatggtttgacattaaaaaatcaatcaatgtgactcattaaaaaactattaaatatacaagaaaaaccataagttcatcttcataagtacagatttttaaaaatgaaacctcactccctttcctrgtagaaacagtcatctgggaatagaaatgcatttctttaatctgataaaagacatctgagaaaagcctccagctaacattatgcttaatggtgaaagaatgatttttttctaagttttaggagaggggaagagagagtgtgagtgataa

SEQ ID NO: 799435 - DNA, 591 bp, Homo sapiens
agttccccttatgtacagttttgttttctgcagttgcagctatccacggtcaacagtggtccaaaaatagataaaaatagtatagtacaataaggtattttgggccaggcgcagtggctcatgcctataatctcagcactttgggaggctgaggtgggagaattgcttctgctcaggggcttgagaccagcctgggcaacaaagtgagaccctgtctctacaaaaaatataaaaaattagctgagcatggtggygccagcctgttgtctcagctagtcaggaggctgaagtgggaggatcacttgagccgtgggaggtggaggctgcagtgagccgtgatcgtgccactgcactccagatggggtgacagagcaagacccagtctcaaaaaagaaagaaagaaaagaataaaaaagatattttgagatgagggagagagaccacattcataaaacttttattataatataattgtattttattatgtcattgttgctagtctcttactgagcctaatttataagttaaacttgatcacaggtatgtatatataggaaaaaacatagtatatatagggtttggtattatctg

SEQ ID NO: 799436 - DNA, 532 bp, Homo sapiens
tttgggggtgtcaggggtcaggagttgaagcatgggaagtgggatgccagaggcagagacagccagaaggaataagtggtggctgggaggaacccacagccagggtggagacttcccgttaaaacagcccgttatcctggcaggaggsagagtgcattcctttcccccaggagataaggaggccagattttcctttctcagggctcctttctagggtaggctagtgggggctctgtgggctgggctggggccaggtccctctggacccctctgcagggtcccagctggagcagctggagctcctggcactcatccaagactccctgcagccttggacaagcactgccgcagcagtggcagcacaacgtttgaatcccagttgcctctctgtgcctcagtttccttccctgaaaaaaatccatctacctcatagggtagttgtgaggcttcaatgagttaatacggtaaagcacttggaatgagtggtatgcagcggaagtagacagcactgttctcaccccaagatgcctct

SEQ ID NO: 799437 - DNA, 625 bp, Homo sapiens
aaaagggaaatgagtgctgtgaatcaccaactattagtccaaagtgggacttatctggagttgttcttagtggagaattcattcctgatcgaaagctattgatgggcatggtggcatagacctgcttgtctatggaagagaatgctggctgatttgggagggtctggttatcagtcacaaagttaaggctcgggctattcaaataggcatcattttggctagttctgtccaaagcctgctgcagaaacttggagtattcctgcaacatgttggctttatctgatgaggatgcttgggagcttgatccaacattctctgayggggtgacctctggtacttctgaagaatttattgatatgctagaagtcacttcagtatctgcaacactgaaggatatctcatgctgtccattagctttgtgggaataatgatccaacagagtctgcagtacctcatctggaataacatttttgtcatgattactcttaatctccacattcagtgcctgtgactctaatatggatgccgtggtactttcatcaatgacacttgccacagctgcttgtgttacagaaggctgagaagctatggtacccacattcagcgcatattccctgctgttgtt

SEQ ID NO: 799438 - DNA, 571 bp, Homo sapiens
aattggagccgtcaaagtctgatttccctgggttaggatctgggcagcacccttggtctgtatagatttagtcattcctagaaatgtgaggtcttcgtggctgtgtcagtctcttctaccacagagctggtatgaaagctggggttgaaatctagtcattcccacagactcaatctgttgttttttttttttttctccatatctgtgcatcttcacacttgttcaaggctgggattctcacaagggcatgacctggtcacacatggctcagcccgcagagtggcaagaccatcagaggctgtgaaaactttgatgccgaagttctgcctcccaggaccacacagcagcctcaaaactcagagcccagagatgagctctggaaatctgrtgtcgtctggcaaatgacaaaaccccacagcagccatgtcaaggccacctaaacaagggcttcctctgcccttcccaacctccttagcaaaagggcagagcttttcctgctggacacaggctgccgctaggaagtctacctggatttaacacaaggaggagcaaaatagaccctaatgccctc

SEQ ID NO: 799439 - DNA, 584 bp, Homo sapiens
cacactgatggcctggccctgagatactggagacaaagcagccggcaccatgtctggcacatgaactcaaacacttcacttcctctggtgaaccttggccagccccatccatgattcagtgacgaaatgccttctcactctgaactaaattcatttgcacggtttctagcgtgctttgtatttttagtccttttccacacatggcctctcccattggatggcacactccctcatcacagcactacagctcagccacatgccccgtgagagcatgatgaggcagccggctggggtctctgcctggcccggggcctggattatctctgtatgtggccaccatttgcatgtgaaaatcacgtctggctcacaagtctgtgrcccaaacaatagtctctttcaccctgagcatacggtctagggatgtgaagggaaatttcccttgcttctctgagaatatgtgccacttttctgaaaaattaaaaataattggagttacgaagttgggtttttttttttttttggcaagagtaagcaataatgattaagaaaagtggttcatcaactgttaccctgctcttagtcct

SEQ ID NO: 799440 - DNA, 628 bp, Homo sapiens
aggagttcaccaacaggattagaagaagaatggtccaggcacagagatggtatgttagttcgtttggtgtcactgtaaagacatagctgaggctgggtaatttataaagaggtttaattggctcagggttttgcaggctgtacaagcatagtgccagcatctgctcagcttctggtgagacctcgggtagcttttacccatggcagaaggtagagtgggatcaggcatgtcacatagtgaggggggagcaagagagagaagggagaggtcctagactctttcaaacaacttgatttcatgtgaattaactgagtgagaactcactcatcaccgaggggatggtgcraaagcattcgtgagggacccacccccatgatccagttacctcccaccagaccccacctccaacactgggaatcacagttcaacatgagatttggacaaacatccaaaccgtatcccatgatttgagaataattggcagcatgacaccacataggaaagtggctggaatagcggccagacaaggccggtgacattttgaaaagctctgtcacactaaggagctttaacttcataccttcagaaaaggaaatattttataagcagggaagagattcaatcaaat

SEQ ID NO: 799441 - DNA, 628 bp, Homo sapiens
aggagttcaccaacaggattagaagaagaatggtccaggcacagagatggtatgttagttcgtttggtgtcactgtaaagacatagctgaggctgggtaatttataaagaggtttaattggctcagggttttgcaggctgtacaagcatagtgccagcatctgctcagcttctggtgagacctcgggtagcttttacccatggcagaaggtagagtgggatcaggcatgtcacatagtgaggggggagcaagagagagaagggagaggtcctagactctttcaaacaacttgatttcatgtgaattaactgagtgagaactcactcatcaccgaggggatggtgcaaaagcattcgtgagggacccrcccccatgatccagttacctcccaccagaccccacctccaacactgggaatcacagttcaacatgagatttggacaaacatccaaaccgtatcccatgatttgagaataattggcagcatgacaccacataggaaagtggctggaatagcggccagacaaggccggtgacattttgaaaagctctgtcacactaaggagctttaacttcataccttcagaaaaggaaatattttataagcagggaagagattcaatcaaat

SEQ ID NO: 799442 - DNA, 602 bp, Homo sapiens; identical to SEQ ID NO: 793012

SEQ ID NO: 799443 - DNA, 613 bp, Homo sapiens
tatcttattaattaaaacaacataatatgaaattctaacttcttaaattacattgtaacatttctctcaggccaacagggatctcttttggtggttttgttataaatatagcttccactctgttatagtaccttactatttstaatgcaattataagccaacaaaatgtaggatttgattgagattcactgacatattgctaagcatatactaagttgttgcagtggtcccaagaagatggatggacttatcattccttatcatgtcgcttcctgcttaaaattcttccatggcatcctgttgcaatgaaaataaaatccaaactccttatcttggccaataaggccggggaacatcttggccctgcctccctttctgacctcatctctggctctctcactctcactctgctccaggcacactggctctatctccctgtccttatcacgagctggttctggctgtaggatctgtggactggctgttttccctgctactgggagaatactctgcaccaggtctttgcatggccacctgcttcttgtcgttcaggtctcagttcaggtatcccctctgaggagaggcccaacctgaccccccttcttcacatcac

SEQ ID NO: 799444 - DNA, 583 bp, Homo sapiens
aatttccaggggtccagtggtgtggggcctgttgagatattccttctaaggtgaaggaaaagttgctgcatttcgcccctcctacaaccaagaaagaggcacaacgcctggtaggcctagtaagattttggaggcaacacatccctcatttgggtgtgttactctggcccatttattgagttacccaaaaggctgtcagttttgggtggagtccagaacaggagaaggctctgcaacaggtccaggctgctatgcaagctgctctgccacttgggccatgtaacccagcagatccaatggtgctagagatgtcattggcagttagggatgctgttggagcctttggcaggccctcgtaagggggcctctgctgttagcggaggcatcaggattttggagtaaggccctgccatcttctgcagataactgttctccttttgagaaasaggtcttagcctgttactgggctttggtgaaaactggatatttgactatgaatcatcaagtcacaatgtgacctgaactgactatcatgaactgggtgctttttgacccatctaaccataaagtggtcctgcacagc

SEQ ID NO: 799445 - DNA, 679 bp, Homo sapiens
cagaagatagaagctcccccatacagagacagagggaggggggctccaaagccaagagaggaaaccccaagtggggcagaaaccagccaggtgtgtatatatagaggctggaggaggcagtgtatatatagaggctggaggaggtggtgtctgatttgcatagggcccaggggattggtttgaccaggcatatcattcacgtagcctgcaaaaaagctggccctcccaccctagccttttaatatgcaaatgcagggcaccaagatattctacacacgtggggctatgtgggggtggccatgttgccaggaacatgtggggcaagggcaagaaggccgagggaatcgccatgttgggtagactcagtttctaatggacttcatttgtatatcaaaggttgccggcctggctctcagagctgcggctttacaagaaacttttccgcagatgctttwaaaaatgaaaacttcccaaggactcctttctctctatctgcttaaaataatttcttaataactcctaccacattcctccctgtggcgatatcacactaactgctgttacagggttttggatgatgactctttctggctacttcctgctgaaaaggggtgttgaatggggaacagcagctagggcttctcctggggtggatctaagggtccccagaagaatggcg

SEQ ID NO: 799446 - DNA, 635 bp, Homo sapiens
cgcaggacccgttcactttcccctccgagcttacttgtctttctaccctaaggggctgctgcggccagagcagcctatctgagcagtaagttaggtggcctttagttgggcttctctcttctggggtgcctccagcagcctgtccccctggctggtgtcatcagatcagctctctttgcacatttagacactgcaaggaggccagctggtgttaatctagttttatcagaaattctcacctgctggagtaaaaagagactgcctgcccctccctctggcggatatgaagatcctcctgagccagcatgcatcttgatccacctttttttttttttttaagtggtgaggtaaacgccaccctatggtcttttgaggaaacaaatgcattggtgccaggtgagaggggctgcaccaagtcwctgctgcacgaggaaaccaccttgtgggagaccagccccaggagacagcagctgcccacgcatgtacctgtgtgtaccctccctggtctcccttcactaggtgcctttcccagccttagccctgctgcattgacagcatcggctgcagggcaccgtccattccgctgacccctggctccttgccctggggatccagcttttccctttgtgagatca

SEQ ID NO: 799447 - DNA, 328 bp, Homo sapiens
ttctgtatctggcttatttcacttagcataatgttttccaggttcacccacgttgttgcaaatgacagtatttccttcaaaaagagggctgtttttccctaattgtcctgtaaacctcctggagttgaatgtcgttggcscggcttgagttatgtgcccttccctgtgtaatcactgtgacagggcaatgagacgcttggatcggccagacctgtatcatgtgcccaccttgggaattgggggccaaggtcagtcccacccaaattcatggcctgagcatgggggagacgaggaccccaaaggaagctatgcgcactgtttccagaag

SEQ ID NO: 799448 - DNA, 632 bp, Homo sapiens
gttgtattactcttgtatctaaagcgttcagaaattatcaatttttcattaatccaaactgggcctcttaacaatttctactatgcacagatgtatttaagaagaaattagatggaattatatattggattgaagtcactgttgcatttttaggttgagatcacttcctgtgggagagatgggggagratatggggttggcggtgcttgtagaattgcaagcattggccagacgtcgtggctcacacctgtaatcccagcaacttgggaggctgaggcaggtggatcatgaggtcagcagttcaagaccagcctggccaacatggagaaaccccgtctctactaaaaatacaaaaattagcagggcgtggtggtggatgcctgtaatcccagctacttgggaggctgaggcagagaattgcttgaacccgggaggcggaggttgcagtgagctgagatcatgccactgcactccagcctgggtgacagagcgagactctgtctcaaaaaaaaaaaaaaaattgcaggcattaactgcatgtggcaaactgagtcatcactagacaaccattgcattatccaggaactctattagtaactattatctaaaagcccaccaaaaaacagctagag

SEQ ID NO: 799449 - DNA, 623 bp, Homo sapiens
gccctatagaagaggggcctgactgttaaaataaaaacaaacagaaatcaacgacaacaacagcatcaacaaaaacattcccacaaaaaccctatccaaatgtcagcaacctcaaagatcaaagctagataaacccatgaagatgagaaagaaaactaaaaacacggaaaactcaaaaaaccagagtgcctcttctccaaatgatcataacacctctccagcaaaaactgggaggaggctgagatggataaattgacagaagaagccttcagaaggtgggtaataatgaacttcactgagctaaaggagctaagttctaactcaatgcaaagaagctaagaactatgataaaacattacaggagctgttaaccagaataaccagtttagagaggaacataaatgasctgatggagctgaaaaacacaacaggagaacttcgcaatggagccacaagtatgaatagtcgaataaaccaaggggaggaaagaatttcagagcttgaaggctaccttgctgaaataaaacaggcagacaggattagaaaaaaaaatgaaaaagaacaaacaaaacctctgaaaactatgtgattatgtaaaaagaccaaacctacgactgattggg

SEQ ID NO: 799450 - DNA, 617 bp, Homo sapiens
attgctacatttagacaactgacatttaaagtgattagtgatatagagggacagcttgttttttttttggagtcttgctctgttgcccaggctggagtgtagtggcgtgatcacagctcactgcaagctctgcctcctgggttcacgccattctcttgcctcagcctcctgagtagttggaactacaggtgcccacccgcaatgcccagctaattttttttgtatttttttagtagagatggggtttcaccatgttagccaggatggtcttgatctcttgacctcgtgatccaccygcctcagcctcccgaagtgttgggattataggtgtgagccaccgcgcccggccagggatagcttgttttatggcacttcactttgttgtgctttgcagatagtgtgttttttacaaatcgaatgtttgtctttttaaaaaaaatcaaattataaaaaaatttataaaattattaaaaaaagaaaaagacagggtcttgttatgttgcccaggctggtttcaaactcctgggctcaagcaatcttcctgcccttccctcccaaagtgctgggattacaggcatgagccaccgcacccagcctttttttttttttttttttta

SEQ ID NO: 799451 - DNA, 617 bp, Homo sapiens
attgctacatttagacaactgacatttaaagtgattagtgatatagagggacagcttgttttttttttggagtcttgctctgttgcccaggctggagtgtagtggcgtgatcacagctcactgcaagctctgcctcctgggttcacgccattctcttgcctcagcctcctgagtagttggaactacaggtgcccacccgcaatgcccagctaattttttttgtatttttttagtagagatggggtttcaccatgttagccaggatggtcttgatctcttgacctcgtgatccacccgcctcagcctcccgaagtgttgggattataggtgtgagccaccgcgcccggccagggatagcttgttttatggcacttcactttgttgtgctttgcagatagtgtgttttttacaaatygaatgtttgtctttttaaaaaaaatcaaattataaaaaaatttataaaattattaaaaaaagaaaaagacagggtcttgttatgttgcccaggctggtttcaaactcctgggctcaagcaatcttcctgcccttccctcccaaagtgctgggattacaggcatgagccaccgcacccagcctttttttttttttttttttta

SEQ ID NO: 799452 - DNA, 617 bp, Homo sapiens
attgctacatttagacaactgacatttaaagtgattagtgatatagagggacagcttgttttttttttggagtcttgctctgttgcccaggctggagtgtagtggcgtgatcacagctcactgcaagctctgcctcctgggttcacgccattctcttgcctcagcctcctgagtagttggaactacaggtgcccacccgcaatgcccagctaattttttttgtatttttttagtagagatggggtttcaccatgttagccaggatggtcttgatctcttgacctcgtgatccacccgcctcagcctcccgaagtgttgggattataggtgtgagccaccgcgcccggccagggatagcttgttttatggcacttcactttgttgtgctttgcagatagtgtgttttttacaaatcgaatgtttgtctttttwaaaaaaatcaaattataaaaaaatttataaaattattaaaaaaagaaaaagacagggtcttgttatgttgcccaggctggtttcaaactcctgggctcaagcaatcttcctgcccttccctcccaaagtgctgggattacaggcatgagccaccgcacccagcctttttttttttttttttttta

SEQ ID NO: 799453 - DNA, 607 bp, Homo sapiens
ttagtttttgttccttttataggtgtttatcataagtggcttagggcttagatatgaactttctgtgttcatattctatatgtgccatgctacttataatctaaattttccttttgaaggtctttattaaaaaaatttagtatagcaaattaagtgtgtactaaagttattttcctccagttttctatactaaggagcttaaatgttaataaatttctcttaagttatattctacatctgacaaagaaaaattctctcttttttttttttgtgacaaagtctcactctgttgtctaggctggagtgcagtggtgcaatgttggctcactgcagcctccacctcctgggttcaagcgagtcttgtctcagtctcctgaatagctgggactacaggtgtgcaccaccagtctcggctaatttttatatttttagtaragacgggggtttcacattttggccaggctggtcccaaactcctggtctaaagtaatccacccgcctcagcctcccaaagtgctgggattacaggcacgagccactgtgcccagctgaaaattcttttaagggaaagatgagtcttgatgtgtttggtcttcaaatatgtggg

SEQ ID NO: 799454 - DNA, 605 bp, Homo sapiens
tgggatcctggttccttcagatctcagctccttgcttcctcaggaagcccccgactctatgccagggaatatctccctattatcaggactgggtacctccccttctcagacaatgtccttatttctttctttcttttcttttctttcttttctttttttgagatagagtctygctctgttgcctaggctggagtgcagtagagcaatctcagctcactgcaacctccgcctcccaggttcaagcaattctcttgcctcagcctcctgagtagctgggattacaggcacgtgccaccacacctggctaatttttttttttttttttgtatttttagtagagatggggtttcatcatgttggtcaggctggtctcaaactcctgacctcgtgatctgcctgccttggactcccaaagtgctgggattaaaggcatgatctgagcccggcccttatttctctgttgggtttttcctctaggagagtaggcactggacacttcctcagatgtacacgttggtttctgggagccgtgttgaacctgctggccttttccattccctggactctaccgctgggaagctgatcagggctgtgctacttccttg

SEQ ID NO: 799455 - DNA, 562 bp, Homo sapiens
cctcagctgaagttcgctcgatttggctgactttttaccattccttttacatcctacttctcctgtttacctttcggcccaacccatccctttatcagccaaagctgtgccaacgctctcctcctccctcctacccctctaagggttcttcctcgcagccagaggaagcacactyatccctggtttccaggttgaagaaattcagctgcacttccattcctggtcctgagcatggtgagggacaggacaagtcgggaatacttgtcagctcccttctagggcagagaatcagtgatgttattatgagaaaacagaggggtaggagcagacttgaaggatgcaggatggtgagctgagggagggcaggcggagtgtgagccactaggagacaaccagggtgatgacgaagaagaggatggcagtgacagccactaatctttgttgagaactgaccaagggactctccaaagtgctttctattgctctgtttgatccacaaaacaactggctgcggttgtgttttctctcctattttacaggtgaagacactaaggctcagaga

SEQ ID NO: 799456 - DNA, 598 bp, Homo sapiens
gttaccaaaactctgtagaggccgcgttctttcttaccacagtgagcaataaacagctttgtgttatcaacagcttgtgttgatgttatttggggaaccagcattcaacagagaaattcaataagtattgcggaatggtgagtggatgtgcagatggatgggtaaagatggatggatggatggatgggttggtgggtggatgggtggatatgtggaagggtgggagggagggagggaggatagatrgttggatggttggatggttggatggatggatggatggatggatggatgtgggtggatggatatgtgagtagatggattagttactggattcctaccaatgctgataaagcaggcttcgggtctggggtgaggcaaggctggggtaggccccatcctggtctcatgagcacagaagtctgtttggtgagagaagcagcattccctctgcaaggaagccccttgaaattataaaaattaattctcaaatagcaaatcaagatgatttcagttgaaatttgcaactgaaaagccccatttgaaaacagctctagagatggctgcccgtcccaacttgatatgatgcgtgtagatc

SEQ ID NO: 799457 - DNA, 651 bp, Homo sapiens
caacccaaatgtccatcagtgatatactggataaagaaaatgtggcacatgtacaccacggaatactatgcagccataaagaatgagttcatgtcctttacaggaacatggatgaagctggaaaccatcattctcagcaaactaacacaggaacagaaaaccaaatgccacatgttctcactcataagtgggagttgaacaatgagaatacatggacacaggcaggggaacatcacacaccagggtctgtctgggggttgaggggctaggggagggatagcattaggagaaatacctaatgtaggtgacgggttgatgggtgcagcaaaccaccatggcacgtgtacatctatgtaacaaacctgcacattctgcactaccccagaaattaaagtataattaaaaaaaaaagtggggggtggtaatagaccytgttacctaaagattgttatgatggttaaattaaaactcctcacccctgtcaagctggaatgtagcccctgttaacttgagatcccccttctttggctagctaacttctgctctcccaacagaatcctatctttcatgtctcatctcccaggacacccccctccccaccgggcctgggaaggattaggagggccctgtccagtgaattccttggccttc

SEQ ID NO: 799458 - DNA, 641 bp, Homo sapiens
tatattttatgatgactgcttctagtaaacttgatcatttaagttagtcaagcagcttaaaattatttaatgcaggtatcacagagtaagaaaaaattatcaagtgttatcacccattctgctttatacttgctttaaaattttttgctttttaaatatataaatgtattgacagatttaaattattttccgaatttttgtcaaaattagaataactatacttttatgcatagttcctcttttgatgtgaacctccagatccaggtgtgacaaaaaacccaatctgcttgtatattttgatatatctaacaaagtctatcactatgttttgaaagattttgtacgccagactacatttattaaattggtattttccttccatatttagaagctacatccccaractgtaaatggcttgagattagaaaaaaaaattttttttactttatactctaatatcaccattctgtggctggcacacagtattcaataaaggtatgtataagggactgtataacttccaattaacgtttctgatcagcatgagacaactgtggtaataaacttagttgatatcattcaattagaaagcaaataaatttgacattttcattagcttgtacggccctagagtgggtaaa

SEQ ID NO: 799459 - DNA, 622 bp, Homo sapiens
tatttcattctaaaatgtaagatgtccagatacctcatggagatggcttggcaaactactaaagagagttttcgaaagcagaaggtcctgtcaggagccaagactaacattcataaggacttctttaatatgtaaggctaatctataggtgacaaaagaaaggaaaaatatgaagaccagaatgacaacataagagcaaagaaacaacctaaattgttgtagtttggaaaggtaaactcacatactcagtctacaaaactcagaaatgactgctcagaatcattatgtaaataaatggtgtggtcaaggtgagaatgagtaagaacctggcagaaagctcagttaccaaccgcattaagaaaaggcacaatattcaaagagaaagacacttttctctacgttttytcagtgctgagcttccattaccaggtcatataggtattgggagatttccctattgtgcagaatgttggaaagaagggttgcacttaactttgatttcctgacactttcaagattgcttgaaacatgtttaaatatttaatatgtttaaaacactgttgtatcagaaactaaaaactcatttcaaagctggcaacaaaattatgctttatatacaggc

SEQ ID NO: 799460 - DNA, 587 bp, Homo sapiens
gaaacaaagagcttcatgcctaggagagtgaactttcgaggttgttactattttgcttgtttggttcctttggttctagctcttaatgtctaatgtaaaatactccaaaaaaaaaaaagcattatctcactcttctgtataagtaacatatctctaagttacttatggaacttagttaggatatgttggaagttcccctacatttttcctacgtatattgttttcgataaattaactttgttaccttcaatttcttcattacaaaaatttcaatactgtaagtagagggaaaaccaccgaatatttgctttattatctatccaaaacactgcatagaacaatttggtctctatactgattaataatttaaaagtattacagtatttgggtgtaattccagacttatatgayatataacaagctttacaagagaaaagaaaaatctggagttaatctgaatatttatgatatgtaaatctgtgatgacacaaaggatctgaaatttatatagttttgttttatcataatacttataaaatatacaaaaaagtagcaaaattatacatgacatatatgtatatatacat

SEQ ID NO: 799461 - DNA, 572 bp, Homo sapiens
aaagaaagttcttctcacgagctttcagagggagcattgccttgctgaaaacttgaataaattgttttgagcaactcagtttgtgataatttgttttttttgtttgttttttttttttgttttttttgttttttgagacagagtcttgccctgtcgcccacgctggagtgcagtggcgccatctctgctcactgcaagctccrccggctgggttcacgccattctcctgcctcagcctccccagtagctgggaatacaggcgcctgccactatgcctggctaattttttgtatatttagtagagacggggtttcaccgtgttagccaggatggtctcgatctcctgacctggtgatccacccgcctcggcctcccaaagtgctgggattacaggcatgtacaggattacgtacaatcatgactcactgcagcctcaacctcccaggctcaaatgatcctcccacctcagcctcccaagtagctggaaccacaggcatgtgacaccatgcccagctaatttttgtattgcttgtagagattggggtcttgctatgttgcccaggctggtcatc

SEQ ID NO: 799462 - DNA, 490 bp, Homo sapiens
gtggctttgggacttccttttgttggtagaatgttatggaaatgttccagttccaagcttaggactctaaagacattgtgcactttcactctctctcggaactctgtctctactgtgtaagaaagtctaagctagagtgacggatgttgagaaatggaggagccaatcactattgtagccccagactaacgcatagctagccaactgtcaggcatgtaagtgaggccatctttaaccaggcargtgccagcccaccttctggctgtcttaataagcacagatacattcagctcatcatgacccagttcagcagaaccagctagctgatctgtagacttgtgagcaattaaaaatggttatgctttgaagccagtaatttgggacagtttggtatataatagtagataattgatatagtgacaaccgggattccctaaaataaagctcccttttgggattctacaactatctcaggggtttacatgtatat

SEQ ID NO: 799463 - DNA, 490 bp, Homo sapiens
gtggctttgggacttccttttgttggtagaatgttatggaaatgttccagttccaagcttaggactctaaagacattgtgcactttcactctctctcggaactctgtctctactgtgtaagaaagtctaagctagagtgacggatgttgagaaatggaggagccaatcactattgtagccccagactaacgcatagctagccaactgtcaggcatgtaagtgaggccatctttaaccaggcaggtgccagcccaccttctggctgtcttaataagcacagatacattcagctcatcatgacccagttcagcagaaccagctagctgatctgtagrcttgtgagcaattaaaaatggttatgctttgaagccagtaatttgggacagtttggtatataatagtagataattgatatagtgacaaccgggattccctaaaataaagctcccttttgggattctacaactatctcaggggtttacatgtatat

SEQ ID NO: 799464 - DNA, 552 bp, Homo sapiens
cttttctgctattctgttataagtctcttctcatgtgtcccacgactcccagggagctgacagtttcctactttaactctgtagagattatactcggtccggcaggtgtgacccagtggtttcagggagtgccaccaaagggacgtgaagagcgccttcactgcccaggacccttgtctggaagacatttccttcctagagyaagtccctacaatcatagagcagttacacaagaattccgagcccctgacttctgtatctgtgctgtttatattgaggtgacctgaaagtatttcctgccaaagtgaaaattccaggatgagaaggggttctagaactctacaagagggaggaagagttcaggctccagtgtcatgttcttccaggagtctaggtaaagacaggtgacaggcagagatcattgaatctgagaggaatgcttggtctttgtaggcagttttgctaaacatacaggaggcactctaggggatatttagtataattaatttattttacaatatgaggaaactaaatcctagagcatggaaaagc

SEQ ID NO: 799465 - DNA, 486 bp, Homo sapiens
taggctctgtaagttttttattttaaaattgtgtattgctagcatatagggatacaattactttttaatattagccatatatccagtgaccttggtaaatgcacttctaagttttaatagtttacatatataagttcttttggactttttatattcacagtcatgttattctctaataatgacagatttttggttttacatttcttattyattttaattttgtattgccttattgtactggctatatctccagtgtagtgttgaattgaaatcatattagcagacatccttatcttgttcctgatttcaaaggggaaatctttatatattttactacttagcataatatttggtgttattttaaaaacattttaacaaaatcagattaatggagttcctttctacttctagttttgaaagtattttactataaataagcatcgaatgcattttctgcatctattgagatcattcattcttttcctt

SEQ ID NO: 799466 - DNA, 618 bp, Homo sapiens
agagattgttttctccattgacaatgaggaagcagagagcaggtgacctttccaagtcacttggctgctaaatacagagcctgtactggagcccagtctctaggcttcctttgaccaggcatggcccaaggcaaacctgagtgcagggagtgtgaggacatgcctgaaagtgacctttctcctgctaggcaagggcctggaggaggtgaaacctgcgtggtcttcaatgcccctgacatttgaaagaaagtgccagctcctcaatwaaaacatgctcgaggcagacctacccaggttggcactggatgaagacctccctggtggggagaaagaagcagctggattgcatgatccctaccctgtccctcggattcaccaagatgcacatttcccttgagaggttgtagccaaggtggtctcaggggcactggtcaccccttaacactctggcccaggaggtggcacagtcctccccctgaaaagcagagcctgagccaaggcattcagataagactcaggggaggcttgagggtgaggcaggggaagtgcacgctttgaggtgggtcctggacagtcagacgttcaagctatgctcgactcctgattccatacggaggg

SEQ ID NO: 799467 - DNA, 637 bp, Homo sapiens
gtgaaataacaagtctgagatgaatgaaaccagacactgggggctcaaaagacaaccctgttcctgtgggaaccacagaccagtcaggtctccaggggaaacagcacagcctccccagccaggcagctgtgttggccattggtgctctctagtctcccctgcttggcttggcccattcctgccagggcccagcacccagcaactggcaagttgagatgttagtggttgatgatggcttaggtgtatctgctttctcattggggctgagcaatgatagaatttctagggctgggaagcagaacccttaagtctctgccctcccaattctattactctcccttctttctttgcctctccattccctcagactaaaaggctcctgagttgaccaagagaaagagaagagaagtgggcatccatcaacccygactattcctttccttcctgctaaatcaaggacacaggcaaatgtgggtgcatctgactctacaatttggctggggaatataggagaatgcctagggaaggctgtgctgtccctcaaaaggagtgacattcagaatatttttatttaacagccagtacagcatgcatgttgaccagccagaatggatgtgatctgtagacaattgtaatg

SEQ ID NO: 799468 - DNA, 609 bp, Homo sapiens
ttatacaaaaaatgttatcccgaatgcattcttcttattttttcccactcaatgttctgttgctaagacatctgttgtggccgctggaattcctcagagatctctaactactgggagtgtaattgacaagagccccacttctatgctgcgtcccccattgctgagttgtcctaaggccacattccccactgctcctggggccctgctcccagccaatgactgagtgtggcagaggcatagggcagccccattcctgggagagatggggctccctgacacctgatggcttaaggacacctaggtggccttgccaagtcttccttagacctaacagcaatgtagttcacttccattccaccttcttttcctcttgcctaaatctaggtcaracttgcatggtagtctgatgattcccccacccttccagggctccgtctccattttctctcatagtcattgcccttaaaaaaattttctatgtttaatctcaccttgtcatcttcttctcagaaacctggacaaaagcaacattcacatgttgcatataattgaaattcattgttttgactgctgcataatatttaattatgtgaatatactaagaaagtg

SEQ ID NO: 799469 - DNA, 656 bp, Homo sapiens
caaattataacagtgagaaaactgtgacataggaaaattatgacagcaaaagaaatctgtctcaacctactccatcttgtttttaacctccaagctgtccttgttcattccagggcgtaggccgggctaactataaaaggaatttcgtttatagtttaactttgaaacaaagatgataatagtcccttcccaaaccaaaccccctttttgcctgggaaccagaccacctttgtaaaactaacaaattagccacaagattagaaattatggctcaggagtcatgcagccagaggccacaagattctaaacttcctgatatggtttgtatctgtgttcctaccgaaatctcctgtcaaattgtaatccccagtgttggaggtgaagcttggtggaaggtgattggatcatgggggtggacatctcatgaatgatttagcacgatctcttggtgctgttcttatgatggtgagtctcatgagatgcggktgtttaaaagtgtgtgttacatccccctacccctacccgccactctctcttcctcctgcttctgccatattagatgcctggtccccttttgccttcagccatgattgtgagctttctgatgcctccccaaaagcagaagccacaatgcttcctgtacagcctgcagaacc

SEQ ID NO: 799470 - DNA, 579 bp, Homo sapiens
aaaatatttaatatggaaaagcaaaaaataagattcatgaaactactatcacaattaacaaatgataacagatgcaatctcctttgtaccctcccctaagcccaccccttcccttccttcccaagaggcaaccaatctcatgaattgggtgtggatctttctactccatgttcttatatttctatactgtttatatatatttatgaaacaaatatagcattggtttgtgtgtttttaaaatttgtattaagaatatgtgtcacatagtatacactgttctgcttttttttcacttaacattgtgttttagaaattcctccatatagtcatatatagatctagttcatttatttcagacgttgtattctattaaatttataccacatcttatccagtcttgttttgaaagtcargtggttctaacttttgttataatagacagtgttgcaagtaaacatcttacacatatctccctatgcacgtgctcaagggacaatgtgggatgtgtacctaggagttcaatgctaggttttaattctactagatggtgccaaattgttctctaaatggggtatagtt

SEQ ID NO: 799471 - DNA, 601 bp, Homo sapiens
tgtgtcacatagtatacactgttctgcttttttttcacttaacattgtgttttagaaattcctccatatagtcatatatagatctagttcatttatttcagacgttgtattctattaaatttataccacatcttatccagtcttgttttgaaagtcaagtggttctaacttttgttataatagacagtgttgcaagtaaacatcttacacatatctccctatgcacgtgctcaagggacaatgtgggatgtgtacctaggagttcaatgctaggttttaattctactagatggtgccaaattgttctctaaatggggtatagtttctatttatcatttcatcacacttgtactgttagattgtttaatgttcgctaatatagcaagtgtgaaatggtatttcatakccattgtaatatgcctgtcccagatgaccactgaagttaaaacatcttttcgtgtgttgactattacagtttcctcttctgcaatcattctactttctaaaatgctgagaaaagctatttattgcatggataatattaatgcactggtcattccaggatctaaaaaataaggttattaagtatatatatatactt

SEQ ID NO: 799472 - DNA, 625 bp, Homo sapiens
ttaagatgggaactgcatttaatcaggctaaattgattatccaccattccaaaaagtcccaattggcttaaaccgtggcaaagacccatagggtcagaaaagatttttctgccagaggtataggtaatcacaggaaaggtgttaaaacttgcactgtgagtcacaagttttcccctaaagtgattcatctttttaccctcatgcttaaaaaacaaatgttagagtcactatgggcatttcagttttctatcataagcaaaatccttcttagtttccaaatctactgaagatatagtgccatatgtaagcactaccatttcctaattaagcacaatttaaattgatagcagttgttccaaactaaaaataagttctcaatttaccaactcacagttttacrttcatgtcttgcaataagggaataatcaaacctactaattaatttttaaaatcattttaaaatttaaagatgctttatgttaaagtaacaattgcaatctttagatattcctaattctttaagtaattattgtatagtaagggaatgtaacagtttcagagtgccatactatgataaaattttcagcatttgtgtatatgtttacatatacatatcactccaaca

SEQ ID NO: 799473 - DNA, 547 bp, Homo sapiens
ttacaggcatgagccaccatgtgcagccagcttcattatagtcttatgggactaccattgtatatgtggtccatcattgactgaaacgttgctaagtggtttatgactgtaatttatccttttaatcacctaaatagtacactactatgtggataaactataactgatttagctagtgtgatatggtggtcaagagcaagaactataggacccaactccartgcttgaatcccagctctgccacttagtaactatgagaatttggacaagattcttaacttatcagtgttgcagtttcctggccataataatgattttggcaggctagaatttgtggctcacttgttgaggtcttctttgcatatttgtcattaaaggacagccaggataaaatgcaccctgcctcacttccctgtgataagtggtgttgaggaaggtagagcagggagaagggagcaggagcaggaaaacaggaggaggatgtagctttaaatggaatggggaggaaaggaccagggtagatcccactgagaagggagcattccta

SEQ ID NO: 799474 - DNA, 615 bp, Homo sapiens
tctttgactatggctgtcctaaaacctttgtcatccacagccaattgttatcttgttttggtcctctttagaaggtgattttataatcagctataaaactctaacaggtgctcttgaatgtaggtttatgataactttggaggtagtaacatcagaatagaagaaaaactttcacaattcttggggagctaatatgttcatgagtatcaagcagaacagttattaactgcatggactgaactaatctttttgactttttgcttaaaatgtttgctgatcctttgttttgtttttcagagtcttggaagtgttcttttgagctgttgacagcttttaacaatttagtatactcctatgaacaaaatttggagcatatttgtttctctctacctgatttctccagactttgaaagctatttgtcaatattcttatggcaawacagttatttgcataagtgcaataagaatctgttttcatttgtaacaggacacaattggagaaactggttattttaccaaggctttgactggaatggtgtgatttcccttaaggaatcaaacttgatttatggagctaacaaagactttggaaaactgttgtcttattttgtgtac

SEQ ID NO: 799475 - DNA, 622 bp, Homo sapiens
tgctttcagtttattttccccatctttgaggctcctgagatgttctttatttaaatgaatgactaggaaagaagtttgatagcatattagtattcttttttagcaaaatttgaatccctgagccttgttgcaacatataaccacatttatttgcasgttttattgattatttctaacaaggactacagctgaatgacctcaggcatactggttttcacgttttctccttgggacttctccctcaaaatggcagcctctattgggcttgcccaggctctccagcctctctttaatcaaagcagttctagagcacctctgctttgaaaggactttcttgagaggaaaggtcttggggaatggtcacacaaaaagactgcatagaagagggttctcccaagtgttaggatacacaagaagccctaggttggattcaatagaatcaacctagtagctttagccaagatcagaatcccatgggccttgattttagagattttttttttctaaaatttatgtttgctcatagtgaaatgacagggataccaagtaggtctcatgttgtgtgtaattgtaatttattagtagtgtccagccacctaaaggagtataatgggaaggattc

SEQ ID NO: 799476 - DNA, 628 bp, Homo sapiens
agttgtggtgtctggtctaggagcatcacagggtcacaggagagaacttgctagaaatgcagattttcagggcccacctcagacctactgaatcagtaactctgagagcgggactctgcaatttgtgttttaacaagccctacaggtgattctgatgcatgctaaagtttgagaaccactaacctagggtagccttatatattgctaaaaccaggacactttttttttttttttttttttttttggttctgggagacagaatctgtttctgttgcccaggctggagtgcagtggcatgatctyggctcactgcaacctctgcctcccgggttcaagtgattctctctccttagccttccaagtaactgggacaacaggcgtgcgccaccacgcccggataattttttatatttttagtagagatgaggtttcatcatattggccaggctggtcttgaactcctgaccttgtgatccacctgcctcccaaaatgctgggattataggcatgaaccaccatgcctggcctgttttttaaatttacaatgagagttttctgttgtgttctcattccagtattcctaaactttgtaggtaggattagtcactctttatgatttctcttagca

SEQ ID NO: 799477 - DNA, 697 bp, Homo sapiens
aaatatatttagaccacttaaaatggatcctttcttatgtagagttatttctttattccgataattctcatggaagatagtgtaagcaggtgtgtaattcatgaatttgctaatggttttctatgatgtggacagattaagtgatagcaatatataactatcaattttgtttcaactttatatatggcggtaattamtttattggcctttgtagctaagtgggcataaagtgtttatattcagactatgatattagtgccccaaactctatttctgtttcttccacttaattttatttatttatttcttcttccacaaattttaatcttgttttacttttgtttattagagaatttagcttaaagtggtggggttggggggagggcattaggactttaatttttaccaagagatttgagaatttgagtaaatgctaatatcagtatatagttttcaatagcctgtgcaagcctactgtcttcatgttcatcttagctaatcagtttacagaatgtaggatttagcatttgataggtattgatataattttaacacattaatagtatatagagtggtaacactataaagtcaggtatgtaaccatattatttccagaatctaaaatataaaggataggcatgtactataagttattatacagtttcacattaatgctcaagggatcttataacatggc

SEQ ID NO: 799478 - DNA, 610 bp, Homo sapiens
attaaaaatgtgctctgctgataatatttttataaacactgcacactgaacaagagcaatgttctttagataccaatttgctgctcttctacagccagtctttctgctaggtcttgtcaattgacagattctgttcaatatggttatttctgctgaaatgtactagagaacttacatcaaagtccccttatgggttaaaatgttgaatttggtgtctctctttaactagtacagccactagacaattcatcagtgtgaatgctggaatgtccaaatatttgttaraaaaaaaaaatgtctataaagccaaggccttcaacttcaggaaaggtaacaaatgatttgatgtcaaatgtgacttgtaggaaagcactcagtttaaaaatattttccctcgaccctgatgctcaggtagaaattgctgtcactatcattaaagtagtcatagtgaaggaattcttaggctttccattatttccttagatttatcccgggacacaaaagccacaggagtttcattaaagcaaacttaactcacaataggtttcatgagtggcggagaggagtctaatctgaaaactaaggagtcagcaaaagttaatggctggag

SEQ ID NO: 799479 - DNA, 610 bp, Homo sapiens
attaaaaatgtgctctgctgataatatttttataaacactgcacactgaacaagagcaatgttctttagataccaatttgctgctcttctacagccagtctttctgctaggtcttgtcaattgacagattctgttcaatatggttatttctgctgaaatgtactagagaacttacatcaaagtccccttatgggttaaaatgttgaatttggtgtctctctttaactagtacagccactagacaattcatcagtgtgaatgctggaatgtccaaatatttgttagaaaaaaaaaatgtctataaagccaaggccttcaacttcaggaaaggtaacaaatgatttgatgtcaaatgtgacttgtaggaaagcactcagtttaaaaatattttccctcgaccctgatgctcaggtaraaattgctgtcactatcattaaagtagtcatagtgaaggaattcttaggctttccattatttccttagatttatcccgggacacaaaagccacaggagtttcattaaagcaaacttaactcacaataggtttcatgagtggcggagaggagtctaatctgaaaactaaggagtcagcaaaagttaatggctggag

SEQ ID NO: 799480 - DNA, 624 bp, Homo sapiens
tattagtatcatcgttattttagaactaggagcgatcacacatcatgggagttaatggcttgtgacaagaagggaattgctcagaagttatgtgaactgaccccaaacacaggttagctagatatgacacttagaatgtacaatatgartggtggtctatcaggttctgtgtaatacacactctttattcttggtatttgcattcttctgagaacattttttgggaaatgtccctagggacgagagtacccatgaccctatacattagggggaaatctgcaggtgacgatgcagagtgacgttgctaataaaggtatgtaaatgtaggaaatatcaacatatccctgttatcattgatttctgtaatatggctttttacacaaaatcacattacagtctttttcacaataatcaaagctgagaactcaaaaccaaatgtgtgaggttttctgttgaagaggtcactatgagtatcaattttcttacttgcttgggatatttacccgattttaaatatataagaaaaaaatggaaattgatgatgtcagccatcccttatagacacatcaacatgaacgagcatccacacgtgaaaatactttcacaagggcttaataattcaga

SEQ ID NO: 799481 - DNA, 624 bp, Homo sapiens
tattagtatcatcgttattttagaactaggagcgatcacacatcatgggagttaatggcttgtgacaagaagggaattgctcagaagttatgtgaactgaccccaaacacaggttagctagatatgacacttagaatgtacaatatgaatggtggtctatcaggttctgtgtaatacacactctttattcttggtatttgcattcttctgagaacattttttgggaaatgtccctagggacgagagtacccatgaccctatacattagggggaaatctgcaggtgacgatgcagagtgacgttgctaataaaggtatgtaaatgtaggaaatatcaacatatccctrttatcattgatttctgtaatatggctttttacacaaaatcacattacagtctttttcacaataatcaaagctgagaactcaaaaccaaatgtgtgaggttttctgttgaagaggtcactatgagtatcaattttcttacttgcttgggatatttacccgattttaaatatataagaaaaaaatggaaattgatgatgtcagccatcccttatagacacatcaacatgaacgagcatccacacgtgaaaatactttcacaagggcttaataattcaga

SEQ ID NO: 799482 - DNA, 624 bp, Homo sapiens
tattagtatcatcgttattttagaactaggagcgatcacacatcatgggagttaatggcttgtgacaagaagggaattgctcagaagttatgtgaactgaccccaaacacaggttagctagatatgacacttagaatgtacaatatgaatggtggtctatcaggttctgtgtaatacacactctttattcttggtatttgcattcttctgagaacattttttgggaaatgtccctagggacgagagtacccatgaccctatacattagggggaaatctgcaggtgacgatgcagagtgacgttgctaataaaggtatgtaaatgtaggaaatatcaacatatccctgktatcattgatttctgtaatatggctttttacacaaaatcacattacagtctttttcacaataatcaaagctgagaactcaaaaccaaatgtgtgaggttttctgttgaagaggtcactatgagtatcaattttcttacttgcttgggatatttacccgattttaaatatataagaaaaaaatggaaattgatgatgtcagccatcccttatagacacatcaacatgaacgagcatccacacgtgaaaatactttcacaagggcttaataattcaga

SEQ ID NO: 799483 - DNA, 488 bp, Homo sapiens
ttctgggattacaggcgtgagccaccgcgcctggccacagagagctttttgtagattgattctgatgttggaaggaagagagcccagctcttgagagcctagtgctgttgaggcattgagggtcctctttgccacgtagagagtgttggtttaaagaaaacccatggaaaaaagcagggggaaacagagggcaaagggaaartaaatccccctgacattgtttgaatccccagattcagccattcctgaagccagccattaccttgaatttcccgaataaatgaactccaaaattccccttttaggcttaagatagtctgaatcgagcttccgtcaccacaatgaaaagaagattcataaaatgctgaatctgaatttgtgtcactacaggatggaatctcataatcatggtgacacactgtcttaccgaatgtcttcgtatgcaaacgtcagtccagggaaagtgtagctttggaaggtaatgtgca

SEQ ID NO: 799484 - DNA, 488 bp, Homo sapiens
ttctgggattacaggcgtgagccaccgcgcctggccacagagagctttttgtagattgattctgatgttggaaggaagagagcccagctcttgagagcctagtgctgttgaggcattgagggtcctctttgccacgtagagagtgttggtttaaagaaaacccatggaaaaaagcagggggaaacagagggcaaagggaaaataaatccccctgacattgtttgaatccccagattcagccattcctgaagccagccattaccttgaatttcccraataaatgaactccaaaattccccttttaggcttaagatagtctgaatcgagcttccgtcaccacaatgaaaagaagattcataaaatgctgaatctgaatttgtgtcactacaggatggaatctcataatcatggtgacacactgtcttaccgaatgtcttcgtatgcaaacgtcagtccagggaaagtgtagctttggaaggtaatgtgca

SEQ ID NO: 799485 - DNA, 632 bp, Homo sapiens
gctgtatttttatggtatctgaatgggaaaccactatgtcatagggatttatatatttttaaaaattgacaaaaacacaagttatccttgattaatatttggggatatgtacattcagtagtccccttgtatttattacatgtgcccatttgtaagtgtataaattagagttgccagatttagcaaataaaaatacaggacactcagttaaattagaatttcagataaacaacacattaatttttggtgtacatatatctcatgaattatttgtcctattatgccacaatcaattcattgtgtatctaaaattcaaatttaacttggcatyctgtcttttatctggctgccctggtatagatgctcctcccaaagcatgactgtgtctccagtagctgctgtggctgagagtgtgcccaacatctgcttctcatgcagcctcactctggccagcttttatgtagggcagacatctcaggaggaagagccaacagaaccagaagtgttcccagacatgttgcttcaccaccgtgcctctctttctttcagcaaacaggagaggtaggagaggaaggcagaacagagcactggtaagctttgcatttgctacagagaggtaggggtgctggaac

SEQ ID NO: 799486 - DNA, 599 bp, Homo sapiens
ttcctatttattgtttttttgtgggtttttttttttttatttttggtacctaaacttaattggccagaatcttcacagggaggagttatagatggcaccttcaagcccctaatcatactcacagaagtcttctttcaaaagatgtgatttgagatgggattttagctaagaatacagaaagtgagagtggcaaagagaagctagatattccacaaggtgggtagaacacgcagaaagatttgsaagcaggaatgagtgtggtgtggatgaaaggtagtggagagcttagccagaggaaaaggaaaaaaatgtcttgcccattttcttggctgaacctttaatagaaagtgcaatatctgcagctgagagcaagaatcagggtcagctgtaagaagtccacaaatccttgtatctttcagacacagagcaggaggatgaaaaataggaagcttgtctaataggttacacttgctagtatgttttaaagctcttgtgttttccctctcattcactcctcaaaatagctttctgagatgggtaatttttttgcaaatgagggatggaaacacaaagacttagtgatttgcctgattctatat

SEQ ID NO: 799487 - DNA, 614 bp, Homo sapiens
ttactgcttaggagtcgtacgtccagaggctacaagatttgtggctttctgaattgctcctgtagataacatctgaaaaccagagattgattttcttgacatctttttcagactgatcccactggactcatgacttatgactcagctggtcctgtggccccactcagaggtgcacttagtgcatgaggactgtttgccatacccctatttcatcccaaaccgacaagcagcagccattccctagccctctgtccaccaacttgtccaaagataccctaacttttgatccttcagagagactggtttgagtgataactccagttctcccatgtaggccagtcaygcatcaattaaactctttctctactgcaacaccatgatattggtcaattggttttctctgtgtactgggtgagaagaatccatcaggtgattacatgttggataagaacaaaatgacaggaacatttaaagtcattgaggttgcgattgaagacttgtgaagagtaggagagtgtctcaataacttccttggccacaatagttagagtattgttgttttttccaggagaaaccaaacaggtactgactattttgacctaaagggacactaa

SEQ ID NO: 799488 - DNA, 634 bp, Homo sapiens
atttatatttaaaatgaaagtaatataatttacattaaaaatataaactatattagatatcataccactatatgttacatatacaataaaataacttaaatataaatatataaatattccagtaatgtatgtgtacctaagaagaataaaagactrttgatttttttctacctattactcaccagaatttaaatagcccccaaagtctagaagtcttttgctctcctctggtgttgttatataacgaagtcttttttggcaactttgccccaagcaggagttcagtagtgtaagagctacccaaaaacctacaaatataaatgcaatcttatcagtatataatttaaagtgaggataataattcctattctgcctacctctgaatgttgtgatgaggatcgatgaagataaaatgtaagaaagctttcctcaagctctaaagctttttatgagtatgtgggaatacagtaaaagggtgataatgacattcctaaatattgtcaaacaccacttattaaatgcatacctgcactgtttcaagtataaactgctacactaaaacagtggcaccaacactgtggtttcaagttagaatgctacgacttactttagaaactgtgaacccctcatggaa

SEQ ID NO: 799489 - DNA, 634 bp, Homo sapiens
atttatatttaaaatgaaagtaatataatttacattaaaaatataaactatattagatatcataccactatatgttacatatacaataaaataacttaaatataaatatataaatattccagtaatgtatgtgtacctaagaagaataaaagactattgayttttttctacctattactcaccagaatttaaatagcccccaaagtctagaagtcttttgctctcctctggtgttgttatataacgaagtcttttttggcaactttgccccaagcaggagttcagtagtgtaagagctacccaaaaacctacaaatataaatgcaatcttatcagtatataatttaaagtgaggataataattcctattctgcctacctctgaatgttgtgatgaggatcgatgaagataaaatgtaagaaagctttcctcaagctctaaagctttttatgagtatgtgggaatacagtaaaagggtgataatgacattcctaaatattgtcaaacaccacttattaaatgcatacctgcactgtttcaagtataaactgctacactaaaacagtggcaccaacactgtggtttcaagttagaatgctacgacttactttagaaactgtgaacccctcatggaa

SEQ ID NO: 799490 - DNA, 603 bp, Homo sapiens
aagataaaatgtaagaaagctttcctcaagctctaaagctttttatgagtatgtgggaatacagtaaaagggtgataatgacattcctaaatattgtcaaacaccacttattaaatgcatacctgcactgtttcaagtataaactgctacactaaaacagtggcaccaacactgtggtttcaagttagaatgctacgacttactttagaaactgtgaacccctcatggaataaaatggtacttttaccragtacccaaataaatgtttgttactaatgtaaatggatgaaaaaatatgttttgtttttacttataatgtagagctagtaaggtagcttttatcatggactagttaatttaacaatttattttttatcaaaaaaaacctctctgctatatcatagtgattttttctccatgtttctgaatgacctatgatactcttttataaaaataatttaaaatatatttctaataatttgtatttgcttttaaactttttaactaaaaatatccgtttaagaaaacgtaaatatttcctaggccagcaccaaaattttgtatcgtatgtgtaccatgttaaatactttaatgaaagtactt

SEQ ID NO: 799491 - DNA, 603 bp, Homo sapiens
aagataaaatgtaagaaagctttcctcaagctctaaagctttttatgagtatgtgggaatacagtaaaagggtgataatgacattcctaaatattgtcaaacaccacttattaaatgcatacctgcactgtttcaagtataaactgctacactaaaacagtggcaccaacactgtggtttcaagttagaatgctacgacttactttagaaactgtgaacccctcatggaataaaatggtacttttaccgagtacccaaataaatgtttgttactaatgtaaatggatgaaaaaatatgttttgtttttacttataatgtagagctagtaaggtagcttttatcatggactagttaatttaacaatttattttttatcaaaaaaaacctctctgctatatcatagtgattttttctccatgtttctgaatgacctatgatactcttttayaaaaataatttaaaatatatttctaataatttgtatttgcttttaaactttttaactaaaaatatccgtttaagaaaacgtaaatatttcctaggccagcaccaaaattttgtatcgtatgtgtaccatgttaaatactttaatgaaagtactt

SEQ ID NO: 799492 - DNA, 507 bp, Homo sapiens
gagattatactttatggctctggttttctcaatgaaagtagtctgaaagtaagtggagtatttcataagatgtgtgcagatttagagtactagttgagggagaggaggctaagtacaaatcaaagaattgttgggcgctgaggatccagytgaggttggaaaatatgactttattgtggcagcatctaaaagactaggagatttctcactagcagcactcaattgttagggtgtagggaagaggagattaaagccctgattgggggttttgttggactaagttgagaggataaagtttcagagtttctcttagtagtagtcaaaagctttctttaggtgagcaaaacctactttttaaaatgtctgtccagcactcctatgacaaggaggaaaattgcatttatcggagtttctcttgggaagaacgatgtacactattatttgaaagaactatttctagaatagttccccaaaggtatgttgaagcaataaataatatgaaatgat

SEQ ID NO: 799493 - DNA, 619 bp, Homo sapiens
tagtttatctcttccactacaatgtaagttttgtgagagaaaggcttttttacttctggtttactgttgtatccttagtgcctggaacagtatctggcgtacagtaagtgctcagtaagtactgactgaattaatgaattaattatataatggataaatgaatagaaatgctatggctagaccactacaatctcaagaaataattcatatacattataaaaatgggaaataacaaaagttgtttgatgttatggaaaattgagcatacttactagtttgcaattttktgtgtgtgttgtttttgtttttaacttttaagttcagggttacaagtgcagatttgttacataggtaaacttgcatcattggggtttgttgtatagattatgtcattacccaggtattaagcttggtacccattagttatttttcctgaccctctccctcctcccaccctccactctcctaaaggccctagtgtgtgttgttcctctctatgtgttcatattttcattatttagctcccacttataagtgagaacatgcagtatttggttttctgttcctatgttagtttgctaaggataatttcctccccctgcaaaggacgtgatctcat

SEQ ID NO: 799494 - DNA, 573 bp, Homo sapiens
tgttttcaataatgtaacagaaaacatcattgtgtaaaaatacagatttgatgaagaaacctcgaatcacagtggcttcctcacacctcctcaatacctactttttccctcccaattcatcttttcactaccacaatcactaccacaatggcaccayctgctgacagttcagcagctctcaaagattaagagtaaaaaactacaatgggagactctagaacaagactgttcaacccaccgcccacgggcagcatgaggcccaggatggctttgaatgtggcccaacacaaatctgtaaacttccttaaaacattatgagacttttttttttttttcagctcatcagccatcattagtgttattttatgtgtgacccaagacaattcttcttccaatgagacccagccccagctctagaaggacaaaatgaccacagctcatttcacatgctatacttgtgattgatttacaagctgtttgaccttatttcaagcgtaataagaatattacatgaaccatacctggaacaggcttttctccaggctttagctataattttttagaaaaaaggga

SEQ ID NO: 799495 - DNA, 573 bp, Homo sapiens
tgttttcaataatgtaacagaaaacatcattgtgtaaaaatacagatttgatgaagaaacctcgaatcacagtggcttcctcacacctcctcaatacctactttttccctcccaattcatcttttcactaccacaatcactaccacaatggcaccacctgctgacagttcagcagmtctcaaagattaagagtaaaaaactacaatgggagactctagaacaagactgttcaacccaccgcccacgggcagcatgaggcccaggatggctttgaatgtggcccaacacaaatctgtaaacttccttaaaacattatgagacttttttttttttttcagctcatcagccatcattagtgttattttatgtgtgacccaagacaattcttcttccaatgagacccagccccagctctagaaggacaaaatgaccacagctcatttcacatgctatacttgtgattgatttacaagctgtttgaccttatttcaagcgtaataagaatattacatgaaccatacctggaacaggcttttctccaggctttagctataattttttagaaaaaaggga

SEQ ID NO: 799496 - DNA, 670 bp, Homo sapiens
attctgtagctgaaaaatataataacggtacaaaaaatagtagaaggatccaacagcagacttgatcaggcaaaagaaatagtcagcaaactcagagacagatcatgtaaagtcactgagtcagaggagcaagaagaaaaaaaatgaagaaaagtgaagacagcccaagggatttacaaaacactatcaagtagcctaatatatgyattattaaaatctcagaaaaagaatgagagaaagggacagagagcttatatgaacaaataatggctgaaaacttcctaaatctgaggaaaaagaagaacatacagactcaagagctcaattcagaaccctaaccagaataaatccaaaaagaatcacaccaaaacacattgtaatcaaactctaaagtcaaagacaaagagagtaacttgaaagcatgagaaacgcaatttgtcacataaaaggaaacttccataagattatcagtagatttctcagcagaaactacaggttagaagggagtggcatgatatattcaaagtgatgaaaggaaaaaaatagtcaaccaagaatactgtatctggcaaactgttcttccaaaattacgaagaaattaagactttgaaataaacaaaagctgagggaatttattactactagaccttctctataagaaatactaaag

SEQ ID NO: 799497 - DNA, 595 bp, Homo sapiens
ctgttgcccccaagtgtaaaatgagtgttctgacgtttgacacatggatagatttatgtaaccaccaccgccaccgtcaggacccagaacagctctgccaccccaaaaatctctcttgcgttctttatagttacacaatccccccatccctaaacctggcgatccctgatctgtcctccaccactgtgtttttgataggtatggtattaaatccacagatcaatgtgggagggtttacgtctataccacatggarttgcccagtcatgaagacaccacgtctctccactcattcagtcagagttcttcggttttatcagcactctgtagtcttcagcctgtagatcttggatatgttttcttagatttatacctacgggttccatcgtgtaatggttagcattctggactctgaatccagatttatacctaagaattttgctttttggggaactattgtaaatggcaatgtttctgagccatatactaccgagccaagtgcgatggctcacacctgtaatcccagcactttgagaggctgaggcgggtggatcccttaaggtcaggtgtttgagaccagcctggccaacatggtg

SEQ ID NO: 799498 - DNA, 621 bp, Homo sapiens
aagtcagctcccggaaatgccctattcaacaagcacatgttgagcagcaagtgcagcccagagagggaaaatgacttgccaaagtcacacaactagaatgtggcagaggcagattcaagtccacacctgtcagactcaagtccacacctgccatgctytttcccctaccccaggaacattcacgaatgcatgctctgtagcagcagaggaggcattctaaagagggaatgggggtgtggggatcaagaaagaaaacacccaacaaatggtgacaaagttgggctggaggtgtggcgagggcctgtggaaatggaagtggagggacatcaaggggaggtgatgctgactgggccatgttcccgttgatcagaaacacagagcacgggagaagcaagccccaaactagaaaaggaggtggagacagcccttgaatgccaggagatcatgattaatggtcaaaatggccaccactgacgcatgggctggagttaagcgatggcctttggcagctgggaagggagggcctagggttagcaccttggacagcggctccagctaggcgagcacgggcaaggcattttgggtaatggggcgtgtcctggggaatggccgatctttact

SEQ ID NO: 799499 - DNA, 631 bp, Homo sapiens
tgaatgaggtgtatcagcaaacacttaactaagtgagatgaccctgagtaaatttatcaggaacttgaagacattttttatacatatatctatatgtatacacacacacacacataaaacatatcatatatatgttattaatagttttggagtacaagcgatttttggtttcatggattaattgtatagtgtgaagtctgaaattttattgcacccatcacctaaatagtgtacattgtatccaatatgtagtttttttatccctcacttccctcccatcctgaccccctctgaatctccaatgtccattataccattctgtatgccttggtgtacccacagcttagctcccaattataggtgagaacatacastatttgattttccattccttatttacgtcacttagaataatgccctccagctccaacaaagttgctgcaaaagacattattgcagtcttttcatggcttagtagtactccatggtgaatatatataccacattttatttatccactcatttgttgatgggcatttagcttggtttcatatttttgcaaacataaattgtgcttccatgaacatttgtgtgcaggtgtctttttaatataattactcattttcctttg

SEQ ID NO: 799500 - DNA, 651 bp, Homo sapiens
agcccagagtatagaccctcatcacaggccaggatcctgcaagttctgcaagggctccatatgagtggtggttgttcttgtttttgtgtagattttatttatttttctctccttttttaatatgtattttcacctttcctctaaggtgaaaatatgtattattttacctttcttctttcactaagccacatctccagtgattcctccctcctaagcaaaactcactctctcactaaaagtcgtcctaacttttaccataattagttctttggttttctttacaggataataactgtattaagaagacacaggcrtggaagaattacaaagagagaggatttttagttgctaacttttctcaccaaattaaaaaaaaactcactagatagtttaaagaaaagaccccaaattactaaagtttctaagtttatagtctcttcctggtagaaagcagctattttcttataggaacatatatcagtattttaagtcaggggtatcattctatcaaggagttagtcatttacagaaaatggctcactagacagagtgatcttgttggatttttgtttgattttatttttgcaggggagggcagagtgggaatttcaggatgcaaagcattttcttctccttgagttgggacatgat

SEQ ID NO: 799501 - DNA, 627 bp, Homo sapiens
tccttgccatggatcacaaattttcacataatctagcccttgccacaccccccatcctcatccaataccacactgtgccctgctcagtgtgattcagcctcagaagcttcctttctgttccagaacatgccaaatcctttctcaattcagcaattttgcacgtgtgtgttttccttcctggtatatctgctttgctttgaacrgtccctggctggtagaaagtgctacataaatatttgtcgagtgaatgaatgaataaatgttggtctttctgtttgttttctcctctactctctggatggctgccttcttctcattctttaagctttagtttaagtcatctactaaaaaattccttccttaacccattatttaagtaagttcccttcacagtacctattaaagctttttgctatatttatttgtcttttttttccccttttattgccttcctctctcacacaactctaagccccacgagggccatctgttgcacttaacggtatactaactagtgcctggcactttcctgggacatactgcaggttatgaacaaatgtctgctcaatagattaatgaaagaataattgactgtgtgagcgcattaaacaccaacaataacctcca

SEQ ID NO: 799502 - DNA, 627 bp, Homo sapiens
tccttgccatggatcacaaattttcacataatctagcccttgccacaccccccatcctcatccaataccacactgtgccctgctcagtgtgattcagcctcagaagcttcctttctgttccagaacatgccaaatcctttctcaattcagcaattttgcacgtgtgtgttttccttcctggtatatctgctttgctttgaacagtccctggctggtagaaagtgctacataaatatttgtcgagtgaatgaatgaataaatgttggtctttctgtttgttttctcctctactctctggatggctgccttcttctcattctttaagctttagtttaagtcatctactaaaaaattccttccttaacccattatttaagtaagttcccttcayagtacctattaaagctttttgctatatttatttgtcttttttttccccttttattgccttcctctctcacacaactctaagccccacgagggccatctgttgcacttaacggtatactaactagtgcctggcactttcctgggacatactgcaggttatgaacaaatgtctgctcaatagattaatgaaagaataattgactgtgtgagcgcattaaacaccaacaataacctcca

SEQ ID NO: 799503 - DNA, 643 bp, Homo sapiens
gcaatggacagcattaagaaatataccaaattagaaataggtcacaccattcagtgttgtttgggtaggacaaatatgagagttctagttggttagaacatttgatttgagtaagtgggttgagtaggataaacttccaaaagtagtgtggtcagggccaaattttggagaggtttttaatgttagattaaggaatctgactttatttggcaggcaakaaggaaccattggaaactgctcaatggaagaatagcatgcacaaaatggcttataaatccctaaataccattttatagttgtctaattctttgcagttatagaccactttcttatgcattatctcttttaatcctcatctacctttcgagagaggtattattgtctttattttatagaggaaaagcctgatgaagctcagggaattttcatgtcttctggtcactacaggcttcacctcaaatcccataactagaaaatgtagaacctggaaacttgaatctaggctttctgactccaagttcagtgctcttgatatatacaatacaatctttaagaagatgagctattgctctggtagcagaattttataaaaattataagagtgcagagaataagcacttggtaaattattaacatcagagaa

SEQ ID NO: 799504 - DNA, 508 bp, Homo sapiens
aaagcctgagacctgtgagggatacttcagggaaatgttatcatctcagagctttaaaataatcatctcccctgggttctccgtggtttggaattcttatgaagcttaatgcgtgaaaaggacaacagttttcaaaatgttggcagtttcctacatttgaccttttaacatttakaaacattggtcaaggtatgtttaaattctttaaattgtagctgacctttggagaaataaacataaattaaggttattacctacatggaatgcttatatggaactattagcaaagtaaaagtagtacgttaagtacaccatggaaaaatgcttttagagactgaaatcattatagtgatagagtcactgagctggaaagaaacttgggaagccatctagttcacccttctgtctgaggccatgtcacatttgaaccataacaagagatttgaaatctttttttttttttttgggagattcaacaacttctcttggtatctagttctagtaactg

SEQ ID NO: 799505 - DNA, 508 bp, Homo sapiens
aaagcctgagacctgtgagggatacttcagggaaatgttatcatctcagagctttaaaataatcatctcccctgggttctccgtggtttggaattcttatgaagcttaatgcgtgaaaaggacaacagttttcaaaatgttggcagtttcctacatttgaccttttaacatttagaaacattggtcaaggtatgtttaaattctttaaattgtagctgacctttggagaaataaacataaattaaggttattacctacatggaatgcttatatggaactattagcaaagtaaaagtagtacgttaagtacaccatggaaaaatgcttttagagactgaaatcattayagtgatagagtcactgagctggaaagaaacttgggaagccatctagttcacccttctgtctgaggccatgtcacatttgaaccataacaagagatttgaaatctttttttttttttttgggagattcaacaacttctcttggtatctagttctagtaactg

SEQ ID NO: 799506 - DNA, 627 bp, Homo sapiens
aaatctttgggtctcagtaccttcttacattcttaaaaattattgagaaccccatagagcttttgtttgtatgagttataattgtcaatctatcaatcagaaattaaaactgagaaattaaaatgtttattgattaaaaataataaacccattgtccattaatagaagaaacatattttatgaaaaataactacattttccaaaaccaaaagattattggtaagaatarcattattttacattttgggaaacctttttattatttagattaataaaaaacaatttaagatttagattaattaaaaaaaacagttgaattcccatatctgtgtctgcattcagtccattgcattccattgcaattgttttaagtagatgaagaaattctggcatcatgccaatagaagattgcctaagtgagaaatattttaatagccatttcagataattgcatatattcttctttgataatacataaaaattcaatagtagtagtttccttcatgtcttttgttttttatagttacctgtgtgtgtgtgcatgtgtgtgtgtgtgtggttagaacatttaagatctactttttcagcaaatttcaagtgtgcagtattgcatacttaaaattatta

SEQ ID NO: 799507 - DNA, 567 bp, Homo sapiens
ggccctaacccttattattccccttaatagctcttaaggtacaatccctaaaaagtcttaggaggccaggccctgtgtgtgtggatcctgctcccacttccagattcttgtcccatcactcacttacctttcagcaatctgacctccatccccacagagcatcgcaggtcatcgcagcagagccctgtgtggcatccyacccagctcccctttcaagcccaaggcactcatttcccccagctgctaggaatttaagctgcttagctcacacctgagtcccactttgggaattgccctcacctggttctcctaaggtcatgcccccacctcgggacagaagattggtccataagtagcctcagaggcctgaattttaggcagctccaaaggacactccaactccagagcctcctcctttccttacaggtgttattcgtgaaagcacacccgataaacacctggccacaaatctctgtttcagagtctgtttccagggagcccacaccaggacacaagccctcctcatgcctgccccaaagcctttgtttctgttcttccctctgtctg

SEQ ID NO: 799508 - DNA, 591 bp, Homo sapiens
gccccaaagcctttgtttctgttcttccctctgtctgaaacattcttcagccatcctcctttccctctttccccaagtgtctcacctactcctctttcttagttctggggtcacttttccaagaatgtctttcctgaaagtccagtctaattcaggtcccactgttctatgctttcgtggaaaccagttccctttytttatagggcttccatttgcaattatgcagacattaatttgcatgtctgccttacctactccagtaaactccatgagagaaggagctctgttccttctcacattggtgttccagcatacagcaatgaatctggctcaagtttggaattcaacgaatagacattaaattgtctggtggattaattgattgattggtggagtgaatggcctctgccatcaaagtcctttctttttctgattcatcttcctgataacagggagccccattttctggtgaccattcctcactgtgaggtttttaaagtgcaaccatgtgataagctgtaattattgtctttaccaagatcatcttaagcattgtatgtttcatctgtcaaatgctaatcatctaagaat

SEQ ID NO: 799509 - DNA, 591 bp, Homo sapiens
gccccaaagcctttgtttctgttcttccctctgtctgaaacattcttcagccatcctcctttccctctttccccaagtgtctcacctactcctctttcttagttctggggtcacttttccaagaatgtctttcctgaaagtccagtctaattcaggtcccactgttctatgctttcgtggaaaccagttccctttctttatagggcttccatttgcaattatgcagacattaatttgcatgtctgccttacctactccagtaaactccatgagagaaggagctctgttccttctcacattgstgttccagcatacagcaatgaatctggctcaagtttggaattcaacgaatagacattaaattgtctggtggattaattgattgattggtggagtgaatggcctctgccatcaaagtcctttctttttctgattcatcttcctgataacagggagccccattttctggtgaccattcctcactgtgaggtttttaaagtgcaaccatgtgataagctgtaattattgtctttaccaagatcatcttaagcattgtatgtttcatctgtcaaatgctaatcatctaagaat

SEQ ID NO: 799510 - DNA, 591 bp, Homo sapiens
gccccaaagcctttgtttctgttcttccctctgtctgaaacattcttcagccatcctcctttccctctttccccaagtgtctcacctactcctctttcttagttctggggtcacttttccaagaatgtctttcctgaaagtccagtctaattcaggtcccactgttctatgctttcgtggaaaccagttccctttctttatagggcttccatttgcaattatgcagacattaatttgcatgtctgccttacctactccagtaaactccatgagagaaggagctctgttccttctcacattggtgttccagcatacagcaatgaatctggctcaagtttggaattcaacgaatagacattaaattgtctggwggattaattgattgattggtggagtgaatggcctctgccatcaaagtcctttctttttctgattcatcttcctgataacagggagccccattttctggtgaccattcctcactgtgaggtttttaaagtgcaaccatgtgataagctgtaattattgtctttaccaagatcatcttaagcattgtatgtttcatctgtcaaatgctaatcatctaagaat

SEQ ID NO: 799511 - DNA, 647 bp, Homo sapiens
cttcagccagtccctccgctcagggtctctgacttcccacaacaggtaccttagtacatgaatgatacatgaacacaaagacgcatatggtcattctcaaaagaaatgaaggtaagtgttcatcacagttgttaaaaatatagtcttaaaatttatatttcttgyaaacccatcttttgtctttatacataaatgcatagatgtgaaagattttttagaatgaactcctttagaaatagtctcctgtattttagaatttgtttaaatgtgtggaaatactgcttatttttagataatgcttattttaattttctttcttttttatgtaacaaaagaaaataattgaattgttatacatacacataaatgttcatacattcccccaaaaataaatcatcttcctgggaaaaatcacatgcctgaattaatatgttccttaaaatgtaagcagtcatttaaaactcagggtagaaaaggatgttagacatgaaactttaatcttttcatttttagagctgggaaagacccagaaaggtaaggtgatttgcctactgtcacagagctagtagcagagccagaggtgaacctaggactccatactcaacagtcaagtgtaagtgtgccaactgtacaatagtcaatgaatg

SEQ ID NO: 799512 - DNA, 582 bp, Homo sapiens
ctttggttattaatttatttatttatttatttatttatttatttatttgagacagagtctcactctgtcacccaggctggagtacagtggcgccatctcggctcatggcaacctccgcctgctgggttcaagtgattctcctgcctcagcctccagagtagtcccagctaccaccacacccagctaatttttgtatttttagtagagacgggttttcaccatgttggccaggctagtcttaaactcctgacctcaagtgatccacctgcctcggcctcccaaagtgctgtgattacargcgtgagccactgcgcctggccgcagttatttattaaagctgggaactatcttgcctcttcactggcaaaagagctatccagaaaagttctaaaatttgggacaaggaaagatgagaattttacaatagtcagtgtcccatgattctgaacctaaaaagactgtctttcttctataaaactcagttaccttgaagtcacattcttatttacttccccatgtaaatttactgagtaatcagtttctcacaagtatgacccatgagaacacattaaatgcagaatt

SEQ ID NO: 799513 - DNA, 552 bp, Homo sapiens
tccagccatgtggaactatgagtccattaaacctctttttctttttaaattaccagtctcgggtatttcttcatagcagtataaaaatggagtaatacagtacttcttagaggtctactggctcatctcttctgagaagaatttgatgaagaatagagccactgagcacagacacagagcaccaaagttgtaaaggttcaaatgcagtagctcagtggcagtggcaggagaataacaaattccaggggagtcctgtgtgacayttttagattgcacagatttgtattcagaatgttatatcttggttatcatccaggtaaagccattgtttataataaaacaggaagacaaggaacatctgagccctgaactatgaaccttactccttatcagtggggcaggagtctaagaaatctgcttctgcagcaattgtagatgggatgggccatgcaggtcttctggctttgaagggactgggttgctacataagctgcaagaatatgatcacgggtgtaaggatcaaggataatgtcctgctgttaaaactggatt

SEQ ID NO: 799514 - DNA, 633 bp, Homo sapiens
ccagtttgagcttcctggccgcttttttacctactcaagcctcagcaatggcagatgcccctcccctagcctcgctgctgccttgcagttcgatctcagactgctgtgctagcagggagcaaggctctgtgggtgtgggaccctttgagccaggcatgggatatactctcctggtgtgccgtttgctaaggccattagaaaatcacagtattagggtgggagtgtcctgattttccagataccrtctgtcacagcttccctttgctaggaaagggaattccctgaccccttgcacttcccgggtgaggcgatgccctgccttgctccgtgggctgcacccacagtctgacaagccccagtgagatgaacccagtatctcagttggaaatgcagaaatcacccatcttctgcgtcacttatgctgggagctgcagattggagctgttcctattcagctatcttggaacctcctctcagcatttgttattacctgtcttttgaatacaagccattttagttggggtgagataatatctcattggaattttgatttgtatttctctgattaccaatgatggtgggcactttttcatatgcctgtttgccagttgtatgttttcttttgtgaaatgt

SEQ ID NO: 799515 - DNA, 543 bp, Homo sapiens
tatataaagatgtatcaaaatgcagtagtaaaatcataaatctgatttttaaaaatggaccaaggctttgagtggacactttattgaaggagagataccggatggctggttgcaagtaagcacatgaaaagacacttaacacaattacttacaagggaattgcaaagtaatgccaggaaataccaccacacatttattagaatgacaacaacaaaacaaataaactccaccccttcatttgtttgtgcaccttcacgctaatctgacarttctaagtgttgacaaggatatgaggatatggactacctggaactgtcatatattgctggtgggaatgcagaatagtatgacaattttggaaaacagtttggcagtttcttataaacatatacttagcacagggccagcaatcccacccctaggtgtttgcccatgagaagtgaaaacatgtgcctacacaaaggtctctatgcaaatatagcaacccaaatgtccatcaactgatgaatggataaatgaaattttggcacacccatgcaatgg

SEQ ID NO: 799516 - DNA, 617 bp, Homo sapiens
cctagcatccctcctgggaatggtattggggacctttctggccacggctttggggttctttaggatagatcatcaatttgacaaataaagctttctctgctttcaataatgtaaatgtactgtttatcaaaagaaaggtttctgtaccaggagtgaktatctggagggatgaaggatatagagacccttcctgtcacatatttccggatatgtgggtcattttgacagggaactttacagagcatagcaagtctgaatggatagatgtttcacccatgggtctctggaaccagggtgttgaatttgtttccccatagccattgggtaacagtctagacagtagtttgagggcttttgtttttgttggtccctctgtccctggatgaccttgggcaaatgcatttgcttctccacctgtaaaaggaaggtaattgtgctgtctgctccattccagagctgttggcaagacggatgtgaatgtgtccattaagagctctgagcatctttgagaagggtggtttgtaattacaaggtgttactatcactgctgctgttaggtgcatggagattgtgatagctggaactaaatcagctgcagctgcttgtctcttaccttc

SEQ ID NO: 799517 - DNA, 639 bp, Homo sapiens
ccaataaattccattccccctcactcgtcaaagtgtctgtgtgcctaacttttactggttgtacgacaagaacccagtttttttctacaacatttttggcgtccggatgtggggcttgaagaagggtgagtaatatgcgaaccaattttttttcctttggtttctatgtcattttctcctgggacctcttccgagggtagargaaactgcacaccaccccaccccaatggctgcaggcacgcgcgggatggattggggaatggcggctccccagctcccctcccggccagagctggaatgtatggccccagggtgcccagcagcaggctggcctgtgctccctgccacacgtccacagagccttcccctcccctcgccaagaggaactatttgcataagaataagagggtcttccccaggtatcttttcttttctctagcttgtcagtagttgacttttaagagaggcttttctttttccttttggaagacgttttgctgggccgggaatgatggggattactgtttatattttctgtagagttttaattgtaagaaaggatttgtgaggttggccttaaactatagccaatctggtgtgttttgcctgactttctatatggtccctagcaaactttgc

SEQ ID NO: 799518 - DNA, 639 bp, Homo sapiens
ccaataaattccattccccctcactcgtcaaagtgtctgtgtgcctaacttttactggttgtacgacaagaacccagtttttttctacaacatttttggcgtccggatgtggggcttgaagaagggtgagtaatatgcgaaccaattttttttcctttggtttctatgtcattttctcctgggacctcttccgagggtagaagaaactgcacaccaccccaccccaayggctgcaggcacgcgcgggatggattggggaatggcggctccccagctcccctcccggccagagctggaatgtatggccccagggtgcccagcagcaggctggcctgtgctccctgccacacgtccacagagccttcccctcccctcgccaagaggaactatttgcataagaataagagggtcttccccaggtatcttttcttttctctagcttgtcagtagttgacttttaagagaggcttttctttttccttttggaagacgttttgctgggccgggaatgatggggattactgtttatattttctgtagagttttaattgtaagaaaggatttgtgaggttggccttaaactatagccaatctggtgtgttttgcctgactttctatatggtccctagcaaactttgc

SEQ ID NO: 799519 - DNA, 573 bp, Homo sapiens
aagcccccatctaaggggagcctcctggaatttatttatttattttcaacgaactagccgggcatagagagagtagaatatgatgccacattctagcctgcaggggtggtagggacagaataagtctcaatgcagttaacagccatactgacggagcagcacatatggtaaggcaagaatcagtaattagccccacccacttctagataatgaaactgaggcttatgggttttaaggacactgccttgtcagatttgaacttaaacagtcagactacagagcacgtgttcctgaccactgggatacactggctctttcacagagcctctgtgagaaaatttgagcaacttrctttgggctggcagaggaagaaattgcaagtttcactgtattttcatgcctacgtacaatttgttcaaacattctggtatgtgctaggcaccgaggatatggagacaaacctcccatgtctgggcctcctggaactcactattttatcccaacctgggaagttgggaggagtagctgtgagtcaagtattatggaaagtcagaaaagggcacaagtaattgt

SEQ ID NO: 799520 - DNA, 575 bp, Homo sapiens
cctaagaattgccactgaagctgcagccaaagtatacagtttcctccaaaggacagtcagaactccgagtactagagacaaggccagagttatcaagcctcgaaatcagaactccaggcttcactgctgaatcttgtgttcctctttaaagaaaactgtgtgtacccactaaccttacctagtagtaactgactttcctttttttttcttctaaaaatccaacttcttcaggagtaactatctcattaacaagagctsagttaggtagttaattttctaagtcacttacccccaaagaatttccttcaatagcagtctgaacccctgtacatccataagccaattcttcactaattaaacaagcatcaaaagttccaagtccaagacctcctacagtatcaaaatgtttcaacacattgtaatatgtagtacatcacaatagaaataaaggtaaactattttaattgctttcaatatgaccaaaatttgttttaaaaggaaatttgcaatataatatctacatgtgttctggctggcacaataagaaattatactttcttaaagctctaaaattt

SEQ ID NO: 799521 - DNA, 639 bp, Homo sapiens
agttagttgagggtttttaacatgacggaatgttgacttttatcaagacttttctgtatctactgagatgatcatgtggtttttatctttagttctgtttgtgtgatgaatcacatttactgatttgcatatgttgaaccaaccttttatcccagggataaagcctacttgatcctggtggattagctttttgatgtgctgctggatttggtttactaacattttgttgaggatttttgcatatatgttcatcaaggttgagaacagtgtctcacacctatagttataatctcagcactttgggaggccaaggcaggaggcttaagcccaggagtttgagaccagcctggacaacatagtgagatcccatctctacaaaaagtaaaaaatttcctttgtgtggtggcacacacctgtacacgcagctacttgagaagctgaggcaggaagattgctygagcccgggaggttaaggttgcattcagctgtgtttgtgccaccacacttcagcttgggcaacaaagtgtcggatctcagtgccattttccccagacctagggcttatataccataaggaaagagtgactcagagagacgtatagcacaatttaaatataataacatcaagatcattttgac

SEQ ID NO: 799522 - DNA, 626 bp, Homo sapiens
cagtcaaaaccccagcgtttgcagaacctgtcacagagggagatgtcaggtgggagaaagctgttggagacacagttgcagaagatgaagtggtttgtgagattgaaactgacaagacattggtgcaggttccatcaccagcaaatggcatgattgaagctcttttcgtacctgatgggggaaaagtcgaaggaggcactccgcttttcacactcaggaaaactggtgctgctcctgctaaggccaagccggctgaagctcctgctgctgcagccccaaaagcagaacctatagcagcggcagttcctccccrtgcagcacccatacccactcgatgccaccagtgccctcgccctcacaacctccttctagcaaacctgtgtctgcagtaaaacccactgctgtcccaccactagctgagccaggagctggcaaaggtctgcattcagaacatcaggagaaaatgaacaggatgcggcagtgcattgctcagcgtctgaaggaggcccagaatacatgtgccaatgctgacaatttttaatgagattgatgtgagtaacatccagaagatgagggctcggcacaaagaggcttttttgaagaaacataacctcaaactaggcttc

SEQ ID NO: 799523 - DNA, 499 bp, Homo sapiens
gaactactgagctcaagcaatccacccaactcagcctcgcgaagggctgggattacaggcatgagccaccgcgctctgccaatgtgtctgttttcttataaagctactaacttcttgaaaggaaagatcataatttttcatttacatgcctaaaaccatccctgaaacatagcaggtgttcagcatatatttgaagcagagagggagaatcaggatggtggggaacaagggaaagagggagggaggcaraaaaaagtagctgtgactttttctcacttagatgaggacatcaagagtcccaaggtcctatctgatgacaggcagaaccaggactcaaagccagatcatttgacataaaaagcccttgtctatcataatgcttaatataacattctctggaatatttcaaatgtccctcaacaacataatcacaatattaaagtttagaatcttgaaactacatgccacaggtaggccaccctactcaacccatgctcac

SEQ ID NO: 799524 - DNA, 599 bp, Homo sapiens
gtattttttttaacaactcactctactatagtgatagtctgtcttcaaagcaaacctgtggggcagttagccatacaataaatagttgattcagagtggtgtggagatactcaagtttcctactctcagatttctgcaggtttccataagggcttgaaacacagccacacgtagttgaattggtgacatgcaaggggtttagataataattagtacattatgaggaaattgactggttcatattacagtatccttgtgtgcragagagcatcaacaatgtaaccatcatttcattgaaacacctgtcaggttgtttcaagtgcttatgatggatgcctgtgatctactgagctgaaatagttttcattgataattggggaaatcagagcatgtccataaagcaaaaatacctccagcatcctcaaaagtttgaaaatttctaaagtaaatcaattaactcaataataacctctagcctccctttctttcagtatttttcaattttatattgatattgaatacaatttgcagtacaatacaattagtgcctgtcctctgtctatgtacttgctctagtatatttatcttcatttgggata

SEQ ID NO: 799525 - DNA, 635 bp, Homo sapiens
aataaatttaaaaacattttttagttgtattaggtgcccgcactgaaaattttactcttagtcctgcctagccagcacgcagcccatgttctggcaaaccaagctgtgatctggacaaaggtaaaaccacaacaaagtatttaataatagtctttgattttyttcccctcaaatcacaagtaagatggtgttcaactaataatgttatgtatcatttaaaattttcgactcttcaaacagaagtttatgtaattagacaaaataattacttaaaagtaagtacgctttgggaataagattttgctttaatgcagtggtcttattaaaactaagtaataaaataacttttattaaaatattttcttaacttcccaaacatataatgaaaacactaaagatatcacacatattataaatatgtttactaataatagttgtgtgttttagaagtttcaaaaatgaatgcatgtgatgtggtcggaatttgttctaagttgttctgtctgtccatttccaggtcttttagttagaaagaggacttatcttcctctgagaacaatgcatggacagtaggatactacagattccagtctagtctttcttgtcattgtatttgtagtgcctaatatttcgta

SEQ ID NO: 799526 - DNA, 638 bp, Homo sapiens
accctttcctaattggttttctacactgtcatgcacacctttgaatgatgtcttcactttaaacttttttgcatactcacaaaccaatcagcatgcactccccattctgagtccataaagggccccaggtccagccacgctggggacttttctgtccttcgggtasgggaaccaccgccctgcccctccctggcatcccttccctgctgagagttttcctttcgcttaacaaattctactccactcactctccagtgtccccatgcctaattcttcctggtagtgagataagaactcagacctagctgagctaaggagcagaaagaccacaacactatgtggattaaatgaactagaatacatagagtgtttagaaccatacatgtttcataatatatactctattaatgttaactgatgctggttctcagttaactttaatataacttttccatgatattttattctaacttcctggacagcgaattaatggccctcctttttgactgggatttatgtcctcttctttctttaatatacaggtattgacctctggcagtgaggtgactaatttaccagccacctaatgctattcctgccttcatcactattcctaagtaccttcccttgaattatca

SEQ ID NO: 799527 - DNA, 602 bp, Homo sapiens
tactggcaactgagtactgggtactttccaagctgttgccacctctgtacttgtgagaagtaactttggttaaggttccttttccctaccacatagttcttcaggcaattctcttcaacaaatgttgaagatctcctcatggccaaaagtagtacaattttaaagagaaattacaatgtataaggaaaatttataatttgaagaggaaagccttggtgttaaaaagattagtgcggtctttagacctgatcttaatcaagctactaggatatgaaaccacattcaatgttaggaaagtaattttacctttctgcgccctagattcattcagacagcaattccygcttacagaggaaagcaattgaaggttaatccttcatcaagaggtttctcgcaggtgtccctgctcttgatgggacatgccaatcttcatttccctatattctttcttgtgcaaacgtttcttcatcagtccatttccagaatatttacctactctagcctcatagaaaatcagtgtcactgtcaagtaaccccaacctggcccacacagagggccttgctcccggggtatattcaagcccctgatatgttgtgcagtt

SEQ ID NO: 799528 - DNA, 430 bp, Homo sapiens
tttgaatagatagccaatattgggattggtgggtcaaatggtagttctgaatctccaaattgctttctacagtggttgagataatttacatttccagtgtatgaggacttcctcttctctgcagcctcaccagcatttgttttttgtttttgtttttgttttgactttttattaatagccattctgcctagtatcagatggtatctcattgtggttttgatttgcatttctctgataattagtgatgttgagcattttttaatatatttattgatcayttgtctgtcttcttgtgagaaatcttttgcccactttttaatggatttatttgctttttgcttgttgaattaagttccttatagattttggatattagacctttgttggatgtatagtttgcaaatattttctcccattctatatgttgtct

SEQ ID NO: 799529 - DNA, 567 bp, Homo sapiens
gcaggatctggttggatgagagaacctggctgaggaagaagattcagaaagtaatgccatgcccccaacggtgtgctgaatgcccccgcttttgaggcgcttagtgtgtggtgagggaaagggagtgagtgacataaagcagctctgcagggcgggacccagtgagcctggcatcatttttagggtgttcctctccttcatagagcctaaaggatgcaccaagctgtgcatcagtaattattgctctgctgtctccattgttagacgccaytttgggttactatccttttggcatttctttaatgatatcgggaatcaagttctgggataccattgtattactttgaatactagttcagcagctgaaacaaaggacagaaaaaaaaagtagttaaaataagagagaggtttctctctctctcaggaacagtctgagagtaagcagccagtctggacatggaggtcccgtggtggcaaggacccaggctatttccatctttgttgctcttcctcctcaacatacagcttctatctcatggtcaaaggtggctgctctagttccctgcc

SEQ ID NO: 799530 - DNA, 575 bp, Homo sapiens
ataatctattttctctcctttttcttgtagtttgtttaaaaggcaaacaaaaatctttcactttttcaatattccataaagatcctgttcaagagagaaagccaaatttcacctttgcattagtatacaattaatatcaaacccaattttaaacaagaccttatacacaaatctacccaatcttgatcagtttgaccataaggtaagagtctcataaacctgttataatcttttataattttctgttaaaaagcagatcaacagtgtaagaaaaccctgttgtgcttttatttcaatgtttgatttatagaaaagctgaataattaaataatatccctttaattttgaccaataagttcacacacagaatttttacaagattaatctttcacaaaccttccataacttggccaaaacttcagctttattctrcctaacataaagccatcctttaatcctctaaaccagaacaaaaaaccctacattcccatgccttcttataattttttaccggaaacatattctactttccttacacaccttgcatgtaaaaccgtttcttcagtagtcttgat

SEQ ID NO: 799531 - DNA, 516 bp, Homo sapiens
agtctgggaggcttctcagaggaggtgttgattcatcagaaacaagagtaagagtttgcttggtaaagaaagaagcaacagaaggacattccagactggacagaattaagtgagctcaaaggcaagaaatgagactgctcagggagttacaattaggtaggtgtgctaggaatgtgaaatttcagaggggttagtggctaaagatgaagatrgcaaaggcaggcatgggtcttgtctaccatgcactcaagctgggatcctaagccttggacaatggggagccactgaagggttttgagcaggtcagattcacttttttttttttttttagacggagtctcactgttgcccaggctggagtgcagtggtgccatctcagctcactgcaacctctgcctcccgggttcaagtgattctcctgcctcagcctcccaagtagctgggactacaggcgggagccaccacgcctggcttatttttgtatttttagtagacacggggttttgccatattggc

SEQ ID NO: 799532 - DNA, 516 bp, Homo sapiens
agtctgggaggcttctcagaggaggtgttgattcatcagaaacaagagtaagagtttgcttggtaaagaaagaagcaacagaaggacattccagactggacagaattaagtgagctcaaaggcaagaaatgagactgctcagggagttacaattaggtaggtgtgctaggaatgtgaaatttcagaggggttagtggctaaagatgaagatagcaaaggcaggcatgggtcttgtctaccatgcactcaagctgggatcctaagccttggacaatggggagccactgaagggttttgagcaggtcagattcacttttttttttttttttagacggagtctcactgttgcccaggctggagtgcagtggtgccatctcarctcactgcaacctctgcctcccgggttcaagtgattctcctgcctcagcctcccaagtagctgggactacaggcgggagccaccacgcctggcttatttttgtatttttagtagacacggggttttgccatattggc

SEQ ID NO: 799533 - DNA, 776 bp, Homo sapiens
gatgtattggggggtcataaaaatgtgggttttggttaagtactagggctgtgaacatgtgcctggaaaggtgttgtggttggtggaggatgcactgtggttttggggaggagctggggagtgtctctggaaaggttattgggattttaattgggtacctgcaagggtctggggaggcgttagagacctgaggtccctccatacgtgggaagggaagaatgggtctctgatatcagagatgtgccacaggctatcgtccgtgcatgcacaggtatgagggctgtaaccaggttcctggtgtcagggaggtgttgcaggttgtgggtaagcatgtggtggttgtgtgtttgggggtatgtgcatgtgaggtagctggatgtcggggggtatctgtatgtagagtgtgtgtgtggaagtgtgtgggytgggtgttgtaggtggagcagttgtgttttagaggtgttagagctgtgagtgtgtatgtggggcagttgtctatttagaaggtgttgggagctgtaactgagtccctggaccccagagaggtgatggggctgcagggtttgtgtgtgttaggggggatgcccctctgggagaatgaagggcagcatcctggcctttgctccggggcctaactgggggctacccgctagaacccctatggtatggggtgcctgtgcgggggtgttgagacaggcagtccatctgtctcagcctgtgcccaggcccaaggagcagagctgcctcctcgctccctggggggcagcagcggatcc

SEQ ID NO: 799534 - DNA, 603 bp, Homo sapiens
caaaagtcatcatattaaagcaatttttcccatttgtcattttataaactttcaataatgaaacagaagtttcacaagaggaaattgtttccaacttggagtgttttatcaaatactcagttccagcccttctgctaattgtctctatggagcagcagaatgtcttttccaaaagactatcaggagaactaaaaactatgcaacctgttaggtggcctctgaataaaaatgctctttaattgggagagtaaatcaagaacagagtaacagaaccaaatgatattgttgttaaactaatcaaatgagtaatcttcttaagatcatcttatgatcttgactagtttatggcctatggtgaaagtaaacaaacaaacaaamaaaacatagtatgtaaacatcattttgggcagacctggtcttcaggagttggttttttttctattccctctagattaaagacattgcacttaactttaaatcctcacagaactttagattctcctgaggtcaatccaactcaaagctcaattgatgaatctttaccgtatctgctttaaagcatacatattatgaaataatttacatttcaatattcctgaaata

SEQ ID NO: 799535 - DNA, 603 bp, Homo sapiens
caaaagtcatcatattaaagcaatttttcccatttgtcattttataaactttcaataatgaaacagaagtttcacaagaggaaattgtttccaacttggagtgttttatcaaatactcagttccagcccttctgctaattgtctctatggagcagcagaatgtcttttccaaaagactatcaggagaactaaaaactatgcaacctgttaggtggcctctgaataaaaatgctctttaattgggagagtaaatcaagaacagagtaacagaaccaaatgatattgttgttaaactaatcaaatgagtaatcttcttaagatcatcttatgatcttgactagtttatggcctatggtgaaagtaaacaaacaaacaaaaaaamcatagtatgtaaacatcattttgggcagacctggtcttcaggagttggttttttttctattccctctagattaaagacattgcacttaactttaaatcctcacagaactttagattctcctgaggtcaatccaactcaaagctcaattgatgaatctttaccgtatctgctttaaagcatacatattatgaaataatttacatttcaatattcctgaaata

SEQ ID NO: 799536 - DNA, 614 bp, Homo sapiens
aaccaaagtgacctcatttgcaattccctatctatgtctgggaaacagatagatttggtataaagataatactgaagactgtggaattcggcagtcttggatttgaatctcctgtctgctgctttgtgccaccttggcaaaccacttaagctctttgtgtctcaattctttcatctgtaaaacatggatgataatatactccttttaagtttgtattaggattatataagatttccatagcctggtggagagtaaatatttagcaactggtactcacagaaatcacttaacattttgtgattctgtgctttaatattatcaccttagccttgtatatttttattctaaatttcacacagacatatcctaccaatatctcaaggtctatttcaattgttatgtcttccataccatcttctytggtctttcacactacgagtactattttttttgcaataaatattcataataaaagagaaagcaaaaaagggatttgggagaacatgtacatatatatcttttaatcatttaaacaatcttaagtaataaatcttataaataaactgagattcaaaaaaacaaaaaacacaagtgaaggatttaaatcttggctt

SEQ ID NO: 799537 - DNA, 639 bp, Homo sapiens
tctatgagccttcagtgtattcatcttgcagataccaatttcaaattttgaatatatctttaataagttctattatatattatcacttctggtttttctagaatgtgcatcatcaaaatgtagtactttaatttttataawccttgatggtccataattttgttgaaaagaaaatgtcatcttcatttcataataaaacatttccttccttccttccttccttccttccttctttcgttccttctttattttttttttttgagatgtagtctcactctgtcgccaggctggagtgcagtggtgccatctcggctcactgcaacctctgcctcccgggttcaagcaattctcctgcctcagccttgcgagtagctgggactacaggtgcacgccaccgtgcccatctaattttttttctatttttagtagagacgggatttcaccatgttggccaggatggccttgatctcttgacctcgtgatccgcccacctcggcctctcaaagtgctgggattacaggcgtgagccactgtgcctgggcaggttttcatttttgtatttacaaacatagattacaataatgcattcaattatttttaaattcacattgtccatttcttttggatgcctgcctttct

SEQ ID NO: 799538 - DNA, 600 bp, Homo sapiens
ttagtattgtttccttccccttggtccaacttttaatattatagttcaattttgcagtcttctgttgtgttgttttattttattactagctaaattctatgaggactgttacacctttaagtgccacatatttggattaagattcaagttatttattaaataaataaatcttataaaacctaagaatcgtaatgtacctaaatgtctaatctaaatgtttactgttaaatgttgtcatagaacctgagaattcaccaggaaaattttactgatatccacaaacatatatcatctctatcattagttgcacatccagtgaaaatgataaaatatctacctcaatataaattaatatataaataaagagaaattggcaattcattagagtatgttgggaaagaaatraagtatccctatgccctatagtaaatcactgtgatgatttttttcaacatattttaaaagtcctaagtaccaaaattacaacaaagtttaatggaattgtatctcatttactcaggaaatttataagaaaatatgcaattgaatcagaattgctcgggtattgaaacagaaattgcctatcagtggctttctggt

SEQ ID NO: 799539 - DNA, 596 bp, Homo sapiens
gaaaatctgttaacaataaatgaggagacattattaaagggcctcatacatattgagttttcatatacatagagttgagacataaccaactttaaacacagaaaaggaagatggttaagtgtttagtttttgcttttgttttttaaattggtatgaggtgtgaatagtcaaggtaccttgaattaaaagaaattaaagcctgtggcaaaatagagacctattgatgggtctatctgctggactaaggttraaaaggaattgtttaaggagactactacagttttaattaaaccatctgcctacaagttgtattgaatgtctttttctaaagcccaacactgtgtattttgagacttgaaaggtgtaccatggttatactaaggataaggagggtaaggcatctcttgctgaggctctgtattgtgaccttagtatacgtagaaaaaaatgggaccttaatttgtattttaggtatctatgaggcaagaaatctatagaattctttatcctggaaaggcagggataaaaggaataagtcttagacagtagaccatgattttgtaaaaaaaaaaaaaaaaaaaaaaaagtgcaaatta

SEQ ID NO: 799540 - DNA, 596 bp, Homo sapiens
gaaaatctgttaacaataaatgaggagacattattaaagggcctcatacatattgagttttcatatacatagagttgagacataaccaactttaaacacagaaaaggaagatggttaagtgtttagtttttgcttttgttttttaaattggtatgaggtgtgaatagtcaaggtaccttgaattaaaagaaattaaagcctgtggcaaaatagagacctattgatgggtctatctgctggactaaggttgaaaaggaattgtttaaggagactactacagttttaattaaaccatctgcctacaagttgtattgaatgtctttttctaaagcccaacactgtgtattttgagacttgaaakgtgtaccatggttatactaaggataaggagggtaaggcatctcttgctgaggctctgtattgtgaccttagtatacgtagaaaaaaatgggaccttaatttgtattttaggtatctatgaggcaagaaatctatagaattctttatcctggaaaggcagggataaaaggaataagtcttagacagtagaccatgattttgtaaaaaaaaaaaaaaaaaaaaaaaagtgcaaatta

SEQ ID NO: 799541 - DNA, 625 bp, Homo sapiens
gccactctgtgtcttttatgtgggacatttagatgatctacaatcaaagttagcattgacatgtaaaatttttatcctgtctttgtgttgttagctggttgttttgtagacttaattgtgtagttgtttatagtgtctttagattatgtgctgaagtgtgtttctgtggtagcagatgttattttgtttccatgtttagcactcccttaaggacctcttgtaaggctggtctaatttccttagcatttgcatccctgaaaaggattttaggtctctttcactcatgaagctttatttttcaggatacgaaattcttggttggaatttctgtttttagggatgctgaaaataggcccttaatttcttctggcctgtaagatttcttctgagatatccactgctagcctgatggggttgtctttttatgtgacctgatccttctatgtagctgcctttaaragtttttctctcactttgacctttatcagtctgatgactatatgcctggggggtgatttggttgtacattatcttgcaggggttttccgtgtttgttgactttgtatgtcaaactctttagcaagactgaagatattttcatggactatatcctcaaacgtatttt

SEQ ID NO: 799542 - DNA, 572 bp, Homo sapiens
aagctggtctcgagctgttgacctcgtgatttgccttcctcggcctcccaaagtgctgggattacaggtgtgagccactgtgcctggcctttttttttttttttttgagacatggtcttgctctgtcacccaggctgcattgcagtggcacaatcatggtttactgcagcctggacctcctgggctcaaactgttcccccatctcagcctcccaagtaagtgggaccacacgtgtgcaccatcacacctggctgatttttttattatttgtagggaccaagtcttgttatgttgcccagcctggtctcgaactcctgggctcaagagaccctcctgtcatggcctcccaaactgctggcattacaggcatgagccmccatgcttggctttaggttatgtttttaaaatccagtctgtcaatctttggctttttttttttttttttttttttttgagatggagtatctttctgtcaccctgggtagagtgcagtggtatgatctcggctcactgcaccctccacctagtgggttcaaacgattctgctgactcagcctccaaagtagctatta

SEQ ID NO: 799543 - DNA, 592 bp, Homo sapiens
tgggttctctgcttagtgtcttgcaaggctgaaatccaggtgctggccagctgggctcttaccaggaggcttccaaagaaacccttagctcttagaggcttttataaagaccttgcacatgcccctgcgtcttcaagccagcaatgatgagttgaatccttctcacacttagaatctgtctgacttcgccttctgccgcatctctcactttctcttmtgccgcatctttcactgactttctaccttctttttttttttttttttttgtttggagacagagtcttcctctgtcgtccaaggctggagtgcagtggtctgatcttggctcactgcaacctctgccttgcgggttcaagcgattctcgtgcttcagcctcccaagtagctgggattacaggcgtgtgtcatcacaggcgtttcgccctgttggccaggctggtctcgaactcctgacctcaagtgagccactgcacccagcccctcttctgctttcaaaggctcatgtgattacattggatccttctagataaccccagataatttgtttccaagtcagctaaccaatagccttaattcggtctgcatagcagta

SEQ ID NO: 799544 - DNA, 600 bp, Homo sapiens
atatagaatcaggcaaatcactaagtctttgtgtttccatccctcatttgcaaaaaaattacccatctcagaaagctattttgaggagtgaatgagagggaaaacacaagagctttaaaacatactagcaagtgtaacctattagacaagcttcctatttttcatcctcctgctctgtgtctgaaagatacaaggatttgtggacttcttacagctgaccctgattcttgctctcagctgcagatattgcactttctattaaaggttcagccaagaaaatgggcaagacatttttttccttttcctctggctaagctctccactacctttcatccacaccacactcattcctgcttscaaatctttctgcgtgttctacccaccttgtggaatatctagcttctctttgccactctcactttctgtattcttagctaaaatcccatctcaaatcacatcttttgaaagaagacttctgtgagtatgattaggggcttgaaggtgccatctataactcctccctgtgaagattctggccaattaagtttaggtaccaaaaataaaaaaaaaaaaacccacaaaaaaacaataaataggaat

SEQ ID NO: 799545 - DNA, 587 bp, Homo sapiens
gtcttctttcctggcaatacttattgtctcagtgattggctttttgtgaggcaagcaatgggccctaaaccaaatccctgacatttgggtaacatttgggattttttttaagttgctataaaatagacagaaataattctgacaaatatcctaggcccagagctacttttttggttgtgtgaatgtgtgtatatatgtgtatatttgtatattttatatgtataattgtatatattatatatgtgtatgtgcatatatgtgtgtatgtttgtataatttaatgatccctcagacactgttgtggcattctacgtggctaaaatgacatatgatttgtgcattcttttgccttcacctgtaccacatgttgtggtcaccatcttatccctgaataccatgagatccacagttggagtgcagatgtaagatttcaagtgcatttagatagyaatatgtcctggaaacccagaaatgaacaagtgcattcttaaaaatcatctgccctcctgacatgcctctttagggaagtctatataagaaactaaatctgactcaaagtatgactcagtcattccagtagctgagtc

SEQ ID NO: 799546 - DNA, 577 bp, Homo sapiens
tttagattgctgcataccacatccataagtggtctgcttgtgtttctgatcaagcaatagctaagcaaagcaacactacctgaaggagtgcttcctgagatcttgtggaggaactcttttcttttttgagacagggtcttgctctattgcccaggctggagtgcagtggtaggatcatggctcacagcagcctcgaccttgtaggctcaagccatcctcccattcagcctcctgagtagctgggacctcagcctcctgagtagctgccaccatgcccagctaagttttgtgatttttttgtagagacagggttttgccatattgccyagactggtctcaaattcctgagctcaagtgatctgcctgcctcagcctccccagttgctaggattacaggcgtgagccactgcacctggctttctggaggaacttcattacacttcttatatgaacacttcccttaccagctcacaatatctaatcagggttcactgcaatttgaaccctttaattccttccctgtctttcttcttcttcaaatacttattaagcttctattctttaccagtcctggggc

SEQ ID NO: 799547 - DNA, 590 bp, Homo sapiens
aaatccttaaagttagaagcttgtacttgtcagtccttttcatatatctccttgaatacaaaacactttaaaattataattgcttgcaaaagctttcagtaaaataccagaacaaaactgtctatgaatgacaagatttaaaatggccatggtaaaagatctgataagagttcattacaatgcaattgataagaaaattttatcaattcagtgacatacaacattttaagataataactagaattatgactgaaagttatatcaagactatcagatttttaggaatttcayacaatttctggaacacattaataactcatccatataaatataactctaagagagttaaatgtcacttattttttgtcaatactttccatgcaatttaacacatcaaataactcaaattagtttaacatctctccttttataagaagagagaataaagtattttgagatattctgggtcccctctagaagctcccaaagttagtccaaagtcaaaaagacttaatttagaatttgattttggtttaaactaaataaaaagtttaaatactttattaaacaggatcatcggctagtgggaa

SEQ ID NO: 799548 - DNA, 554 bp, Homo sapiens
caaaaatacatctcattgtttctgaggcatttgagatccccctttttcttcagtgaactccacagatgagcaattttgattaggttaagacttccccactgtggccaccaaaattctaaattatttttgggaaggtttacctatttttctagaaaataataggttccaagatggaggaatcccaactctgtgaatttggataaacccattatctaaatcttcttagttatttcgcagaatcttcctagatatctttccatgatctttccygcctgaggcctcttactggacccagttcaggttttgttagacccaatctgatgttgaacccaatatgactttcaaatctagtctggattaaaaatgatcagataaactacaggtgcttgacccaagttgtggaacttgtatttgagggtgggtgcttactgagtgacctctggtgcagcaagaaaaacagtaagcacagtggtcttcctaggtacctatgtttgtttgttcattactctgagggtctccatcagcaccctggtcctcacttatgacaccagaat

SEQ ID NO: 799549 - DNA, 625 bp, Homo sapiens
aaataggtttcccttctccttttttttccactccacccataatattctcatcaactgagtcctctgaaacttctcctttcattatggagaagtatagtgtattggtttaaaaacacagactctagaaccaagctgccggttttaagtcctagctctgccactatctataggacttggacaagttaatcaacttgtctgggctttagtttccctatttaaagtggagcaaataatagyacttacctcatagagttatttggataattaaatgagttaacatttattatcacttagaacagtccctggcatagagtaagtgctatatttatgttttttaaaaaatgggaaaaaaatgtattaggaacctggtcacaaatgttcagtgacttcctgtattccttttctgggcattcatagctctccattatcacaggaccttcttcaggaagcttcctgaacactttccttcaaagcactcatgagctatcctgcctgtttggtcatttatatttttatacctgtgattcttttctctctaataagctatttttctggcattctttatagttccatgaattatacattaggtagattgagaggatcaaaataataataaaagcagcat

SEQ ID NO: 799550 - DNA, 625 bp, Homo sapiens
aaataggtttcccttctccttttttttccactccacccataatattctcatcaactgagtcctctgaaacttctcctttcattatggagaagtatagtgtattggtttaaaaacacagactctagaaccaagctgccggttttaagtcctagctctgccactatctataggacttggacaagttaatcaacttgtctgggctttagtttccctatttaaagtggagcaaataatagcacttacctcatagagttatttggataattaaatgagttaacatttattatcacttagaacagtccctggcatagagtaagtgctatatttatgttttttaaaaaatgggaaaaaaatgtattaggaacctggtcacaaatgttcagtgacttcctgtattccttttctgggcattcatagctctccattatcacaggaccttcttcaggaagcttcytgaacactttccttcaaagcactcatgagctatcctgcctgtttggtcatttatatttttatacctgtgattcttttctctctaataagctatttttctggcattctttatagttccatgaattatacattaggtagattgagaggatcaaaataataataaaagcagcat

SEQ ID NO: 799551 - DNA, 594 bp, Homo sapiens
agcacagcttttttcccttcttgcctgtaagtgacctatacctgagctgacttggagcctcttcctagtctatctctggtgaatattccccttagcaagtggcattttcttggtctttcccttcttgaaattattcttagagatggtcaccatctactgcttgaccattaaggtctgtgacagagaagggatgctgctggcttctctggtttaatgttttgctggcctycactataataaagcatctgaagtactggattatcagctagttctttgtttttccctgaaggaggggtgggagcttaggttaagtttctatcaagcacacaaatatatattgagattacatgagtaagtgtaagattaaggaggaaaacatatagatggaaggataaagccaggccttttggtggttatgatggtatcgctatctttttttttaatctctcatatatatatacccttatcctacatgaattcaacagccagaagaagagtctgcgctttttgtgatgttttagatctctgatactgactcattgtttaaacaggccttcttacctctccctcaaactgacttggtgacttgatgtc

SEQ ID NO: 799552 - DNA, 650 bp, Homo sapiens
ccggaggatcctacagagggacagagtcctggctcatcttaagaggcccagacctacctccacagcacacagtgcttctgtagagtgctcccggagccaaggaccagggagggctcgtctctagcactgggaccatgagttgtgtaattctgccctggtagataacagtaaatacaggagtcccccattatccctcggggacacgttctaaggcccttggtggatgtctcaaaccgtggacagtaccaaactctatatatactatcatttttcctatacatacgtatctgtgataaagtttaatttataaattaggtatagtaagagattaacaaaatagaacaattgtaacaatatattgtaataaaattatatggctgtggtctctcaaaatatcctattgtgttgtactcacctattttgaccacataattcacttaattatggaattaagygaaactgtggatcaatggggactacttgattagctaaaactataatagctaacatttatggagcacttactatgtgggcctggaactgctctcaacactttgcattcattaatttgtaactttcacaacagtaccatgaagtaagcactatcatccccatttagagttgaagaaactgactctcagagattaagt

SEQ ID NO: 799553 - DNA, 559 bp, Homo sapiens
caatgtgttgtctcatttaatcctcacactagctgtgtgatgtgaatggccaggcagtgtttgtcctgatttggagagggagatgcggagaggtcgagtcgcttaccaaggcctcaccactagttgttggcagagatgacaaggctactgtcatgttaccagtgcgccatctggtagggaagtgctggcacgtatttccgagggccttttgggtcttttcttttttaagttattaggggtgggagccatgaaaatgatagtaaccaaaaatcttttatcatttctttaagcctgaacttggctttcatatttatcctgctgtctatatattaaggggaaccttttgcktatgtcaggaaacagatcaggtcagatcagctccccaacttaagaggtcattgagttcacctcctcattttacatgtaaggaaactgacctactaagtcactgatgctggccgactgtgcacggcttactgattttcatattgttgtgaataaaatgtgcagtttcacataaactttgtgcagggatccacatggattctttttttaataa

SEQ ID NO: 799554 - DNA, 628 bp, Homo sapiens
actttcagtgtggttgtctctttgctctgctgtgaggctgtttaattcagctaatagatttgccaggcaggagttggatatgagtccttattccttctaacaacctaatggaggtatgtcaatctctcaatggactttcttgaagcctccttctgttggcttgaattggggtgaatgcccccatcactcctcccccatagtaggatagaaagagcacatagcacgctaccggtactctcaaaaataaagtttatcactataccttcattctctaaatgaacgctcttctttgatgaaggctaggattaacgatgagtcactggaaactcaggccctcctctaatgtttgaggggcctgctcaagagtacagtggaggcttaccagacatatatttataattagaagttcaaataaagctaaacagaagtaaatatgttctatyctccaatcttgacagatctgtttttctaaaaacaaaattgaaaaatatgtgtataactctggtttctatataaattaaaatgagcatactgttaacaagccatcaatgtttggataagtaataaagacaacttatgcttttatgtttatgctataaaatttgtcttgcctttgatttaataaaat

SEQ ID NO: 799555 - DNA, 631 bp, Homo sapiens
taatgcgttcggggaaactgaaaggagctgaggaacttttgggaaagttggaacatagatttcttttcctctgctgtgcttaaatagtggagaatattactattgctactacatgactgctgctgttgctgctgctactattattattattattactacaaacactaacacttgcaggtctcttactttatgatggagacagttccaaatgctttacatgtattttctcacttaaactcacaacaaccccatggaatagatgatatcattgtccccattttaaagaagagggaattaaaactagagtagttatgtacttgatcaaggccacatggctactaagcaatggggytaggatgtaaatctagctataaccattctgctatgggaagcttgtaactgctgaagacataaagtgaagtctgaagcttctgaggggctactgtgaggacctcaggaagaaatgggtccagaggaagcagaggtgatatcttatgaatccagtactgaattcttcctggagccagaaatagctaagtctgccctttgaagttatgtgaatcaatagattttctctgttgcctaagccattttgagatgggctttctctctctttcaattgaaaacaatt

SEQ ID NO: 799556 - DNA, 582 bp, Homo sapiens
tttataataaaatatcatcaagtaaagaatagggtgaaattaacaaacacctacaaaaaaaccctccagcaaatcgtatactgaatgctttcaccctaatattgagaataagatgaagatactgtcatcaccattcttattcatcagagtgctggaagttcaagattgtgaaataagaaaagaaaagtaaatcaaagtcgtatagatagaacacgaagaaataaaatgttttctatttaaagataacataattgtttacataagaaataccaaagaatctacaaaacaattgctagaactaatagttcagtaaggtcacagaatkcaaggtaaacttataaaaataactatatttttgtaaactagtaatgaatacatgacattgaaattaataaaatcaataccatttaccacctgcagttttagtagagagacagacaatggaagggcacagataaacaaaaaatagacccatataaataggcccaattaaattttgacaaaactgcaaaagcaattcaatagattagaagagtcttttcaacaaaattatgttggagtaattggataccataggacaaa

SEQ ID NO: 799557 - DNA, 571 bp, Homo sapiens
aatttaaaaaattaagattcttacatccatataactttctattttgcctttgaggttttaaaattatcactattgattaaatgaatgactactatttataatatttatatatataaaaatttataataacttgtgatttgatcaaatattttgagccttttaacatctttgataaacaccatcaaaatcaaaattctaacctaaatttctgacctagacttacactggggacttatcaaaaccataaaaattaatcactgcaaagttatagaattgttttacaacttccaaatggaacattgaccccagtatcaccaccttcagtcccttgaaaaggtccttaccaggtgctattaactaatcctgtgctattaagttacaggcttttgaaacctcaatatacacrtctcatctaaaaaggcaccatctgctgccaaatcttgaatgtgatgtcattatctgacaccaaactcaaagtaaccaaagccttgtctccagatctagaaaaaggcaacattcaaagtaaattgctttcacaaaacgtggggacaggcctataataaaagacatt

SEQ ID NO: 799558 - DNA, 551 bp, Homo sapiens
gggccgttttataagatttgggtaggtaaaggaaaattacagtcaaagggggtttgctctctggcgggcaggagtgggggtcgcaaaatgctcagtaggggagtttttgagccaggatgagccaggaaaaggactttcacaaggtaatgtcatcacctaaggcaaggaccggccattttcacttatttttgtggtggaatgtcatcagttaaggcagggcagggtattttcacttcttttgtgattcttcagttacttcaggccatctgggcgtatacatgcaagtcacgggggatgccacggcttggcttgggctcagaggcctaacagtggcacacgcctgtagtctcagctacttgggaggttgaggcaggagaattgcttgagcccgggaggcagagsttgcagtgagccaagattgtgccactgcactttagcctgcgcaacagagctagactccatctcaaaaagtaaatgaataaaagtaagtaagtaaatgtaatccccagtgttggaggtggggcctggtgagaggtgtttgggtcatgggg

SEQ ID NO: 799559 - DNA, 604 bp, Homo sapiens
tttttccatctgtgcagtttagggtagatttggcatacgctcaataccaggcaagaaagaaactatggtttaggctgcttttaaagttaaaaaaaaaaaaggcagaaaaggaaactatttccttttataagcaggaatgttaaaatagggaaagctttcatcgagcaattcactactgaatcaaaactatttgatccatattctcacctacctcccctcactccgtatttgtgttgtggttagttgtcttctagatcatggtttatatatcatggtcacttcctcactaaagttaaacaatatagattattcttaaccagccacatgtgactcagaggtcaaaagagtgttctttttgggtaatctctctcaattgctaatayttaaggacctggttttcagaaccattgattatttaaaatgtatgtctttaagattaggctccacccaagatgcctcctcagaggctaagtttgaggttgagaaactagcttaaggagaaagataaagtagcagaaatgtcatggcgggtgagctgatgactcactgccccttccttgaactgcaagaatgacaaaatggaaaaggggaaaaaaaaaggcaa

SEQ ID NO: 799560 - DNA, 531 bp, Homo sapiens
tttttttttttttgagatggggtctcactcttgtttcccaggatggagtgcagtagtgtgatcatggcttgctgcagcctcacctacctgggttcaagcgatccttgtgcctcagcctcccaaggtgctgcgattacaggtgtgagccactatatttggtctcatttgtatttttgaaagatcactggtggcagtgaagataccagtgggttggagggagggagactagaggcaataacagtttagataatagatatttactgagcccctgctaagtgccaggcacygatccaggtgctgggaacctagggggtgagtgaataagacagtctctgccctcatggagcttacattctaatagtggtagagtagtgtggtggtaggaaagcagactatatatatatatatatatatatatatatatactatatatatacatgcaacaaatgatattttttcagatggtgataagtaatttgaaaaaataaataaatagagctatgggagttagagtgtttgggcattgggatg

SEQ ID NO: 799561 - DNA, 621 bp, Homo sapiens
tagtttgctcagaatgatggtttcatccatgtccctacaaaggacttgaactcatccttttttatggctgtatagtattcaaacatggaatatattttaagatagatataagactaaagcaaaggtaaggaaaggrtggaagaataacgtgtgtaaatgatatatgttctgaaaaatagaaataaagccaataaaaatgggagcagaatggaggaaggcagataaaaaggggagaatagaatcagactgtcacaaagttaataaataattgggagtcaaagaattcattattgaaagctgacaaaccagatagtaggagagtaagaacaaaagggggctaaggacattataaaaagtattagtgtaaagataaccactagaacaaaaatgcggactcccctaaatagaaaaacaggcaaagaaaacaaatcacagagtgaatttaacataatagaaacagtaaaaataatataaaataatatgacaggcttaagactaaatatatcagtaatataaatatataaatgagctgaaaatcacctaataaaaggaaaatattttcagattgactttcaagcaaaaccaattcattgctctgtagaagagacatacctaaaacaa

SEQ ID NO: 799562 - DNA, 621 bp, Homo sapiens
tagtttgctcagaatgatggtttcatccatgtccctacaaaggacttgaactcatccttttttatggctgtatagtattcaaacatggaatatattttaagatagatataagactaaagcaaaggtaaggaaaggatggaagaataaygtgtgtaaatgatatatgttctgaaaaatagaaataaagccaataaaaatgggagcagaatggaggaaggcagataaaaaggggagaatagaatcagactgtcacaaagttaataaataattgggagtcaaagaattcattattgaaagctgacaaaccagatagtaggagagtaagaacaaaagggggctaaggacattataaaaagtattagtgtaaagataaccactagaacaaaaatgcggactcccctaaatagaaaaacaggcaaagaaaacaaatcacagagtgaatttaacataatagaaacagtaaaaataatataaaataatatgacaggcttaagactaaatatatcagtaatataaatatataaatgagctgaaaatcacctaataaaaggaaaatattttcagattgactttcaagcaaaaccaattcattgctctgtagaagagacatacctaaaacaa

SEQ ID NO: 799563 - DNA, 621 bp, Homo sapiens
tagtttgctcagaatgatggtttcatccatgtccctacaaaggacttgaactcatccttttttatggctgtatagtattcaaacatggaatatattttaagatagatataagactaaagcaaaggtaaggaaaggatggaagaataacgtgtgtaaatgatatatgttctgaaaaatagaaataaagccaataaaaatgggagcagaatggaggaaggcagataaaaaggggagaatagaatcagactgtcacaaagttaataaataattgggagtcaaagaattcattattgaaagctgacaaaccagatagtaggagagtaagaacaaaagggggctaaggacattataaaaagtattagtrtaaagataaccactagaacaaaaatgcggactcccctaaatagaaaaacaggcaaagaaaacaaatcacagagtgaatttaacataatagaaacagtaaaaataatataaaataatatgacaggcttaagactaaatatatcagtaatataaatatataaatgagctgaaaatcacctaataaaaggaaaatattttcagattgactttcaagcaaaaccaattcattgctctgtagaagagacatacctaaaacaa

SEQ ID NO: 799564 - DNA, 534 bp, Homo sapiens
tacaaaaagtgagcaaaagatatcaacaattaattgaaaatacaaataaccaataaaaatatgaaaatatattcttaatcttattaagtacgcaggtaaagacaaattaaaacaatgaaataccaatttttattcatcagattggccaaaactaaagcctgaaaatataaagtgtccatcttgctgtgtgtaaatgggaaatctgaatctgatggtggaggcgtaaattggacagctttttgaaaagaatgatttagcagtatctattacaaygaaaaacatagatacctttgcctcagtaagtttacctccaggtgtgtatcctaaagaaatacttagaaaggtacctccaagagacatgtacaaggaagttcccttacgcattgtttgtaaaagtaaaacagtgatgatctcaatgcccactgataggggaaaggtttaattcaccatgattcataaatacagagaaattctatataaagtagaatagatttgtgtggcatggaaggatcgccaaaaagtattttaagatta

SEQ ID NO: 799565 - DNA, 534 bp, Homo sapiens
tacaaaaagtgagcaaaagatatcaacaattaattgaaaatacaaataaccaataaaaatatgaaaatatattcttaatcttattaagtacgcaggtaaagacaaattaaaacaatgaaataccaatttttattcatcagattggccaaaactaaagcctgaaaatataaagtgtccatcttgctgtgtgtaaatgggaaatctgaatctgatggtggaggcgtaaattggacagctttttgaaaagaatgatttagcagtatctattacaacgaaaaacatagatacctttgcctcagtaagtttacctccaggtgtgtatcctaaagaaatayttagaaaggtacctccaagagacatgtacaaggaagttcccttacgcattgtttgtaaaagtaaaacagtgatgatctcaatgcccactgataggggaaaggtttaattcaccatgattcataaatacagagaaattctatataaagtagaatagatttgtgtggcatggaaggatcgccaaaaagtattttaagatta

SEQ ID NO: 799566 - DNA, 534 bp, Homo sapiens
tacaaaaagtgagcaaaagatatcaacaattaattgaaaatacaaataaccaataaaaatatgaaaatatattcttaatcttattaagtacgcaggtaaagacaaattaaaacaatgaaataccaatttttattcatcagattggccaaaactaaagcctgaaaatataaagtgtccatcttgctgtgtgtaaatgggaaatctgaatctgatggtggaggcgtaaattggacagctttttgaaaagaatgatttagcagtatctattacaacgaaaaacatagatacctttgcctcagtaagtttacctccaggtgtgtatcctaaagaaatacttagaaakgtacctccaagagacatgtacaaggaagttcccttacgcattgtttgtaaaagtaaaacagtgatgatctcaatgcccactgataggggaaaggtttaattcaccatgattcataaatacagagaaattctatataaagtagaatagatttgtgtggcatggaaggatcgccaaaaagtattttaagatta

SEQ ID NO: 799567 - DNA, 599 bp, Homo sapiens
atgaccagagaggccagtgtagctgggggccagtgagtaagggtgaactgggccatgtaaggttttggaaagccgttagcttttctccactgggaagccattgaaagatgatgagcagggctgcagtgtggagagtagactgcagggaagcaagggaggaggcagcaagaccagttaggagctaccacagcaattcagaacaaaatgaggctgagttgcactgttcaaaaggtggaagggataggaagggttgaattctagactcattttgaaggtagagctgataggatttgctcatgaattggattgggaatttgtaagagaagagtcaataataactctgaagatttgtggcctggcaggtgaatggtggtacygttactggggtagggaacgtgctggggtgtggtcaggatggggtgtcaagagttcaggttcaggcatgttaagttctaggtacctgttagatggctatgagggaatggtaagtcagttggaggctggagttgactgagagatctagactgtagatacagatttgggaatcaccagacatagaatggaatgggatctgataggaagcaaggagagatagaaaa

SEQ ID NO: 799568 - DNA, 534 bp, Homo sapiens
gtgagcgcccaggccatctggctactacagataagcaccccagcccgggagcacagacgctgaacgcagccgcctgaccagaatgcagacaccagggcagataccattctgaagctgtggactcttccctttctggggaaatcagtgagttgatattttctatgttgccacagggagctctttctggcaaaggaaacggaaagaaaacgcaggatctcctcaccaaagcacagaatggggaaaaacaccaaagcctgggcagttgggcagttaggtacaaatctaccaagtgagcagacttaactaaaagggattgtgatgatctactccaacaatttcatttttaaaattaggaaacgaggccgggcatgatgacttacatctgtactcccracactttgggaggcagaggcaggtggattgctcgaggccgggagttcaagaccagcctgcccaacatggcgaacctctgtctctactaaaaatacaaaaattacaagagcatggtgacacacgcttgtaatcccagctacc

SEQ ID NO: 799569 - DNA, 646 bp, Homo sapiens
aatcaaaacattgcaaaggtgggtgtggggaaatcaagctattatctttaggtatattctattcctaggtgtttaaaacactaatattaaaaagtgatatggagcttcacctaccctctggcaatttgcagttattgtcctttgatcatgtaaagcaactgagatcatttgctcctgacttcacttcactaatctatatccttcattttttsctccaagtgttccttcttctgagtgcctagtgctgctccagtacctagatatctctctctccccctctctttctgtctcaatatccaatcaatcccaagctgtattacctctttaccaactttgggaaagtggaccagtatccaggcttggataagccaaggaaaaatactaaggaactgcttaaagctctagtagttcttctactttgctgtttctggctttggccatctaaagcaaagttccttggattggttgacagtgagatagtctctagattcttgtgtctctttttagtaggaccacctaagatgtatcatccattgtgtaatgagttcttgaccaaagaaaagaaatcttaaggtcttcggactctgtcatctttcttgtttgccactctttggactgtaatttgaagagaaaaaaccttgttttc

SEQ ID NO: 799570 - DNA, 612 bp, Homo sapiens
tattgttcagaacagtaaatatcatagtggttatgtagaagcaactgatacttaaaagttgtagtagttaatataaaacttttaatcatatgcttattttactaaaaaaacattacaaactataaaaactcaaacctgagaaaagcaggcccaaaacgcttaaaacttactttgatggtgtcattatgaactatcttcctactgaagtcaaagtaaagtaaaagtgatttcaaggggacttcctgaacactaaacacaaagtagaaatctgtgagcttaattaatatmttcaagagtctctcatgggcagaagcatcctcctctcgagagatctaaaatgtacaaaagtgtaactgatgtgaacaaatgttatccctctctgtggtagttttgtaataatgccttacagacagcaggcactactcagtgtttaaagttcttctacatacactttatcatttaatccctactctgtgaaatagatcttactcttctcactttacagataagaaaactgagtctcagagaaattatggcttgtcctgggtaagtaacaaagcctgtgtaatattctaaagcaaaagaatgaaactgtaatgatgaaactttcta

SEQ ID NO: 799571 - DNA, 584 bp, Homo sapiens
aattccatttatctaatacactcctctgctgagatatttaacacatcttcatctgtactctcttctatctctggcaagttgccccaaagtaggatgtttacacctgaaaataaaaaatcataaaattctttaatgcttactactgttataactcagaacacaaattacgaaactttatatgttaatattcttatgtaaaccatagtgttagcagtaaaaagagtagctattgaagaatgtactgcaaataaaattacctaatattatccatctaggacataaaytttatttatttattttgagagaaattctctctgtgttgcccaggctggagtgcctggcaggatcacggttcacaatcacagatcactgcagcctgaacctccagggctcaagtgatcctcctacctcagcctcccaagtcacttggactacaggcgtgtactaccacacatggctaattttattttgtagatacaggttcccactatgttgcccaggctagtctcaaactcctgggctcaagcaatcctctctccttgacctcccaaactgttgggattacaggcatgagccaccatgcc

SEQ ID NO: 799572 - DNA, 587 bp, Homo sapiens
acattattagttaaaagcactaaatggaaaataactgacctctaggatagccaattaacttcacaagaaaagcaaatctttttttttttctttttgagtcggagtctcgctctattgcccaggctggagacgagtggtgtaatcttggctcactgcaacctctgcctcccaggttcaagtgattctcrtgcctcagcctcccgagtagctgggactacaggcaaatgccaccatgcctgggtaatttttgtatttttagtagagatggggtttcaccacgttggtcagggtggtcttgaactcctgacctcaggtgatccccctcgcctcggcctcccaaagtgctgggattacagatgtgagccaccacacttggccagaaaaacaaatcttaagctgtccagttatcagtgtggacacaaagaggatccagcaattcaggatacccaccccatatacactgagatagcagccacatggcggaatggaatgagccaggatttggagatttggtttgaatccagtgttcaccactgctagtacaccatgcatggttttactacaaatgcatgcaacatagacaatat

SEQ ID NO: 799573 - DNA, 587 bp, Homo sapiens
acattattagttaaaagcactaaatggaaaataactgacctctaggatagccaattaacttcacaagaaaagcaaatctttttttttttctttttgagtcggagtctcgctctattgcccaggctggagacgagtggtgtaatcttggctcactgcaacctctgcctcccaggttcaagtgattctcatgcctcagcctcccgagtagctgggactacaggcraatgccaccatgcctgggtaatttttgtatttttagtagagatggggtttcaccacgttggtcagggtggtcttgaactcctgacctcaggtgatccccctcgcctcggcctcccaaagtgctgggattacagatgtgagccaccacacttggccagaaaaacaaatcttaagctgtccagttatcagtgtggacacaaagaggatccagcaattcaggatacccaccccatatacactgagatagcagccacatggcggaatggaatgagccaggatttggagatttggtttgaatccagtgttcaccactgctagtacaccatgcatggttttactacaaatgcatgcaacatagacaatat

SEQ ID NO: 799574 - DNA, 658 bp, Homo sapiens
taaacacagaagattattaaatttctatcttaataagacagaatggctgggtggggtggctcatgcctgtaatcccagcactttggcaggccgaggcaggcggatcacctgaggttgggagttcaagagcagcctgaccaacatggagaaatcctgtctctactaaaaaaaaaaaaaaaaaaaattagctgggcatggtggtgcgtgcatgtaatcccagctactcaggaggctgaggcaggagaatcacttgaacctgggaggtggaggttgtggtgagcttagatcgcgccattgcactccagccttggcaacaagagcaaaaactccttctcaaaaaaagaaagaaagaaagaaattaaggtaggatgcagtggctcatacctgtaatcccagccttttgggaagctgaggagagaggatcacttgaggccaggagtttgagatcagcctgggcaacakagcaagaccctattgctacaaaaataaaaaacttagccaggcctggtggtgcctgcctgtagtcccagctactcaggaggctgaggtaggagaatcacttgagcccaggagttcaaggctacagtgagctatgatcatgccactgcactccagcctgagcaacagtatgagacccctctaaaaacaaagaaaggga

SEQ ID NO: 799575 - DNA, 634 bp, Homo sapiens
gagcagcaaagcaactgcttgtacttttttatgcttgaaactatttggagtaggagtgaggagctagcattgttttcagggcatgggaaccccctccccacctcactagccaaatatgtttgcctgggccgagagtgtcagatctctgagagatcttgacagagtatttaaatacattctgccctcggacaattcttcagtgttaatcatttcaggaaaagggctgtcagctaacctttaaaatcctttccagaatagtataccacagcccacctttccatcttgttccagtgacccaatctataaatggtcagttccttcatttgcagaacttgaaatagtttaaagaagagacttgatgaattgaactcatgtttttgctgctgtggccacaccctctwtacagacatttgcttcatttgggttctcagcaacttgggaaggaggaggctattgatgaaactttcaaggtgttggcttatagctactggagtcttcttctttcctgtcccctcccctcctcacttcctccagtgttgggacactttgtattgaacaagaagatcatgagctaatttcaacctggcagccatttatttagcacctactgtatgttgtcttttttttttttttg

SEQ ID NO: 799576 - DNA, 651 bp, Homo sapiens
ggtacactcacacaaactgtaaggaagaacaccatagctcatgtaacaggcatttcccaaggagcattgaggtacacaagaagaggggatggttaattcagactggggattccagtgaaagcttcaggaagggatttcttcttccacctctcagttttaaactttttaactatgttagaggaagatgaattctggaaatttgggggcaagagattttgttaaggaatacctgagtactgactgtcctctgaccctcctgccaattcaggatgtggttcttgttagagatgaatttgttcaaaaaccacgagtgcccatgttggtaaacattcctttaactggaagaaaacagaacatcaatagaaaggtaagcctgagtagagtcccagtaagaatgtggctattttctcacctctgctagagctggacctgcagagtgtgtcactggcagctgtgagtacttttagctagggagcttgtggcctaggtaagyctgccaagacaggctgcacatgcacttgggctctgtgtagctactgccattcagcttaagttttgtatcagtagctaagtagagtcagagctagatcaggccaaatagactgggagtgagaaagtaggagagtgaatctgtttagcttcttcctgtct

SEQ ID NO: 799577 - DNA, 639 bp, Homo sapiens
aggcagtcccatcacgggggtgatgggagaccgttactgatcatcaggcattagattttcataaggagtacgcaacctagatccctcacatgtgcagttcacaatagggttcatgctcctatgagactctaatgccactgacaagaggcagagttcaggaggtaatggccacctaccccttacctcctgctgtgcagtccatggcctggagattgggaagccctgctactcctgtcacatggtaacgtgacactgcattctttctactacattctttctactcctagttatctataggagctatctatctcctatatatagataaccctccaccagctttatattcaaatcttcacaaagtctcttattaaagggaaaaatctctccattgctttattttgaataataaattactaacaggcttgagttcaaatcctggctccatatttatctgctgtycaagtcatttaatctccttgccttggtttcctcaactgtaaaaggaaaataactgatagcacctatgtcaaaattaagtgtggggttcaaatgaatcaaagcactctagttatatcactgtgccaggtaagtaaactgtgctcgctgctatcataaaaacagtgtcatcatcatcatcat

SEQ ID NO: 799578 - DNA, 593 bp, Homo sapiens
aatccaaataaaagttatgcttccaaatgcattaataacataaagatgaggtgaagctggtaaactattaatatgtctgttactactactaacaacagctaacatttaagtgcatgcttgaagccaggcacagctggaagcactgggaggaactcatttaatccacacaaccacactatggaraggtactattatgatgctcattttacaaactaactgattaaataagtacttgctcaagggtaaaactagtgggtcttggggctggaactggaatccagtcactctattaccattatgccctttctggcaccacacactgccaccttattatacactgactatagcaatgtaaacggaggcaatcctttcagaaagcaatctggcaatagaccagaagccacagaaatattcttccgaatgttcttcttactgctctctggttatctatcatccatgctcaaagattcaccacagctttatttaaacaaaaaaggaaaagtggaacaaaacttaaatgcctaataacaaggaaatggtacaatagccaagatttggaagcaatttaagtgttggataactaaggttagcgg

SEQ ID NO: 799579 - DNA, 619 bp, Homo sapiens
gcaccagtgcacaccagcctgtgcaacagagtgagacttcatcttaaaaaaaaaaaaaaaaaaaaattttaggttttcaaagtataaagatgaataacatttttgaaaaaaaaattaccataattatagctgagactaattttttcagttttattttcttaaagcattttataagcatttatatgctttagagccactttttttcaaaccctgggccctgtgtaagtgagtcatatcatctaaggcacagctcatatgtcagcttttctaagtcttttctaactcccacaagtagcgttaatacctctgtcttttgtggcacttaccaggttggattttgaaatccttaaaatgtcagttttctccrcttatataaatttttccagggcagcagccctaatttattcatgtattcccaatgatcggcatatactaagcttagcgttctgtagatgcttgtggaatgatgaaaaccggtaaatgaaatgaaagttgtaataaagttcagattgtttaatagtttgcttgttttggaataagcaaatacattagctgcctttggcaatatttttattgtacagaaatttctgaagtgctaatcgtaatgtgaattggctta

SEQ ID NO: 799580 - DNA, 577 bp, Homo sapiens
agttttctttctacacttgagagggcctcagaaacccagaaattttgcgggtatgtgtgtgtgtgtgtgtgtgtgtgtgtgtgtgtgtgtgtgtgtgtgtgtgtgtatggtccgtccgcagactcttcaagaactcgaatgccattctccctccttcggatggacagcgccccgcgtgcccgcacacacccggttcacttacctgaggcatctgcggatcgttgatgtcccagctgagctgcatcccgtaggagcacacgccgaccgcttcctgcaccgcggccgccggcatctgcccaactcgctcgcgctttccgcccagggttctgaaaaatagaagaaaaaaggacaggtgcgccaggtggrttttttttcttctctttaaagaagaaagtggggtgtgtgaaggggaggtgcagagagagagaaagagagagaggctgtttagatatctggaagctggggacaatggttatggacccgggcggggccttgtccttggccgcggtgctgaacgttctccacccgaacggcagcatcgacctctggcagctgccccctcctttataaagatata

SEQ ID NO: 799581 - DNA, 583 bp, Homo sapiens
tggttaaacttcgtctctacaaaaaatataaaaattagctgggtgtggtggtgcacacctctagtcccagctacttgggaggctgaggtatgaggatcacttgaccccagaaggtcaacactttagcaagtgctgtgatcacaccactattctccagcctggggaacagagcgagaccccacctccaaaaaaaaaaaaaaaagagataagtgagcctccccagcacaggtggaaaaaaaatcttgcgatctgagaatctgctgaaaacaaactatcaaagaagacacagaatttggaaagttctcagaagtattcttgattatagtaaatatgcctcaggcctaggtatctttctttygttaaaaagcttccagctaattagagaattttttcctataggaatacatatccaatttcatattaaactgctgggattggaatgatttaaaataaacttctgcaacctttcctcccccactccagaatatacagtatttcctcaataaagcaaaagccatcttatttttcccatgattttaactgagactggtcactcttagaaaaaaaaaaattagaaaaactc

SEQ ID NO: 799582 - DNA, 634 bp, Homo sapiens
gttttccagccctctttccaccttgctgcgtagaaagtgcagaagtgttaagcaaccccaagtgctgggacttcatttaaccgaacgacaaaggacagcccctaagataaagctacaattattacttatcaataaataataaaaaaaaacacatgaagtttgagcccacccagggacgccaaaaacaacaaacaaaaaccacstggggcgtgtttctaacattcttctgcctgggttcctggtggtagaaattctgatgtaattggtctacggtgggccggtagtttgttagtttgttagtgaggacgccaggtgattctgatagccaggggtaactgcttgcctagatccaggaactcactcttgttctccataaaatccatctgtcatctggcgccatcttcccagccatggggaaacagatttgggacagaaacctttctaacatcaagctacgcttaaattcagagcacttaagcataacctcctcaccctctccatccctgttacattgaaagctgccattcactgagccatttttatgtgcccaggcactatgctaagaacattacagacattctgtcagtcagtcctcactccaatccttccatataggtgttaccatctttttttt

SEQ ID NO: 799583 - DNA, 634 bp, Homo sapiens
gttttccagccctctttccaccttgctgcgtagaaagtgcagaagtgttaagcaaccccaagtgctgggacttcatttaaccgaacgacaaaggacagcccctaagataaagctacaattattacttatcaataaataataaaaaaaaacacatgaagtttgagcccacccagggacgccaaaaacaacaaacaaaaaccacctggggcgtgtttctaacattcttctgcctgggttcctggtggtagaaattctgatktaattggtctacggtgggccggtagtttgttagtttgttagtgaggacgccaggtgattctgatagccaggggtaactgcttgcctagatccaggaactcactcttgttctccataaaatccatctgtcatctggcgccatcttcccagccatggggaaacagatttgggacagaaacctttctaacatcaagctacgcttaaattcagagcacttaagcataacctcctcaccctctccatccctgttacattgaaagctgccattcactgagccatttttatgtgcccaggcactatgctaagaacattacagacattctgtcagtcagtcctcactccaatccttccatataggtgttaccatctttttttt

SEQ ID NO: 799584 - DNA, 647 bp, Homo sapiens
tttttttttttttttttgctttgtgtttaaaacttgaaatgcatttctttgaaataaaaattgtttaaaaacatgtttttattccacacagaaaaacaaagatgctttgcagcctattaaggaagacaggactgggaaggcccaggatgatgctttctgggtaaagatcaagtttcttttataatctctstctgtgtgtgtgtgtgtgtgtgtgtgtgtgtgtgtgtgtgtgtgtgtgtgtgtatgtgtatatgagtgtatgtattctttctagttctgtgttccctgggtcattagcaaacttgttcctccagttgctcaaatcagaagcagagaaatctttacttctccttccctaatctctcatgtccaatttattactatatctagtcaatttaccattagctatcttaccaatatcctagtctaaactatcttgtgccctgtgcagatatcttgtgccctaaatgcagatagatgatactgaacaaactagaaacaacgtctgcctttatggagcttatagactggcagagagccaaagaagcaggaagaaaaagaacagggtaatgagatggggaataattgggaatgttgaggaggcacctggtctacgtaagataaggtggtcctggaagatctacctg

SEQ ID NO: 799585 - DNA, 647 bp, Homo sapiens
tttttttttttttttttgctttgtgtttaaaacttgaaatgcatttctttgaaataaaaattgtttaaaaacatgtttttattccacacagaaaaacaaagatgctttgcagcctattaaggaagacaggactgggaaggcccaggatgatgctttctgggtaaagatcaagtttcttttataatctctctstgtgtgtgtgtgtgtgtgtgtgtgtgtgtgtgtgtgtgtgtgtgtgtgtgtatgtgtatatgagtgtatgtattctttctagttctgtgttccctgggtcattagcaaacttgttcctccagttgctcaaatcagaagcagagaaatctttacttctccttccctaatctctcatgtccaatttattactatatctagtcaatttaccattagctatcttaccaatatcctagtctaaactatcttgtgccctgtgcagatatcttgtgccctaaatgcagatagatgatactgaacaaactagaaacaacgtctgcctttatggagcttatagactggcagagagccaaagaagcaggaagaaaaagaacagggtaatgagatggggaataattgggaatgttgaggaggcacctggtctacgtaagataaggtggtcctggaagatctacctg

SEQ ID NO: 799586 - DNA, 641 bp, Homo sapiens
gtacagttgaataatccatcagaaagattaaacttgccctaaatctctaatcttttataatccaggcttaatttcaaaatgctttatgttttaaacagaaattaccctcctgggctgggtgcggtggctcacacccgtaatcccagcactttgggaggccaaggtgggtggatcatctgaggtcaggagtttgagaccagcctggccaacatagtgaaactccgtctctagtaaaagtacaaaaaaaaaaaattagctgggtggtggcatgcgcctgtaatcccagctactctggaggctgaggcaggataattgcttgaacacaggaggcagaggwtacagtgagccaagatggcgccactgcactccagcctgggcgatagggtgagactccatctcaaaaaaaagaaaaaagaaaaagaaataactctcctctttggttttggttcttctaaaatgtagagaggcttgtctttgcaaaaaatattcccatacttttcttttgccatctgacttagtattttcaagtagtattaggcacaatattgagattggtctgcttttgaacagtcatccaccatctcttctgttgcaaacgttttattagaaaggattttgtcatcctatacaacagcaacttg

SEQ ID NO: 799587 - DNA, 635 bp, Homo sapiens
aggtggggcctggtgggaggtgttggatcatgggggcagatccccggatcccttgtgaatggctttgcatcatccgcttggtgatgagtgagttcctactcagttcatgagagatctagttgttgacaagagtctaggacctcttccttctctctttcttgctccatctcactgtgtgatgtgcctgttcccacttggcctttcaccatgagtaaaagccccctgaggcctcaccagaagccgagcggatattggtgctgkgcttgtgcagcctgcagaagcctgagccaattagacctcttttctttataaattatccagtctcaggtaatcctttatagcaatggaagaatgaactaacacactgacacagatattgatgatggggacaatgactattatttattgaggctttctgaaggccatgcactgaactaagaactttatatgcagtgtcttatttaaccccatagcagccccaaggtatagataatattatctcctgtgataggcagaattttaagatggccccaagagttctgccccctggtgtgcataccctatataatcaatgcgctcctctcaaatgtgtgggcagggcctatgtataagatggaatttcactccagtcatta

SEQ ID NO: 799588 - DNA, 569 bp, Homo sapiens
ccattatcctaagcaaactaacacaggaacagaaaaccaaataccacccattctcatttataagggggagctgaacactggctacacatggacataaagatgggaataacagacactggggactactgtggggagaaagggacagggggaagggctgaaaaactacctactggttactatgcttaccacctgggtgacggattcattcgttcgtactccaaacctcagcatcacacaatacacctttgtaacaaacctgcatgtgtacctcctgattctaaagtaaaagytgaaaaaaaaaaaagagtagctggagaaagtgaattttctgctactctctctgaggccttcagattctgcagctgtgcctgtcttaaaatctgccccaccagccaattaaaaattaaattgcctgttgtcttcaaatttctgcagtgctcgggactgcctcttcgctgggttagaaactctggaggcagagatcctatcttttcttctttttgtctttttcacaccctagcctcataggtttgcagcatcctacagttggaacgggaccgagagtatgc

SEQ ID NO: 799589 - DNA, 569 bp, Homo sapiens
ccattatcctaagcaaactaacacaggaacagaaaaccaaataccacccattctcatttataagggggagctgaacactggctacacatggacataaagatgggaataacagacactggggactactgtggggagaaagggacagggggaagggctgaaaaactacctactggttactatgcttaccacctgggtgacggattcattcgttcgtactccaaacctcagcatcacacaatacacctttgtaacaaacctgcatgtgtacctcctgattctaaagtaaaagctgaaaaaaaaaaaagagtagctggagaaagtgaattttctgctactctctctgaggccttcagattctgcagctgtgcctgtcttaaaatctgccccaccagccaattaaaaattaaattgcctgttgtcttyaaatttctgcagtgctcgggactgcctcttcgctgggttagaaactctggaggcagagatcctatcttttcttctttttgtctttttcacaccctagcctcataggtttgcagcatcctacagttggaacgggaccgagagtatgc

SEQ ID NO: 799590 - DNA, 493 bp, Homo sapiens
caaaaataaataaaaaacaatacagaaagagaaaaacagaaccagcatttaagtggcttaaccataaaggatgtggctggtaaatgttcacatttcaaagaggagctcaaaaccaggttgagcaatgccagcctggttgaatgagggcagctttggggcacagcatttctttggccatttcccttcaaccatgttttatgcaatctcagtggttttattaccacttgcctgcctatccagagcacacctagaaccaggtacatgaatccccaaagacatttgcgtggttctaccttcctggtgttktgtgcctcacacaagggcaccccctcaactccaaagggtcccaagtctgctttgaggctaaggatatggagggaggaaggagtcaagattctccttaaagcactcccttctttctttccttctctccccacctcgatctgaccttctgcctggctctctacaccaagtggggggccctcttcatttc

SEQ ID NO: 799591 - DNA, 534 bp, Homo sapiens
tctatgaacaaataagaggagaccttcaagctgagactcaaagaatgagaaggaacccgtgacaaaaagagcttccgagtgagatctcagtgctatgcatgtgtaaagggcttgagatgggtgtgagtgtctgggagttgtcagggttggttggggggcaggtatctgtagcccagggaagacagaatggggtgcagagtgggaatggggagagagttaagggaagtgaggattggatcaagcaaggccttgcaggtcacagtgagatgtttggatttaattctaactacaatggaaagccactgtayatttttatgcagagaaatgacatgatctgaattatgctttgagaagtgacatggtctctgggacagctgtctggaggaggcactggtggaaaggcaggaagagcagtgagtagagatgatggaggctacctgggaggtgactgaggttgtccagccagaagatgctggtgcctggaggagtcgatggcagtgtatagattcaagacatatttttgggcctgggagt

SEQ ID NO: 799592 - DNA, 613 bp, Homo sapiens
atatctgttggctatttagcacagtgcctggcacagtaaataatttatccataatatttcatccatttgtatatcaaatgtgaagaatgtattattattcttctcattttacaatgagaaactgaggcttggagtaagcaacttgctcattttcaaggagctcatgagtgaaggagctagatttgaacccagacccatgactctaaaaatcccagctctaaaccacaaggttctaattcctttttttttttttttttwaaaaaaaacatagtctcgctctgtcgcgcaggctgcagcgcagcggcgcgatctccactcactgcaacctctgaccctgggctcaagcaattcttgtacctcagcctttagagtggctgggactacaggtgtgcaccaccatgcccggcaaattttttgtaattttttttttttttttttaggagagacagggtttcaccatgttgcccagggtggtctcgaactcctgagctcaggcaatccacctgccttggcctcccaaagtgctagaattacaggcatgagccaccatgcccggccttctactgtattttaaaggcagatgcttctcttccagtcctgtgtacaatctttt

SEQ ID NO: 799593 - DNA, 621 bp, Homo sapiens
cctctttccctccaccccctcagtttttttcttctcccttactcccttttccttaaaaaaattataaaatgaaggttcaaacaaacttcaatgagcaacattttatcatttttctttcttttttaaattatggcaaaacagaagcttgcagaaaaaactgaagatctgataagaatgaggaaggttagccatttttcactttcacaaaactacattgccatttcacccatgctgacttacagtgcattaaaaagacagtgatccattcttttcattgatttcttttaatcaggagttgttaatastttcaaataatggatatgggccaggagcattggctcacacctataatcccagcactttgggaggccgaggcaggaggatcacttggggtcaggagtttgagaccagcctggccaacatggtgaaaccacgtctctactaaaaatacaaaaattagccaggcgtgttggtgcacgcctttaatcccagctacttgggaggctgaggcatgagaatcacttgaacctgggaggtgtaggttgcagtgagctgagatcgtgccaccgtgctccagcctgggtgacagatatacacatatatttacataaactgaagaaa

SEQ ID NO: 799594 - DNA, 621 bp, Homo sapiens
cctctttccctccaccccctcagtttttttcttctcccttactcccttttccttaaaaaaattataaaatgaaggttcaaacaaacttcaatgagcaacattttatcatttttctttcttttttaaattatggcaaaacagaagcttgcagaaaaaactgaagatctgataagaatgaggaaggttagccatttttcactttcacaaaactacattgccatttcacccatgctgacttacagtgcattaaaaagacagtgatccattcttttcattgatttcttttaatcaggagttgttaatactttcaaataatggatatgggccaggagcattggctcacacctataatcccagcactttgggaggccgaggcaggaggatcacttggggtcaggagtttgagaccagcctggccaacatggtgaaaccacgtctctactaaaaatacaaaaattagccaggcrtgttggtgcacgcctttaatcccagctacttgggaggctgaggcatgagaatcacttgaacctgggaggtgtaggttgcagtgagctgagatcgtgccaccgtgctccagcctgggtgacagatatacacatatatttacataaactgaagaaa

SEQ ID NO: 799595 - DNA, 611 bp, Homo sapiens
atcttttccttttggcacttaaaatttccctttcgttgcttaatttaaaagaaacaaattaggttttgcccagaaaagggaattatacttgattgtttcaaggctttaaagcatatagatttatttctttaaaaagaagaaagaaaaaaaggaaataaggagtatatttattttcttacatgattttatatcttgaacaagttgagatggaactctctcaattcactgggagatgaaattttttttggaaggaaaggtacagccataattattttaaaattggcaggacatttaattagaacagaaagcaagataatgccactatgaagaggaattgggagctggsagcaaacctgctccttggacagcactcacagctggtccagttttggtcctgccggggtcattcaaccctgtggacacagcatgaagatcgaaaagagctgataacagatctcaattcaggagagtagtcaacaaggatgaatcaaagatgagactgttgggtgtccagtcatagagaaagggcatggcagtgactaatctcagaaatgcaggaaggcagtgtgaggatactgtggtgggaattctggtgcaaggttatggaccct

SEQ ID NO: 799596 - DNA, 599 bp, Homo sapiens
caaatggatggctgtttcagtacatttcatttttcatatattagtgtttttcattcttgtgcatttttccattttgtttgtttgttttcctgcgccgttgcccatgctggagtgcagtggtgcgatcatagctcactacagcctcaaactctcgggcgcaagtgatcctcccacctcagccttckgagtagctgagattacaggcacgagccaccccacccagcctgtttggggctcttaattaaaatcctctttggttccagattcattttcttcaccgatatgtttatttcacatatttaatgtgttctattcaccattttcacattctatagaagatacagtggaaagaaaatatcaatctctaatatagctttgattccagaagcatcacagagtttgtacacacttgaaagaaaggcttctaacattaggtttctcacctagaaggatactggagatacaaagcctgtctaggaaaacaaaccattctccctgctaaaatgaaatgatacagaaggacctgaaaggacaagtgagctcagaggtggtaagagtgtaagacctttgccaaaaaactagacagaaacccaggtgaa

SEQ ID NO: 799597 - DNA, 599 bp, Homo sapiens
caaatggatggctgtttcagtacatttcatttttcatatattagtgtttttcattcttgtgcatttttccattttgtttgtttgttttcctgcgccgttgcccatgctggagtgcagtggtgcgatcatagctcactacagcctcaaactctcgggcgcaagtgatcctcccacctcagccttcggagtagctgagattacaggcacgagccaccccacccagcctgtttggggctcttaattaaaatcctctttggttccagattcattttcttcaccgatatgtttatttcacatatttaatgtgttctattcaccattttcacattctatagaagatacagtggaaagaaaatatcaatctckaatatagctttgattccagaagcatcacagagtttgtacacacttgaaagaaaggcttctaacattaggtttctcacctagaaggatactggagatacaaagcctgtctaggaaaacaaaccattctccctgctaaaatgaaatgatacagaaggacctgaaaggacaagtgagctcagaggtggtaagagtgtaagacctttgccaaaaaactagacagaaacccaggtgaa

SEQ ID NO: 799598 - DNA, 589 bp, Homo sapiens
gacaatgaaattgtatgttaacttgattgtttttaagttaaaacagtatttaaccttatcaagagagattcacaagcaactacaaaagtaaaaccacagcattaagaatgaaaaatccaggctgatgttttatgaatagacatgcatcattcttatatgaaatatattgatacgctatatccagaagaataacttacaagttgatgatggaattgtaaaaacaactctactaatacatcatgccaataggtcaaataagcaaaaggatatgtagtaatttctaaaagtatatgaaagtcaagaaattttaaaatccattccaattattttagagcakgagcacaaatccttaatataagacaaaaaggtccaggtcaaacttatagctaacataaagtcatacttaacacaatatcacattgaaatgtgaatgattacaattagaagttttaaaaattgtttcactatccctcatatcaactaacatacagcctttgtaataaaattaaatgagtaggaaaaaatagaaacccatagactatattcctattctcttctttgagaatataaaccaactaggtttaatata

SEQ ID NO: 799599 - DNA, 605 bp, Homo sapiens
tcaaactttcaccctatcatggtatttgagagaaaaagacaaataaaattagaatgtctatgaattagaaaattctgaatagaagtggtaaaacagtctattacactggacctcagatttgacatgcagtaaactactcagcagacaactggtgattttcagttaagtatgaggcacaggtattaatgtatccctatggctacaaaagtcagagatgattatgtgtgctctgtgagattccattcatttgaacgggtattcagtgggtggtctcagcaaattccataactatcaagcattggaatgagaagtgttttggtgatatgatttactttatcaatcaatttaatcaaattagtcaaagttacttttgaccaggctttggagaaatataaacagtgacccttctgtatgggattgttagttgatacaggactsaagttttaccctgataaacagaccttcagaaacttattccatgaacaaaaatctatgtgagtgagcacagttcctgaaaatgttcccatcatcatcattggctatgtcccatccttgggtactgaataaatgatgttcttggagttcagtagatacaagatttctga

SEQ ID NO: 799600 - DNA, 644 bp, Homo sapiens
ttccctgggcggtttctttcatcatccaggcctcatcttatggcctggagagtcctcttctcttcctgaacttctctccagacacacccacattgctctgacgctctgagacatagggtcaatgtgcctgtcatccgtgcacccagatggtgtgygcctgggggcaagcagacgagacatctgccccattcaccatcagatgtctgaggatgcatcaatgcgtcgtgtgaatggtgtgtggagacgctgcctcgctggggaatcccatctccaggcgggggccgccagcttttctcagtgactcaaggcggctgtggggcaggattggcattcccagaaaggagcctcccaaaatagcccgggcgtcccctgtgggtgtcgagctgtctgttctctctaggaaggcattctgccttgtatggaaggaattgcttctcaatttctgctccacactgaggtgactttagatgttgattcaaaccttttctgtgacatctgtgctggggtgagatcaagatttgggggatgtgcgtttagtggggcagcctggctgggtggggcttcattggggaagcaaagcttggggagctggaactatgcttctcctgaccccgtgtccttccacttcctgaaattacctgcag

SEQ ID NO: 799601 - DNA, 503 bp, Homo sapiens; identical to SEQ ID NO: 791832

SEQ ID NO: 799602 - DNA, 676 bp, Homo sapiens
tcctaaatgagaagggaagcgagcaggaagtgatagggttagagctctatttctaagacatcggatcacaggaagaccagttgctggggcagggatgctggtactggaccagggttgttatgatgcaggtggcaaagaaagttgggttcagggtctgatctgtagtttattctgtgtgctactccgttttgccttggctgctaggaagctcagggcacacaaataccctcctctggagcccrtgtggtgtctgtcgtggggacccacctaactccttgatgctgtggccctcagcagaccctgattcctccagatccttcctgacactcccttcatccttcagctgtgtatgtgtgtttctggtgattgctgccgatcctttgtgaaggaggtgagatataaataaagcaatgattatgctccatcctcgtctcctctgctcatccctggagatcttcgtcttcatcttcagctgagcttggaggcttggggagacctagcccatccttcccctcgtgcaaagcatgctcaggacagcaggctttcccagggccatgtggagtcacagtcttgctcccatctggtgtctgtaggtggaggaaggaaaggagaggatgagaacatggaatgcattgtctctgagaagagaaggatccctgtacatccctctgcctcc

SEQ ID NO: 799603 - DNA, 499 bp, Homo sapiens
tatattgaattcctctctccccacttcagccttaaaatattactagtgtctttgtaatttggcccaaatatcaggaattaggaaggaagctcatgaaataaacgaatccagattttatgcagccgggcctgtcagcacacaaacccgaytgtgggcccaggcttttgtcattgtttcctctctttagactcgaagagtgaagtattttgatgatgctatttttaggggaaatctacatgggaaattgcttcatagtgataataaaaccttacatgtgcgaggaaagcttggtgtcaagtcccgtggcactcagatggttaacgccgtcgtgacgctcggatttggcggaatgcggttgctgagctagaaatctggaggattttcactgggatgggacaaaaaagtgtcaaactccggcattttgaatatgttgccaacaagcatacctttggatcttagggaaggagaaaggaagatgaaaacaatgctaaggcctttt

SEQ ID NO: 799604 - DNA, 499 bp, Homo sapiens
tatattgaattcctctctccccacttcagccttaaaatattactagtgtctttgtaatttggcccaaatatcaggaattaggaaggaagctcatgaaataaacgaatccagattttatgcagccgggcctgtcagcacacaaacccgattgtggrcccaggcttttgtcattgtttcctctctttagactcgaagagtgaagtattttgatgatgctatttttaggggaaatctacatgggaaattgcttcatagtgataataaaaccttacatgtgcgaggaaagcttggtgtcaagtcccgtggcactcagatggttaacgccgtcgtgacgctcggatttggcggaatgcggttgctgagctagaaatctggaggattttcactgggatgggacaaaaaagtgtcaaactccggcattttgaatatgttgccaacaagcatacctttggatcttagggaaggagaaaggaagatgaaaacaatgctaaggcctttt

SEQ ID NO: 799605 - DNA, 651 bp, Homo sapiens
atgcatagccagtttcctgaggcttgcatggatatattgaattcctctctccccacttcagccttaaaatattactagtgtctttgtaatttggcccaaatatcaggaattaggaaggaagctcatgaaataaacgaatccagattttatgcagccgggcctgtcagcacacaaacccgattgtgggcccaggcttttgtcattgtttccyctctttagactcgaagagtgaagtattttgatgatgctatttttaggggaaatctacatgggaaattgcttcatagtgataataaaaccttacatgtgcgaggaaagcttggtgtcaagtcccgtggcactcagatggttaacgccgtcgtgacgctcggatttggcggaatgcggttgctgagctagaaatctggaggattttcactgggatgggacaaaaaagtgtcaaactccggcattttgaatatgttgccaacaagcatacctttggatcttagggaaggagaaaggaagatgaaaacaatgctaaggccttttctcatctattctaaaaaaaacactacttttgttgagtaaagagtaagtatatagatttggttcctctcaaaaatgaagctatagtttgactaattaaaggggaaaacttctaggagcgtt

SEQ ID NO: 799606 - DNA, 570 bp, Homo sapiens
tacatgtccttcctgccgccttgtgaagaaggtgcttacttctcctttgccttctgccatgattgtaagtttcctgaggcctccccagccatgctgaactgtgagccaattaaacctcttttctttataagttactcagtcttgggcagttatttttagcagtgtaagaagagactaatacagtagggatctgtctggattagtgccatgtccacagcttctagaatagtgcctggaacccatggttgttcaataacatttgcaagatgggttgatggttgaatgagcaagagggaagggaaggctcaggagaattttttgtggggaccaagattcaagttwggatgtgattggcctccagatggagatgccagtgtggccaactggtaacatatgagtctggagctcagagaaatggtccagggttaacagagaaatggaatcagttctgaagccaaaggagtggatgagaatgacctgtgagaaggttagacagggaagaggacctaggccttcatcctggggcagcccaggtggacattcagatgcaggaggtgggacctgccagag

SEQ ID NO: 799607 - DNA, 544 bp, Homo sapiens
gatcttcacatgctggagtgaagagagtgaggtggagatgcagctagggagccgagtggggccacccccaggggccttgagactgggccatgagttcgaatcatgtcctaaggaagatgggagagtgatccaattcaccttctggggtgatcctcctggcagagatacagggagagggttggagcccagaaatttattccttactgttctgggggctggaagtgcaagcccaaggtgctggaayagatgctgtggggagggcagagcggaccatggtgctcatccaggctgaagggtggctgcacagattcttccgggtttcccaagaacaagaagcagcttcaggaagctgaattcatagcagagaagcaggaaggaggcttttctaagcccagcgccctgcagggaggatgctggtgctggtgtctgcaaggcttggcccctaacagggtttgccctacagatggagcagaactggacagagatgcaccctggcctctagctttgggagcagggatcccggtccagcatcttggcattagtt

SEQ ID NO: 799608 - DNA, 535 bp, Homo sapiens
aacaaaaaaaaactgtaacaagtaaagcaggacgagatggaagcagggggagagggaggaagagagattgctctattgatctcaaatggccgtctcagaagtgctgtggatgggacaggcagcatacgcttgtttgggagcagatgctcacagggtccttggaagccagctccgtatttgtcctcatggtgcgttctcccatgaggtaattgctccatcctacccttgaggactccggggctcgggacgatagaggcctgcagacmaccctgtgatgaagggagaaggaggctcaggccaggaggaggaagtgctgagggggtttccctcccagctggtactggctgtgcggggccctctgattagtcccaggaaggtccagggcggccgtggtgtttggcctgcaagggaaggatcaggaagcgtccgttgctgttcttcctggaagcatctcatggtgactgttgcgggcatgggcaaagctcaggccacgtctccctgggtgtctgtggggagcaggaaagggcatcagatg

SEQ ID NO: 799609 - DNA, 535 bp, Homo sapiens
aacaaaaaaaaactgtaacaagtaaagcaggacgagatggaagcagggggagagggaggaagagagattgctctattgatctcaaatggccgtctcagaagtgctgtggatgggacaggcagcatacgcttgtttgggagcagatgctcacagggtccttggaagccagctccgtatttgtcctcatggtgcgttctcccatgaggtaattgctccatcctacccttgaggactccggggctcgggacgatagaggcctgcagaccaccctgtgatgaagggagaaggaggctcaggccaggaggaggaagtgctgagggggtttccctcccagctggtactggctgtgcggggccctctgattagtcccrggaaggtccagggcggccgtggtgtttggcctgcaagggaaggatcaggaagcgtccgttgctgttcttcctggaagcatctcatggtgactgttgcgggcatgggcaaagctcaggccacgtctccctgggtgtctgtggggagcaggaaagggcatcagatg

SEQ ID NO: 799610 - DNA, 597 bp, Homo sapiens
accagcaagcagtttattcctccattataagcagtgtgactataagacacttgtcaaatggtctcactttgtccttggatggtatgacccttgttttgtttttattgatcagcacacccaaaatatcatgctcttcagtcattacttaggaattttctaggggtggaggaggtcaaaccaagaacttttacatttgggagattgaaatctatttctaaaacttgattttggaggttcagctccattctggtggtcactctctgaaaatgcccagcactttttctgtagatggctgtcaagccacatctcttgcagcctggccacaggcaattggwttttcagtgctcagtgcttccgtgtgaggttattgtatgttgctttaaaggttaacttcttcctcctcccagccctatttctccttcctcctcccagatcttagacagcagtgttatcatctgctctgtgtcatctagcacaggactgggagaggggcggagttgtcaaagaggctgtggggttaagatcagggcttttacagcagatgacctgagttctaagctccactctgtcgctaactagcatgtgccctggggtaat

SEQ ID NO: 799611 - DNA, 597 bp, Homo sapiens
accagcaagcagtttattcctccattataagcagtgtgactataagacacttgtcaaatggtctcactttgtccttggatggtatgacccttgttttgtttttattgatcagcacacccaaaatatcatgctcttcagtcattacttaggaattttctaggggtggaggaggtcaaaccaagaacttttacatttgggagattgaaatctatttctaaaacttgattttggaggttcagctccattctggtggtcactctctgaaaatgcccagcactttttctgtagatggctgtcaagccacatctcttgcagcctggccacaggcaattggattttcagtgctcagtgcttccgtgtgwggttattgtatgttgctttaaaggttaacttcttcctcctcccagccctatttctccttcctcctcccagatcttagacagcagtgttatcatctgctctgtgtcatctagcacaggactgggagaggggcggagttgtcaaagaggctgtggggttaagatcagggcttttacagcagatgacctgagttctaagctccactctgtcgctaactagcatgtgccctggggtaat

SEQ ID NO: 799612 - DNA, 641 bp, Homo sapiens
ctggtgaatttgaggtcagactggttctctgctcttgaaccctgttttctgttaagatgtttatcaagacgatatgtgcaccactgaacatagacccttatcaggagtttctgattttgccctggtcctgtttcctcaaaagcatgtgatctttgttctcctttttgtcctttgaagcatgtgatctttgtgacctctccctgtttgtacaccccctccccttttgaagttgttaataaaaacctgctggttttgtggctcagaggggcatcatggtcctaccaatatgtgatgtcacccccagaggcccagctgtaaaattcctctctttgtactctttctctttatttctcagctggccaacacttatgaaaaatagraagaacctacgttgaaatattgggggcagattcccccgataatatacagtttttttggagtcatctgagagtaagttgaggcctaaatatttcagcaatttaacatttttttgtttatacaaggacataaaaatcaagcaatcagcaatttaacattgataaaatatctttaccaagtaccacccatattctaattttgtcagttgacctagtaaggcactccattctaggatcacatacttcttttttttttgaaacaga

SEQ ID NO: 799613 - DNA, 641 bp, Homo sapiens
ctggtgaatttgaggtcagactggttctctgctcttgaaccctgttttctgttaagatgtttatcaagacgatatgtgcaccactgaacatagacccttatcaggagtttctgattttgccctggtcctgtttcctcaaaagcatgtgatctttgttctcctttttgtcctttgaagcatgtgatctttgtgacctctccctgtttgtacaccccctccccttttgaagttgttaataaaaacctgctggttttgtggctcagaggggcatcatggtcctaccaatatgtgatgtcacccccagaggcccagctgtaaaattcctctctttgtactctttctctttatttctcagctggccaacacttatgaaaaatagaaagaacctacgttgaaatattgggggcagattccccmgataatatacagtttttttggagtcatctgagagtaagttgaggcctaaatatttcagcaatttaacatttttttgtttatacaaggacataaaaatcaagcaatcagcaatttaacattgataaaatatctttaccaagtaccacccatattctaattttgtcagttgacctagtaaggcactccattctaggatcacatacttcttttttttttgaaacaga

SEQ ID NO: 799614 - DNA, 629 bp, Homo sapiens
ttgtactagaggatccatttagtgcagatggataatataaacaaataaaaggacttcacattaggaaaaaaagagttaaaaccatttgtattcacagacataaatgtctatgtcgaaaatctgatggaatctacaatttaaaaaagcctgctagaataaaaaagtcaatttagtaagtatctgatcaatgtacaaaaataaattggatttctctatactggcaatgagcaatcaaaattaaaatttggaaatttaaaaagctggcatttacaataacatcaaacatgatgaaatacttagaaggcaatataagtgaaacacttgaacactgaacagtacaaaatattgctgaaattaaagaaagcttatataattgggaagatataccttgatcatggatcagaagacaatattgttatttgaacagacacttcaacagagaagatatacagatgacaaatagsacataaaaagatgttcaacatcattagttattaggaaaatacaaattaaaagcacggataccactattaacctatttggcaaaatttaaaagacggagcataccaagtgctggagaggatgtagaggaacagaagttttcatacactgcaggtggaagtgtaaag

SEQ ID NO: 799615 - DNA, 613 bp, Homo sapiens
tttagatgaactgattgcagaaataaatactgtacagtgatatttccaagatctatccacatcataatggagaatacacttccaatctactctttcttgtttattttcttttcctcttctcatagcgcttaaaaaggaagtcttttgatcaaaaatttgttttccccaaaattaactagattgttaatgcaacaccactcctctcttctctacacatcatttatttatacaaataagctataaacttcttcaccagctgcataccaagttgctgcagggccgtgkatatatttggaataagacacactgagggtggtagtaggcttcactccgcaagactatctgcaagtaaaatctgactttggaacatactgctgagcttggtctcaatcctggagcactgtggttccaaattgtctgcttcagccagtgcgaggttgcagaactattgcaaaaaggtaattaatccacttatgtcccaagtggaggctgtataaatactatgtcttttatgtgtatatactgttataaataatacatgtttatttaacagcattgctcaatttatagtaacttttgttcacatgtatttttctcaattatctgatactaa

SEQ ID NO: 799616 - DNA, 592 bp, Homo sapiens
aagagtgggagatgtgtaaaaatcaggacgagggtgacagcgggataccagagtcctacctgcatcagtcccatggcctcagcccatgtgatccccacctcccttggataccagatttcaaggtaaatttccatcaattatggccactgcattaatttggctagttcgtagcatttcacaagggagcttctaaacctggagaacaagagcttgggttcttccaacagacaacagaatttaacctaaatagattacccaggaaagctctgcccaactgacatagacattgatgacagggaagacaagctagtgcaaagagatgatagtagcagtagagctgaactaacaatccagcctgaaaaggaaagttaaagattaaaatayagtttaaatatatgtgagatactatgtcagatttgtgagcagtcttttatgtggttgtgattagaagaatgatcttcatctatagaacaaattttagttgggggagcaccacaactttaaaaccagaaagtctaagaacattgtgatttttatggaaagaacgctttaagaaatagtactcaaatatttaatagaaggaaatgttcac

SEQ ID NO: 799617 - DNA, 592 bp, Homo sapiens
aagagtgggagatgtgtaaaaatcaggacgagggtgacagcgggataccagagtcctacctgcatcagtcccatggcctcagcccatgtgatccccacctcccttggataccagatttcaaggtaaatttccatcaattatggccactgcattaatttggctagttcgtagcatttcacaagggagcttctaaacctggagaacaagagcttgggttcttccaacagacaacagaatttaacctaaatagattacccaggaaagctctgcccaactgacatagacattgatgacagggaagacaagctagtgcaaagagatgatagtagcagtagagctgaactaacaatccagcctgaaaaggaaagttaaagattaaaatatagtttaaatatatgtgagatactatgtcagatttgtgagcagtcttttaygtggttgtgattagaagaatgatcttcatctatagaacaaattttagttgggggagcaccacaactttaaaaccagaaagtctaagaacattgtgatttttatggaaagaacgctttaagaaatagtactcaaatatttaatagaaggaaatgttcac

SEQ ID NO: 799618 - DNA, 637 bp, Homo sapiens
agtaagtaaaggtttgccttaggctctatttttcaagacacttggactaagacttctgtgaattgtctattatgagcttttactaagttttctagtgtggtgtcttggtttggtttctctagaagcagaaacttgggctcagaatggagaatttggaaagaattcttacaggagaagggcagtaagagaagttggttccacagcatgttctgagaaagactgtggtcttggctggagacttttggttggatcccacagggaagctctggagcacaagttgcaccacagaattaattccaaygtaagtccagggactgatgtcaatttgtcattggttgaggttggggggagtcagcgcatattgactctgggtggggcagctcccttgggccaagggcaattttctagagtagaaggtagctgtgattggtgcttagctgattactcacagcaactatggattggttactgaggcagtcaaagagaacctggctgaggtgtcaataacatctaccacaggaggtttgtctatcttatactttataacaggatgtaaaacatttgtattagagcttgcaggcattttctcttcatttgtcattctctttcactttgtttatgattttaataagacatt

SEQ ID NO: 799619 - DNA, 637 bp, Homo sapiens
agtaagtaaaggtttgccttaggctctatttttcaagacacttggactaagacttctgtgaattgtctattatgagcttttactaagttttctagtgtggtgtcttggtttggtttctctagaagcagaaacttgggctcagaatggagaatttggaaagaattcttacaggagaagggcagtaagagaagttggttccacagcatgttctgagaaagactgtggtcttggctggagacttttggttggatcccacagggaagctctggagcacaagttgcaccacagaattaattccaatgtaagtccagggactgatgtcaatttgtcattggttgaggttggggggartcagcgcatattgactctgggtggggcagctcccttgggccaagggcaattttctagagtagaaggtagctgtgattggtgcttagctgattactcacagcaactatggattggttactgaggcagtcaaagagaacctggctgaggtgtcaataacatctaccacaggaggtttgtctatcttatactttataacaggatgtaaaacatttgtattagagcttgcaggcattttctcttcatttgtcattctctttcactttgtttatgattttaataagacatt

SEQ ID NO: 799620 - DNA, 577 bp, Homo sapiens
tagtttatgtttgaagtactcagaaacacttggtatggatcttcctattttgttagaagttggtcatctggtgacctttttttcatgttttcatgtaaatcatgtctcctggtctgaccctggggatgacttctccctcagagtcaggctcaggaaggccctggttcctggggtagaaaagaagtcttgccccagtaaaggagtgaatcattctggcatgactagaaatttgtaattatcaggtagtgtcagtctactagttataggaaaaataaatggtcttctttggggtttgccactaactacagtgacaatgaggaaactagaggatagaggtcctgagtggcaggtcaaaacaaaaagacaggctcccatgtctaacaagaaatcacaattcttgacagaactagaaaaaaacaatyccaaaattcatatggaactaaaaaagagcccatagagccatagcaatactaagcaattagaacatatctggaggcatcacattactcgacttcaaattatgccacaaggctatagttaccaaaacagcatggtactggtataaaaataggcctgt

SEQ ID NO: 799621 - DNA, 616 bp, Homo sapiens
gttttggaagatggaggtaactatgcagtttaaaaatttcactgtattttcttataaaacaaacagaacaaccaggatggaaaactaaatacaatgaacaacctccacaacaaaagtagatgacaaagaagtccagtaaatgccaaaatatgagtgcataggcaaaaaamcaccactagctacagaacccatgtagtaccagaagcaattcaagaggaagaagagggttgacagtaagactttgatgatccagagaactgtagaaaactgctatcacaattaggttctccctggagagcttcataggcaattccatggacagtagctgaaactgggagagaactgtcaatcttaaattgagtgcaagagggccataggaaattccgatgatgccaaggcagtttggcagcctaaccttagaaagataaactatcgtaaattactttacaacacagtaatttgactatatgttcctagttccatgaacaaaagaactgcaaaatatcttaaactgttatactactcatattgttgatgctagtgttagtattgttattcttgtatagttttgcatgcatataatcaagcagataataattatattggtgtccttgcg

SEQ ID NO: 799622 - DNA, 523 bp, Homo sapiens
atgggtctgaatgagcattctgaacttttgcaattgcaaccaaagcaaaaattgacaaatgagatctaattaaactaaagagcttctgcacagcaaaagaaactaccaacagagtgaacagacaacctacaaaatgggagaaaatgtttgcaaactatgcatctgaccaaggtctgatagtcagcatatgtaaggaacttaaaaaaatttacaccaaaaaagcaaactatcacattaaaaagtgggcaaagaacatgaacagacacttttcaaaagaagatattcatgtggccaagamacataaaagctcaacatcactgatcattagagaaatgcaaatcaaaaccatgaagagacatatcatttcaaaaaagaaatattatcttcaactaaagaagataacataatggtaccttttatgtgtgtaatttttaattcataaaataaattttgcattctaaaaataaaaatgtaaagaatatacagccatagggccccaattctttgcttcttccaagaacag

SEQ ID NO: 799623 - DNA, 596 bp, Homo sapiens
gtaaaagtaattactgttgttacattaatagcttcagtgatctggaactctattagtgaggactactacttggaagcaggagatgatttttggaacgtaaatgcaaaagggctaaaactgggtaacatcaaagggagcaggggggcatttcctcgatgtctcaattcatgtatttattcccccgggcattcattaatytgagaagtatttatcttgcctattctatgtgtaccaggtatagtcccaagtattggagaaatagctataaacaaacagacaatattacattctttttttttttttttggtcacaagtaaaccaaagatacataggcatacctcattttattgcactctactttattgagctttgcagatgtcgtatttttttttttttttaacaaattgaaggtttgtgtcaaccctgcatcaagccaatctattggtgccattttcccaacagcacatgcacattttgtgtctctgtatcacattttagtaattctcacatttcaaactttttcattactattttatctgttatggtgatctgcgattagtgatctctgacgttactattataattgtttgggggtg

SEQ ID NO: 799624 - DNA, 621 bp, Homo sapiens
actgtttacacgcctgtttttcagatgaggaagatgaagtatgaagagggtaactaagttccctggggcgtcacagctgctgtgcctcactgagccttgtagacagtgggagctcaatcatggctgtgtcctccatgaagctgaggatcagagccccatcacragcaggcactgatggatgcggtaagaagaatttgggtgtgggctacagaagcagacctagatgccgagagggggactgagccatccccaaggactaagactcagagtagccagttgtagtcatggaaaccaaagctcttgagcacccagcgctcactgcatgctaagcgctgcaccgagtgcttcccatgagctaatttaatccttacagcaactttgtgaggtgggtcctcttatcacctccattttacagatgaagaaactgaggcacggagcggatatgtcccttgctcaaggtggaaccggttccagagccaactcctccccacttgctgtgctgcccagatgtgggaggcagtgtcaacatgagcagatgaaggagaggcggtctgagagctgtcaagggcttgcagtcatgacctgaacccactgcagagaaattctttctgaaattttgtt

SEQ ID NO: 799625 - DNA, 616 bp, Homo sapiens
aatgctggccaagtcttagcacctgccttgtgccctctcctttctgcaggcttatgtagcgatccattcaataaatcttgttcggatgcctcccatttgctaggtcctgctttaatggtgctgggatggctctggtgtcatgaagtttgcatgctggcatgggtagtatattccgttttattctattatgctgtagtggaggtagttatattatttatgttatgttatgttatataaaatttatatcatattatatgaaatttatcttgttttatcatgttatattatatcatggtgtatcatttccatttaaccttcataatggccctcctaggaaggcattatcatcttcattttaaagccaggaagacaagttcagacagataagtgacttgctaagtgccccctgccggtgagtgagaaggtggtgctgtgggtgagcacagtgtggggyggatgggtttgggagtgggatgagccagggtttgaatctgagagtgtggcctcccccgctccaaacctcaggattttcacctataatgtggagatgatagagtttccctctcggatggctgtaagaatcacgtgggatgacgtgtgtgcctagctcagctcc

SEQ ID NO: 799626 - DNA, 462 bp, Homo sapiens
aaggggctcacatagatggcgtgggtggcttcctgtagtgtagtttccaggatcacagccccaaccacccatttttcagttccttaaatcatacttagtttttaattgatttttttatttttaatttttttacaactcaatggtttttagtatatccacaaagttgtgaaaccattaccacaatcaattttagaacattttatcactscaaaaagaatgccatttagctatcactccctccccgcgatccctccacccaccgccccaggccctggcaaccactaatctactttctgtctccatagaattgcctattctagacatttcacataaacggaatcatatactatgtggtcttttgtgactggcttctttggatttattgcatagacctccacatggacagagttggggggtggggctcccttagatcattgaaccaaatccttcatatttcagatg

SEQ ID NO: 799627 - DNA, 587 bp, Homo sapiens; identical to SEQ ID NO: 798895

SEQ ID NO: 799628 - DNA, 614 bp, Homo sapiens
tcttgtttatccattcatgcactgataaacatgggtttcttggccaggcgcggtagctcacgcctgtaatcccagcactttgggaggccgaggcgggcggatcacgaggtcaggagctcgagaccatcctggctaacatggtgaaaccccgtctctactaaattagctgggcgaggtggcgggcgcctgtagtcccagctastcgggaggctgaggcaggagaatggcgtgaacctgggaggcggagctcgcagtgagccgagatcgcgccactgcactccagcctgggcgacagtgagactccgttccaaaaaaaaacaaaaacaaaacaaaacaaaaacttgggtttctttcacgttgttgctattgtgaataatgctcctatgaacatggatgcacaaatatttcttcaagagtctattttcaattattttgtgtatatacccaaaggtggattactagatcatatcctaattttatttttaattatttgaggatctgccatactgtttttcacagtagctgtgccattttacattctaccaacagtgcacagaagttccagttactctatgccacatccttaccaacacttgtcattttctgggtttttt

SEQ ID NO: 799629 - DNA, 452 bp, Homo sapiens
gtgacatattttttctcttatttcttctttgaaagaactccaaagctttgcagatagtttttcctttcactttctctctctgtctctccctcttcctctctctctcccctttccctcccctcttctcctccacgttttaatccttttcttcttctcatgacccacccagaattaccttctgagtaacataagttttatttagaatttgtaaaaataaaattgcttcagggcttagaycctataggccaatctttgcttggagacaatgtttacaacttagcgataaattgggattgttatcaaggggttgacagactgttacctaaagcacggctggaaataatgccataaaaattgctgaacatgggaaagtaaatgctaatggctcctgcagtaaaaacaagttggtaaagagcaatcaacacaataagagttactgtggtcagtttggg

SEQ ID NO: 799630 - DNA, 584 bp, Homo sapiens
gggccaaagcccagattgcttaactctttgtacaagaatcttgttcttccattaatggatgggtcttaatatacttgagcatctcccagatttgttattcatctgtctaaagatgttttctcatctatgagtctttttacgttcaatattctacaaaatcaatgttctgtaccaaacatcaaatattaatgtgatcaacattatgctggaagacccaggtgatcctgaagaggaccaggaacaccttctttttctataaaggacttgtatgttatggattgaattgtgtcctcagaaaaagatatgttgaaatcctaatcactaatacctgtgaatgtgactttaattggaaatagagtcttcgcaaatttagtcaasttgagatgagatcaccagggtggacctcaatccagtatgactggtgttgctttaagaagacaactatggaaagataggaaagcagggagaattccatgtgatggcaaacgcagagatgccactgcaagtcaatgaatgctaggattgatggcctttgctggtgctaagaggtaaagaggactcttccctataggctttcaaaggaa

SEQ ID NO: 799631 - DNA, 644 bp, Homo sapiens
atataaccatgtgtgggaaaacaggaattagagaggggtaagaaagaagagttggtcaaaaggaagctgatggtcagaaaggcaatcatgatgggtgagggttcttgcatctcattgtccggatgtggtgatctcgtaagtttcagttccttcatactatctggaaggcytgatgattggtttcctgaaaaaggaactcagataaggcaaatgtggtttctcaagtttttaagactaggagggtcaatttctatgtttattcaatagaaactataaatatcaattctatgggacaactgggccagtttcacaatcaccgtaactacctagctgttctccaacccctttgtagtactggtgagacatgagccataactgcagaccatgtacagctcattgaagcaagctgttagcatacttgattgacttgtgcaactgctctccaaaaagcaaaaaatgtccacactgtcttcatcaaagacctacgtctggaatctcacagtgcactgtatgaacatagagcaaactagtatctatggcttatatgtgttatcaacttctggcatacatctaattaatgattagaaatttatcatggaaaataactattctggaggcctggttctcatctcagaattatgtat

SEQ ID NO: 799632 - DNA, 655 bp, Homo sapiens
tattctgcctgtctaactgagattttatattctttaaccatctgatatggttttgctgtgtctccacccaaatatcatcttgaactgtagctcacataatctccacatgccatgagagggacccagtgggaggtaattgaatcatggggacgggttttttcttygctgttctcatgatgcagaatgagtctcatgagatccgatggttttataaagggaagctcccctgtacacactctcttgactgctgctatgcaggatgtgcctttgctccttcaccttcctccatgattgtgaggcctccccagccatgtggaactatgagtccatcaaacctctccttctttatcaattacccagtctgtggtatttcttcatataaataaatgaagtatgaaaatggactaatatagtaaattggtaacagaagtggggcactggtaacacaagtggggtactgctatgaagatatccaaaaatgtggaagtgactttggaactgggtaacaggcagaggttggaacacttcagagggctcagaagaaaacaggaaaatgtgggaaagtttggagattcttgttgaatggttttgaccaaaatgctaatagtgatatggacaaggaagtccaggctgaggtggtcttagatggagatga

SEQ ID NO: 799633 - DNA, 646 bp, Homo sapiens
tgctgcttctcttctcagtcataatacactgggcgaaagcaaggttttttgtttcttgttgtttttactagtagcacaggacctatcatatagtatgcactcaaaaatgtttattgtttcattactactattatcacagctatcaacattagcaaagaattgggcttctaatagtaggcagatggtcaagttacatatatcacaaagatatgattttggtttgactcttctatctcaaagttatttgtcctaattctaaatggaatatcatactgtgatattaaagaaaacacaattagcaaattatrtagtctaaatcccatgtccatgatcaggaatgctttgagattttgtttttttccagggtatcctgaagtggcaagtaccctggactagaagtcagcaattctgggtttataatatgaaaactggagcaggtcattttaactccctgtcctcttagcctgtttcagtttagtcatagcatattttactatcagatattatagattcttgcttgcttgctcatccttgtgcctatttgcttggttacttgcttgtcttcctttccattggagtgtaagctccaacaagtcaagaactttgtgttgtccaataggtgtgcaatgtctttctctccctctct

SEQ ID NO: 799634 - DNA, 609 bp, Homo sapiens
ctaaatataagcacatttttctaaaacctactgtgaaaggcagtagagcagtctaacatgaatatggttttggcatttttatttcaagctgtgacctcttcaaaaaaaaaaagttactgggatttattattatttagatgataaaagctggtcaagaacccagaatgaagactaaataagttagttcaaggtcctgccttggttaaaaagtgtaagaaaaatstttcaatgcaaaagtaccgtatcaggggtcgctaatatctaaaaatgcatatgaggaggcagtcctttgattatagattttttttcaccattaaactgcaagtattctgagcaatgtaacatcaaaacactgtgagatatttatgcctcaggcagaataaatattaaatcttgttttacttagcatgtgtttccccaaataccaaaactgagaaaaaggctgacacagaggtaatttatttgggaagtgatgccttggagagaaaataagttacagagggagtaaaagagagagagagagaggaaaagccaatacaacaaattaatttggccataggtatgggtaactgggattcaatctcatgggactttctgaagggttttatg

SEQ ID NO: 799635 - DNA, 625 bp, Homo sapiens
cttgattagagttggccccatcaggagcacatccaagaaaagcagagagactaagcaatttccttttaagaggatgtcttggagaacaaacatatcacttccagtcacactgaccatgcctagctgcaagggaggctgagtgatatagtctattgctggatagcaacatgccaagctccaacttatctgagggaagaragaaagggagaagacaagaataaaggaggaccactcacagtctttgccaaaattgttataattgttttgctgtagttattattaaaatgaaggatgggataatatggtcatagaacagatttaactttcccacaatagaaaaaacatatacagcactactttagcctgtatactgctaagctattcagacacaaacttaccaaaaaaataatagaaaaaaagttttcaaactaccaccaatgtgctgtctttttaaagtcacgaataggcaaattttaatacaaaaatatgcatttagcaggaaccaagatactttgttttttaaggtgtataaaattcacaaagaacattttgatacaatttttaaaagtggcacttctctttggatagtggaaagttcttatggaaaactctacatctgatcact

SEQ ID NO: 799636 - DNA, 575 bp, Homo sapiens
ataaagtatttaagagtgtggtatctggaatttaactgtatcattcgtcatcacaacttctgcacttatgttttaaagttacttaatgtatctaaatctcacttccatctataacatttggcaaatgacaggacctatttcactggattgttgtaaagtttcagcacagctctaggtacagaggaagtarataaaaactggtagctattgtaatactgtgataaaatgcatatttgatgacacatcattgaacttttgggcacagagaaatccccagacacttctcagagctattttaaaagaacagatattaagcttggaggaaaaactggcaacatctcccatatttttaacctcttagtcaatattccctatggtacaattttgaaattatataatgattttaaagtttattatatgtctaaatctgccatcaaatgtgtttggtgattttctgtgcccatagttttgtcaactcaaatatttattataaaaagcattcctgaatattttatttaacttttatgacttatttgcaaatgtttacttatctcggaactagaagagaatccttc

SEQ ID NO: 799637 - DNA, 625 bp, Homo sapiens
ataaaatttgcatccaactaatacattgaattattgacatactttgggtgtcaaaggagtcgttgaatggtttgtttttaaaatacatggaattctaagcatctggtggctactgggtcgtgacaatgaaataattccctggttttccattgtttgcaaaagaactaattttctctcagctcagatttaacacttttaaacactatgcacaactccttccatattcacagccattgcccatttctgaattttttaaagggaagggatagaggaataatggtactattcctgcctaacaaaaacgtaataaaaatgattaatatataatataatttaaattattcactatcatctctttggggccaaaataactgggtaaaatggaaactacaatttgatttgattattttttacctgaagaaaaatgaaaagtaaaaaaatgtgatatgaaactaaaatcacatttargcataggattttaatgcccagaaaaactttcattagtttttttagagaaaataatagactagattttatgttttcatggttaagccagtgaaagggctatgaaccaatttgacaatgaacacatatatgttgctaataatgattatttagttaataa

SEQ ID NO: 799638 - DNA, 621 bp, Homo sapiens
tggagtgtgcagtggcatgatctcagctcactgcaacctctgcctcctgggttcaagcaatcctcctgcctcagcctcctgagtagctaggattacaggcatagaccaccatgcccagctaattttttttgtatttttagtagagaacagggtttcaccatgttggccaggcctgtctcaaaactcctgaccttggcctcccaaagtgctgggattacaggcgttagccaccacgcccagccttgaactaagaatttgacctcctgaactgtaagataataaattgatgttgttttaagccactagtttgtggtgatttgttacagcaatagtggaaaataatacagttcccaaatgggagcatgaaataagagtacaaaataaaatttttcatacatgatagtaaaagagatcttattttgcatctgagaaaactagaacctytactattttcaccttcttattaatgatacacaagtatggccgggctccgtggatcacacctgtaatcccagcactttggaaggctgagggaggtggatctcctaagctcaggagttcaaaaccagcctgagcaacatggtgcaaccccatctccaccaaaaaatacaaaaaattagc

SEQ ID NO: 799639 - DNA, 621 bp, Homo sapiens
tggagtgtgcagtggcatgatctcagctcactgcaacctctgcctcctgggttcaagcaatcctcctgcctcagcctcctgagtagctaggattacaggcatagaccaccatgcccagctaattttttttgtatttttagtagagaacagggtttcaccatgttggccaggcctgtctcaaaactcctgaccttggcctcccaaagtgctgggattacaggcgttagccaccacgcccagccttgaactaagaatttgacctcctgaactgtaagataataaattgatgttgttttaagccactagtttgtggtgatttgttacagcaatagtggaaaataatacagttcccaaatgggagcatgaaataagagtacaaaataaaatttttcatacatgatagtaaaagagatcttattttgcatctgagaaaactagaacctctactattttcaccttyttattaatgatacacaagtatggccgggctccgtggatcacacctgtaatcccagcactttggaaggctgagggaggtggatctcctaagctcaggagttcaaaaccagcctgagcaacatggtgcaaccccatctccaccaaaaaatacaaaaaattagc

SEQ ID NO: 799640 - DNA, 563 bp, Homo sapiens
caaagtaaccaaactggtaaatatcatttggagccttcactgattgtgactgttgcctgatcaccaggggtagttatgcgttgtgtaggagcttacacaatttggcagaggctttctttaagaaaaagaacgcaaagttaggaataaaaaattggttgtagaaaatagaaaaaataaatagaaaaaataaaaaataaaaaaagaaataaaaaattaaaacaaaaacaaagataaaaaattgggtatgtaaacaactatttacttggaatgagaaaaatccacaaattacamattttaaaatgccaatccttttgtagttcataaatgtgatgattgggttctcacatgtgaggtgtgtgagacgtgcttcattcaaaccctgttacaacatccgcacataccctgtctgtcatgaaagaaaaaaaattaaaaaagaataaaatgttgacaaatataccacaaacatcaaaagtccaggacaaattatgcaattcttttattaatgaattaccttatatatacctttataattcttttgaattttaatataatcaataattctg

SEQ ID NO: 799641 - DNA, 609 bp, Homo sapiens
accatgtgtcagcagtcaaatatcagactcaaaaatataaagcaaggaagaaaaataccccccaattgcctgtaggactgccctgtgcaatgtgatcaccgctagccacatgtggctattcaggtcttggaatgtggtttgtttgaatgaagatgttctataagcataaaatacacactagacttcaaaaattggttaaaaacaaaataaaatagatcaatatttttattttgattacatgttaaaaggatattttggctatattaggttaaataatatatattattaaaattaatttcattgatttctttttactttttaaaacgtggatgctagaaaattttaaattacctctatggyttgcatcttatttctaccaggcagtactgctctagaagaaagtctaaactttaccttgacctgacccttaagtcttcagtaccttagaaacatgaagacataaagtcactaaattcaagtctggaaatagggacatttattatgtacctactaagagtacaaagattaataattacccgttttccaactccagcctgtaactactgttaaaaaaaaaaaaaaaaaaaaaaggtgggaagaggggtgagg

SEQ ID NO: 799642 - DNA, 609 bp, Homo sapiens
accatgtgtcagcagtcaaatatcagactcaaaaatataaagcaaggaagaaaaataccccccaattgcctgtaggactgccctgtgcaatgtgatcaccgctagccacatgtggctattcaggtcttggaatgtggtttgtttgaatgaagatgttctataagcataaaatacacactagacttcaaaaattggttaaaaacaaaataaaatagatcaatatttttattttgattacatgttaaaaggatattttggctatattaggttaaataatatatattattaaaattaatttcattgatttctttttactttttaaaacgtggatgctagaaaattttaaattacctctatggtttgcatcttatttctaccaggcagtactgctytagaagaaagtctaaactttaccttgacctgacccttaagtcttcagtaccttagaaacatgaagacataaagtcactaaattcaagtctggaaatagggacatttattatgtacctactaagagtacaaagattaataattacccgttttccaactccagcctgtaactactgttaaaaaaaaaaaaaaaaaaaaaaggtgggaagaggggtgagg

SEQ ID NO: 799643 - DNA, 609 bp, Homo sapiens
accatgtgtcagcagtcaaatatcagactcaaaaatataaagcaaggaagaaaaataccccccaattgcctgtaggactgccctgtgcaatgtgatcaccgctagccacatgtggctattcaggtcttggaatgtggtttgtttgaatgaagatgttctataagcataaaatacacactagacttcaaaaattggttaaaaacaaaataaaatagatcaatatttttattttgattacatgttaaaaggatattttggctatattaggttaaataatatatattattaaaattaatttcattgatttctttttactttttaaaacgtggatgctagaaaattttaaattacctctatggtttgcatcttatttctaccaggcagtactgctctagaagaaagtctaaactttaccttgacctgacccttaagtyttcagtaccttagaaacatgaagacataaagtcactaaattcaagtctggaaatagggacatttattatgtacctactaagagtacaaagattaataattacccgttttccaactccagcctgtaactactgttaaaaaaaaaaaaaaaaaaaaaaggtgggaagaggggtgagg

SEQ ID NO: 799644 - DNA, 615 bp, Homo sapiens
ctttgttccttctcccaactctctaaataagatagaattgtccttttccagctccatgcagatctctcaggtggcctctttgacttctttgcttcctctttgcccctaaacagggtgcaggtatcatgagaaaatgcagagtagtacaaaagaaatctggtgttctcttccccaaaaccaagtgcaccttactctaatttctgttagtcacataaacatttctgttaytcattttaataactggaagaatttcaggttaagtagatgctcatttctcatttcattggttcagcaattacttattgagtaccttttatgtgccagatactgttctaggctctgggagacaggagtgaacaaaacaaagtccccatttcttagggagcttaccttatgatgcagcagagagatagaagtataactaaatgagtaatacccgtatagtacatctgataaagataatgctattgaggaaagcaacttagggaatgaaaaagggagtgctgggatggcatgctcttgcttttggtgagttggtattaatattttcaatagggtagccagaaaaggtgtctccaataatgatatatgtgcagagacctgaaggaagtgaga

SEQ ID NO: 799645 - DNA, 626 bp, Homo sapiens
ttctttaggtcatggattgataaatagagcagaatacattctgggatattaattctaggcaagaaacacaaaaattatcctggggaggaggatgggaacatattattttaggaagagccatataaataaaataaactctatgtttgtacctaactttaccaatattcttttttttttttttgagatggagtctcgctctgtcacccaggctggatggartgcagtggcgcaatctcagctcactgcaagctccacctcctgggttcacaccattctcctgtctcagcctcccgagtagctgggactacaggtactcaccactacgcccggctaattttttgtatttttagtagagacggggtttcaccgtgttagccaggatggtctcgatctcctgaccttgtgatccgcccacctcggcctcccaaagtgctgggattacaggcgtgagccaccgtgcccggccaactttaccaatattctttaccaaaatatatatctttgagaagtaaagttatgtggaatatggatctactaaaatagttttttgtaatagttttttttttttctggtctggagatggccacaggatatttgaattggtagttgataagtgccaggtgttt

SEQ ID NO: 799646 - DNA, 583 bp, Homo sapiens
cctcaagtcctgggtcacactaaaggcagtaagaatgagtaagaaaggaggaggcacatcaagaaaagaatgtacctctttttcccttttcccagagccgtgggtgcaccctattcatttatcttctgtcatttggttaaagataggagtttccagactgaactgttgtctcagcggagaaaattaggataagtttggggttcacagtgaaatgtgagaagtacaggaaacagagaaaaaaatcaagatacaagcatagagacaaaaaggaaacaaggaaraaaaattgaggcctcctcaatccaccaccatcaataagacctttcttcttaaaagacaaggaccacgtggaaacactgttttcctttcccatggaacaagcaaaatgctttataaatagggctcagtaaagaattagcacaaaagaatgctaaaattacacttaaaaatggtttaaagcaaaaaaaaaaaaaaagcttaaagcaataacccaagatggtaagataaacagcaaaaacatttcaaaggatgagctctagtctttctggcatcttcatgttctgtttaagagaaatgagggtcc

SEQ ID NO: 799647 - DNA, 583 bp, Homo sapiens
cctcaagtcctgggtcacactaaaggcagtaagaatgagtaagaaaggaggaggcacatcaagaaaagaatgtacctctttttcccttttcccagagccgtgggtgcaccctattcatttatcttctgtcatttggttaaagataggagtttccagactgaactgttgtctcagcggagaaaattaggataagtttggggttcacagtgaaatgtgagaagtacaggaaacagagaaaaaaatcaagatacaagcatagagacaaaaaggaaacaaggaagaaaaattgaggcctcctcaatccaccaccatcaataaracctttcttcttaaaagacaaggaccacgtggaaacactgttttcctttcccatggaacaagcaaaatgctttataaatagggctcagtaaagaattagcacaaaagaatgctaaaattacacttaaaaatggtttaaagcaaaaaaaaaaaaaaagcttaaagcaataacccaagatggtaagataaacagcaaaaacatttcaaaggatgagctctagtctttctggcatcttcatgttctgtttaagagaaatgagggtcc

SEQ ID NO: 799648 - DNA, 658 bp, Homo sapiens
tgaagtagaatctgctatgatgtgttacaattgagggtagtaaaaatataactggagcagaaaaagacttagacaaatttgcaatgcttgtaaagatgtaaaaatttttaagcctatgtttatttgttgtagtatctgttacaggtatcttgtgaaaaatacattaatctgttktgtattattaaaccagtcgtaccagtggtgaacttcatttacgattgtagattttactgtcggttccatgaatttttgtcagagatagaagctaaacattaaacatggcagttttatggtttagcagtggtaaagttttattgcaataaaaattttgagctgagggataacactgaattttttctgaaagagaagaactggtttaaaccattattatcaaacactgaatagctttggaaattagcctttgctacagactaaataatgtttattaatgaattcaacctaaaatcataaggcaaatgtcacttatatatgtgaagcttaactatagtaaaattactttgacaactaatgtttgaactgcaattaatgtcaagctgctttatacactttctaatctgtcaatggttaaaacaagaatgagatctccattcccacataaatttgcagtagatacattctcaagctcagacaatggtta

SEQ ID NO: 799649 - DNA, 658 bp, Homo sapiens
tgaagtagaatctgctatgatgtgttacaattgagggtagtaaaaatataactggagcagaaaaagacttagacaaatttgcaatgcttgtaaagatgtaaaaatttttaagcctatgtttatttgttgtagtatctgttacaggtatcttgtgaaaaatacattaatctgttttgtattattaaaccagtcgtaccagtggtgaacttcatttacgattgtagattttactgtcggttccatgaatttttgtcagagatagaagctaaacattaaacatggcagttttatggtttagcagtggtaaagttttattgcaataaaaattttgagctgagggatracactgaattttttctgaaagagaagaactggtttaaaccattattatcaaacactgaatagctttggaaattagcctttgctacagactaaataatgtttattaatgaattcaacctaaaatcataaggcaaatgtcacttatatatgtgaagcttaactatagtaaaattactttgacaactaatgtttgaactgcaattaatgtcaagctgctttatacactttctaatctgtcaatggttaaaacaagaatgagatctccattcccacataaatttgcagtagatacattctcaagctcagacaatggtta

SEQ ID NO: 799650 - DNA, 605 bp, Homo sapiens
ttcttaaatcctagtaaaacctctaaacttttcttaactcataaaatttctagatcagctctcccttaatcaatatgaaaactatttacattagatagtattataagtgaggaaacaggcctgggaaatacatgacttgtctaaagtaaaaaaaactagctagtagaagttgaggctaaaaaattttttgactcatacattcaaggatcctattacttctttcaaatctttatttttagaaaaaaatttagcagaaccccaattatccaagaagggaggtggaaattccaatagctgctcacctaacatatttacataaacatttttaatgtttgattctcctatatacttcagatttaatataactaaaatgtttagaatttttaagatacagtagacccttgaacaatgcaggtttgcagtgcaygggtccaacatacatgtggatttttgtttttcaattaaacatggagcaaaaatattctaaggatgcaaaacccacctacagggaggttcgacttttcacatacatgggttctgcagggccactgcaggattttggtatatgcagcggtcctagaatcaatcccccatatatactttga

SEQ ID NO: 799651 - DNA, 681 bp, Homo sapiens
cagttcagggtgggaaatgcccttgggttctggctgaccacctgttatttaattttttaataagtgtgccagcttcaaaataccagagactctccttgaagggtaatcacaaagaattgaatgtcctggtatttggaacaagcattctatctagcttattggcatcatagcccttactgtaatatcagcgataacagcagtaaccgcaacaagagcccatgtcaggtccctggggatctcccaaagaaaacctttccatttatagcaaaaaacagtaaagaagcagggatctgagggggaaacatagatagtttgttcccgtggtagcacttccctcggtattctagtgcgggattagtgggcttcaaagtggaactgcctccagcctcagtgggcctrggaccatgcccatcagttatccactctggttttggaggtcactgtgtgatcttgggctgaccttggaagcttctgacttaccggcctgaggttcgcataattgcagggcttctatgttctgacggctaaactggaaagcatggtattcatgctggatacctcgtccaacaggtgtcaccatgtggtccatagaccggcagcattagcatccctctggagcttgttagaaatgccccaccctagatacagggaataggagcctgaataagatccttgtaacaa

SEQ ID NO: 799652 - DNA, 599 bp, Homo sapiens
gagtctgacatacctttgccttcatgtcaaatatgtactataaacgtgaatgctgggaagagttttaatagtttgagcctgaccctgtatgttcattagaaaagaagatgaaaagagaagaaaggggctttgagacccccttttcttttcatttcagcaggagcagcccagcacctggctggtctggacagtggagcrtgtcatatgtgggttatgaatttgaccataatgttgctgctttttttttctcaattttttttctactagtatttactaatgaccaactgtgtgtcaggcactgctctgggcaccagaggatgcctggccctgtgacgtccctgagagagctcacactgtctgggcccagtggcttccttagtactgggcatctgttgcactcttaccccttggtgagactcccaaaacttagcttcctgcctttcttttaaatattaattctgaagcagactatgaagcaagtggctaatgttcccatgtggctgatcaactggttataaggaaagttcccaaagaacagctccaaaataatccaagcagtgatgaccaggtttgaatgagcctgtagccatctgtgctga

SEQ ID NO: 799653 - DNA, 597 bp, Homo sapiens
aatcactccagttgccgaataccaaaaggccccttttcagtgtcattgtcagaaggaaatatccttgagggacagaactcacgtaattaaggacaaccacaaggagattatagtttataattttctgcatgttcttagaataaacagaccccccatagcaataactacttattaatgaagtcaggtgtgcatgctcattcctagcctggttagtctatggcatgcacataacacagaatttttgatggatgaatatttatttatgcatgagtagcacrgatattacacttgcagatgaagccagagttccaggttgctatcatcattgtatgaatagaatggagttgtttttccttattattttccttgtctttctcccttcacctcccccaaccttgccacttcccatctaaacacaggaatatactaatcagggaaatatgcactgctgtttagcaaaggggtcaaacccatttggatggaattccaggctcagcaggctaacaatggcaggaaactgggccctcaagccggctgcaccggggggctgttgagcgatagcttgttgaaagaggcggccctggggtatgctacttt

SEQ ID NO: 799654 - DNA, 622 bp, Homo sapiens
taacatgactctgtcttccaccggtgctgccatatttggtccacacgtgaattgctgtgattaccagcttttttctttcctggagacctttggtggcctctatttatgcagctgaaggagacacttacgacctcattcctgacagttttgggagctgacagcagaacattcaaagaatgacatcaagtggctttcctcaaggtcatttcctgctagtgatctcygcaaagatcacattctttatggatgtgtgggggtcagaaacagaccctattctgtcaggcgagagatgcctggagcagctgtaatgggcagacgtgtgtgtgtgtgtgtctgtgtgtctgtgtgtgtgtgtgtgtgtgtgtgtgtgtgtgtgtacatcctctgtgacatgctttgctggtgaatacaacccctcctcccccggccacacttcgctaaaaacaaaccaggtctgctggggtgcatgactcatgcttgaaccggagtcttcaccctgagacaataattctcattttaaaagcaaatgctgaagtcaacagctgctggggtgactttgcctatcttaatttggcttgttagagacagcacctccttagctgcttgaaggagaacttaagtg

SEQ ID NO: 799655 - DNA, 601 bp, Homo sapiens
gtactgtagatagtttctgctggaaccagtaacagagctagagtttcttatttgcaaatgtagtaagtatttgagaacactgtatgacatatttgtaggtgaaaactatcaagcttgttatacaaagataaatgtatctcttttacaatattcatcaccctctgcatagatatcataattttcaacctcaattaaatttactaaaagaatgttcattttaatgaagctttacaaactatttcagtatttaaatgtttagtagtctcttgccatggaaaaaggagaagctttmtcaatttttcaatcacaaatttatagtgacaaatataccattgagacaacaaaggctaggccatttcataatttacatgaatatataatatctagatccctagatatgccataagggtagtctacagaagctaccagaacataatagtaccttgcacttgtaaaacaattactacaacatgttttcatgtaatgtatcttactttttatatgtaaatgtatttttctttattacaataaaaatacccacacaatataagaaaattggaaaacagacacataaacagaagaaaaataaaacaacattact

SEQ ID NO: 799656 - DNA, 571 bp, Homo sapiens
ggtgtttgcaaagttctgaaaactatttggctatagtattgtgtaagaaaactgtcatgcaaaagtgaaagcaatattttttaagggtaaataaaccaggtatcatagcagacaccgtggatcactaagatgaaacagttataggttctgttttaggaacattcgtcttgtagaggtaagaagactgcttcaagaatcttcytgaccactaaccttggttggatcactctcttctctgcttgaacatcactgttttccccccttcattaaatctgcttcataaattgaagcaatccatttatttgtctgttgtacccactagaccataaaccccttgaaggcaggaatgatgccctactccttacaagagactatgtgaaaggcaggacatagaaacttaacaggcagagtataattataccataggaaatttgtcgcattttatcattcagaggtactgatacggtttggctctgtgttcccacccaatgtggaattttaatccgcatatgtcaggggagggacctggtgggagatgattagatcatggaggaggatttcccccatgctg

SEQ ID NO: 799657 - DNA, 618 bp, Homo sapiens
agtaattaaagtagtatctgattgtcaggggttacgcttccaaatgtttcaatatatagaacaacctgatggacaagtgattgctgtaaattgaaattacagaaatattttaaggccctgagaaatctccaaatagcagtgctctttttgtgtgcataggcccttttgtgggtaacagaatcacttatgggctcacccacgaaggagaggttttagatkttctttttttttttctttttttaagttttttattttgaaaaaaaatagagacaagttctcactatgttgttcagactggtctcgaactcctgagcttaagcaatcctcccaccttggacccctaaggtgctgggattacaggtatgagccaccacacccagccatgggttttagattttcacattcatgactcccattcatttctcttggcatggtgactgggagggcgatgagatgccttcagatggtaataagcaccctttacatagcacctttttccaagatgctttgtacgtgagaatcacaagaacttggaggctgcagagaactaatagtttcaaaaattacatgaacacttggacatctgtctcacactttgtggaatggtaactcacacct

SEQ ID NO: 799658 - DNA, 545 bp, Homo sapiens
agagatactctgatggcttatatgaatacaaagagtatttaaacacattccacgattcctagtagcctagcatctaatggagataaaaagtaatatagattatgtagtctagtgtgaagataaaggacctcaagtgggtaacaaaacagcaaaaacaagcaaaaaccacaggaatgtactatggtaagatctatcaaatccgattagtagttataaaatagaaagggacttgaagataaatggacttgccaattataatgattggcaattggttttaagaattagaacaaaatagttgttaatggaactgcttatgtaacaactccggataaaaactgtgtagaattytaaggttgagagacaatatctttctggagcagggtagaggaaggaaagaaggatcacagtaaagtctattttctcatgccaccttattgaagtaggatccagaaaacggagacagttggaaatggagagaggaggaggaaagagtagcctatagctaccaaggaagagtttacaataacttatccttactggtatca

SEQ ID NO: 799659 - DNA, 602 bp, Homo sapiens
cttctattgccacctgttttctggagaatcctagaacattatctcttctggagaatcctaggacattacctcttcattgcttctgccacattcttttattttatttatttttattttttatttttgagactccaggtgcacatatctgaaaccttgtcaccgtaacacattggtytctgatggttgtttatgtattttgtctttttgcctcttgatacattggtctggatatctgaatattttcttattacctatcttccagttcatgaattctgttttagtaaaatcaatctattcagttcttacttgtaattattacattttttagttataaaatttccttttaatatagttatattttctggttctctgctgaaattatccatcttttactaaattaaccacagatattttaatatccatgcctgataactccaatatctggatttcctatgtgtttgattttatttgcctgtttcaaatttttttctcttagtttttgtcaaaatgacagactaatttttaatgtaatgtgggacattatatattaaaaaataatttgaagttctcgatggttttgtctcttccacagaggatcaact

SEQ ID NO: 799660 - DNA, 564 bp, Homo sapiens
aaattaaaaaaaaaacacaaaagtgtccattaaacttgtgaaaattatttacttcaaggttatatgttagaccaactatttttccaggaatctaatatgctatgaaattaatcttgaaaagcctggagatatttccaagaaaaacaagataaatttcatccttattaaaaaaaggaaaggaagcagataccaaagctcaacatattttcagcattgaactcttkgaaatctcactctttctctagataaatgaagatatagatagatagattttaaaaacacatatggacagatagatattttaactctctcttgtatatatatatgatatatatcttatctatcttatatgtggctatctagagagagaaaatatctctctagacatatagctatctagaaatatcaatatataaatatatacagagatatatctagataacatatatagatatctctataaatctacatagagagaaatatatgtattgatatctccagatatatagatatctagagagatagatatctagagagatatagatataggtctccatctatcta

SEQ ID NO: 799661 - DNA, 633 bp, Homo sapiens
attattgatgaaaatggatatactaaacaacatattttcaatggagatgaatacagccttctattagaagaagatgtcatctaggacttgcacacctagaaaggagaagtcaatgcctggcttcaaagcttcaaaggacaggctgactctcctgttaggggctaatggagctgatgactttaagctgaagataatgctcacttgccattccaaaaatcctaaggccctgaagaatgttgctaaatctactctacttgtgccctagaaattgaataacaaagcctggatgatagtccatctgtttatagcatgatttactgactatggaaagcccactgttgagacctactgctcaraaaacaaagattcctttcaaaatatgaatgctcattggcaatgcacctagtcatccaataactctgatggagatacatatggagattaatcttcattttatgctgttaacacaacatccatcctgcagctcatggatcaaaaagtaattctgactttcatcaattattatttaagaaatctatttcataaaggctatagctgccataaaaattgattcctctgatgaatctgggaaaagaaagttgaaaaccttatgcaaaggatacaccagtctag

SEQ ID NO: 799662 - DNA, 570 bp, Homo sapiens
agccgggcgtggtggcttgcacttgtagtcccagctgcttgggaggctgaggtgggaggatcacttgagcctaggaggcagaggctgcagtcagccgagattgtgccactgcaccacagcctgggcgacacagccagaccctgtctcaaaaaaacaaaaacaaatcacagattgctgcccaccacccctctccatgcacccagagtttctgattcagtaggcatggcatggggcctgagaagttgcatttctatcaagttcccaagtgaggctgatgctgctggtccatggcccacactttgagatcactgttttgtgctcttgatgctgtttggatgattcaggcaaaagagtgaaaaacaattatattaacctgggagcagaatcccatggcagttgggcacaraactcaaagtcaagcagacgtggctgggactggaggtctgctgtagactgcaggagtccagcctggtcgctgctgttccctggtgcttggctccagggctggcacactgtgggcgtccaataaatgtgtgtttctggatgctgtcttagcttttaggtggaggt

SEQ ID NO: 799663 - DNA, 596 bp, Homo sapiens
tttccaggtcctgtgggagacaagactgtctgtgacctcgaggagctcacactgatccacagatgcacacacatacacacacatgcattctcacctccatttgagttttcctttagagtgtctttttttttttttttttgagacagagtctcgctctgtggacaaggatagaatgcagtggcacgatcatagctcactacaacctctgcctcctgggttcaagcaattctcctgtctcagcctcccaagtatctgggactacagatgaatgccaccatgcccagctaatttttgtatgtttaatagaggggtttcaccatattggtcagtttggtctcgaactcctgaactcaggtgatccacccgcttcagactcccaaagtgctaggattagaggcgtgagccaccgcgcccrgctagcgtatctttctcttccatggcttgaaacctcttgactctccaaggtcttagagacacagaatccctcggttcacatgaaactgggtccctaacaaacccggccttcctgacacatggcaaacctgtgttcagctgagtccccgtacctggaggtgcagtcagagtgggtgtggccc

SEQ ID NO: 799664 - DNA, 642 bp, Homo sapiens
gaaaaatgctttctctgggggagttgcccctctcatggcagggagccaccaaagaaggggtttaagagctctcctctttaagcactaaagagagatccctccctgagtccgttttttcctatcgtccgcttggcatttaataatgttaagacttattagagctggtaatgaaaactgggactgctgaataggaaactgtgttggagaggggtgtaatagcttccaggcatggtaagaaactatttatccgcaatcagttctcactctcagagtttgaagcacaaacgttaagttgaagggttttaaagcagattaaattgagcttttatttctgtgcactttcatctctgaacagctcactcctgctccccttgggctgatattcatgaggctgttcatatttttttttttgctcttatccttgttaagactgagttattaggattgttggtggtgagtattctcagaccgttgccgataggtgcttgccccagycaagcttggctcacctggaaagggaagtggacagttccttgcccccatgcacttagactccctcctcttcacccctttctccgaggatcaggggatagacaggccggggacccaacagggaggggatttgaggagagaagagaaagg

SEQ ID NO: 799665 - DNA, 594 bp, Homo sapiens
cccccaccatgtcccctgagctgtggcttcccctctctcagccttagttttctcatccagacaatgggagcaaatgaattaaaacacagaaaagctatgtggcacataggaagtacatgcttaaaatgagatgaaagacctgaaagtgatttgtgtgaaatacatgatccctaaaagtctatatgctgagaatttcccaagtcaaaagcrcattgtctcatcggtggctctaaaatgtatatgcatatatttttataggtttttgaaagatttattgcaaaagtaatatgtacttgtaaaatttcgcatcgtaaaaaagtatataaaataaaaattaacaatccttctctatccctagcaacagctttgttgagttgggatataactgtctagatttatacagtgatatctagatacgtctctctatctagatctacctatccatctatctgttcagatgcagatatatatttgaaggaaagtggtgtcacatctgcttaacttgggggcaatagaagcttcaaggggtgactgtgaatccgcagaattaatttatcagtggtgggtatgagtctggagagagattccgagtgt

SEQ ID NO: 799666 - DNA, 623 bp, Homo sapiens
ttaattggtctctgtgcctcgagtgttctcctctgtaagatgtagaaaatgatctcttctgcatggaggctgtgagaatgaactttgcaagagtgtggcagaccttcagcagatgtaaatttcccctctcatgctctgactcccagcttgcttagggattttgaggttttatttttaattcctttggttcactaagaaaagcccaagccccaaagtgttcatcacttagaaactttttggtatttgggggtgagtcaagtgtctatgcctgaaccagataccagggtattgagagatgaacgtgctagcatccagggagggggtggtggagttgaggggaagcaggagggcaagggwtgatcataacaatgttttactaaacacccacgctctgtcgtagccactgtgctaagggtcttcatctcgttaatcctcacgatcatattatgaagttaatattaaccccatttaacagatggaaaaactgagtcacagagaagttatgtcatttgcccaagatcacacagctaggaagtgacagagctgggatgtaaacccaggcttcctggctctaacaaaatgctctactcaagtattctgggttgaccagatgaccatctttt

SEQ ID NO: 799667 - DNA, 669 bp, Homo sapiens
actaataattttttagcatcttctgtgtgtcccgtcttggacaaagtaaagtttattaaatggaagatactctaatgggaaacaaagagaagcatgccaacatacaattgctatgcaactccattcaagcccctacagtcctatcggagagaagaaagttatgtattaaatatgtcctttatattaggtcttgctctactgtggttctgtcatttgcatctcagattagccttgacataagcattatatctttattttaaaagaacttaataggccaggcgtggtggatcacacctgtaatcccagcactttgggaggccatggcaggctgatcacgaggtcaggagatcgagaccatcctggctaacatgatgaaatcccatctctactaaaaatacagaaaattagtcaggcatggtggcaggcacctgtagtcccagctacttgggaggctaaggcaggagaatggtgtgaacccaggaggcagagcttgcagcgagccaagatcatgccactgcactcagcctgggygacagagcaagactcttgtctcaaaaaaaaaaaaaaaaaaagaacttactagtgtacctagtgatagacctagtaagtgatagagatggcacttaaagttttgaaaatgtgacccaaagccagggtgttttggcacta

SEQ ID NO: 799668 - DNA, 629 bp, Homo sapiens
cagattcaattaaatgagaattattcaggtaacactatgctagcttaatttataggtaatattcttatcttgctctgttttgcgttgctttaacggaacaacacagactgggtaatttaaaagataaataaatctatttcccacaattgtggatgatgggaagtccaatattaaggtgccagcatcttgtgagatgatcttctacctcatcccatggcagaaagcagaaggaaaaagaatgcaagagagggctgggaagggggccaaacccatccttttatcaggaacccactcccacaacgacgagcccattcctctgcggtattaattctctaataagaagtcttattcggtcccactccccaatacatttgcattgakaattaaatttccaacacataaactttggcagacacactcaaaccatagaattccaccccagctccccaaatttatgtccttctaacaatgcaaaataccctcatactatcccaagagtcccaaaagtcttgtctcactccagcatcgactcaaaaattcaaagtccagagtgccatctaaatcagatatgggtgagactcaaggcacaattcatcctgaggcaactctctctctagctgtgagcctgt

SEQ ID NO: 799669 - DNA, 600 bp, Homo sapiens
atatattattatatttatattttccattgaggatcctattacaaatagactgcttctcaaaaattccctaatcaaatgctacatgccagcagacatttcaaataattataatggagaaaaaaagaaggtgaaaaaaatgtgttttctgttaaaaagaaaaatcttgtttgatgataaaaataccttttgctagatgtttgctaaatacagtttttccataygatcagaatcaaggtatgatgttaccagatatttatcaattatctcagctatccagcaatgagaaaaaaaatgtaattgttcttttgcaaaccataaaatatacttttaaaaggcagcatatgatacgtgaaactgaccattacagtacttccagcaatatacattattcatgaaggtattaactactactaatttctaacttatatcaatataagaagcactattgctaagaaaatagatgtttatttactttctgtagaggatattattcagaaatcatctaaaaatccattaatctttagaggaaaaaaccattcttttttatcaatttgatgcagccgaagcaatttcctcaaaataatatatgactgatttcct

SEQ ID NO: 799670 - DNA, 620 bp, Homo sapiens
caacatgcaaaattttgctcgcactctcgggaacttcagtagcccctggaagcccattaacatgctgttcaggttcagaaacctgatccaaaataaacttctggaacatagcctattcataagttgaagtatcctgtatgggaaaaacaggcacgtgtggagatacagagtaaagcctataaaacttgacttcccctacattgtcaactattcaccagaaaaaagaaaaaaaaatctatttctgctgattgaagccgaaaaaggcacagctcaaacctgtggaaatgaatacaatgtgaaaatgcaccatccaaagagccagacatgcccaagaccccttcccgtgcaaggatamtaaggaaggcctgctactccccccagccccacccttcagggcactctggtgtcctagttatctgacctaagtttaaaaagaaaaaaatctttccccctgtacttggcaatattcaaatttttccaaggtgcgcttgcttacacactctctctctttctctctctctttctttctttctctctctctctctcacacacacacacacacaattagatgagggaaatgtccaaagcacaaaaatagatttcttaccctaaatctgatc

SEQ ID NO: 799671 - DNA, 620 bp, Homo sapiens
caacatgcaaaattttgctcgcactctcgggaacttcagtagcccctggaagcccattaacatgctgttcaggttcagaaacctgatccaaaataaacttctggaacatagcctattcataagttgaagtatcctgtatgggaaaaacaggcacgtgtggagatacagagtaaagcctataaaacttgacttcccctacattgtcaactattcaccagaaaaaagaaaaaaaaatctatttctgctgattgaagccgaaaaaggcacagctcaaacctgtggaaatgaatacaatgtgaaaatgcaccatccaaagagccagacatgcccaagaccccttcccgtgcaaggatactaaggaaggcctgctactccccccagccccacccttcagggcactctggtgtcctagttatctgacctaagtttaaaaagaaaaaaatctttccccctgtacttggcaatattcaaatttttccaargtgcgcttgcttacacactctctctctttctctctctctttctttctttctctctctctctctcacacacacacacacacaattagatgagggaaatgtccaaagcacaaaaatagatttcttaccctaaatctgatc

SEQ ID NO: 799672 - DNA, 633 bp, Homo sapiens
caccaaccctacctctgccagccctgctactggaaaaaacacttaggacatgccagggattatgccaagcactttgcatctagtctctcatttgctccttactacactctatgagtctaatatctccaaataaatagcaatctatagtaacaaaggcaatattcttataagaatcatgtttttaatacctggcacctatgggaaaacctctctgatggaagaatttaagagaagggtggaagggagcaaattccatttcttccagagtgactaaactacaccgaagtcaaacttatgctacccagttagttttgctctgatgatcctctctgcactgacaggtgaaagcacatgcagaacatgcatggcttattattctgaaaagtccaaaatactgcgcttattcctatagcaactcggaggctaaacagagacccagtgttaacttcatacagacgtcctcagagaarcccttcctttgcagttttatgttctttataattataccaaacctttagctcagaatccctttcactttaaaaaaaaaaaaaaaagaacttacattatcatctagttatatatgcaaggcaccaaagaaacaacaacaacaaagtaaatatggaaaaagacttg

SEQ ID NO: 799673 - DNA, 467 bp, Homo sapiens
cagatacagaccattatgtagatataatctagtcacaggttcttgggaaatatttaacatttttgttcgtttgtttgttttgagacggagtctcgctctgtcgcccaggctggagtgcagtggcacgatctcggctcactgcaagckccgcctcccagtttcacgccattctcctgcctcagcctcctgagtagctgggactacaggcgcccgccaccatgcccggctaatttttttgtatttttagtagagacggggtttcaccatgttagccaggatggccttgatctcctgacctcatgatccacctgtctcggcctcccaaagtgctgggattacaggtgtgtacttggtgttatctttactctccttgggtatagtaagaatttgctactagtttgaaggtcatggggactttttgaaaggcttcttatggggatgtgtttcggggatcattctttttattt

SEQ ID NO: 799674 - DNA, 542 bp, Homo sapiens
cataaatgtcgctaaattaaaaggaaacaagcctgggcaatgtggcaagaccccacctctacaaaaaataacaaaaattagccaggcatagtggcacgtgcctgtagtcccagctacttgggaggctcaggcaggaggattgyttaagccagggaggtcaaggctgcagtgacctgtgattgtgtcactgcactccagcctaggtgacagagtgagactctgtctcaaaaaaaaaaaaaaaaaaaaaaagaaccaatctcttggtcttttggagggttgtttttcaaggcaatgaggttgaagaccctaacttatacacacacagactttttttttttttaatggtaaatcatgactagaaaaaaatgctttacaatcatggttaagtatgacgttagggtataaaacagaatgcaagttttctgcccacatgatagattaaaagtaatggcaaagccgggtgcggtggctcacgcctgtaatcccagcactttgggaggccgaggcgggcagatcatgaggttaggaaatcaagatcagcc

SEQ ID NO: 799675 - DNA, 510 bp, Homo sapiens
tcactcagataagcctgatgcatgttcaagtttgaaaaacgctgacttagagcaatattagcccaaaagaacccaatgttagaagttctcttttcttgctgctggctaggaggaggtgagttcccccgaaggtcatatgccaaaggcttccttcaktgtgggaccacctctatagcttgcagcagggacaccagctgccctggtacttcaatattgttcttcggttgactcaagagttgacaggaggaggagagaatgtggagggacgcaccaggtgtgagggaccttcacagcccatccatcattttaagctcaggcagctgacttggaaaaacctatcagaatcacaaacaaggccagccaggaggctgagatctggtggggcaggaagagaataaagtatcctactttaagtgagtgagtatctccaatcaacctggaggtcttggcagatagaggcaggtgcttgctgcattgaacctgaagccttgtacctaattttcagagtcc

SEQ ID NO: 799676 - DNA, 595 bp, Homo sapiens
ccatctcaaaaaaaaaaaaaaagaaaaaagaaaaaccgtataattatcttgatagttgtagaaaagacaatccaaaatccattcctgataaaaaataaaaataaaaataaagtcttcgtgagctaggaatatagaggaacttcttcaacctgctagagaataaaacagaaaacatcatactcattggtgacatattgaatccttctgttaactaagatcggaaaaaaacaaggatttcatggttatyagttctattcaacattgtactggaggaagtatccagagtaaaaaggcaagaaaaataagtaaaaagtcatccacattggaaaggaagaagtaaaagtatccttatataaaaatgacttgattgtgtagagaatctgatggaaacaacaaaaaagcaactaaaactaataaatgactcttataaagtttcaagatgcaagattgatgtacaaaaatctaggccaggtatggtggctcacacctgcaatcccaaaactgggaggccaagaagggaggactgcttgaggccaggagttcaagaccagcctgtgcaacatagtgagagcccatctgtacaaaaactttttaa

SEQ ID NO: 799677 - DNA, 595 bp, Homo sapiens
ccatctcaaaaaaaaaaaaaaagaaaaaagaaaaaccgtataattatcttgatagttgtagaaaagacaatccaaaatccattcctgataaaaaataaaaataaaaataaagtcttcgtgagctaggaatatagaggaacttcttcaacctgctagagaataaaacagaaaacatcatactcattggtgacatattgaatccttctgttaactaagatcggaaaaaaacaaggatttcatggttatcagttctattcaacattgtactggaggaagtatccagwgtaaaaaggcaagaaaaataagtaaaaagtcatccacattggaaaggaagaagtaaaagtatccttatataaaaatgacttgattgtgtagagaatctgatggaaacaacaaaaaagcaactaaaactaataaatgactcttataaagtttcaagatgcaagattgatgtacaaaaatctaggccaggtatggtggctcacacctgcaatcccaaaactgggaggccaagaagggaggactgcttgaggccaggagttcaagaccagcctgtgcaacatagtgagagcccatctgtacaaaaactttttaa

SEQ ID NO: 799678 - DNA, 595 bp, Homo sapiens
ccatctcaaaaaaaaaaaaaaagaaaaaagaaaaaccgtataattatcttgatagttgtagaaaagacaatccaaaatccattcctgataaaaaataaaaataaaaataaagtcttcgtgagctaggaatatagaggaacttcttcaacctgctagagaataaaacagaaaacatcatactcattggtgacatattgaatccttctgttaactaagatcggaaaaaaacaaggatttcatggttatcagttctattcaacattgtactggaggaagtatccagagtaaaaaggcaagaaaaataagtaaaaagtcatccacattggaaaggaagaagtaaaagtrtccttatataaaaatgacttgattgtgtagagaatctgatggaaacaacaaaaaagcaactaaaactaataaatgactcttataaagtttcaagatgcaagattgatgtacaaaaatctaggccaggtatggtggctcacacctgcaatcccaaaactgggaggccaagaagggaggactgcttgaggccaggagttcaagaccagcctgtgcaacatagtgagagcccatctgtacaaaaactttttaa

SEQ ID NO: 799679 - DNA, 595 bp, Homo sapiens
ccatctcaaaaaaaaaaaaaaagaaaaaagaaaaaccgtataattatcttgatagttgtagaaaagacaatccaaaatccattcctgataaaaaataaaaataaaaataaagtcttcgtgagctaggaatatagaggaacttcttcaacctgctagagaataaaacagaaaacatcatactcattggtgacatattgaatccttctgttaactaagatcggaaaaaaacaaggatttcatggttatcagttctattcaacattgtactggaggaagtatccagagtaaaaaggcaagaaaaataagtaaaaagtcatccacattggaaaggaagaagtaaaagtatccttatataaaaatgacttgattrtgtagagaatctgatggaaacaacaaaaaagcaactaaaactaataaatgactcttataaagtttcaagatgcaagattgatgtacaaaaatctaggccaggtatggtggctcacacctgcaatcccaaaactgggaggccaagaagggaggactgcttgaggccaggagttcaagaccagcctgtgcaacatagtgagagcccatctgtacaaaaactttttaa

SEQ ID NO: 799680 - DNA, 611 bp, Homo sapiens
catgcttatccaaagattactattgtatcttcaaatgaatttaatattgtgagatggaactgccggggattaaaaagactacccaaaagatttctggcacttacaatttttaaaatagttatgtcatctcttcattatttagggctggatgggcaactcaatcagcgattttttgatgcttcttttatccttcaaaatagagacctaaggacacgtggaagtcagtttaattgccagagagaaggatgcaatcactaggtaaaatgaggtttttaggattatttattgattccaggttcccatgctttttgttagagcttattagtacaggttctcaagagatgaccacataaaagtgctctgtttataaataagcaggtttctgtagtactgactggttcatcacaaggcaagtcagaaaccagtatccttctagctctccagtcaggacttccttatgcctctarttttatgaccggttaaggagaagccagagttagagtaggagaggactaattctcagcagcagtggaggtgagttctttcttttgcggaagctttacatatgttttgtgtagtaggaataactagatattttagctagtgtgcgg

SEQ ID NO: 799681 - DNA, 573 bp, Homo sapiens
cgtaacaaattttgttctctgtaacagagcggggctccctaacccccaggccacggaccagtgctagtcggtgtcctgttaagaagcaggccacacagcagaaggtaagcgttaccacttgaactctgcctcccgtcagatcagcagcagcattagattctcatggaagcacaaaccctattgtgagctgtgcatgtgggggtctaggttgcacgctccttgagagaatctaatgataaatggaatgcactggaatcttcctraaatcatcgtcccccaccaccacccttggtccgtgggaaaactgtcttccgtgaaaccagtccctggtgcctacaggctgggggctgctgctttataatgttgttccggaaggaaaacattccctcgagtctgtgccgtttgctgtgctgggaggtgacatgtatacaccttgagtttggatttcagtgaaaaagcctttgttgatgcttcgtctaaagatgcacagtgaaaggagtccttcttatccttttgaattactgcagacagtgtttaacccaaaactttcactgaggcgatgctgtccctccc

SEQ ID NO: 799682 - DNA, 573 bp, Homo sapiens
cgtaacaaattttgttctctgtaacagagcggggctccctaacccccaggccacggaccagtgctagtcggtgtcctgttaagaagcaggccacacagcagaaggtaagcgttaccacttgaactctgcctcccgtcagatcagcagcagcattagattctcatggaagcacaaaccctattgtgagctgtgcatgtgggggtctaggttgcacgctccttgagagaatctaatgataaatggaatgcactggaatcttcctaaaatcatcrtcccccaccaccacccttggtccgtgggaaaactgtcttccgtgaaaccagtccctggtgcctacaggctgggggctgctgctttataatgttgttccggaaggaaaacattccctcgagtctgtgccgtttgctgtgctgggaggtgacatgtatacaccttgagtttggatttcagtgaaaaagcctttgttgatgcttcgtctaaagatgcacagtgaaaggagtccttcttatccttttgaattactgcagacagtgtttaacccaaaactttcactgaggcgatgctgtccctccc

SEQ ID NO: 799683 - DNA, 573 bp, Homo sapiens
cgtaacaaattttgttctctgtaacagagcggggctccctaacccccaggccacggaccagtgctagtcggtgtcctgttaagaagcaggccacacagcagaaggtaagcgttaccacttgaactctgcctcccgtcagatcagcagcagcattagattctcatggaagcacaaaccctattgtgagctgtgcatgtgggggtctaggttgcacgctccttgagagaatctaatgataaatggaatgcactggaatcttcctaaaatcatcgtcccccaccaccacccttggtccgtgggaaaactgtcttccgtgaaaccagtccctggtgcctacaggctgggggctgctgctttataatgttgttccggaaggaaaacattccctcgagtctgtgccrtttgctgtgctgggaggtgacatgtatacaccttgagtttggatttcagtgaaaaagcctttgttgatgcttcgtctaaagatgcacagtgaaaggagtccttcttatccttttgaattactgcagacagtgtttaacccaaaactttcactgaggcgatgctgtccctccc

SEQ ID NO: 799684 - DNA, 498 bp, Homo sapiens
cggtcactatttgcatatcaggcagaatcctttcccatctttgcacctcctgttctgagcatggcatgtgtgcagaagctttccagaaaagtctgttgatttgaaccatgatggccaaaataactctggacagggtggcaccgttttgagctgcgtgtaagcacacatgtgtgcaggtgcacatacccacaccgatacacgggcatgcacaccacggcctgaggtcctctgccgctggaagaaaaggcaggttggcatctgtcatcgttgcatttytttgacaaaacatcaaccttcttctcacaacttttctttgccaagtgacttttcaaggaccttcccaaactgacatctctgaaatctttctttttctgtactctaaggggtgggcgaactttctgcaaaggctagggtggtaaatattttaaactatatggtctctgtccaacttctcaactcctgcatcgtatcacaaaagcagccacagacagcctgtaa

SEQ ID NO: 799685 - DNA, 629 bp, Homo sapiens
aaaaaaaagacgtaactatcatgaacagtttttactgtttaccctactgatttacttggatttaaagaactacatgcttcatagggttagagttctttgctttattttttcccatttaaaatacaaatagcctgggcaacatggcaaaaccctgtctctacaaaaaaaataaataaataaatgcaaaaattagctgggtgtagtggtgcgtgcctatagtcccaactatttgggaagctgaggtgggaagatcacctgaacccagaaggtcaaggctgcagtgagacatgattgcaccactgcactccagcctaggtgacatagtgagaccttgtctcaaatgacacacaaaccaaaaaaaaaaaaccccaaatatttacatatctcttacccaaaggaagcattttttwaattggttaatctctttctgagaatattaacaaattgcaaatggattttcgtcccctagtttatgaacagctatgtaactcatgaatttttctgtaaatgaccctactacttgagtatcattgcatttaatcattagctagtgtctttcttgattgaaaaggtaaaattttagagattctggagtaatctcatatgttggctggagattagtcaattca

SEQ ID NO: 799686 - DNA, 604 bp, Homo sapiens
ttgagtatcattgcatttaatcattagctagtgtctttcttgattgaaaaggtaaaattttagagattctggagtaatctcatatgttggctggagattagtcaattcagaaattatgagacagcttggtggaatgcagccagtgttggagttaggctgggttcagccgccagctaaggcacttttggctctgacagaagttagagatagctgcttattgtttctaagcctcagtttcctcagttacaacataaaacctaagatataagtgctgttgtgaataacaaatgagatcctacaattaatgatagctgtcagttaggagttgaaacctctactttaagccattgtcttatctcrtcaataaaatccagctgaccagctttgagatcgtaccactaagaagagacttactcaataaaggaatcaaaaacaaattaaaaaatccattatgtatggtttctcttggagatggctttggctctggagtgatgcttggactgagatctgagtcctcatgcttagtgccaagttgacctggcaaagaaggctattttaaattttagggggaaggagcgacatctgtcggacacagtgcaaacta

SEQ ID NO: 799687 - DNA, 636 bp, Homo sapiens
tagttgcctgtttcatgagattcctgtagttcttttcaatgatgtcataagcctacaaagctggcttttgggcaattgccgcgataaaacacaagtatttatgtacatctatcatgcatcaatagaaatatttgttttataaaaaagcaagtatctcttaaatcagtgtggaactggaaatggarttggtggcgtccagtctgattccagggtttgggaagttgggcagtgcccagcagacactgagttgacaggacataagtaatgattaagttgtttggccctaactacgtacttaattggaactgtgaggtatttattttggcctaagtaccatgaaaaaaattactgaaaccctaaggaccgtgtggcctgagaaagtttgggaccctctaaccttgaattctgctgctgccttttgtaccctggtttttctttcttttttttgttgttgtttcttgttttttgttttgagacagagtttcactcttgttacccaggctggagcgcaatggtgtgatctcggctcactgcaacctccaccctcccgggttcaagcgattcccctgtctcagcctcctgagtagtcgggattacaggtgccccccactatgccaggctaatttttgttatttt

SEQ ID NO: 799688 - DNA, 636 bp, Homo sapiens
tagttgcctgtttcatgagattcctgtagttcttttcaatgatgtcataagcctacaaagctggcttttgggcaattgccgcgataaaacacaagtatttatgtacatctatcatgcatcaatagaaatatttgttttataaaaaagcaagtatctcttaaatcagtgtggaactggaaatggaattggtggcgtccagtctgattccagggtttgggaagttgggcagtgcccagcagacactgagttgacaggacataagtaatgattaagttgtttggccctaactacrtacttaattggaactgtgaggtatttattttggcctaagtaccatgaaaaaaattactgaaaccctaaggaccgtgtggcctgagaaagtttgggaccctctaaccttgaattctgctgctgccttttgtaccctggtttttctttcttttttttgttgttgtttcttgttttttgttttgagacagagtttcactcttgttacccaggctggagcgcaatggtgtgatctcggctcactgcaacctccaccctcccgggttcaagcgattcccctgtctcagcctcctgagtagtcgggattacaggtgccccccactatgccaggctaatttttgttatttt

SEQ ID NO: 799689 - DNA, 618 bp, Homo sapiens
tgttcatttttttcagtgttttttctcttttctaatgtagataacttctgttcatctgtattcaagtttagtgactcttctgtcatctcaaatctgaagttaagcctatccaatgaattttttattttagatttattttaaatattatactttttagtgcttcagtttccatttagttcttttttactgtttctatttctctaaaatttcctatgtgttcattgtttgagaatatttttctctacagctttgaccatagttataacagcagctttaaaatctgtgtacgcttattctgagtcatctcagcgtctgtctttattgattattatctttcctctaaaatatgggtaacatttttctgttttatgtctagtattttggggggttttttggtttgggtttyggtttttttgttgttgtttgacagggtctcgctcttttacctgagctggagtgcagtggcacagtcgtggttcactgcagccttaaactcctgggctcaagctgtccgcccatctcagcctcttgagtagctgggactacatgctactcatgccttgtatcctagatattgtaaataattcattgtaggaactctggatcctattatattcc

SEQ ID NO: 799690 - DNA, 616 bp, Homo sapiens
ctttgttgaaatcactaacaacatttccttgaagtaccatcatttagttacaatcatttaagaagacatttgtcagtttgaatgtaggagaaaactggtgtctcattgctctaattcaaacttgattcttattgaagttgaacatgttttcataggcttgctatttgccttttttyttttctgaattatctttatgtccttctgtatcatgtttacttcttaccactttctttttttccctctgtttctagacactggagtcaactaggtaccctgttcttgtaacataaaaggtgataagagtttagagccagattggtaaagggagctagaaatttgagcaacattcttacataggtattttattatgcatctgctttgggttttgtactgtgtaacacagtactcaggagtctattggactaatttacattaatggtatgtggttaaaaaacctatttttctgacatttgacttcaatatatcttgaagtagttctctaaaagaccacgatatgccgtgttactttccctctgcaagaaaaagagaaatgcatgtaaagtaaagcagttgaacagaagcagcttagacatggattagaagcaggggggattga

SEQ ID NO: 799691 - DNA, 569 bp, Homo sapiens
ctttgtaggacctgccctggacaagactgagaggtagaagacacttgcctttccatttctccccaaggttccctccgttcggggccatccacagatctttctccagctccatctctctctgaagctggcagacagggacagcctctcttcatgtgttccacgtttccttgtgttacaatctggacttcagtgttaatccattatttcattaaacacccactcattgggacacctctgggctgggcttagaccctggrgataagaagatgaagggcatggaggttcaggccatttcggaacttccaggtccctcagggagggcagagaagtggacaggcaagcccaggaacccgtgaaggctgccgtcctgctgtcagttatgtgtgttgtgcaaccaagactcatagattttcatcccagcaaagccagctgggaaaggaaaagggacagttgtgagctctgagagtcagcttccttgaattgttctttgagttaaaatcaaagctggcaattaagactctcctactaccaagctgtggaacaaactgtcccaggaggcccgactttcc

SEQ ID NO: 799692 - DNA, 616 bp, Homo sapiens
tgcttgatatgatgtgtatcccatgccttgagctgtgtgatggaagaaaataacttgttacttttttcttttagtagatacaaatccacttcaagggttttttttgggaggaggttttttttaaacattaatttttttgtttttttttttttgtttttttttagagacttggtctcattatgttgcatggggcctcaaactcctgggctcaagcaatcctcccacctcagcctcccaaagtgctgggattacaggcatgagccactgcacctgaccataaatccattttgatctcaytgattagctgatgcagctgtggttatagttgctgcaatttgtggttgtggcatctgttaaaggattttcacttttagtagtggttaattagagaatttttatgaacgccacaagctagaaaaccaaaacaactgaaatcctttgtaagatatattttaaaacattttcttgtatgcattggaatgctcatctgttattgtaggaaatgacggtcaaaatctagctgaaggttagtaccacagaggtagaccagcattcaaatgcccagagtattatatattttccaattaccaagaaacagctgtgaggttgatctgag

SEQ ID NO: 799693 - DNA, 567 bp, Homo sapiens
ttgtgccataattaggtttagccagccaagtaattctaggtcacttctatcttttcacatttagcatggaagtgtttttctggttacatctccaaatacattgctttagtgtttttacagttctactacacagtctttgcaaatggaccactattttctaatcaagaaagcaaggacaatttgtgtcacatcatccttgttcccttcttgcaattttggaagccttgaggagtgatgttactaaggaggagggtgatgyagattttgaaggtgaggatgggagccacttcagggctcagcatctgccccgacaatgcctctttcccagctgcttcaccattgctgtgctccctacctgggcctctcagtcatcccacttcctgtgaggccatcctcatagggctaacaagaattatggacagaagtacagttataatcaagcattcatcaggctgctttgacccacttccttgttctgaaagtctcatagcactagtagataccgaccatttgcatccccgctgttcctatgcatagaatttctgacatgagagtcacaaggctttt

SEQ ID NO: 799694 - DNA, 472 bp, Homo sapiens
gtgtatttttgttattttcctgtcaggcactcaggagccctgggatctgccatcttattattcatcattagtgaagggaagtcccaaccacagaggagaattccgaataatatcttccctttgtaaacatttctgccaatttctaaggactttactcatctatcctgagctttgtaaccactctgtgaggcaggaagaaagaaaaggttttgtcatcttcactttatgagtaagaaaataagattggagaggttaattgacttgcccaaggccaaacagcctgtaggtggttgagcagaaatttaatcctgggtcatctgactccagggctcagtgyggagaacattgacctgggaatctggggatctggttaatgttttagatctgcaggtaactctcctgcatcccatggtaaccacttgtcactggaaagtaggaagttggggtcacctgggggatccctaggctctgt

SEQ ID NO: 799695 - DNA, 485 bp, Homo sapiens
catgtatttcagccctggtgaaactatataaaatggtgtggtaggccaggcatggtggctcatgcctgtaatcccagcactttgggaagctgaagtgggcagatcacttgaggtcaggagttggagaccagcctggccaacatgatgaaaccccttctctactaaaaatmcaaaaaaaaaaaaaaaaaaaaaatcagccgggcgtggtggcaagtgcctgtagtcccagctactggggaggccgaggcatgagaatcgcttgaacccaggagatggaggtgcagcgagccaagatcgcactcagctgagactgcactcccgcctgggtgacagaaggagactgtgtcaaaaagaaaatagaaaaatgacgcagtagatgagaaaaacagtttgatggttcttcaaatagttaaacatagaattaccaaaaatacctatcacctacactcctagatatatatgccaaatgtttgaaagcaagtatt

SEQ ID NO: 799696 - DNA, 632 bp, Homo sapiens
tatattatatattaaaatatatgctattctttctttaaaaattcaaataaacatatttagttcacatcattactcatgtttgtgttcaagggtagataaaagaggagtagggaaagtagtactcacttgagctgataaatatctctaagaaaattttaaaatacatgtttaaatttatgtgtaagttttattaatttttatttgacatttaaatgtaaaatattttatcactcaaatatatttcagctataaaataaataacagttaaggatttaaaaatatttatactctgaactgtagaaatattagtcccttgaaagatctctttatttccaaaatatttctattgcaagtgtcagaaatggtaactatataacaattgagaacgtaggaaattatttattcatatatgaattcccactcataaattttggctgccttcactgaaggctttcaccaaagtgctatcaattttcacytctccttcattcccatgatgtcttgcagaaacaaaaggaggaagaaaaaataatctaaagattgaatggctgtcccacagattcacagccaaaattaaaacaagaacatttttggcctacttaatatacttactttccccaaaaagaatctca

SEQ ID NO: 799697 - DNA, 630 bp, Homo sapiens
cctgggcttggccagctcccggctcagacctgaagctgagccagagctaggtgtgtgagccccccggaaaggcaggcatctcggccatactgtcccacatccccccgccaccttaggacccatctattcccagtcaggccctgcctcccaggctcctctgctctagactgtgccttgcccccttgggccatctgtactggaagggcctagcgagcttcacatctgagctcttcactcagtgaacctcagggcttcttctcattgtcctgcccrcctcttgcaggtgtgaagactccagaggagggctgcctcctgaacactgcccatgttactggccctgaggcccgctgtgctgcccttcgggaggaattcctggccttccgccgccgccgagatgctactagggctcggctaccagcctatcgacagccagtcccccaccccgaacaggccactctgctgtgaacatccctgatgtgaggctgtgaaaaggcatatggacctgcaaaggaggcccccaaccagacagacctagtttcaaacgagggcactgcccctgcctgcccctttggtgcccaggcacagaccctgatagtgggtttgggtcaccttggtatggaatgtatgtgc

SEQ ID NO: 799698 - DNA, 630 bp, Homo sapiens
cctgggcttggccagctcccggctcagacctgaagctgagccagagctaggtgtgtgagccccccggaaaggcaggcatctcggccatactgtcccacatccccccgccaccttaggacccatctattcccagtcaggccctgcctcccaggctcctctgctctagactgtgccttgcccccttgggccatctgtactggaagggcctagcgagcttcacatctgagctcttcactcagtgaacctcagggcttcttctcattgtcctgcccgcctcttgcaggtgtgaagactccagaggagggctgcctcctgaacactgcccatgttactggccctgaggcccgctgtgctgcccttcgggaggaattcctggccttccgccgccgccgagatgctactagggctcggctaccagcctatcgacagccagtcccccaccccgaacaggccactctgctgtgaacrtccctgatgtgaggctgtgaaaaggcatatggacctgcaaaggaggcccccaaccagacagacctagtttcaaacgagggcactgcccctgcctgcccctttggtgcccaggcacagaccctgatagtgggtttgggtcaccttggtatggaatgtatgtgc

SEQ ID NO: 799699 - DNA, 639 bp, Homo sapiens
aggggaccctgccaagagtcacctcattagcacaaacacagattgctgaaaggggtgcataatgaataacaaaagatgctcctattgctcaggaaatttcaaaggtttcaggagctttgcgccaaggacaaagaacaaattttttttcctattatatattccaatgaatccagacaagttcatcagaaagtcaaacatattggttgtcacagtatatctaaataagttatatttttctatgaaatgacaaagatcatcatatttgatctaaccatatactgtccacaagaggcacatctaaaacaaaaataaataawtaaaaataaaaaataaaaagatagaaaaagatatagtatacaaaaagaattaaagtcctaaactattaaaataaaggataagtagtaaaaatcaagatctgcaatgaagatgtgtttgtcataaatctttagtttctgaataagaggaaaatgaccaaaacacaattgctgtggagatttcatcagttcttaacagatcaagtaaacaaacaaaagatgtagaatgtcagaaaaaagtcattgctgggatccactttgtaaatattgaaaaaaaaaacaaaaaaaatctttttcagggtctatggaacaattttttaaaatt

SEQ ID NO: 799700 - DNA, 639 bp, Homo sapiens
aggggaccctgccaagagtcacctcattagcacaaacacagattgctgaaaggggtgcataatgaataacaaaagatgctcctattgctcaggaaatttcaaaggtttcaggagctttgcgccaaggacaaagaacaaattttttttcctattatatattccaatgaatccagacaagttcatcagaaagtcaaacatattggttgtcacagtatatctaaataagttatatttttctatgaaatgacaaagatcatcatatttgatctaaccatatactgtccacaagaggcacatctaaaacaaaaataaataaataaaawtaaaaaataaaaagatagaaaaagatatagtatacaaaaagaattaaagtcctaaactattaaaataaaggataagtagtaaaaatcaagatctgcaatgaagatgtgtttgtcataaatctttagtttctgaataagaggaaaatgaccaaaacacaattgctgtggagatttcatcagttcttaacagatcaagtaaacaaacaaaagatgtagaatgtcagaaaaaagtcattgctgggatccactttgtaaatattgaaaaaaaaaacaaaaaaaatctttttcagggtctatggaacaattttttaaaatt

SEQ ID NO: 799701 - DNA, 630 bp, Homo sapiens
cggacctggtcagcccatgtcaacatttactgtaccccgcacattttagggtcctgtactaaatctattcttgtttagttttgttttgttttacagacagggtctcactctgtcgcccaggctggagtgcaatggcaygatcacagctcattgcagcctcaaactcctgggctcaagcaatcttcccactttgacctcccaagtagctaggattacaggcatgagccaccaggtcagtccgatgtactgaatctttgtaatctacaaaaataggaatctagctcccttccctttaagaacttacaatttagttgtggaataaaacaaacacatcatctactcattctttaactaagcatttttgtcaaatcaattggaagattttcttccatgagatcatatctctgattttataaaacaagtcaatgagagagagaaaattctttttatagtcaatcttgctggaaggcatctttaccataaaataaatgtttcaggagtctcttgggaagaattcatgatgcagttgagatccactgtcatcactatgtaacagtgttccttctcatgggaattggatgagattaagagactttgtgaatattctctgttgtgcttaagcaaagttta

SEQ ID NO: 799702 - DNA, 630 bp, Homo sapiens
cggacctggtcagcccatgtcaacatttactgtaccccgcacattttagggtcctgtactaaatctattcttgtttagttttgttttgttttacagacagggtctcactctgtcgcccaggctggagtgcaatggcacgatcacagctcattgcagcctcaaactcctgggctcaagcaatcttcccactttgacctcccaagtagctaggattacaggcatgagccaccaggtcagtccgatgtactgaatctttgtaatctacaaaaataggaatctagctcccttccctttaagaacttacaatttagttgtggaataaaacaaacacatcatctactcattcyttaactaagcatttttgtcaaatcaattggaagattttcttccatgagatcatatctctgattttataaaacaagtcaatgagagagagaaaattctttttatagtcaatcttgctggaaggcatctttaccataaaataaatgtttcaggagtctcttgggaagaattcatgatgcagttgagatccactgtcatcactatgtaacagtgttccttctcatgggaattggatgagattaagagactttgtgaatattctctgttgtgcttaagcaaagttta

SEQ ID NO: 799703 - DNA, 552 bp, Homo sapiens
gtgaaagtccacattgaattctggaagcacttgggaattcatacatacaaattattctgataacacctggatcaaactggtttgcccatcacaattataacacaggcatatattactgtaacatatttttatttccccatcttagatgttttatayagatcattaaaactaatctcaaattgttaattcaacaaatgacatttcttgttggttttggtagcatacatagttctcaatttgcaaatagtcaacatttgaaaaccaacagtattttttcctttttttatttgcctgtttattattttctatctctatacctgactcccattcttcccaaacacaggcaaccatttttgttgtgcttattgcatatttagtatttaattatgttctttctcaaatgattattttgtctgcagacatttagtatacataactggaattatatgacaaaatatagtttccattttaaaataatcattttatttctgaggtcattcacattcctaggtttttgtctgttatgttgcttccaactgccttacagtactc

SEQ ID NO: 799704 - DNA, 592 bp, Homo sapiens
tgaacatttccagttttaccacaaatgcttgccccgtgggaaaatacttccctacattttatgacaattgattctgattttgaggaactaatttgtatcgaatgcaaaatgtccagcctcacatggaaactggaaagtccccttgtccagacaggtccaaaactgtgtttttattgtaaagacaggggaaacaatgaaagattgtgttttttgttttagaaaatccttccttcattgttctgcatacttctgtattttattttttttaacagtcctgtgggtttaatgaccacaggcaattttgtggatatctggggctcatgggaaacttcaccatgtctggattctaagctcttagatgccagagcctactggatcttttactrtatgtgaagtcacccgtactgccaaggatcctgaagtgaacatgctgacccctttgagagattcttggaaatatgactgacattttctactgtgcaatgaaagtcagcatttccctccccacattatagttctggccacaaaggaagcaatgcccctagaactctctgatgtatctgagaaccctggaggcttctgacttcatttg

SEQ ID NO: 799705 - DNA, 619 bp, Homo sapiens
tcatttcatccttataacaaccctgaaatgtaagtattttatccctatttgaatggaagaaaaattgagactcagtgcttaagcaacttacacaagtttacataggtaggagatagctagtgcatagaagaatgaatatttaaaccaggccttcctgactaaggggctctctgcagccctacctcagcccgctccacccctgctttttaaattagagtaagaggtagcagaacaaaatgttcaagattggggattctgccaagcactatgtaaccttgaaaagtttaattaamctttctgtgttccagttttctaatatgacaaatgaagatgctctaattattagaccatagggtagctgtgagaatcaaatgtggcaatacttgcaaatacttaaagccatacttcacagagaataagtggtaattaccagctatgcttttcttggtgctttatcctcttacagtcatagaattctgagttaaaaaactacctctagttaacagtgacaaaatgattagtcatagactattatggtcaagattttagggctcagactaagtgaaaatgattgtcattaacatgttggtgtagatcttcaactcaatatagaagagaa

SEQ ID NO: 799706 - DNA, 629 bp, Homo sapiens
ttttaactcattttattcttataattatataaattatatcattaatacattttttagagataagaaaaccaaggcatagaggggtagatactaaagtttaagaatcattgttctgtacgtttttctgcatatatttacaaccttataatttccttttcaattctcacagtgtttactatttcaatactaacacactttctatttcttgagcagaataagacatctttctcaggcccaggaactcacagtttactggatgacacttttacctaaaccaataacaaccacattccatgataagttttataatacatttttatgaagtrtatatacgaaatgcagtaaatgaatctattcaccagctggggaaaacaccctggaatcatgtattgaaggaaatgtttacagggctaagaagtgggcagaaacattccaggacttagagttgggaaatgtggccaaaatactcttaactgggcaaggcaaacatgctaaaatatttggtgaaggatgagtctggaaacaaatgttgatgcttaagtatttttcttctttaaatctcggtgtcttcaattacttctgtacccttcaaaacacataagaaaatttatacattgtataaatatgtg

SEQ ID NO: 799707 - DNA, 609 bp, Homo sapiens
ttccttctgaaacaattccaaacaataggaacagagggacttctctgtaattaatttgatgaggccagcattatcctgataccagaacctggcagatacacaacaacaaaagaaaatttcaggccaatacctctaatgaacattgaagcgaaaatcctcaataaaatactggcaaaccaaatccagctgcacatcaaaaagcttgtccaccacgatcaagatggcttcatccstaggatgcaaggctgattcaacatatacaaatcaacaaacgtaatccatcacataaacagaaccagtgccaaaaaccatatgattatctcaatagatgcacaaaaggccttataaaattcaacaccccttcatgctaaaatctctcaacatactaggtattgatggaacgtatctcaaaataataacagttatttgtgacaaacccacagccaatatcatactgaatggacaaaagctggaagcattcccttggaaaactggcacaagacaaggatgccctctctcaccactcctgttcaacatgttattggaagttctggccagggcaatcaggcaagaaaaagaaataaagggtattcaaataggaagagaaga

SEQ ID NO: 799708 - DNA, 634 bp, Homo sapiens
aaaaatataatacagaaaagagttttgaagggaaggtttccagagacatgaattaggaagggaagttttgacagagcagaagacatttaagggagaaggaacggttcacattaaaaggactggaggtgtgagaaatcagagtgcatgtaaagagcagaacatgaaggtcccacaaaaggaaatacatggacatgggatttaaaagacatatagagctaaatcatggtcctgtgtgtcatgcaaaatatttggaatttaggttttaggaagaaatggagctattgaaggattttcaatcaggcgatgaatgaaacagacttgcatttgagatacattatttagcccttagtctaaaagtagatttaatgggattaaagctgcagacagagaggcaaggaggccaaagttgcccaaascagattagattttaaaaatggataaattattaaacgtctgagagatctaaaataaaggcttttattttgttttatattagcttcttagcctatgaaggataattttctaaccaattattgccttgccaccttgttattgaaattttatttctaatgccaaaatgacaatgatttcaggtacaaactcatactcatgttgttctttttaccaattaata

SEQ ID NO: 799709 - DNA, 634 bp, Homo sapiens
aaaaatataatacagaaaagagttttgaagggaaggtttccagagacatgaattaggaagggaagttttgacagagcagaagacatttaagggagaaggaacggttcacattaaaaggactggaggtgtgagaaatcagagtgcatgtaaagagcagaacatgaaggtcccacaaaaggaaatacatggacatgggatttaaaagacatatagagctaaatcatggtcctgtgtgtcatgcaaaatatttggaatttaggttttaggaagaaatggagctattgaaggattttcaatcaggcgatgaatgaaacagacttgcatttgagatacattatttagcccttagtctaaaagtagatttaatgggattaaagctgcagacagagaggcaaggaggccaaagttgcccaaagcagattagattttaaaaatggataaattattaaaygtctgagagatctaaaataaaggcttttattttgttttatattagcttcttagcctatgaaggataattttctaaccaattattgccttgccaccttgttattgaaattttatttctaatgccaaaatgacaatgatttcaggtacaaactcatactcatgttgttctttttaccaattaata

SEQ ID NO: 799710 - DNA, 433 bp, Homo sapiens
tgcgtccagaagttaaagaccagcctgagcaacatggtgaaaccccatctctacaaaaaacaaaaactagctagggcagggtgcggtggctcacacatgtaatcccagcactttgggaggcagaggtgggtggatcacctgaggtcaggagttcaagaccagccaacatgatgaaaccccatctctaataaaaatacaaaaattagctgggcgtggtggcacgcgcctgtagtcccagctactcaggaggctaaagcaggagaatcgcttgaacctgagaggcagaggttgsagtgagctgagattgtgccgttgtactatggcctgggcgacaagagtgaaactccatgtcaaaaaaaaaaaaagaaagaaagaaactagctgggtgtggtgatgtgcacctatagtcccagctactgaagaagctaaggta

SEQ ID NO: 799711 - DNA, 597 bp, Homo sapiens
tttatttttattttttgtaggaacagggtttcactatgttgcccaggctggtctcaaactcctggcctgaagccatcctcctacctcggcttcccaaagtgctgggattacaggcctgagctaccgcgcccggtctgttgtytacatctttacgtctatgtatacctatggtttcactcccacttgtaagtggttttctgtttctgtgataattaacttaggataatggtctgcagctgcatccatgttgctgcaaagggaagccccattttctttatccagtcctccactgatgggcacctaggtggagtccatggctttgctgttgtggacagtgctgcaataaacatgcgagtgcaggtgtctttttggtagaacaatgtattttcctttgggtacatacccaggaatgggattgctggggtgaatggtagttgtatttttagttctttgagaaatctccaaactgctttccacaggggctgaataatttacattcccaccaacattgttatgagtgttctcttttctctgcaacattgccagcatcttttattttttgacttttaaatagtagccaagaatgactgacttgct

SEQ ID NO: 799712 - DNA, 614 bp, Homo sapiens
ggcagaggggaaaagcacagtcgaaattctctggaggggaaggcgctggtctgcttcagctgagaaaggagctgatcaacggtaatccgcaccagtcctgaatcctttattctctttacacagagtggctagaaacaggctgcccaacacagctgctggtgtcccttcagacccagggacgcatgtcagaaccagcaccaaccattaggtggcgccrttgtagcacaacaagcattgacctgggttggcgacaaatctgaccccgctcccggtggaactgccactggctctctcccctgtcatggggttcccacaagcctagcagctcggagccccaggccagtaaccagtgaacagctgaggatgaggatgataaaacacaggaaaaaacacgtgcacttgcaccctggcagttacagctctttgtgatggaagatgtaacagctaaggcaaattaaatatgttttcatttaaaattcataataaactattttgaacatacataaaattatgtgtatatatgactattgtaacaaatgcctgattttttttttttttttgtttttgagatggagtcttactttgttgcccaggctggagtgctgtggcatgat

SEQ ID NO: 799713 - DNA, 611 bp, Homo sapiens
agactatatatggatccctgggcagatggcctggctgtctggtcaggggtcggaaataaatggcctggcagatggaagacgaggaggtgttgggtaggggcatgtcatgggcacatgggagtgggcacgaatatgcctatcagaaagcgtccagcatggaaagcacagaacagccaagctggcaaaatgccttggccacttgacacttgtcacactatgctactgaccccctggaactggcatgaaggatggtgtggccctgggggcaacgatggaggygacatctatgcccagcatgaaccctcactcaccaaggccaactgagctgctcctgcctctgacttcccagcccgccagcaccaatgccaagcctcttggtgggatggctctgcgaggacagccacccacgactccattcagtccagtctacttatgcaccaccccctgcgactgctaagctgggcaaactgcgcccatagaagccccttctgtactcaatctctgctgctggacagtgagggtgtccgtgcctgtgggtagggcacacagcgccatgtctgtgcccagaattcctgcaggctgcttccagccacgaaccagcacagtgggtg

SEQ ID NO: 799714 - DNA, 611 bp, Homo sapiens
agactatatatggatccctgggcagatggcctggctgtctggtcaggggtcggaaataaatggcctggcagatggaagacgaggaggtgttgggtaggggcatgtcatgggcacatgggagtgggcacgaatatgcctatcagaaagcgtccagcatggaaagcacagaacagccaagctggcaaaatgccttggccacttgacacttgtcacactatgctactgaccccctggaactggcatgaaggatggtgtggccctgggggcaacgatggaggtgacatctatgcccagcatgaaccctcactcaccaaggccaactgagctgctcctgcctctgacttcccagcccgccagcaccaatgccaagcctcttggtgggatggctctgcgaggacagccacccacgactccattcagtccagtctacttatgcaccaccccctgcgactgctaagctgggcaaactgygcccatagaagccccttctgtactcaatctctgctgctggacagtgagggtgtccgtgcctgtgggtagggcacacagcgccatgtctgtgcccagaattcctgcaggctgcttccagccacgaaccagcacagtgggtg

SEQ ID NO: 799715 - DNA, 603 bp, Homo sapiens
taaaaatactttattgctaagaaatgttaacaatcatctgagccttcagcaagtcataatcttcttgctggtggagggtcttgatggccgctgattgatcagggtgatggctgctgaccgatcagggtggtggctgctgaaggatggggtgactggggcaatttcttaaaataagacaacaatgaagctggctgcatcgactgactctttctttcatgaaagatttctctgtagaatgtgatgctgtttggtagcattttacccacagtaacgtggagtcaatcctctcaaaccctgtggctgcttatcaactaagtttatgtaatatcctaaatcctttgttgtcatttcaatagcgttcacagcatcttcgycaggaggagattccatctcaagataccactttttctcgtccataaacagcaactctttatttgttcaactttgatcatgagagtgcaattcagtcccatcttcatgctccactgttaattctagttctcttgctatttccacacctgcggtgacttcctccactgaagtcttgaacccctcaaagtcatccacgagggttgaaatcaactgctttcaaactcctattag

SEQ ID NO: 799716 - DNA, 617 bp, Homo sapiens
ctgcagtgtgcaaggaaagagtaagaacttggaatcaattaggtcacagtgtgaaagggacgaaacctatcaacaatccatggatgagttcaaaggtgaaaattaaaaaaaaaaaaaaatatatacatatatatatctggagccaggtgcagtggcatgcatctgtagtcccagctacttggaaggccaaggtgggaggataactygaactcaggaagaggccagcccaggtaacacagcaagaccttgtctctaaagaacaaaaccaaaaaccactggaaaggatttccatggtgaagataccgcagtctttgttcacggctatgaggatcaataaacacttctagaataagatcagtaagctgtattggttctgcatcacgtcaggggaaggctgccctcagaagaggaagaacagagtaaagaagggaatctgtaaagagggaggcactagagagaagtgtgctttgggtccattttaggcttaaaacaaatatgcagacatgcaaacactagagtaagttcttcaagtgtttttcctggagaaataatttgttatactccatcataaaatgtacactctttagacagctgaacatataatacaaatataaaca

SEQ ID NO: 799717 - DNA, 617 bp, Homo sapiens
ctgcagtgtgcaaggaaagagtaagaacttggaatcaattaggtcacagtgtgaaagggacgaaacctatcaacaatccatggatgagttcaaaggtgaaaattaaaaaaaaaaaaaaatatatacatatatatatctggagccaggtgcagtggcatgcatctgtagtcccagctacttggaaggccaaggtgggaggataactcgaactcaggaagaggccagcccaggtaacacagcaagaccttgtctctaaagaacaaaaccaaaaaccactggaaaggatttccatggtgaagataccgcagtctttgttcacggctatgaggatcaataaacacttctagaataagatcagtaagctgtattggttctrcatcacgtcaggggaaggctgccctcagaagaggaagaacagagtaaagaagggaatctgtaaagagggaggcactagagagaagtgtgctttgggtccattttaggcttaaaacaaatatgcagacatgcaaacactagagtaagttcttcaagtgtttttcctggagaaataatttgttatactccatcataaaatgtacactctttagacagctgaacatataatacaaatataaaca

SEQ ID NO: 799718 - DNA, 617 bp, Homo sapiens
ctgcagtgtgcaaggaaagagtaagaacttggaatcaattaggtcacagtgtgaaagggacgaaacctatcaacaatccatggatgagttcaaaggtgaaaattaaaaaaaaaaaaaaatatatacatatatatatctggagccaggtgcagtggcatgcatctgtagtcccagctacttggaaggccaaggtgggaggataactcgaactcaggaagaggccagcccaggtaacacagcaagaccttgtctctaaagaacaaaaccaaaaaccactggaaaggatttccatggtgaagataccgcagtctttgttcacggctatgaggatcaataaacacttctagaataagatcagtaagctgtattggttctgcatcacgtcaggggaaggctgccctcagaagaggaagaacrgagtaaagaagggaatctgtaaagagggaggcactagagagaagtgtgctttgggtccattttaggcttaaaacaaatatgcagacatgcaaacactagagtaagttcttcaagtgtttttcctggagaaataatttgttatactccatcataaaatgtacactctttagacagctgaacatataatacaaatataaaca

SEQ ID NO: 799719 - DNA, 618 bp, Homo sapiens
ctatgtaatagaatggttaaaattttacacaaaaagagtaagttcaaggattgtagtttctagaacagcaccaactttttagagttaaattatggtatttttctatgaatgtttaaagataaatagcttaatcaacatttaaaaagaataaaaataaaaataatcatcttccagttgaacagattctagaacacagtcccaagtgtgattaaagacttctcttttggttagattccttccccttcctgtcttttccattttatatctttttattatttatccaacttcagaattaggtttaagtgataacatttccttttagttctctatggaactgaattaaattgtaaacattatttactataagaaaacattgcttgtcattaatagctcaagtataagaaactatcattgtctaaagaatgtataaaccttatttttaytatcttctatattttatcagttaagatagtgccattgagatgggggtgactttttaaatatattcttaaaagtctgtctggctccaaagccacatgttctgagacagtaagattatgattgataagtctgtttttagccacagaaaaactgctggtgaattaaatacgatgaatt

SEQ ID NO: 799720 - DNA, 470 bp, Homo sapiens
ggatatgaacagacacttctaaaaaaaaaagacatttatgtggtcaataaacatatgaaaaaaagctcatcatcactggttattagagaagtgcaaatcaaaaccacaatgacataccatctcatgccaggtagaatggcaatcattaaaaagtcaggaaacaacagatgctgaagaggatgtggagaaataggaatgttttacactgttggtgrgagtctaaattagttcaaccattgtggaagacagtgtggcgattcctcaaggacctagaaccagaaataccatttgagccagcaatcccattactgggtatatacccaaaagattataaatcattctactataaagacacatgcacatgtatgtttattgcagcattgttcacaatagcaaagacttgaaaccaacccaaatccccttcagtgatagactggataaagaaaatgtggcacatagacaccatggaa

SEQ ID NO: 799721 - DNA, 656 bp, Homo sapiens
ggtgctccttctccactgaggggatcctaagaactttgaatagtgaaaacaactttctttcagtaaccaaggggcttgtgctggacctgttaccagagggtgggaaagtcctaggacactttgtctgtagctcacattaatccagtctccactcaataactaatgtagcctttaaaaaataaaaccaagtctcaacactgtcttgcccaaaacctttcagtggctccttactgtctttggaataaagttccacctctctaacaagaccccatcttctctcctcagccacaatgtacttctctcagctcctctaaagggctccctccaactgctcttgcctgagtctatcccagttactaatgctgtgtaacaaattaccaccaaaatttagcggcctaaaaccaccatcttattatacgcatggggcctgtgggtcaggaatttggagatgaaacagtagaatggctctctctgctccccrgtgtgtggggcctcaacaggaagactctacagctgacagtgatgcagcatctggggtgactctgtggctaagggctgggatcatctacaggcatctttccttgctcacgtgtctgcggctgatgctcctgtcagctgggacctacactgtgtgtggcctctagctggacttctta

SEQ ID NO: 799722 - DNA, 590 bp, Homo sapiens
ataagcaaatgatgtagacattcttcaaagctctttgcttgcttttgttatcattccaatctaaccgggtatttgcaaggagctgctatcagataaaatcagctgcaaataattgaactatttctcaacactgttttcacactttgaagtaatctgcaagaaactttttgattcaaagagtcttattttataaatgtaatacatttttccctcagtatttttaaaattatgyttcatcaggaactcactacaccaaagtacagccaactggctctacaatttgcattaaaaggagtcagaatcacacccatgtggttagtaacaaaggctagtactacataaaggcatctttacatggaacaaagagacacatatgtgaatagtcacaggagaccagttagcatatagaatcttccacagagggttaaaagaattgttacaaaaataaagcccataattgctattagagacaaataactgctgaagcagcattcacggtctcaagcaacagaagtaacaaagcagcttgaagtatcagggactgacctacagttcctcccagaaaaacagcctcctctcaccccaagggg

SEQ ID NO: 799723 - DNA, 618 bp, Homo sapiens
ggaaaaatgtcttctaacacccttagtgtaaaacagacctgccaaggcatttcatgctctatgactaatttcttccaatttcaactccactgatccaataagccaggtttaaccaagcagagagtgaacaacattttttttttcctttgatgagacggagtttcacactgtcacccaggctggagtgcagtggcatgatctcggctcactgcaacctcccccacctggtttcaagagattctcctgcctcagcctcctgagtagctgggattacaggcgcctgccaccacgccggctaatttttgtatttttagtagagacggcgttgcaccatgttggccaggctggtctcwaactcctgacctcgtgatttgcctgcctcagcctcccaaagtgctgggattacaggcatgagccacggcgcccagccacgaagaacatttatcgccctgctgtgggcactttctcttgtctttttttttaatcctttaaatttctacttttcttgatttcttattatgttgagtttgtgtgtatggtttctggttattgttatataagtgggagacatttagttgaatatatactctacttttttttcattagataataactttc

SEQ ID NO: 799724 - DNA, 618 bp, Homo sapiens
ggaaaaatgtcttctaacacccttagtgtaaaacagacctgccaaggcatttcatgctctatgactaatttcttccaatttcaactccactgatccaataagccaggtttaaccaagcagagagtgaacaacattttttttttcctttgatgagacggagtttcacactgtcacccaggctggagtgcagtggcatgatctcggctcactgcaacctcccccacctggtttcaagagattctcctgcctcagcctcctgagtagctgggattacaggcgcctgccaccacgccggctaatttttgtatttttagtagagacggcgttgcaccatgttggccaggctggtctcaaactcctgacctcgtgatttgcctgcctmagcctcccaaagtgctgggattacaggcatgagccacggcgcccagccacgaagaacatttatcgccctgctgtgggcactttctcttgtctttttttttaatcctttaaatttctacttttcttgatttcttattatgttgagtttgtgtgtatggtttctggttattgttatataagtgggagacatttagttgaatatatactctacttttttttcattagataataactttc

SEQ ID NO: 799725 - DNA, 618 bp, Homo sapiens
ggaaaaatgtcttctaacacccttagtgtaaaacagacctgccaaggcatttcatgctctatgactaatttcttccaatttcaactccactgatccaataagccaggtttaaccaagcagagagtgaacaacattttttttttcctttgatgagacggagtttcacactgtcacccaggctggagtgcagtggcatgatctcggctcactgcaacctcccccacctggtttcaagagattctcctgcctcagcctcctgagtagctgggattacaggcgcctgccaccacgccggctaatttttgtatttttagtagagacggcgttgcaccatgttggccaggctggtctcaaactcctgacctcgtgatttgcctgcctcrgcctcccaaagtgctgggattacaggcatgagccacggcgcccagccacgaagaacatttatcgccctgctgtgggcactttctcttgtctttttttttaatcctttaaatttctacttttcttgatttcttattatgttgagtttgtgtgtatggtttctggttattgttatataagtgggagacatttagttgaatatatactctacttttttttcattagataataactttc

SEQ ID NO: 799726 - DNA, 592 bp, Homo sapiens
aagcagtgctggacccatatgcagatgttaaaggatggctttaacatcttaacatgagcaatggctcatgcctgtaatcccagcactttgggaggccgaggcgggtggatcacctgaggtcgggagttcgagaccagcctgactaacatggagaaaccccatctccactaaaaatacaaaattagcygggtgtggcggtacatggttttaatcccagctactcgggaggctgaggcgcaagaattgcttgaacctgggaggcagaggttgcggtgagctgagatagtgccattgcactccagtctgggcaacaagagtgaaactctgtctcaaaaaaaaaaaaaaaagaataaaaggatgaatgaatgaatagatgaatcccaaatctagctactataacagcattcttgattcttaaaaacccataagcgtatccctggtttttaacaaactatatgttcgggccactttcaaaaactgtgttatcctaattgtcccaaccccactagttataacacagtaactcagtcacaaaccccggtgtaacttttgagcttacaattacaatagaaaaagattattatcatagtag

SEQ ID NO: 799727 - DNA, 638 bp, Homo sapiens
gtgttttactgtcttgtatatatctgtttaagttacttcgctaggattgcagtctggttaaacctgtatttagccactacctagattctaagaacattcaggtcagtaaatgctcacagaattttggaaagtggtggatttgttttcaagggtggtcgtattacccttgaaagctttttaggtgcacaatgtgaatggctgtcagatggagaccacagactgaacactctraggctctaagtcaaatctcggcttgtccactttcataactccaattaactccaaccaataaaagcccatgccccctttctatcaatttttaatatgcaacaatacttatgtttatgagattaatttctctcagattagtctgattgatagctggattgtggtttcttaagagcttgctccctgaaacccacagcagagctgcattccatttaactagtgaatgtaaaaacgggtaaccatggattcagccaccactaactgccagtgcaatgacttgttgtaaacaatacaaatgagccaggagagcagaggcaaccagacatgaaatgattttaatagaaattacggtaaaaggtcatgtgatttggtatcagcttctgttcagttttaaagggaaagtctttatt

SEQ ID NO: 799728 - DNA, 520 bp, Homo sapiens
ttccagtttctggccagcataccccactggccaaacctcattaaaacccagagagatcagtgtctgcatgcacagagctcatggagagaagagaagaagagatcttaagggttaactagaagacaccagaacagtcccgaaggtgtgctgtggactgaactgtgttcccctatgctaaagccctaaagaccaatgtgactatatttggaaaaagggttttcagtgaggcaattaagcttaaatgaggtcataagtgtggggccgcacaggactggtgtccttataaacagaggaagagataacagagctcagatctctctagctcgctcgctttctctctctctctctctctcagattgtaggcacagaagcaargctatgtaaagacccagccagaaggtgcccatctgcaagcagaggagggccaggacccagctctacaagcatcgtggtcttggacttccagcctccagaactataagaaaataaatttcccttgtttaagccaggagtcctcaac

SEQ ID NO: 799729 - DNA, 571 bp, Homo sapiens
acgaagaatttttttctttgcctcttttctttagctctttcatatgcattgtgcttaataaatagcagatgctccccgctaattaattactgcttaacaaactatcatactcataagaattcagggtgagaaaaaggaaagaaagaggtcaaatgcactatggaccaatattcaaggtagtttcagaaagccttttcttagttctattattgtataccttaaatatttcatgttagggaatctctatatttatattcctatcctagaaagaattgtcatttttattttttagttctaacactatttcccacttgaaaacaaataatgcattggaaacaaggaggtcaatctggttccaggagcttcattcatcttatgacgcycttaggagacccctagggaataccttcaggcataatgataaaatcatgaggatccatagaatctattacaatattttcttcccatttgtgtgtggctgtggcaccaggctgttgcttacaaagatgattacaaatgggaaagttaagagtttgcttttatcaatgcttaaatttatactgctttggct

SEQ ID NO: 799730 - DNA, 603 bp, Homo sapiens
ctaccttttctacctccactcgctatgattttatattgacactgaattctgttttatgtaaatcaataaactcaataaatacaatgcatcattcatatctcctgaaataataaccattggaaagaatacttaatataatttgcaacttagacatcaaatcaattaaagttgtaaggatcacttatcttttacttgtcaggcagtttcacttaggttctcacatttaatttcatttgatctctctaayagtcgtgtactacatgtatttttatccccaccttataggtaagaaaatggaaattcttgcaggttaagtgactttgctaaagtaatacagccatcttactttgaaagaacttaaacccagaacttctgaaaccaagtcctagagcttaacaggaaaatgcaaaatatatttaaacaagaacatgcatacatcctcaggtacacacgtacttagtgccagaacaaactaatgatgatttgagatctttcctgagacaactgctcagaagttgcatttttaagctatctggatcagggttcacaggctccttctaacaggataccataattattaggtttcctaagtgagaaagccaa

SEQ ID NO: 799731 - DNA, 443 bp, Homo sapiens
tatattcaaagttatttcatgtctaatattgataactgagaattgaaacaacccttactcagaatcagatatatggtattgctctcttcaattgtagtttaaaaatgtgaaatagacaatgctgtgcgtgttagcttaatttctctgtagcagaaattgttggctctgtttatkgcatttcaagaaatgcaaatggtaaagaggaaaatcaaacagctgtacgttttcctcttttgacttgacctataagaaaaaagctggcattcggcacattgacatgtttcccttctcccagagccttcccaagcattgaacactactctgatgactgaagaattaaatatccacctttcctctcttccttgtaaatatgccaatctttttctgataatggtggaatagcatgtgggaaaaaagcaaggtgaaattctgctacttgcttt

SEQ ID NO: 799732 - DNA, 443 bp, Homo sapiens
tatattcaaagttatttcatgtctaatattgataactgagaattgaaacaacccttactcagaatcagatatatggtattgctctcttcaattgtagtttaaaaatgtgaaatagacaatgctgtgcgtgttagcttaatttctctgtagcagaaattgttggctctgtttatggcatttcragaaatgcaaatggtaaagaggaaaatcaaacagctgtacgttttcctcttttgacttgacctataagaaaaaagctggcattcggcacattgacatgtttcccttctcccagagccttcccaagcattgaacactactctgatgactgaagaattaaatatccacctttcctctcttccttgtaaatatgccaatctttttctgataatggtggaatagcatgtgggaaaaaagcaaggtgaaattctgctacttgcttt

SEQ ID NO: 799733 - DNA, 585 bp, Homo sapiens
gtgggatcccatgttatacttttagtgaatctggtcgctcgctccccgtccccgattcccactttgcttgcctcttctccccatccatctaccccacacgcattttccagaaatctccccaactcgacgcccactcaggctactgaaccccaataacgccacccttttactaagaggagcctccgtcgtcccaaccccttgctccgagcgggaagcttggtgcagcgcaccaaggtccggtagaggggggcggcgccccctgcgccgtgggccagcaggccgcrgacgcgcagacagcaagtagaccccaagggctggagccgcaacgcaagttccccctgactgggggacgccgcccagctcctggagcctgcgaaggctcttgaagctgagcttcccagggataccagaagggacactctcgtgcaattccggctagggaaagcgagggaaggtggcggctccgggcagggagcgagcgagtgctccacgccgcccgcaggatcgagtgagtcacgcggccgccaaaaaaggccggtggcgcacgcacccgagatccgatgtagtgcaccgcctcggcgccgc

SEQ ID NO: 799734 - DNA, 585 bp, Homo sapiens
gtgggatcccatgttatacttttagtgaatctggtcgctcgctccccgtccccgattcccactttgcttgcctcttctccccatccatctaccccacacgcattttccagaaatctccccaactcgacgcccactcaggctactgaaccccaataacgccacccttttactaagaggagcctccgtcgtcccaaccccttgctccgagcgggaagcttggtgcagcgcaccaaggtccggtagaggggggcggcgccccctgcgccgtgggccagcaggccgcggacgcgcagacagcaagtrgaccccaagggctggagccgcaacgcaagttccccctgactgggggacgccgcccagctcctggagcctgcgaaggctcttgaagctgagcttcccagggataccagaagggacactctcgtgcaattccggctagggaaagcgagggaaggtggcggctccgggcagggagcgagcgagtgctccacgccgcccgcaggatcgagtgagtcacgcggccgccaaaaaaggccggtggcgcacgcacccgagatccgatgtagtgcaccgcctcggcgccgc

SEQ ID NO: 799735 - DNA, 658 bp, Homo sapiens
catgacagctgccccctccacagacaggtccttgcttctccaaatcccaaatgtctaccagcttcgtcctcactccctcattcaacgcaggagaggaagtgatgcagcggaacctgagggcctcagccagcctcccgcccagtacaggctccccagccagtgagctggtgaaggagcaggagcacgctgcagggagagtgctgygccgggtcatgctggatagcgaaaccccacgagaggaacttccagcagcagacttttggaaatgaaatggtgacattcccattgtgaacgtatttctcactgtctcatatatttaaattcctggttgttccattcaaaagttcttcagttcatttccagcaagcttcagtggcaagggaattctaatttggcctgggggaaagccacttttcccctcctgtattccagctgccctgtcagatcctccacttcctcgctggcaaaatggggatacagcacctcccttccaagtttccccacctttggatcaaataggctccattcgccaaggtttcaagtcgatgggtttggagttcttagaagccaggtggaaaggtggacttgctggaggggacctcactttaggctgctctctgttctctcccaaagctggctcaggctggacctggggcaa

SEQ ID NO: 799736 - DNA, 590 bp, Homo sapiens
tggaatagcgagtccattaacagggtccagggcagctggaaggctggacaggaagtgggcgtgtttcctgcctccttttcccagattcaggagtggggattttcccccatgttgaggtctaccccagggcttggtcctgctgccatcaccctgcagaggcagtgcagtgcagtggaaagagctctgacccgtcagtggaccccagttctcatcccagttccggttggmtcatgggggtaccaggcctacatgctgtggccacactgggcctcagtttacctgtctgggagtgagagggaggtaggcatcaccctctcttggagcccctggcaggttaagccaacacttaagcttatttctctctgtgtaatcgtttttgtccttagcctggcagctcctcagggtcaggacaagtctgatgtgcctccagaccccagcatggggctggctggccacataggaggtcagcacccggcatctcggtgctctcccaagttcttcagccttgggttcattccactttgccctttgctttctgccctgacagatgacacggaggtgctgctcgcagtcttgtagaatgatgggct

SEQ ID NO: 799737 - DNA, 590 bp, Homo sapiens
tggaatagcgagtccattaacagggtccagggcagctggaaggctggacaggaagtgggcgtgtttcctgcctccttttcccagattcaggagtggggattttcccccatgttgaggtctaccccagggcttggtcctgctgccatcaccctgcagaggcagtgcagtgcagtggaaagagctctgacccgtcagtggaccccagttctcatcccagttccggttggctcatgggggtaccaggcctacatgctgtggccacactgggcctcagtttacctgtctgggagtgagagggaggtaggcatcaccctctcttggagcccctggcaggttaagccaacacttaagcttatttctctctgtgtaatcgtttttgtccttagcctggcagctcctcagggtcaggacaagtctgatgtgcctccagaccccarcatggggctggctggccacataggaggtcagcacccggcatctcggtgctctcccaagttcttcagccttgggttcattccactttgccctttgctttctgccctgacagatgacacggaggtgctgctcgcagtcttgtagaatgatgggct

SEQ ID NO: 799738 - DNA, 588 bp, Homo sapiens
tgccctcctcccagcatccttgtccaggctctcaggcaggctgcccatgctgctgggcaacagtggcccatccctcgcgcccaccccttgggctgcacgctagcctttggctccattctcattccttgggcactttccgctgctataaatgttcaccacgctctcatgtcatgccactgagcattctgccccatggacaggcctgcagaacccagcccctggggagcccagggacccttatattgggacgggaaatccaatttcctcaccctccacacccagctacaatgttgaggatcaagtaagtgtttagggactacataaagctgcctcatagcgggaccagatgagaatggtaccccacagcaccgggcaagaaggctgaccctgagcaccagggaacacagggggcccagcaggaatcccaacccagmggggacaggagggaaaagtgaagctaccaaccagggaaaggcaggccaccaaaggtagctgagggcctggcttgagatgaggggcagacaatcccccatgctctaacctatgggggtggccccagaagggttacctgagtgagcggaggggatg

SEQ ID NO: 799739 - DNA, 588 bp, Homo sapiens
tgccctcctcccagcatccttgtccaggctctcaggcaggctgcccatgctgctgggcaacagtggcccatccctcgcgcccaccccttgggctgcacgctagcctttggctccattctcattccttgggcactttccgctgctataaatgttcaccacgctctcatgtcatgccactgagcattctgccccatggacaggcctgcagaacccagcccctggggagcccagggacccttatattgggacgggaaatccaatttcctcaccctccacacccagctacaatgttgaggatcaagtaagtgtttagggactacataaagctgcctcatagcgggaccagatgagaatggtaccccacagcaccgggcaagaaggctgaccctgagcaccagggaacacagggggcccagcaggaatcccaacccagargggacaggagggaaaagtgaagctaccaaccagggaaaggcaggccaccaaaggtagctgagggcctggcttgagatgaggggcagacaatcccccatgctctaacctatgggggtggccccagaagggttacctgagtgagcggaggggatg

SEQ ID NO: 799740 - DNA, 383 bp, Homo sapiens
atacagtatttgtaatgaaataaataatgtctaactttcacaaagtgctttagagttgacaaagcatgttatagattcaatttaatccacaaaacaaccttatgtggtaggtattattatccacaattttgtaaatggtgaaaaaaacaaagaacacttaaataaacctttgagtgccccaaatcatacaactaaaagtttattaaagttcaamcctaaatttcatgattcaagtcaactctaggaattatccttgactacataatctatgtttctaagtcctgtcaattaaatcctgcatatttttcctcttaagcaggttttaaatctatcttgttctccatgcctactacccctggcctcatcagacttttgttgtattt

SEQ ID NO: 799741 - DNA, 605 bp, Homo sapiens
ccatggatccatagatataggaagccctcattatactaaggagagtaaaggaagagaaatccacatctagtcatacattattctgtttattcaacaaatatcaattgaacagctgctgtgtacagacactattttagactcttgatgtacaacagtaaaggaacagactaaggttcttactctcatgatgctcatagcctaagtaatatatatyttagaaggtggttattgctatggaaaaaagaaaaggtagagcacgtaaggggagattgagaatgccatggtagggcaaggagtgaaaatggcagtattagcacgagggctcttttggggaaaatatctaagaaaacacttggaagcaatggagttagacagttaagatgaaggaaaagttccagacagtgggtacagctggagcaaacgcttataacataagagtgtgttgaagaagtggctgagagcttggtgtggatgggtgtactgagtcaaggaaataatagtaggagatgaggtcatagaatttatgaagtggcagagcattacagattattataaaacctaagcttttactctgaatgaaacagggaggcaatgtagggctttgg

SEQ ID NO: 799742 - DNA, 597 bp, Homo sapiens
aggcccttgtcatttcaaaaaggatagtctcttttcttactctggcaaacctgtgagtgattccacaaagatacagtattacttagctatctgaattatgatagaaaaggtcctagttaggttcctatataaagcatttggaagatgaccttgttgcccttgaaacttgaaaatagggattctggggtgaggatacaaagacattgtcttgcatatccataagcaggtcttasagcattattccaaactctagctgtttcagtagttctatgaggattgcaagtcataggtgtgtgtggcatatcagtccatctccctcatctccattctcagtttcttccccacaaaatttggaatcaaagcttttatgacgtttgccaattgcagaacttcttcagctaaggttaatttgacgctatgataaaactgagagatgtcaaaaagcctcttagaaattttaatcttgaaagacttttcagggtatctcattttttaggtgggggtggcaggtgtatttcttttttaacaaataaaaggcatttaagtaaaactaaaatgaaaaaagtaggccttctgacattgtgtacttggtggttc

SEQ ID NO: 799743 - DNA, 574 bp, Homo sapiens
attggctattaatacgtgggtttatttctgagttctctgttctgtcccattagtctatgtgactgtctgtttttataccaataccatgctgtctgttgttttggttactagaattttatatacatatatatatatatgtatatatttaaaacccacatatatatgtacatatatacatatgtgtatgtgtgtgtatatgtatatatgtacgtgtgtgtgtatatatatacatacatatatatatacatacatatatatatatatatatayacacacatacatatatatatgtatatatatatatatatttgtgggtttttagagacaggatctcgctttgttgcccaggctggagtgtagtggtccaatcttagctcactgcagcctcaacctcctgggcttaaacaatcctcctgcctcagcctaccaaatagctgggaccacagatacataccatcacccttgtctaatttttaaaattttttgtagagatgaggtctcactaagttgctcaggcatgagccactgtgtccagactatcatatattttgaagtcaggaagtgtgatgcctcc

SEQ ID NO: 799744 - DNA, 649 bp, Homo sapiens
cacagctcttcgagacaatgaaattcacaggatgttctggaagctgcacaactcctacatagatgtgatgtgcaaccccttctgtaacccggggacaatatccagtccagggactttgataacatggtgatgtatataatgatacaggtctgctgagtgagaactctgccaccagacattgcagacggaagcttcagcatgtgactgttgtggggatgtctgcctcttcctgaatgtgatgcccatggcatttggggcaaggccccatgcatgctgcacctcaaataaagctcttgtgagatgagatttggctttttccttttgtgttagcagaggatttaactaargagaattcagctacagtcctttagtggtgtgggcagaggttagtgaccagacacagcaggaagtctgcccccaataggctcgaagcggggcaggcaggggtgcctggagctgagagctctggagcccacgggacctgtgaccacgtgggctgcctctgctgctccctctgcccttgctgtggctgcccattggctgaacgggtgggctggtccataggggttagcctcctgagcccacatccagcctaggatctaggggcaaatggggagcccttccaacgtgcacattcccatgggggagg

SEQ ID NO: 799745 - DNA, 625 bp, Homo sapiens
ttacttgtatagttaaaaggaaataaataaattaggcaatgccaaaatatttaaaggtatataaaaactatattactatatgcacacatacacatatgcacagaaaaacatctggtaaagataaacaccaaacttaataatcatggttaaacaaaagcctagctaagagcttaaaaggtctgggaaatgaggtatccacgggagggagtggggattaaaaagttcagatatatttctgaaggtctagaaagttgtctgaatgtatagggctgtctacatgctcaggaaagacctaaaaagccataaattttgcatctctggctgactttgagactctgtttaagcagtgaaggctaaggcagagttgtaaaagtgcctgagtgttgaaggcatatgcccaaacacagacacaaaactcttggcaaatggtggaagatktataggttcaaggcatttaagtaactgagaccagtcatcaagtaaccactaaattaacagagaagacacttctgtgatggcaaactacagggaatccagtttacagaatcagtccaggaaagtcactaaacaaacaaaaacaagtgagatttatcctaggaatacaaggttggtttaacattcaaaa

SEQ ID NO: 799746 - DNA, 625 bp, Homo sapiens
ttacttgtatagttaaaaggaaataaataaattaggcaatgccaaaatatttaaaggtatataaaaactatattactatatgcacacatacacatatgcacagaaaaacatctggtaaagataaacaccaaacttaataatcatggttaaacaaaagcctagctaagagcttaaaaggtctgggaaatgaggtatccacgggagggagtggggattaaaaagttcagatatatttctgaaggtctagaaagttgtctgaatgtatagggctgtctacatgctcaggaaagacctaaaaagccataaattttgcatctctggctgactttgagactctgtttaagcagtgaaggctaaggcagagttgtaaaagtgcctgagtgttgaaggcatatgcccaaacacagacacaaaactcttggcaaatggtggaagatgtataggttcaaggcatttaagtaactgagaccagtcakcaagtaaccactaaattaacagagaagacacttctgtgatggcaaactacagggaatccagtttacagaatcagtccaggaaagtcactaaacaaacaaaaacaagtgagatttatcctaggaatacaaggttggtttaacattcaaaa

SEQ ID NO: 799747 - DNA, 656 bp, Homo sapiens
ggaccttacatttcacagatgctctcctttaatcctgcctttgcaaaaacggttctccgggccatttcttatccaccctcctcctttatttagggaaggaatgagtcagatggagcagaagggtgcagcaaactggatgctttaaactatgtgtgttttcccctggcaaagtggtcatggagccagccctggctgatcccagagggagcatggttctgggggaggaaagcactttgatgccccatattctgccataataaacacttcacatcacccttttatgttggytatgatgaaaaacagtatacccttgtagaaacaaagggaaatgttgccactttgagggtcatccaaaatgctgtttggaaagtaaacttcacaagcacattctcagatgaggtttatttacagctctggagctatcaataacaaagacaattaaattagctaggtcaaaagcccatttgaactgaagaactctactatcaaattaaagtttgtggagagcgtcccacaccagccattctcacatgaaattgatggagaggcttttggggtttgttaaaattcaaaaaggatgaatagctttcatgttgcataatattactgagaaagagtgcaaagagtttagaatacttctcccatgtaaacgagga

SEQ ID NO: 799748 - DNA, 566 bp, Homo sapiens
aagagaataaaatacctaggaatccaacttacaagggatgtgaaggaactcttcaaggagaactacaaaccactgctcaatgaaataaaagaggacccaaacaaatggaagaacattccatgctcatggataggaagaatcaatatcgtgaaaatggccatactgcctaaggtaatttatagattcagtaccatccccatcaagctaccaatgactttcttcacagaattggaaaaaactactttaaagttcatatggaaccaaaaatgagcccgcatagccaagacaatcctaagccaaagaataaagctggaggcatcacgctaccagacttcaaactatactataaggctacaataaccaaaacagcatggtactggtaccaaaacagagatatagatcaatggarcagaacagagccctcacaaataataccacacatctacaaccatctgatctttgacaaacctgacaaaaacaagaaatggggaaaggattctctatttaacaaatggtgctgggaaaactggctagccatatatagaaagctgaaactggatcccttc

SEQ ID NO: 799749 - DNA, 593 bp, Homo sapiens
catccattcattccagcagtaattccaaggtttgctgagatcttcctgagatcaattgtgcagcctttccaaagaggtgaatattaagtctccagtccatacagcaactgcaagattagaacagcccaccagtgtacatcaaagatttatctaccttaagcttctacaaaagaaaacctgtttttttcttacagcagtacatgctgcccatgcataaacaatcaaagttaaaccgagaaaagatggatacacatggagctgctaccgattgggaaaggatttggttattttattatttcataatgctgagctgtgatggacctgacgacatckgagaaaaaaaaaattgcccaaatgaaaaaataaatagccttagaaaaaatgcataagttgcgtacatccaaatccacacacacgcacatgcatgtatgcacatatgcactgacatccatgcacacgcatgcataacatgcatgcacaacataaatgcacacataggtgcacatgcgaagagatgcccacataccatgcacacacatgcatgcacacacatgcacacacatccctgaatacacatgtacagcatacatgca

SEQ ID NO: 799750 - DNA, 654 bp, Homo sapiens
ggactgacgccagtgtgtgtccagccatgcacaggaaagtaacaatgcaatcttacacactttcatttgtcatagtgcatgatttctttaaaaggaaatacctaaaacactcagacttagccttcaagggagcatcacctaggaaaggttttctcccctctcctgactgtggcacaraacgaagaatctccaatgtgcacggggacactttaatgagatttccgtgacatcactctctttcttcccgtgcctgatgattcacggcaggcttttcaggtttctttggtgcaatggtccaattacaaactttatgcaaaaacggtgtcaggttacaacatgttgcagaagcacacgggcaggacatgggcagattcgtttctgatggatgttttgcggtgactaagaagcagctcccaagagtgaaatgttctccacacgtctcagaaccaccggtggcacctcggcctctgtcacagcagcatcgctgcccacgccagttgcccatgcaaactttgcagggcaagtggctgcatccgctggctctcctattccgtgcaccactgccctcctctacacacagggagatggcagatcacttttcctctttcccatctttgtgagatgagaaagttttccttgatattgtctcctgtc

SEQ ID NO: 799751 - DNA, 654 bp, Homo sapiens
ggactgacgccagtgtgtgtccagccatgcacaggaaagtaacaatgcaatcttacacactttcatttgtcatagtgcatgatttctttaaaaggaaatacctaaaacactcagacttagccttcaagggagcatcacctaggaaaggttttctcccctctcctgactgtggcacaaaacgaagaatctccaatgtgcacggggacactttaatgagatttccgtgacatcactctctttcttcccgtgcctgatgattcacggcaggcttttcaggtttctttggtgcaatggtccaattacaaactttatgcaaaaacggtgtcaggttacaacatgttgcagaagcacacgggcaggacatgggcagattcgtttctgatggatgttttgcggtgactaagaagcagctcccaagagtgaaatgttctccacacgtctcagaaccaccggtggcacctcggcctctgtcacagcagcatcgctgcccacgccagytgcccatgcaaactttgcagggcaagtggctgcatccgctggctctcctattccgtgcaccactgccctcctctacacacagggagatggcagatcacttttcctctttcccatctttgtgagatgagaaagttttccttgatattgtctcctgtc

SEQ ID NO: 799752 - DNA, 595 bp, Homo sapiens
tacaaaatcacatgtttataaggaaacgacttttgaaaaaggtgtgaactcagataagcaaatttaaagtaaccaattaagatggagaaatcttcaaagaaccttctacagttgatatacaggccttgaaaaagaatcctgaaatcaaaagtatcacccaggaacactgaggaacaccagttttgaccaagctacccccttagtggttcctaatcgcccacagaattgagtccaaattccccagcatggagtggaaggcccatctcaaagtggctcaaatctgcccatccaaccgcacacacatcatgcaccgacctgaggtgcctggactctatcttctttagttttattttttgtatatttgctgttttaaatatttagtagttattaatgataacatgaatttccacawgctttagtgactctggttggaaatctcttcctaaactgtgtatgatgagcaaagccgcgcacgttaagatccaaatgaatgccggccacctctgtgtgctataggattctgtgagtcctggtcttcactgatgagagtcacctgctgcaacctttgctaagcacctcctctgtgctgtgcatt

SEQ ID NO: 799753 - DNA, 589 bp, Homo sapiens
atcaagaaacttttgtactttattcactgaaggcagttatgaaaattacactggtgttcacttcatttttaaaaaattaatttttggccgggcgaggtggctcacgcccataattccagcactttgggaggctgagaagggcggatcacgaggtcaggagatcgagaccatcctggctaacactgtgaaaccccatctctactaaaaatacaaaaaattagccgggcatggtggcgggtgcctgtagttccagctactcgggaggctgaggcaggagtatggcgtgaacctgggaggtggagcttgcagtgagccgagactgtgccactgcactccagcctgagcgacagarcgagactccgtctcaaaaaaagaaaaaagaaaaaagaaaattaattaattttcaagagttttttaaagtcagatttgttcagaagcctggtgtgaaattttttactcttcataactatttattttttatctttatataaatttctatgtacatcggtgtaatgactaaatatttcaaaagaatccataattaatttaaattacttgattatgtgttagcacatttattctacatgga

SEQ ID NO: 799754 - DNA, 632 bp, Homo sapiens
gccattctaactcctcattatagtgctagaaataaagtattcttctttcccccacatttaaaaggtgggaaattgtatatttaaaaatatgagattttaaaaagatgttcattatagcatcggttttggatttatataaagccaggcccaagtctcagccacttaccagctgtgagaccttaacccctcttttcctctgtttcccaagtgatgagggttacatgagagaatgaatatcgaagtacttgacccatagtaaatgtacactaaattattaactttggttgatattgggaatatgactgggatacccagaggctggatggttcrtgtaatctagcacagagttatccttgatgctaaactagaaggacaggtatgtcaccttccagagctcacagctgtctccaccctttagctatgatcgtaaaccctctctccctgtagccatttctcactgatggtgcctttatatgattggaggcatttaggtgaactgtctggaaatttgtttagttatatttagcttatcgtgctcaattaactttatttccctgtgaataagaatgggaaactgcatacatcaaaaaacaagcctgaattttggaacttgcataaaacataaaattctc

SEQ ID NO: 799755 - DNA, 545 bp, Homo sapiens
ctttaccttcttaatatcaaaatttgaagattcaaaatttaaaatgcctttgttttcctagaattgtattcatgttttaaatatatatattaaaatttagaggccaggtgcagtggcgtgcacctgtaatcccagcactttgggaggccgaggcgggtggatcacttgaggtcaggagtttgagaccagcctggctaacatggtgaaaccatgtctctactaaaaatacaaaaattagccaggcacagtggcacatgcctgtaatcccagttactcgggaggctgaggcaggagaatcgcttgaatcaagggggctgttgcagtgagccargatcacgccattgcactccagcctgggtgacaaagtgagactctggctcaaaaaaaaaaaaaaaaaaagaaaaagaaaaaaaccataaaataaaataagtaaaataaaatttaatgtatttttcatctatttgtttattttaatgaaaaaatagatatacattaaagaacacagctgttcatttatttttccagtgagcccggttagtttaagg

SEQ ID NO: 799756 - DNA, 604 bp, Homo sapiens
ttctctgaagtaggtcactggtaaataacatacacctttcaagctaatgatgctgttctcatgtattgaggaatgacaaagaatatgttttgacagcttgaaaacttatgttagagaagcagcttaggtacatcagtgttcatatgttagtgtcacaattgtttttctcacattgtgctctagctattggttaaaggtagagtgatatacatctagaagtttttaaaaggctgtggaattgaggaatcttcccaaacttgtcatgtgcagcttctacccgagctgctgaattctgggatgtyagagtagagaaagagagagcagagttcttttgggagctcagcatcatagatccaccgttttaggactggaaattcacagtccatgcagattttgcagccagctgtatgaggactgcaggtatgcttcgcttgtttcttttactattggtgtgaacaacgtgtagctgtggttttgttagatctgaatgtgaatgcatttagatggggcctccattcttcagctcaccatggatccctctactctgtattgcttaaatctgtcgggtacctgtctggatcctgtaggtatttgagtgtgtgaa

SEQ ID NO: 799757 - DNA, 576 bp, Homo sapiens
aatatgtggaaagcccaaatgcacctctgatattaacttttttaaaatcagaacatagacttaagataaaaggaaactataagcaatagcagtattagtttgttgaactcctttcctgacattttctttcactgttttttaaaaggagggtggcagtaatcattaatatggactttaaaaataccctttgatggttttctcttgccatgtctcataaattccaaccttctttgataagaaaagtgtctgacattacagaccaggcaaaactctctgaacattaattgaaagcatccaattgaattgtcatatctttgcaaagaagtaatcataagcactagtgtgtagtttgaaactttcgatacaggaatacaagaaacatgtttatgtatgcrtaggaagttctaatgacaggtactactctgtgtgtgtgtgtgtgtgtgtatcaatatatagatatatggtcctttgcctttggttatcatttgcccatgttaattggtaatgcttataggttacaaagacagcaaagccacacatattatttccattaatagaagtgagacatcatcctca

SEQ ID NO: 799758 - DNA, 501 bp, Homo sapiens
gaaatgacttgcccaagaccactcagtgaataaataacagaattaagatgagactcaggaatcctaacttttgatcttttttcttggtcagttaagaatataatgagagtagacctagcatgggggctcacacctgtaatcccagcactttgggaggctgaggcaggtggatcatgaggtcaagagattgagaacatcctggccaacatggtgaaaccctgtctttactgaaaatacaaaaattagctgggtgtggtggcacgctcctgtaatcccagctacttgggaggctgaggcaggagaatyacttgaacccaggaggcggaggttgcagtgagccgagatcgtgccactgcactccagcctgggcgacaaagcgagagtctgtcttaaaaaaaaaaaatgagagtaaactgtacatatgacaccacagagaacattactaagagcgtatctcaggctcctttcctgggagtgactttttctacatcaagacaagtg

SEQ ID NO: 799759 - DNA, 548 bp, Homo sapiens
aactttgttacataaacaattgttaacccaggactccctccatcctatgcttatgcaatttattttttgaattccaaatttcatttttcaataaatgcttgctgtattatcttttttttattttaattttgattcatttattttttgagggagggtttcactgctgcccaggccagagtgcagtggcacaaacatggctgacagcagcctcgccctcctgggctcaaacaatcctccccactcagcctcccaagaagctgagaccataagcatgtgccatcacacctgcctaatttttaaattttttgtagagatggagtctygctgtgttggccagtctggtctcgaattcctaggcccaagtgatcctcccacctcagcttcccaaagtcttgggattataggcatgagccattgtgcctgactttgctgttattattattattattattattattttttttgagacagagtctcgctctgtcacccaggctggagtgcagtggcaccaccttggctcactgcaacctctgcctcccgggtttaag

SEQ ID NO: 799760 - DNA, 527 bp, Homo sapiens
ctctatgactggagggtgggggcgaggctagcagctccctcccggcttcctccgcttgttctctcctccccttccccctcctcccggcggctctccacttcctttccccccaccccaccccagggaaaaacgaaaacaaacaccctcgcgcctcgcgcctccgactcccagaccccacgacccggctccggcgctggtttggcggcctgggtgggagaaggcacctcgccccggaccccctatgccccgcagctcagtgactcttcccctcgccctccgccttcccygccgcagcccggctccgcctcccaatggggaaacatcccaaaaaagggcagaaaagaaatttcagcataaagttggcccactgggaaagagaggagcgtccgcggggagcgggggagaagagggaaggcgcgcggaggggagtggggccaggcggagccaggggcggggagcggaggggctcgggacgcgtccgggtgggagcgggggcggggaacgcgcggtgaccagcctggccgcag

SEQ ID NO: 799761 - DNA, 633 bp, Homo sapiens
ttaagtgcttgatagtattaattcacttaatgttggtggtattttcatcaccattctacaggaaatgggggcagggaaaggcaagataactggcctaggattacacaacactcaaacagatattacctcatcttgttaactattaaatktattgcattcagattttacttggtgtggggtacagtggctcatgcctgtaattccagagctttaggaagctaaggcaggaagatcacttgagcccaggagttcaaggttgcagtgagctgggatggtgccactgcagcctgggcaaaagagagagaccctgtctcaaaacaaaataaaagccacacaaaaaatttttgctgatgtacagtttagatacttgttactgatattctttatcctgagatagttttacttcctgaatccatggattcttgttttctaataacttctgaaatattatctgtcattatctcttcaaatattacctctccttgattctctaccaaagattctgattataagtatattaaacattttcattctatcttatctcttaacttctcattcacttttctgttcctttgtttttttgtgctgtttctatgtgatttcttcagatcgatcttccagttcactaatttc

SEQ ID NO: 799762 - DNA, 485 bp, Homo sapiens
aaacatctctttgtaatccatccctcctctgcatccctaccgctactgccgccatcccctctcactcaaatcttgcaatagcctttgaaaggcgccgcctgactccagactgctgaccactagatcagcacagcagccagtggagttagagcctttarctcactgtgttcatccctcgcttaaaactttcagtgactccctttcacctcccctgcaggataaagcccaagctccttggcatgacttatgggcgcagtgtgatctggctctgtctgcccctccagcctcatcttaccattgcccccatctcactctaccctccgctgtgcctaatgcacttctgccaggtcctctgaataagcctctcctttgcctgtggttccctttgccttggagcattttctgtccttcgcttctcctggcagattcctactatgtgtcatgtctctacctagaagtcacttcacctatgagctcccatagag

SEQ ID NO: 799763 - DNA, 576 bp, Homo sapiens
atatatatatatatatatatatatatatatgtatatacggagagagagagagcgagagcacctattagttttgtttctctggagaagtctggctaatgcaatgttcctgtctaaaatgctttgcactttttttcctgattttctggttagtttagtctcatccagtcagtgtttaaaaacatacaaatgatggaaagagacctctttctttaggtgattatatagaacctgcccacctctaattactttggacaagtttgctctcwtctgattgatacacagatgagtgaatgaataattagttcattatttctttttttctttccctttaaagaacataaattccttacatggaaaaaaaaaatcaaacatattttgcctcaatcagtttatactgaggatatgggaccctgttataatacttgtctttcagtcacacccactgagtctaaataagctagcccattgtagtcagtttacaatagaggtaatataaatacaagttaaaatagcaaagtttctttattttaaaataaatcagtgaaaattcaagttgatccctatataacctttcac

SEQ ID NO: 799764 - DNA, 543 bp, Homo sapiens; identical to SEQ ID NO: 755507

SEQ ID NO: 799765 - DNA, 630 bp, Homo sapiens
atgggaagtgtgattgaatatcagatctttcacagactgatgggacttcatggagcattattgttgactcagataaaatgtatttattaagtgtgtattatatgaggatgctatgtggcagaaaataagtttcacatttagttatagttatgtactatgcacagcaatatgacactcgatgacygaattattaattcagaccaaataagcaaactagcagcccaggcaacaaatgcttttaagataaataagatattctgaatttagcattttgtttacatattaaatcattagaaaagtgtattaacacaaaagggttaaagaagagtatatataaaatattttgtttggtgacatactgtatactttagagaatatataatctgtgggttgctttaagggtaagaaaaatagaagaactagttattttttagcagccacattctgaaaatgactgaaagtttttatttttaatattacgtttaaaatcatgttttaaaataaataccaaaaaggaatgtcattttaggtgcattttataaacagtcttctggtgtgttaaataacttatacaaggaattggattaaataaatcccaaactaatcattattttctaattgaaaaaaagc

SEQ ID NO: 799766 - DNA, 602 bp, Homo sapiens
aagtctgacacttaagcatgggtttctcctctcaaaacagccctcctagtttttgggctccactagagtttcacaacctcctgccttaatcctaaggcttgcccaaaggcacttttttggtccacaaatggctgcaaaattattgttgctatgattaccaaaaacatgaactataggctaattctttagacattctaaacagagaacctgattatatgtgtactgttattacaggcatgttactaaatctttcttggctatttacccattgcctttccaccactctcttattaagactttagagttcgattccaactcaagcctaccttctccccatctatgagaaatatgttacagagttatatacagcaccattcargatgatttttataatgtattcctctcaattcaaaagaacatccactatttatattacttttaaaatcacaattggatgaaattttactttagaacattacaaaagtggtataaagtttcataaattaaaattttcccagttttttctctctgcttgtgacaattatgttttacaatttcaaatttaaccacttttttttcaaaatgccattcaacgatggtga

SEQ ID NO: 799767 - DNA, 647 bp, Homo sapiens
gtcagctttcaatgactatttcagtgtcagccaccgtgctcattatctgactaacaaaactaattttgttgcagcctttgagagaagataatgtaggcccctgaacacataatagctgatcctaaatccaaaagtgttttatatccagagcagctgctaccctcttggcgatctctgagatgtatgaacttggaaaatctatttctttatataacatattgaaattttcttctctataataaaaatttatacatgccatgcttcagctcactgctaggaaagcatgcaactattaaagttatgtaaaaataatgtgaattgccccaggctaytcacagtccttcatccagtcctcatttgacccatggtggtccgctggatattaaccaacatgcaggggtggtttgtgatcacgcaaccaagcatctttctctatgagttgactcagacatgatattttcagttgctctcagtaaccaaatagctctatatgcccttttaatataataatttagaaatgaatgacagttgtatagtggttccaaatgtcatactctatagcagtaacatggtgagtcttaaagttatttattctgaaagaaacatttattctctgtgtcattggtttaatgatgaaaggtattctt

SEQ ID NO: 799768 - DNA, 448 bp, Homo sapiens
cttccgattgtttcaattaccatctatttgctgatgactcccaaatccatatttctaggtcaaatctttactgaattccgcatctgtataactgactgcttattaagcctcttcactttcgatggctcccaggcatctcaaacttatgtccctaagtgaaatcatttaacttmtttaactttttttttttaacttaatatcacatcatggtaccactaagtttcctaaggtgaacttcaatataatcccttgctcctcctcttactgaatcttacatcaagttcttactcagatttgttcattaaagcaaatcttacaaccagctccaattcttgcttatttacctcttttcctctcaattccttcacttctttccattcctattgtcaaaaccgtggaagagtccaccattttgtctcatgtgtattacttctgtggtctgctaacc

SEQ ID NO: 799769 - DNA, 650 bp, Homo sapiens
ggtttcctcaacatagctagactgaaattaatgcttgtaaaagtcaagaagttttttaaaaggtatttcctaatttattcctaatttaaaaataaaacattttttcttagcaagttatcctgacatcacagatatgttaatttggatragattcttagatgaagtgaattgattaatgtgaaaattaattcatgaatcttagatatcagcaagtgagtaggatttgggagttgtttgacaatatttcttatatatagtattcgtttttcctagatcatctgactgccagtatttcatcttgagagtggcaatttaaaaagcaaaagcatttttttcccctgggcttagactccactaaaacttgtgggttgaacattttacccaaatatagaccttttagtgattaagctaatttactcttttcaaactgtgacatcctgtttataagaaagaagacttataaaaagtaatctgagcatgaactaactcttctaaagtcaacatcttggtgaacttatgtgttaaatgagtcacaaatatttggatgaagattttttctggttttgaaagggaaagtacttgggaaaaaatgtcattttggtttcattgaaatggaaacatttgaaaaaatgaaattcactggtgagact

SEQ ID NO: 799770 - DNA, 517 bp, Homo sapiens
ctttatattattcctacaaataatattttcaaatttaatacccctttaaagataattagcagaaacaagattgcagccacaaattaatgagacttggatgactagaataaaggtatatattctcagacagccatgcttaccatttataaagaaataaaaagaaagatagaaaatacctgaaatgcaagagaaactattaaaagctgacacaatttgaaaaagaaccaagtagaccttctagaaatgaaaaatacaacggaagtaaaagttcaataagaataacaacagagtctacttaaggggaaatacttgaagcattaccattaaaatccaatttttaactcaatgctgttttgtgtrtacgagccaatgcaattaaaaagaggaattagagatagaaatttggaaaataagtgattaaattttaattatttgcagaagttataataaaatatctggaaaaccaaaggatcaacttaaaactactataagcaataagagaatttagttttagtct

SEQ ID NO: 799771 - DNA, 603 bp, Homo sapiens
acacacaccctcccaaggctgaaccagaaagaagttgaagccctgaacagaccaataatggactccaaaatttaatcagtaataaatagcctaccaaccaaaaaaggcccaggatcgaacagattcacagccaaattctaccagatatacaaagaagagctggctggtaccattcctactgaaaatattccaaaaattgaggaggagagactcctctgtaacccactctrtgggaacagcatcatcctaacactaaaacctggcaaagacacaacaacaagaagaaacttcaggccaatatccttcatgaacatcagtgaaagaatcctcaacaaaatactggcaaatcgaatctagcagcacatcaaaaaccttatctaccacgatcaactaggctttatgcctggggtgcaaggttggttcaatatatgcaaatcaataaatatattcattacataaacaaaactaaagacaaaaaaatgataatctcaatagatgcagaaaaggcttttgatataattcaacatccttcatgttaaaaattctcaataaactaggtattgaaggaacatacctcaaaataatgagtcatttatgacaaac

SEQ ID NO: 799772 - DNA, 635 bp, Homo sapiens
gaaaacaaattttaaaaatggcaagcataagtccttacttatgaatgataacactgaatgtaaatggaccaaactctccaataggacataaagtggctgaatagattaaaaaaaaagactcaacaatctgctcccaataagaaacacacttcacctataaaggcacacatagactgaaactaaaagggtggaaaaagatattccatgcaaatggaaaccaaaaaagagcaagaatagctctatttatatcacacaaattagatttcatgacaaaaaccataaaaagacaaagaaagtcattacataatgataaaagggtcaattcagcaagaggawaagaagggtcaattcagcaaggtgcatataaatataaatgcacccaaccctgaagggcccagatatataaagcaaatattattcaagctaaagagagagatagaccacaatccaatagttggagacttcaatactccactttcagcactggacagatcatccagacagaaaatcaacaaagaaacattggaattaatctgcacaatagaccaaatggacctaatagatatttacagaacatttcatccaatggttgcaggatgcacattctactcagcccatggatcattttcaaagaa

SEQ ID NO: 799773 - DNA, 578 bp, Homo sapiens
gtgctttcaaatatagtaaaaatatgtattgaaaacctgttgaagttaataagtgaagtgagtaaaatctaggatttgaaatcaatgttaaatattaatagtatatctgtataccaacgttacaaatggaaaactaaatatacaaaagcacaacaatagcaataaagctattgaagtatgcatataatgtctctagtgggaactaaaatacatagctgagaagaattaaatagggtataaataaatggagaattatactatgtgcatagattcaaaaaatcaataagacaaataatagttgaaggaaatttaaagaagaaaaactatgctcaagaatttgcattgccagataagacartctgttaaaaatcgtgctaattaactgtattactgaaagcatagttaaataaactaaggcaatagaatagaaactatataccgtcatctattcataacaaagatgacacaacagttcaatgggtgaacctatagtctttttggtaaataactccgggtaacattgaaaaaaatatatattggtccctaaaccatatacaaaattcaaactcaatggattg

SEQ ID NO: 799774 - DNA, 578 bp, Homo sapiens
gtgctttcaaatatagtaaaaatatgtattgaaaacctgttgaagttaataagtgaagtgagtaaaatctaggatttgaaatcaatgttaaatattaatagtatatctgtataccaacgttacaaatggaaaactaaatatacaaaagcacaacaatagcaataaagctattgaagtatgcatataatgtctctagtgggaactaaaatacatagctgagaagaattaaatagggtataaataaatggagaattatactatgtgcatagattcaaaaaatcaataagacaaataatagttgaaggaaatttaaagaagaaaaactatgctcaagaatttgcattgccagataagacagtctkttaaaaatcgtgctaattaactgtattactgaaagcatagttaaataaactaaggcaatagaatagaaactatataccgtcatctattcataacaaagatgacacaacagttcaatgggtgaacctatagtctttttggtaaataactccgggtaacattgaaaaaaatatatattggtccctaaaccatatacaaaattcaaactcaatggattg

SEQ ID NO: 799775 - DNA, 578 bp, Homo sapiens
gtgctttcaaatatagtaaaaatatgtattgaaaacctgttgaagttaataagtgaagtgagtaaaatctaggatttgaaatcaatgttaaatattaatagtatatctgtataccaacgttacaaatggaaaactaaatatacaaaagcacaacaatagcaataaagctattgaagtatgcatataatgtctctagtgggaactaaaatacatagctgagaagaattaaatagggtataaataaatggagaattatactatgtgcatagattcaaaaaatcaataagacaaataatagttgaaggaaatttaaagaagaaaaactatgctcaagaatttgcattgccagataagacagtctgttaaaaatcgtgmtaattaactgtattactgaaagcatagttaaataaactaaggcaatagaatagaaactatataccgtcatctattcataacaaagatgacacaacagttcaatgggtgaacctatagtctttttggtaaataactccgggtaacattgaaaaaaatatatattggtccctaaaccatatacaaaattcaaactcaatggattg

SEQ ID NO: 799776 - DNA, 509 bp, Homo sapiens
ttgtcatcatgttaatttatggatgccttactctatttagtttccaagactgataatggtggaagaataataagagtcgggggactaaagtttcctttcattttcagaaggaacattggccatagtaattttgcctctatttggtggtagtaaaagtttattgttattttaaaaggaatagtagctcttcccttctaccatttatgattgggaattcgaaacataccaaaaaaagatattaaatatcaacttaatataattaaaatttgcttarccttaaagcctcatcctatacttgtggatttgttacatttagtggaggcattatacaaatagcaaaatatcatttaaaggtgagtaaatcaaagaaatattgccttctggggtatagtggtcacataaaggagatacacctctggattggctagattgcacatcacaggcaggctccatctgacccctttactgtgtaagaactggctagacccaggaggggcagtctcctcagc

SEQ ID NO: 799777 - DNA, 469 bp, Homo sapiens
ccttaagtcatctttagattacatgtaatacttaatacagcagccaggcgtggtggctcacacctgtaatcccagcactttgggaggctgaggagggcggatcaggaggtcaggggttcgagaccagcctgaccaacatggtaaaaccccgtctctactaaaaacacagaaattagccaggcgtggtggcacacacctgtgatcccagctactcaggaggctgaggcaggagaatgacttgagcctgggaggcggaggttgcagtkagctgagatggcgccgttgcactccagcctgagcgacaaagcgagactccgtctcaaaaaaaaaaaaaaaatacagcataaaagttatgaaagtagtcattatactgtattgttttaggaataatgacaacgaaataatatctgtacatgttcagtagagactcaaattttttcctaagtatttttgatccaattgtggaatc

SEQ ID NO: 799778 - DNA, 602 bp, Homo sapiens
tacaccatatggtaattactatactatagagaacagtttggaggtttctcaaaaaacttaagatagagctaccataagatccagcaatccttctgcagggtatatacccaaaataagggaaataagtatattaaagagatatctgtattctcatgtttcttgcagtgctgtacacagtacccaagatatggaagcaacctaagtgaccatcaacagatgaatggataaagaaaatgtggggccaggcgcartggctcacgcctgtaatcccagcactttggcaggcccaggcgggaggatcacgaggtcaggagatcgaggccatcctgactaacgtggtgaaaccccgtctctactaaaattataaaaaaattagccggccgtggtggcgggcccctgtagtcccagctactctactcgggaggctgaggcagaagaatggcgtgaacccggggggcggagcttgcagtgagccgagatagtgcaactgcactccagcctgggcgacagagtgagactctgtctcaaaaaaaaaaagtggtacctatacacaatggagtactattccaccataaaaattaatgaaatcctgtcatttggaa

SEQ ID NO: 799779 - DNA, 602 bp, Homo sapiens
tacaccatatggtaattactatactatagagaacagtttggaggtttctcaaaaaacttaagatagagctaccataagatccagcaatccttctgcagggtatatacccaaaataagggaaataagtatattaaagagatatctgtattctcatgtttcttgcagtgctgtacacagtacccaagatatggaagcaacctaagtgaccatcaacagatgaatggataaagaaaatgtggggccaggcgcaatggctcacgcctgtaatcccagcactttggcaggcccaggcgggaggatcacgaggtcaggagatcgaggccatcctgactaacgyggtgaaaccccgtctctactaaaattataaaaaaattagccggccgtggtggcgggcccctgtagtcccagctactctactcgggaggctgaggcagaagaatggcgtgaacccggggggcggagcttgcagtgagccgagatagtgcaactgcactccagcctgggcgacagagtgagactctgtctcaaaaaaaaaaagtggtacctatacacaatggagtactattccaccataaaaattaatgaaatcctgtcatttggaa

SEQ ID NO: 799780 - DNA, 646 bp, Homo sapiens
caaaggacacaaagtctagctccctccaaagtctctgagcccccagcctgcctggcatggccaagggaagcccacacggggctgctcacccaagagcacagaggcacagtgccctgggtccaagagagtgttgagctctaagagaatatttaaatatctcatacctgtatgttcacctttatacctatgcagtcacagaatagaactttcaatatttgtcaggagagagggacccaggaaggcagacgggtctcctccaaccctcccacacttcttctcttgtcaggggacttttaaaaatgctatgttggccaggcgccatggctcacacctgtaatcccagcactttgggaggctgaggcgggtggatcacgaggtcagtagttcaagaccagcctggacaagatggtaaaaccccatctctactaaaaaaaaaaaaatacaaaaattagccaggcrtggtggtgggcacctgtaatcccagctactcgggaggctgaggcagagaattgcttgaacccaggaggcggaggttgcagtgagcggagatcgcaccactgcactccagactgggtgacagagcgagattccatttcaaaaaaaaaaaatgctatgttggccgcctctagggtcatcctcccacaag

SEQ ID NO: 799781 - DNA, 562 bp, Homo sapiens
ttctccacatcttcaccaacacgtgtctttttgtttgtttggtaatagccgtcctctgcctaggtctgaagctcattgtggttttgctttgtatccccgaatgattagtgatgttgagcatgttttcatgtgcttgttgaccaggtttacatcatctttggaggaatatctattcaagtcttttgcccactttaaaatcagattttgttgttgttgagttgtaggagttctttacatattgtggatattaaccccttatgagagacatggtttgcaaatatttgcttctattcagtagattgcctttcaccctgtggataagttcttttgctgggcagaagttttagagtctgatgtagtcycatttgtctgttttcgtttttgttgccggtgctgtggggttatatcaataaatgattgcaaatccaatgtcatgaaacttttcccctatgtttttgtctaagagttttatagttttagctcttatgtttaggtctttgatccattttgccttaatttaatttttgtatatggtgtaagataaggatccacctgcatcctc

SEQ ID NO: 799782 - DNA, 611 bp, Homo sapiens
cattatcggctcattttcagagactgagaagaaaagacacatcatgttttgtggtgggatttatacataagcagatgagacgtgagatcattaagaatgtcccggaacagaagatgacgtcttggcatggtggtgtcttgggggactgtggtcatacattcaggttgtggtggaaacaaacccaaacacgggcctgggtgactgcacagccggtgccaggctgccatgggatgggctgccaggagttcaggggagcctgaacgacgcaggagcctgcctgggcccagagctgtytgcctcacccccagcccatggctttctttccccaaagatgcccggctccacgtgaggcatgttcccaggggcccgtgcctgccagcacatggcctggttttgaaggcagcgcttagcggcgtttcgacaagagaggaaggaaccctgggatcggccatctggtgcccttgctggttgctttctccagccttttgttccgctctttccctattatctttattgatgcattaatttaacttgtaattactttgaacactcacaagctggccagtcaacccaagaacaagaaacttggaagtttctaactcttaggacac

SEQ ID NO: 799783 - DNA, 634 bp, Homo sapiens
tataagggcaataattgttatattaatgccaaacatttattgagcaaataccatgtacaagtccttattctaggaccttacatatattaactgaattaattatactaatgacattactgaatccaaccagtctttataaattatttctagggaaaatacttctcaaattttgtatgtgggagagaagaaagataacactccagtgtcagtagagtcatggctgtagagacatagccagtgtattgatggaagcccgaggggaagwggacagagcagacaagtcccggtaggggcttaaaaaagcagtatttgggagcagggttttcattcatcactgaagagctttggaaagacctggatttatgaatacattttcaatattttttttctcaagtcttgctaaccaggcctggtagggtgggaaggggtagaatttgagattgctctaatgctgaaacatttggtatggctgaaacttcatgaactgagagtaggaaaaatgctcttatttttcaaggtgcccataggcttagtataaattaaaacctagcctccctgagtctatgatcccttccccaaacaccgagagacaaatgtgctcaagacttactaattaggtggaaccatctaatga

SEQ ID NO: 799784 - DNA, 588 bp, Homo sapiens
agttcaataggcaattaaatatagaaacaaggagataagtcagattaaaaattaactgtgaggacttgaaccaaggaaatactcccaaatagagaataagcctttttgcagtaatatgcttattacagtattctttacaaaaggacaacaacaatcccagcactttgggaggccgaggcaggcagatcacgaggtcaggagaccgagaccatcctggctaacacagtgaaaccccgtctctactaaaaatgcaaaaaaaaattagccrggcgtggtggcgggcacctgtagtcccagctactcgggaggctgaggcaggagaatggcctgaacccgggaggcggagcttgcagtgagcccagatcgcgccactgcactccagcctgggcgacagagcgagactccatctcaaaaaaaaaaaaaaaaaaaaaaaaaaaaaaaaaaaaaagaaaatagtgcatcacacaaaggaattttttttcagaataaaattttgtcccctgattatgtgggaagttgcaggcctgcagcacctgggcagatagcaaaatgttaataaggtgatttttaatgaggtgcttgggaaag

SEQ ID NO: 799785 - DNA, 597 bp, Homo sapiens
atatgaatgctagtcatagcattatttataaccagaaaaacttgaaaacaactaaaatgtgcaacaatagagaattatgttaagtactatatttatatgataatatgttcctttcaaattaaatgtttttgaagaatgtttaattacatggataatgytcacaaaattttaagtaaaaatgatcaaattattaagtaaaaataaaactaaatacaaactatgaccaaaaatttccaaatacagtatatatgaaggtgaatggatacatagaaaaaaattaaaatattaattaaactataattatttctgtgtagtaacattaggaatattttctctttgctatattattctgtagttcctaattattttaaatctttatcatgtattcattgatgtccaggaaagccatctaataacaaataacattaacaataaaaatgtatacaataaggattttgtaacaataatcattctttacaggatcaaatgaataatctatacgtacataatgaaatttaggaggaaacatagaacttacaaatttttactgctaatttttatagctgtaacccttaagttaagcaagtttacagttaa

SEQ ID NO: 799786 - DNA, 597 bp, Homo sapiens
atatgaatgctagtcatagcattatttataaccagaaaaacttgaaaacaactaaaatgtgcaacaatagagaattatgttaagtactatatttatatgataatatgttcctttcaaattaaatgtttttgaagaatgtttaattacatggataatgctcacaaaattttaagtaaaaatgatcaaattattaagtaaaaataaaactaaatacaaactatgaccaaaaatttccaaatacagtatatatgaaggtgaatggatacatagaaaaaaattaaaatattaattaaactataattatttctgtgtagtaacattaggaatattttctctttgctatattattctgtagttcctaattattttaaatctttatcatgtattcattgatgtccaggaaagycatctaataacaaataacattaacaataaaaatgtatacaataaggattttgtaacaataatcattctttacaggatcaaatgaataatctatacgtacataatgaaatttaggaggaaacatagaacttacaaatttttactgctaatttttatagctgtaacccttaagttaagcaagtttacagttaa

SEQ ID NO: 799787 - DNA, 631 bp, Homo sapiens
agtattacgtagtctgagaagtcagtctcatgataggctctgtgcaagctggagaccctgggttgcaggtagcctggctcggtccaagtctgaaggcatcagagccagggaagccaaaggtataactctctgtccaaggctaagtaaggtgggagagscttagaagctgctggcacaagtcacagagtccaaagaccaaagagcctagagttttaatgtccaagggcagggtaagaagggtgtccccactccaggagcaacagaattcatattttatttgcctttttgttccacagggacccccagcctactggatgtttctgatcaccttgagggtgaatctttccaatcagtccactgaggcacatgccaatctcctcggaaacaccctcacaaatacacccagaaataatggtttttcatctatctaggttatttcttaatccagtcaaaatgacaccaaaaattaaccatcacactaatgcttaatcaaaaggctggtgagatgctacctctttaggtagattctggtaaatagctgggaactattgataccacaacctctcttccctcccaaagaaatactgatactttggaactagttttcttccttcttattcttattccaact

SEQ ID NO: 799788 - DNA, 479 bp, Homo sapiens
tccctattctggaccttcataggactggaataatatgatgtgttgatgttatgtgactgacttgttttccttcacataaagttttcaaggtttgtctgtgttgcagcatctatcaataccttaattcttttttagatggaataatattccattgtatgggcataccatattttaaaatccatttgtctcttgatagtcatttggkttctttccaccttttgactattatgaataatgctgatatgaacgttcatgaacaagcttttttgtggacatatattttcatttctcttggatatatacctagaagtagaattgctaggtcatatagtaactctatgtttaatcatttgagaaacggccagattgtttttaaagtacatgtaccattttacattcccatcagtagtgtatgagtgttatgctttatccttatcctcttcaacacttgttactttctgactttttaattctagtca

SEQ ID NO: 799789 - DNA, 559 bp, Homo sapiens
ggagcacattggagagcagcctgaggtgaggatggggtagactgtggctaactgcagagagcccttgcagggcaggttgaggatttccttttggtctttacagccacagaggaatttaaatagatgattttagttgtacagtcaagaaaatttgaagacaagaaatagtattttatggtgactagttgggagaataatagatttatctatgcagtagatgatggcatgattgtgagttctgtcggtgaaaatggagttaaatggaragactcaggagatatttaggaggtaaaactgttaggatttgatcattgaatatatatagggatgaaggagaagaagttgtcaaggttatatgatttgtaaaactgggtatttgaggaggccagtatttaaaaataattgagaacgaatagatctatggagaagaccaagagtttaattttggatatgtcatctatgagatgactataagacagtcaagtggagatatcagataaatgactggacatgtgtatgtggagcttagagcagggtgagctagagataaaaatttgag

SEQ ID NO: 799790 - DNA, 559 bp, Homo sapiens
ggagcacattggagagcagcctgaggtgaggatggggtagactgtggctaactgcagagagcccttgcagggcaggttgaggatttccttttggtctttacagccacagaggaatttaaatagatgattttagttgtacagtcaagaaaatttgaagacaagaaatagtattttatggtgactagttgggagaataatagatttatctatgcagtagatgatggcatgattgtgagttctgtcggtgaaaatggagttaaatggagagactcaggagatatttaggaggtaaaactgttaggatttgatcattgaatatatatagggatgaaggagaagaagttgtcaaggttatatgatttgtaaaactgggtatttgakgaggccagtatttaaaaataattgagaacgaatagatctatggagaagaccaagagtttaattttggatatgtcatctatgagatgactataagacagtcaagtggagatatcagataaatgactggacatgtgtatgtggagcttagagcagggtgagctagagataaaaatttgag

SEQ ID NO: 799791 - DNA, 559 bp, Homo sapiens
ggagcacattggagagcagcctgaggtgaggatggggtagactgtggctaactgcagagagcccttgcagggcaggttgaggatttccttttggtctttacagccacagaggaatttaaatagatgattttagttgtacagtcaagaaaatttgaagacaagaaatagtattttatggtgactagttgggagaataatagatttatctatgcagtagatgatggcatgattgtgagttctgtcggtgaaaatggagttaaatggagagactcaggagatatttaggaggtaaaactgttaggatttgatcattgaatatatatagggatgaaggagaagaagttgtcaaggttatatgatttgtaaaactgggtatttgaggaggccagtatttaaaaataattgagaacgaatagatytatggagaagaccaagagtttaattttggatatgtcatctatgagatgactataagacagtcaagtggagatatcagataaatgactggacatgtgtatgtggagcttagagcagggtgagctagagataaaaatttgag

SEQ ID NO: 799792 - DNA, 615 bp, Homo sapiens
ccagcaatcccactactggatatatacccaaaggaatacaaatcattcttttataaaaatacatgtacttctatatccattgcagcattagtcacaatagcaaagacatggaatcaacctaaatgcccatcagtgataaactggataaagaaaatatgatacatatacaccatggaatactacacagcgatgaaaaagaacaagataatgccctttgcagggatatgaatggaactggaggtcattatccttagcaaactaacacaggaacagaaaacaaaatacctcacgttctcacttataagtggtagctaaacaatgagaacacagagacacaaagaagggaacaacagacacaggtgcctataatagggtagagggtgggaggaggaagaggatcaggaaaaataatggataataggcttaatacttgggtgatgaaataatctgttcaacatacccccttgacamaagtttacctatgtaacaaacctgcgcatgtacccctgaacttaaaatagaagtaaaaaaagaatataatctttcaaaatgaatatttttgtacatgctatatgtgagtgctaaaggtgccacattctcataccatctttgaac

SEQ ID NO: 799793 - DNA, 583 bp, Homo sapiens
atcttctctgttaaagctttcttgtgcatcaagaccaaaccttttctttctctcaaatcccagtaattaagatcagtatttttatcttctattacacctgttcacctatagtgtgccccagctatcttgagctaatcaaccaaacaaactttatctttgctcaggctgtccttgtgacctgaaatgagttccttctttccctattgggaatgttacwtgtctttccacacacagctcaaagatttcttcattttaagccctgtttcattcttagcttaagattcccagctcttcccttacagcttgtccactataataattgtttttttaatttcttatctagttgctatttgtttacatgatttttccccacaaaggcttacaactattaagacccaatagagcagctcctgcgtcctcaattcataattcatcaaatcatagctttctctctgaaaagaagtttcactgattatctcatcgaatcctccatttaataagagaaataataagcctgcaggcaggtggctactcgcatagtcacaacattccattcctgggtcagggcccaatcctgtgaatg

SEQ ID NO: 799794 - DNA, 618 bp, Homo sapiens
tagctagtcctctctgaacgttagccatgaaaatctagacaaattatttgatgttgggactttctttcctgcataatattgttttactcttacgtactgctgattgcatgtccctatagatctactgcagctggttccccaggtgaggccactgttgtttcctattcagttgtacagctgtcactcaatcacagtgtgtattgttgcgagcagctcactcatttctgccaaaatttccatttgctcatggtcttatgggtacatttgtcaccagtttttacttgtatctgacattcctggttggggaatgttggggtcacccacatgtgtgggaaagtaagtgacagcatggggttgggccagcttggacctctttgtgcctgacctcctgagctccatatcttattgcagcatagccagggtgatatactctctctttaatasagggtcttctcctacatttgcaacataccatggccaaagtgcaagtctctgtgcactctaccacttagactccagtatctatttggatttcagcctccagggtcaatctttggagaactttgaatgacaggctgaggaatttaaacttaattcaataaaccataaaaagctgtt

SEQ ID NO: 799795 - DNA, 606 bp, Homo sapiens
aatgggagatactaggagaaggctggaagacatcactggatttagggaaagggtagtagcatgcttacagtctgagaggaaagtttcagtagaaaagaataattgcacaaagaggtaagaaagggcacaactgaagaaagrtgatgtaagagaagaaaggacaagttttaggtgtgctgtgataacagtatctaaagcaagaacatctttcacaaccacaatgtaaagttgtttagaaaaatcatgctttgtcaatttattcactgaggtcagaatttgtctcagttcaaaatacacctagaatacacaatcaaagggatgcttactttttctaatctagccattctctagcgcttattttatgctagtgtctctaattaatatccaaatgccttgatggatgtattggaattgttttaattcagttctttgtagtcattcagtccattttattcttataattatggggggcaggattaactagaaaatcctctccttctatcaggattaagccccagctaaatgaaaacacaaacaccacaggactaactaagaggcagctattttcagcaaatgtggtgacttttgtaatgcaagccaagctct

SEQ ID NO: 799796 - DNA, 606 bp, Homo sapiens
aatgggagatactaggagaaggctggaagacatcactggatttagggaaagggtagtagcatgcttacagtctgagaggaaagtttcagtagaaaagaataattgcacaaagaggtaagaaagggcacaactgaagaaagatgatgtaagagaagaaaggacaagttttaggtgtgctgtgataacagtatctaaagcaagaacatctttcacaaccamaatgtaaagttgtttagaaaaatcatgctttgtcaatttattcactgaggtcagaatttgtctcagttcaaaatacacctagaatacacaatcaaagggatgcttactttttctaatctagccattctctagcgcttattttatgctagtgtctctaattaatatccaaatgccttgatggatgtattggaattgttttaattcagttctttgtagtcattcagtccattttattcttataattatggggggcaggattaactagaaaatcctctccttctatcaggattaagccccagctaaatgaaaacacaaacaccacaggactaactaagaggcagctattttcagcaaatgtggtgacttttgtaatgcaagccaagctct

SEQ ID NO: 799797 - DNA, 412 bp, Homo sapiens
gttcttccttaaatattagacagaattcaccagaaaagccatctagcgtttcaggttttctttgtgggaaggttttgtttttgtttttgttttttgagacacagtctcactctattgcccaggctggagtgcagtggcactatcttggctcactgcaacctccgcctcccaggttcaagcgattctcctgcctcagcctcttgagtagttgggactacaggcgcgtgccaccacacccagctaacttttgcatttttagtagagacgggggtctsgtcctgttggccaggctggtctcgaactcctgacctcaggggagctgcccaccttggcctccccaaagtgctaggattacaggtgtgagccaccatgccaggccctttttgtgggaaggttttgattgacaattcaa

SEQ ID NO: 799798 - DNA, 627 bp, Homo sapiens
tgaaatgagaagaccctaccaaactaaaacctgtgtcttacctgatttgatctttactacattctacctacgcctttttgcacaaatctgaatttcaaggatgtaaagagaaaaaagggcagtgtggttagatttagacataaacttggttgaatacaaattaaaaatgtccccttttcccactccctgtaaatcagtatccaactcttgggtgcaggatattgagtggggaaggggaggagtggggcagaaggaaaagaagtcaggaatccaggcttcccagtytctctgccacttacctccctaaagactcctcttcatttcatctctggatttccaggtacttaacccctgtgatggtcaggtgagataggagaggttcctgtttcagttataacttgcactggggctgttgtcagcaaatccaggcctctagctattttccagactggtcagaacactaacctgaaacccagaagtaactgccagggcagaggtaagtcactggtggcttctgcctctacatagagccttggatcccccaaacactcttagatcctgggagtactgatgtttgccttttctatctgccctcttttcttggcttctcctttctttctttttaaa

SEQ ID NO: 799799 - DNA, 629 bp, Homo sapiens
taatatgaagtgtgagtggtgcccgctctgcctcattcggccatggggtttattggggaaatggcgtctgctgcatgcctgtggctccagcttaataccaccagagacaagaatgctgggcgcagctgaaaggcagtaacccatctggagagctcctaaaaaggatccaagtttgcttaataatgtgctcagtagtctaatgttttgggcacaaatagcaaaaagctcttccaataacacgtgctttggatatcagattaatctggggcaggaaacacttgcaaagtggaatccacccaagagaaaaaggccaatatgccagcatcaaagkcttagtgttttgttttgctttacaaagtgagcacatagtgagcacacattgctgaaacaatcaatgtctcaactgtatgccaaattctgtaagttgataagtaccattttttttattaggggtgtaactaatagagcactgcttttataatctagtcctactttcagattcagagagatttaggcattctgaagttaagtcccagggcagggtctttactcaaagtgtggatgtgtggacaggctttctggctataagcagtagcattagctatttggggctcagaaacccgtgcatt

SEQ ID NO: 799800 - DNA, 584 bp, Homo sapiens
ttctccatataaatgcagtaaatcattattacatcttaatagtgtaaaaaataaagtagaggttcctcttcaaagactttcctcctcatctaataagaaataaatagtaactcctcttagaagcaaaatgcattcaaagacctgtggtaacattcttaaatatctgctagccgtaataaagaaatcaacgtactttatgttcttagctcccgaatttagcctagatatttgccctgacatgcttatactggtccaagcaagcattaggtcatagcctgttcctcttccttatttgaaggtgtttttacctttctcagcattccacaagttacttcctccttcctttgctctcctctgacttcgacgcttttaaaaagttctaacttgctagccaatcgggacaaatacagaatgtgaggtccmgttccagccagcggaaaccagacgcagcagtagggtggacgtgtcaggttataaatgaccctgtctcctttgttcagtgtactttcatggcaaaactgctggcaagtgtaccctttctgcagaaagtaaaaatggccttgctgaggaaattaaatttatgt

SEQ ID NO: 799801 - DNA, 647 bp, Homo sapiens
atatgtaataaaattaggatagacaaaaactttctacacctgataaatgagatttacaataaactgacagtatcacaattttttaaaaaaatgtttattctaagttcaggggtacatgtacagggttgttacatggtaaacatgtgtcatgagggtttgttttgtagattatttcatcacccaggtattaagcctagtatccattagtcatttttcctgatactctacctcctcctaacctccctcaagtaggtcccagtgtgtgttgttcccctcgatgtgttcatgttttctcatcatttagctcccacttataagtgagaacctcttatctggttctctggtatttgatttttggttttatgttcctgtgttagtttgaggaggatagtggcttgaggagattgtgatggtggtgcaaattagtcattctagacgtaccaatcacagctggaagggtccagaagatatgcccttgaccaatgttttgcaaaatagatttacragggcagcacctgcatctttgaagagccccgtaattgcttttctctgtatgtccgatctaacagtgagaaccgcagcaactgaactacaatatttaaatacaatgggaataattggatcctgaggtggcagggaccatgtgg

SEQ ID NO: 799802 - DNA, 630 bp, Homo sapiens
ccacattttggggtatccttgtagcagcaccccattctctgcagtaccagtttactgtgttagtccattctcatactgctataaagaactgctcaagactgggcaatttataaaggaaagaggtttaattgactcacagttccacgtggcttggaaggcctcaggaaacttacaatcatggcagaaggcacctcttcatatggcatcaggagagagaatgagtgttcagcgaagggggaagccccttataaaactatcagatcttgtgagaactcactcactctcactctcacaagaacagcatgggggaaaacacccccatgattcaattatcttttaccgggtccctcccacaacacatggggattatgggattacaattcaagataagatttgggtggggacccggagacaaaccatatcaggtgtgtgtgtgtgtgtgtgygcgtgcgtgtgcacacatgtacatgcacacaagcacacacctgtgcacaataacatccttcagtatttcaaacattcattttctttcagagaagctataaaaatgtactttacttcttctctgagagataactttttctaacatatggatattttttaagatatagtgagcaattattttaatgg

SEQ ID NO: 799803 - DNA, 572 bp, Homo sapiens
cactgaggaaaatctgagagtagacaaggagtactgattgggttatgaatttgtattttaacatgtagactttggctatagacatagcacatagtaatattacacatttctgttcaattatgcttatgttccaaaacaccactgttattaaaaataatgaatgttttgttcatcttaaagtatctattcacatcattaaaagaagaatggatttaaggtactactgtgtgccttgggactaatccttaagtattaaaattttaaatgtttattttgtgctcatctgtgaatcagtgagagactgttcgcttttttctttcacattcttggtttggtgtaaacgcccaacatkttcaaacatatgatctctagtgtttgaattagaggtcacctccctttccctcagaactctttttgtacttctgacttctttctacaccttgctttcttacctattaatgggaacctgcaaacagaatagcagagacagaattttggatcctgggtatctagaattgtggttatcaaacatccgtgggcatgagagtaatatgggaagtttaactggcaga

SEQ ID NO: 799804 - DNA, 563 bp, Homo sapiens; identical to SEQ ID NO: 795369

SEQ ID NO: 799805 - DNA, 556 bp, Homo sapiens
gccaggtgctgtaatttgtcacctggattccttaactcttgtgaacgtatttttaagcatggatgtttgttcaaattaatgcttctgtgaggagataagccctggatactcctgtgctaccatcttggtgacatcactctccaaatgtaaattattttaattagttacattatttatagcaataaaatttaaattttttcctyagggcacaatgctgataaagaaattgaaaaatatcagactatataaactaaatgaggggtgcttaatccccttcaaggaggtagtagagaatttagtactagtttatctctccagatagtgattcaattttttttcaattacagttattctagatataagaaaagggacaggtttggaagattacattattatttggagacattgatcttagtcactattactgataaaattcagcctagtttatgtctatagacacataataagactgcatgaaagctattaggatctaagttttctacattggataacctctccctttcacccttaccctagcctaagttttcccatatca

SEQ ID NO: 799806 - DNA, 655 bp, Homo sapiens
ttttaatttaaagtgagagacatgctattcttcttgtctcttgaatacatcaaggccactgaaaggttatttattggcattgttctgtctcagggagtagggaagcccaaggagaaggagagagaagggagaatggccaatctgtggagccgtcagaacagagacaacatttagtgattaagtttgccatcatctatgactgcttgctcatggtgmcctagagtaataagaaagatcaccgatcacatattactataacagatgtaataataatgaaaagttttaaaatattgtgacaattatcaaaatgtgatatatgctgttggaaaaatagccccgatagacttgctcaacacagagttgacacaaatcatcaatttgtttaaaaaaaagaaaaaggaaaaaaagaatatctgcaaagaacaattaagtgaagcacaataaaacaattcatgcttgtagttttttgccactcctcccactcccaaattggccactcccatcactccattacaggtatgttaaaccatctgacactgccccataggtcactggatatgcttctctccatactccagcttttttatttctctttctgtgcttcagtttaggtggtttctattgttttgtcttcaagctcactgatcttttctga

SEQ ID NO: 799807 - DNA, 654 bp, Homo sapiens
tcctactcattgttacatatgaattgcacctacagttttgttggcttgtttgattttttaaattgaatcctgactccaccacttactagctgtgtggtgaaaaaaataagtgataagaaaatcacttttctctaaaccttagttttctcatctgtgaaaaggatatgatgatagtatcttcttttataagattgtactgataattaaattagatacataagcctcttgcatartggctgacacatcataaatcttctatatatgttagtaattattgttaagtattttggacatgaatattaatcacacctctctgatctgactttggaaccttgagagttagatgaataaatcagaaaaatggaattaaatgtatctactttattattggtaaatctggttaggatgtgcagccctaatcaggcttccttaattccttctccactgagtctggaccagcactctccagtagaactttctatgatgacggaaatcctctgtgtctgcgctgatcagtgtggtagttactggccacatgtggctgttgagtacttgaaatgtggccagtgtggtgatggaattgtgtttttaatcttatttaatttaaatttaaatagccaaatgtggctagtggctgttggacagtgtaggtct

SEQ ID NO: 799808 - DNA, 654 bp, Homo sapiens
tcctactcattgttacatatgaattgcacctacagttttgttggcttgtttgattttttaaattgaatcctgactccaccacttactagctgtgtggtgaaaaaaataagtgataagaaaatcacttttctctaaaccttagttttctcatctgtgaaaaggatatgatgatagtatcttcttttataagattgtactgataattaaattagatacataagcctcttgcatagtggctgacacatcataaatcttctatatatgttagtaattattgttaagtattttggacatgaatattaatcacacctctctgatctgactttggaaccttgagagttagatgaataaatcagaaaaatggaattaaatgtatctactttattattggtaaatctggttaggatstgcagccctaatcaggcttccttaattccttctccactgagtctggaccagcactctccagtagaactttctatgatgacggaaatcctctgtgtctgcgctgatcagtgtggtagttactggccacatgtggctgttgagtacttgaaatgtggccagtgtggtgatggaattgtgtttttaatcttatttaatttaaatttaaatagccaaatgtggctagtggctgttggacagtgtaggtct

SEQ ID NO: 799809 - DNA, 601 bp, Homo sapiens
tttatctgtctcaaaaaaaaaaaaagtaaatattttttttgagcattaagccactatggacaagcggctagaaaaagaattttcacaaattcaggaaacacttgagaggtaaaaccaacatcctgagacagaagacaggccagcttttgacaccaggttggagctgcgaggcctaaaacgtccagccaggaagtgcttgcccctggtcagggctccagaggccccggccaaggcaggagagcgcagaactttccacgcgccaccgcaaccaacaggcctcttcatgggaaattggctgaaaatgtgctgaccggcataaaacttttattagaatccgagagcaggaggctgaacttccagggaatgacgggtctgggcgggctggggagggcgcagccaggacccagaccggggcrctcggtcccccagccggcccccatccgtggagcctgcgccctgccgtaactttgggggtcggctccctgggcccccagctcacgatgcccgctaggagccggcgccggggcgccccaaggctgcctccccccgcagcgctgcgcagtgcgccctggtgggatggggacgctgcacccctgaaccc

SEQ ID NO: 799810 - DNA, 601 bp, Homo sapiens
tttatctgtctcaaaaaaaaaaaaagtaaatattttttttgagcattaagccactatggacaagcggctagaaaaagaattttcacaaattcaggaaacacttgagaggtaaaaccaacatcctgagacagaagacaggccagcttttgacaccaggttggagctgcgaggcctaaaacgtccagccaggaagtgcttgcccctggtcagggctccagaggccccggccaaggcaggagagcgcagaactttccacgcgccaccgcaaccaacaggcctcttcatgggaaattggctgaaaatgtgctgaccggcataaaacttttattagaatccgagagcaggaggctgaacttccagggaatgacgggtctgggcgggctggggagggcgcagccaggacccagaccggggcgctcggtcccccagccggcccccatccgwggagcctgcgccctgccgtaactttgggggtcggctccctgggcccccagctcacgatgcccgctaggagccggcgccggggcgccccaaggctgcctccccccgcagcgctgcgcagtgcgccctggtgggatggggacgctgcacccctgaaccc

SEQ ID NO: 799811 - DNA, 627 bp, Homo sapiens
atataaaaaaaggttgagtacacaatccagcaaaaaatgtcattaaaaggacacatggtgctgagtgggacaaccttaaaatcactgaaaatggagcgtttaaaagagcactggagggacacatccaagaagatgacaaagggggatggggggaaatattagagacatttmccctgggccgtgtttctgttttccatgaaaatactcatgaaatcatatggggggatggagagaaaaaaaagaaaagaaattctcagtaaaagccacccctaaaagagctaggactccagaatattccagaaatcactctatggcatttcacactggtggttgacctgaataactggcaccagtgcaaaccaatgcctcaggctgtggtgcaggaagtttctgattggggcaggtgggggccgatgggcaggtgccagcggggtgggagccctcagccatgggctgtgaacaggctttggacccctatgtggcttcactgtggggctttagtcatctgagtggagctgtgcaatagcaggggtctttgttggtgttgttcattatgatatctctagctcctagaataagagcactatagcaggtgctcaacagacatttcctaaatgtgttacttta

SEQ ID NO: 799812 - DNA, 627 bp, Homo sapiens
atataaaaaaaggttgagtacacaatccagcaaaaaatgtcattaaaaggacacatggtgctgagtgggacaaccttaaaatcactgaaaatggagcgtttaaaagagcactggagggacacatccaagaagatgacaaagggggatggggggaaatattagagacatttcccctgggccgtgtttctgttttccatgaaaatactcatgaaatcatatggggggatggagagaaaaaaaagaaaagaaattctcagtaaaagccacccctaaaagagctaggactccagaatattccagaaatcactctatggcatttcacactggtggttgacctgaataactggcaccagtgcaaaccaatgcctcaggctgtggtgcaggaagtttctgattggggcaggtgggggccgatgggcaggtgccagcggggtgggagccctcagccatgggctgtgaacaggcttyggacccctatgtggcttcactgtggggctttagtcatctgagtggagctgtgcaatagcaggggtctttgttggtgttgttcattatgatatctctagctcctagaataagagcactatagcaggtgctcaacagacatttcctaaatgtgttacttta

SEQ ID NO: 799813 - DNA, 600 bp, Homo sapiens
gcagaatgatacagtttgcatgtggtctcctctaaaactcatgttgaattataatccccactgtttgttggaggtaggacatggtgggagataactggatcattggggcagatttctcatcaatgttttagtgccatccacttggtgctgtccttgtgatagtgagttctcacaatatctagatgcttaagtgtagcatcttccccctcattctcttctgctcttgctatgtgagatgccaggtccccygttggcttctgccatcattgcaagttacctgaggcctcaccagaagctgagcagatgccttgcaccatgcttcttgtacaacttgcagaattgtgaaccaattaaacctttttaccttataaattatccagtcgcaggtatttctttatagcaaattagagaataggttaacacagaaaaagttgaattcactattatagttggagacttcaacactcctctatcagaatgaagagatccatcaagcagaaaatcaggaagtcaacagagaaaattgatgaaaccaaaagctggtttttgaaaaattgataaaatcagtaaacctctgtcaagccagactgagagagacaa

SEQ ID NO: 799814 - DNA, 528 bp, Homo sapiens
ctttgaattacaatcatgggtgtttactgtttctttgattttctaaatttactttttcaaaggtttcatcttcaaaaccagaagaaaataaaattcgtcaggaagatttaacaaaaattataagtagtgctcagaaggttcagataaaacaggaaactattgagtccaggctttctgaattaaaaaggtaaagtgttatttccaaatataattttaatctgggaattgggtatgtgtctatgtgtgttgagtttggaggttgtctgatgttttattgtaagtactcagatcactttgttgaagccaagatcaaaggtcatttttctgcaagtattggttccctttactttgatttgtggccactractttactctaatattgttttaattatgatagtcagaagaagatataaacctaagcgtatcaaaacagtttgatgtataagtcttagcaataaacagtaggtctttaagatgatgtaggaaatatgattctatttaggttagctcatatggtgctcatagaca

SEQ ID NO: 799815 - DNA, 649 bp, Homo sapiens
cacacagagtccccactggggcactgcctattggagccgtgagaagaggcacaccatcctccagacctcagaatggtcgatccaccaacagcttgcaacatgcccctggaaaagccaaagacactcaatgccagctcatgaaagcagccatgggggctgtaccttgtaaagccacaggggcagagctgctcaaggccttgggagcccaacctttgcatcagcatgccctggatgtgagacatggacttgcatggagcctgcagaccctttgttttggctggtttctcccttttggagcaggagcatttactcaatgcctgtacccmcattgcatcttggaagtaactaacttgctcttgattttacaggctcatcggtggaagggacttgccttgtctcaaatgagactttgaacttggaattttgagttaaaactggtatgagttaagatttgggggattcttggaaaggcatgattgtgttttgaaatgtgagaaggacacaaaatttgggagggtatgggagggaatgatatggtttggctctgtatcaccacccaaatctcatgatgaattatgagattcatcttcagtattggaggaagggtctggtgggaggtgattggatcctgggggtggatttccccctt

SEQ ID NO: 799816 - DNA, 621 bp, Homo sapiens
  misc_feature 602, 603, 604, 605, 606, 607, 608, 609, 610, 611, 612, 613,614, 615, 616, 617, 618, 619, 620, 621: n = A,T,C or G
agatttcaggagctacaatgtttaccttaagtttgatttgcacttgtcctgataaattacgactcgatgaaattttttttttttttttttttttttttttagagacagagtttggctctgttgcccaggctggagtgcagtggcgcaatctcggctcactgcaagctctgcctcccaggttcacgccattctccttcctcagcctcctgtgtagctgggactacaggcgcccaccaccacgcccagctaagtttttgtatttttagtagggacggggtttcatcgtgttagccaggatagtcttgatctcctgatctcstgatccgcccgcctcggcctcccaaagtgctgggattacaggcgtgagccaccgcacctggccgatttaaaagttttaatcacctagggaatatgtcgattatctccccctcagtagagtgtcttggcctgtgaacagggaaaaatagtgcagaataaaatattttggagcaagtaatttattgtttgagtttatttatattctgtgaacttcttatgtgacatccagtgcacttcccaagcttgaatagttacgcactgaaaatctcatacgctacggaaannnnnnnnnnnnnnnnnnnn

SEQ ID NO: 799817 - DNA, 533 bp, Homo sapiens
ctggagaaagaaatcaaatacagtgcctaattttgattttccaatgcaacttacacgacttcagaatgttcgtggcctctcctgccacagcagacaggttcttgaatgaagattctaaacatgcacactcttatccacacaataaaacaaacagaaaattgctcctaggtgctatttttaaatctccactaagtattgaacttaaaaaaaatatttttacaagagtatcccattattagacttcctaggattactataagtcccctgcaagatgactttagttccaggcttatttattcatttatttttaaatcactgctcaaagcttggagacactaagaattaactccaacaagtggatatgaagtccarcttcaccactgactgggttttgaactccagaaaaattaatgcaacattagaacctgagttaactcatctctacaatgggaataataatgagaataatgactaccttttataaattgaattatgtcaccctcaaaaaaggtgtgtctgaagtcctaaccacc

SEQ ID NO: 799818 - DNA, 584 bp, Homo sapiens
ctcgatctcttgacctcgtgatccactcgcctcggcctcccaaagtgctgggattacaggcgtgagccgccgcgcccggcccgagatgcacatgtatttttaaagagttccattgataactgagtttctcctgaccagaaggtggactgtggcctaggcatggcagtgcctcctgattggctttggaagctcagctccatctgtggtccgttattcttaaaagtggccactagagggtgagaatgagccacagcacagcaaagtcctgttttaaccttcagaacagctggaggacsgtcaattcaaacacactagagagcacctatcatgtgccaggtactgtgccaagccctccctgccttccaggacctcataaatggccagtggcccctcacatatagacacaactcttgtacaaggcagaatggaatgtgcacaaagaggtacaatcccaactcctagatctagggggtctcaacaaggaggaactgtgggtggctttcctgtagaactcagattggtcagtctgtgagaaggaaacttacaggacctgcaccatccaccctctcagtctcagtctcacc

SEQ ID NO: 799819 - DNA, 584 bp, Homo sapiens
ctcgatctcttgacctcgtgatccactcgcctcggcctcccaaagtgctgggattacaggcgtgagccgccgcgcccggcccgagatgcacatgtatttttaaagagttccattgataactgagtttctcctgaccagaaggtggactgtggcctaggcatggcagtgcctcctgattggctttggaagctcagctccatctgtggtccgttattcttaaaagtggccactagagggtgagaatgagccacagcacagcaaagtcctgttttaaccttcagaacagctggaggacggtcaattcaaacacactagagagcacctatcatgtgccaggtactgtgccaagccctccctgccttccaggacctcataaatggccagtggcccctcacatatrgacacaactcttgtacaaggcagaatggaatgtgcacaaagaggtacaatcccaactcctagatctagggggtctcaacaaggaggaactgtgggtggctttcctgtagaactcagattggtcagtctgtgagaaggaaacttacaggacctgcaccatccaccctctcagtctcagtctcacc

SEQ ID NO: 799820 - DNA, 582 bp, Homo sapiens
caggggattatttctgggattagcatttgaggatgtttaatcaaggatgtcagaatggaagactggataagcaagaattcactgatgtgggggtactttctcaggacaaaagatttaatattctactaggaactccaggagatgggacaaagttgctgcaaggatttaagaagcctggaaaaaataatggccaaatctcagagaagtggaaatasctgccttgccctgacaaactgcagaggaaggtgggcatgccaaaactgatatgtaaggcaagaagaccagctagataattatgttccattggaaggcctagaggacacactgctaaagccatcaggaatgagctgaaagagaggtaccactgatcctaagaaatttggtggtggctctcctctgcaggccagggctaatctaagagaagaggtcacagtgttgggtttattaacacccattgaaatgatggtgccccaaagtagtagaagtatgtgtcttaaggaatggaatggcaaaataagactttttgttgttgttgattatgataatttcattaagtcaggtaatttgttacacattccaaaa

SEQ ID NO: 799821 - DNA, 582 bp, Homo sapiens
caggggattatttctgggattagcatttgaggatgtttaatcaaggatgtcagaatggaagactggataagcaagaattcactgatgtgggggtactttctcaggacaaaagatttaatattctactaggaactccaggagatgggacaaagttgctgcaaggatttaagaagcctggaaaaaataatggccaaatctcagagaagtggaaatagctgccttgccctgacaaactgcagaggaaggtgggcatgccraaactgatatgtaaggcaagaagaccagctagataattatgttccattggaaggcctagaggacacactgctaaagccatcaggaatgagctgaaagagaggtaccactgatcctaagaaatttggtggtggctctcctctgcaggccagggctaatctaagagaagaggtcacagtgttgggtttattaacacccattgaaatgatggtgccccaaagtagtagaagtatgtgtcttaaggaatggaatggcaaaataagactttttgttgttgttgattatgataatttcattaagtcaggtaatttgttacacattccaaaa

SEQ ID NO: 799822 - DNA, 607 bp, Homo sapiens
actaccatcagagtgaacaggcaacctacaaattgggagaaaattttcacaacctactcatctgacaatgggctaatatccagaatctacaatgaactcaaacaaatttacaagaaaaaaagaaacaaccccatcagaaagtgggcaaagacctgaacagacacttctcaaaagaagatatttatgcagccaaaaatcaaatgaaaaagtgctcaccatcactggcgatcagagaaatgcaaatcaaaatcacaatgagataccatttcacaccatttagaatggcaatcattaaaaagtcaggaaacaacaggtgctggagaggatgtggagaaataggaacacttttacactattggtgggactgtaaactaattcaaccattgtggcagtctgtgtggygattcgtcagggatctagaactagaaataccaattgacccagccatcccaatactgggtatataaccaaaggactataaatcatgctgctataaagacacatgtacacgtatgtttattgtggcattattcacggtagcaaggacttggtacctacccaaaggtccaacaacgacagactggattaagaaaatgtggtagatata

SEQ ID NO: 799823 - DNA, 539 bp, Homo sapiens
aaaaactagacagaagcattctcagaaacttctttgtgatgtgtgcattcaactttttcttttgatagagcacttttaaaactctctttttgtagaatttgcaagtggacatttagatctctctgaggtctacggtgaaaaaggaaatatcttcacataaaaacttcacagaagcattttcagaaacttctttggatgtgtgcattcaactcacagagttgaacctttcttttgttagagcagttttgaaacactctttttggacaatccgcaagtggacatttggagcgctttgargcctgtggtgaaaaagcaaatatctttacataaaactagacagaagcttgctcacaaacttctttgtgatgcgtgcattccactcacagagttgaaactttcttttgatagagcagttttgaaaaactctttttgtagcatctgtaattgttcatttggagcgctttgaggcctactgtggaagaagaaatatcttcacataaaaacttgacagaatcattctcagaaacttctttgtgatg

SEQ ID NO: 799824 - DNA, 614 bp, Homo sapiens
ctttttgtagaatttgcaagtggatattttgatcgcttagagcccttctttggaaatgggatatcttcacaaaaactagacagaagaattctcagaaacttctttgtgatgtgtacattcaactcatagagttgaacctttcttttgagartgctgttttgaaacactctttttgtactatctattggaaacaggatatcttaaccgaaactagacagaagcattctcagaaacttctttgtgaagtgtgtattcaactcacagagttgaaccgatcttttgaccaagcagtttagaaacactctttttgtagtatctgcaagtggacatttggtgctctttgaggcctatggtgaaaaaggatatatcttcacttgaaaactagacagaagcattctcagaaacttccttgtgatgtgggcattcaactcacagagttgaaccactctttggatagagcagttttgaaacactctgtttgtggaatctgcaaggggacatttggagtgttttgaggcctatggtgaaaaaggaaatatcttcacataaaaactacacagaagcaatctctaaaacttgtttgtgatgtgtgcattcaactcacagagttgaac

SEQ ID NO: 799825 - DNA, 441 bp, Homo sapiens
aagcttctttgtgatgtgtgcactcaactcacagaattgaacctttcttttgatagatcagtttggaactctctctttgtagaaactgtaagtggatattttggcagttttggatctttcgttggaaacgggaataacttcacataaaaactagacaraagcattctcaaaaactactttgtgatgtttgccttcaactcacagagttgaacattccttttcatagagcagttttgtaacactttttttgtagaatctgaaagtggatatttggagcgctttgaggcctatcgtgaaaaaggaaatatcttcacataaaaactagacagaagcattctcagaaacttctttgttatgtgtgtactaaactaacagatttgaaccttttttttgatagagcatttttgaaacactctctttgtagaatctgcaagtggatgt

SEQ ID NO: 799826 - DNA, 599 bp, Homo sapiens
catctacaggtaccaactaggaagggtagtcttgaattaaatggctttagaacacgttataagagcaaattgaagcttccaggtattagaaccacttcaatcacagagcatctctgggttctatctgtggccagcatcaggtatctgtctgccctccccgaatggttcctctcatcatgtggatcttctagatggttttattcttccccagccagccaacctgaccaacaagcctgggtatattatgtatgtataaagttggttcttaaataaagtccatttctatatctaggtaagtaatgtcttcagactggcaatttcattgttatctagaaagagtgactctagttagcttctagtgtcagtttttctagcagcttctttaaaaaaaatcctctctggaacaaagcttccttgcaagcattgctgttggcaatattcctctttactgaaatgcttatccrgtgaaacttgggctgtgccagtgagcctgcaggttgacagtccttttgttcaacttctccattataagcaacctctctgatcacccttttaaaactaaagatcaaagaatcaaatgaggtcaggaagtgaccaga

SEQ ID NO: 799827 - DNA, 569 bp, Homo sapiens
tcctttttcctgatttacacccttcagtcccagggtaactactaccctgaatttatgtttaggattccctgcctttaaaaaaacattgttttattgcatatatatgattgccctaaatgacatattatttagttttttaagggtataatttatttacccattcttctattaatttacccattctcctattaatgaaaatctggcttgtttccatatattcgctattatgaatggcattacattagcatttatttttctactacttctggtacatatgggcaagagtttctccagggcctatggtagagaaattactttgccctaacatatgaraatgctcaactttatgagataatccaaattgttttccaaagtggttgttctaatttaaactctcacctcctgtattagttcgaaatgatcttgttgatccacagtctctccatatttggtgatatggtttggctatgtccccactcaaatctcagcttggattctatctcccagaatacccacatgttgtgggagggacccagagtgaggtaactgaatgatggaggccagtcttt

SEQ ID NO: 799828 - DNA, 551 bp, Homo sapiens
gtgccacatgttgatatgcatcccagggataaatgcacaacatgggggataggccgacgctggcagtaatgagctttgtaggagttattgcaaagaccaacagtttgtgaaggaattttgcttaacaggccaaggagatagacagarttgagggttgccaagatttgcctgtgcggggcttgtcagtcacattgttttcatccaaacttcatttgaggggaaaattgaatacatttgacagcaatggaaagtcttattttcttttttcaaatctttcagaggacaaaagcagtatttctggtgactaacataactatttttagtactgactaaatcatatatatgaatggatctattagcagtttatctttttccatatctagagaataattaaaagatatttcatagatgtcatatatatgttttaaaatctatgtaaaaataatgtagcctattaattttcctttgctcttttcctcctttgattttcctctagcatagcctggttctttagaaatacatttgcttaattggctagatgcagaggagaa

SEQ ID NO: 799829 - DNA, 395 bp, Homo sapiens
agggtggagccttcaaaatgggattagtgtccttataaacgggcttgagggagtgggttctcccttaccaggcaccagatgctggcaccttgatcttggactttccagcatccagaactataagaaatgcatttctatgccrggcacagtggcttacgcctgtaatcccaacattttggaaggctgaggtgggtggatcacctgaggtcaggagttcaagaccagcctgaccaacatggtgaaacccagtctctactaaaatacaaaaaaattagctgggcatagtggcgggtgcctgtaatctcagctactgagggaggcagagggaggaaagagaattgcttgaacccaggaggcagaggttgcagtgagccgagatcgtcccattgcactcc

SEQ ID NO: 799830 - DNA, 593 bp, Homo sapiens
aagatgtttgttcctctcttaaataacagtccagaggtaggtgggcagcctactcgtggctagtaggtggccatgacatcctcaacttctgactcctacctatgggtccaaagtggttgccgcagttctccccatctcacagctaggaaagatctaattattttaaagacaagacttggaagtagctcccatcactccttcaatcccattggccagaatgtagtctcactcagctggaggggaggtacctaaatgtggagctgggaactcacccgtgtgaccagttgayattctattgttatggaagtaggagagaatggacatggaaaaataacagaagtctgctacactaggtatactagaatggagcttctcaaactttaatgtgcatgtaaattacctggggaccttgctgaaatgcagcttctgatacaataggcctggagtgggatctaagacaagcttttccaacaagcatccagatgctgccaatgctactggtctgtggaccacactttgagcagcaaggaactagtagactctcttgattgcaagaaacagatttcattagaccgccttacgtatcacttact

SEQ ID NO: 799831 - DNA, 633 bp, Homo sapiens
ttgcaaataatcaaggcaaatctagatgtctcagctctctcttgaccatacagtctctatttccctttgcatgaatcttccatttttctttcatcccaagctagaaaattctcaccatattttctggtccaaaatctgacagaaatactagcaactagctacttcagtgagacagggacctccctcaacaaagtgctatgattttatgggtcacctggcagtccgcaaatgagataaactttggttcagtcaataatcacataaacatgaacagcctgacttggcttcccttagcaacragcagtagatgatgcagcttaagctacaggggaagctgtaaagaaaaccgtatatagtttcagccgggcacagtggctcacgcctgtaatcccagcactttgggaggccgaggcgggcggatcacaaggtcaggagatcaagaccatcctggctaacacggtgaaaccccatctctactaaaaatacaaaaaattggccgggcattgtggcgggcgcctgcagtcccagctactcagggggctgaggcaggagaatggtgtgaacctgggaggcaaagcttgcagtgagccgagatggcgccactgcactccagcctgggcgagagagcgatac

SEQ ID NO: 799832 - DNA, 461 bp, Homo sapiens
aggaaatatcagccagaggcttcattttatcatctgtggaaatgcaagatgttagagcacctaggagggtcttaacgtgcaaaacactgtcttgaggctgcctgcagaacagagggtcatctgctttcattagattctcaagggagcctyaacaggctacacctgaaccccaggtttggggcatctctccagccctcccagctctgacatcatcatcaccattaacagctgaaatgtgtgaggtggttgggatgtaccaacaaccctcccaagagtcccatatctacctgacctcatttgaccttcacagcaacccagtgactcagctgctatttggcccacgttttacaaacctgagtcagtgtgctttacctcagtgacccaagaacccaggtgctagagtcaggcctgcatccaaatcaggggtgggatcagtggtgtgccctgaacaaatcattatc

SEQ ID NO: 799833 - DNA, 643 bp, Homo sapiens
gcccagtgtatgtgcctctgtgctgctctggtgacttttttccaatcaacacttagccacagggggccaggagctgggaatgcagtgtggatagggcagacacagtcccagcctgcatggagtggatggtctgtgggatttgcttcccataacagtaacactctggaaggaatccgtttcctttgtaggaagtgactaggggttgagagagaagatgggtaagagtggaaaaggtrggacatctgaggtaggtagctcaagggagcctctggcacttgccagaaatgtatggaggagacagccaggacctggcaccggctccacgacagtcacaggtctgaggattcccaaaggtctccagatgctttccttacagatgtccagggtcttctgtgagtgtatatgtgggcagtttgtgtgtgttggggaggggggggtgtttaggtatatgtgcacagatgagcgtgtgtggttatgtgaatatgtgcatggaatgtgcatgtataaatgtggggacatgggtaagtcatatatggtgtgtacgcaggtggggtttacatgtagaggtgtggggtatgcttgtgtgtgttgtatggggggttactgcaaaggagagaagagagtgccatttggcccaggcctc

SEQ ID NO: 799834 - DNA, 616 bp, Homo sapiens
ctggttactatgttggcttgtttgtgtggttgttttacactgacattggtctgtgtgtttaagtgtgtttttgtatttgctgatagtggtctttcccttctagatttagcgttcctctcaagatctcttgtaaggcaggtctggtggtaatgaattcccacaacatttgcttatctgaaarggatcttatttctccttcacttagaaagcttagtttggctggatatgaaattcttggttgaagacttttttttttttttaagaatgttgaatataagcccccaatctcttctggcttgtagggttttggctgagaggtcagctgttagcctgatggggttccctttgtaggtaacatgccctttctctctagctgcctttaacattctttctttaccttcgactttggaaaatctgatgattacgtgtcttggggatgaatgtcttgcgtacaatcttgtgggagttctctgtttttcctgaatttaactgttagcctctctagcaaggctggggaagtttccatggacaacatcttgaaatatgctttccaaattgtctgctttctccccctttctttcagggatgccagtgattaatagatttggcctcttta

SEQ ID NO: 799835 - DNA, 616 bp, Homo sapiens
ctggttactatgttggcttgtttgtgtggttgttttacactgacattggtctgtgtgtttaagtgtgtttttgtatttgctgatagtggtctttcccttctagatttagcgttcctctcaagatctcttgtaaggcaggtctggtggtaatgaattcccacaacatttgcttatctgaaaaggatcttatttctccttcacttagaaagcttagtttggctggatatgaaattcttggttgaagacttttttttttttttaagaatgttgaatataagcccccaatctcttctggcttgtagggttttggctgmgaggtcagctgttagcctgatggggttccctttgtaggtaacatgccctttctctctagctgcctttaacattctttctttaccttcgactttggaaaatctgatgattacgtgtcttggggatgaatgtcttgcgtacaatcttgtgggagttctctgtttttcctgaatttaactgttagcctctctagcaaggctggggaagtttccatggacaacatcttgaaatatgctttccaaattgtctgctttctccccctttctttcagggatgccagtgattaatagatttggcctcttta

SEQ ID NO: 799836 - DNA, 623 bp, Homo sapiens
agaaagttttcattattctgatgttataaagatatcttctatttttctcatggaagctttagaattttggttttctttatatttgcatttaatacatctggaatttttgtgtaaataaagtataagctgggaatattattttactgttttccataaaaacagtgattttgtctgagcaccatatatgtaatagtcaacttttctccactaatttatagtgaaaacttatccttctacaagttttataaacatggaactttttctggattttttatcctattcaatttggcctattaacctaatctaktaccagtattcactgttttaattataatagttttataagtattgaaatctggtggggcaaatatatactccatttcctttttttcttcgcctttaagtttgtcttgactgatctttgcccttcactctttcattcttcataagttctaagaaaagcacttttagatttattagaatagtattgaatttattaataaatttgggcaaaatagaaacattttctatgttgtctttctacccacaacactgtatgtatttctctccatttacttaggtttatcttcagtaaagatataagatttcctcaaaaaaaaaag

SEQ ID NO: 799837 - DNA, 607 bp, Homo sapiens
catcctactcttcaattagaaaacttcattgttatgaataggtaatttccagacaggggaaatgcagggcatactaaaagcacatgacaaaaaatctgacaaatctgaaaattctcagaaagctggggaatggacaattgtcctgcactgctgagaaagtgtaaaccgacagagtgattctgaagagaaatctgtcattatttrgtgagattgattgtatatataccagatgatgcagctatcctattttatgacatataactcagaaaaactatcacaaatccccagagggacagacatgagtatatatttatcagatcattagttagtgggctcatcagacaatctaaatggctacctgtatccatttgctagggcagcagtaacagagggtcataaactacatgggttcaatgatagaagtttattgtctccccgttctagaggctagaggtctgaaatcagagtgtcagtgggtttattctttttgagggctatgaaggagaatctgttccatgtgtctcttccagctttggtgatttgccagcaatctttggcattcggcttatagatgtgtcaccccaatctctgcctttatcttcctgtg

SEQ ID NO: 799838 - DNA, 607 bp, Homo sapiens
catcctactcttcaattagaaaacttcattgttatgaataggtaatttccagacaggggaaatgcagggcatactaaaagcacatgacaaaaaatctgacaaatctgaaaattctcagaaagctggggaatggacaattgtcctgcactgctgagaaagtgtaaaccgacagagtgattctgaagagaaatctgtcattatttagtgagattgattgtatatataccagatgatgcagctatcctattttatgacatataactcagaaaaactatcacaaatccccagagggacagacatgagtatatatttatcagatcattagttagtgggctcatcagacaatctaaatggctacctgtatccatttgctagggcagcagtaacagagggtcrtaaactacatgggttcaatgatagaagtttattgtctccccgttctagaggctagaggtctgaaatcagagtgtcagtgggtttattctttttgagggctatgaaggagaatctgttccatgtgtctcttccagctttggtgatttgccagcaatctttggcattcggcttatagatgtgtcaccccaatctctgcctttatcttcctgtg

SEQ ID NO: 799839 - DNA, 509 bp, Homo sapiens
gctgctgacctttcacaaatctcctataggtgtttggtacccgcatcagctaactttatggctcaaaccaataggacaatttgtggaggtatttgaacaccttctccagcgaatccctgatctctcaaaatttggtcgagatctaaagtttattttgctgtacaactcctctttttttggagacctacttgcttccaacaaggaaggcatgtcttcctactttcatgacratggaaggcaggtaactcctttatggagtttgagctcacttccaacatggaagaggagttttttttttccctgcttctaggatggtagataccagtctacagcctgagacccatcacaagctaagaagctggtttgggattctgtcttgcaaattcttttaaactaactaaagttagcattaacaagcagctggtgttaatttctgcttacacttagagcactcagaaatcatgcaatttgtgtgatcatttattagttttccttaactgttttgttgt

SEQ ID NO: 799840 - DNA, 488 bp, Homo sapiens
aagccagtcatgtatctccaccttgttctgtgggatagatgtttttttagctccgtcaatggagtgttgcctttccatgatattggcttatttgtgggtctccattctgatatttcactcaccttgagcttcagatttttttctctcatgtgcaggaaatgctgactccatcacttgatgatgactctggatttgggcattctgatcattcatggggcccaaggaattactttctagatagatctgtcatacatttaaaattttttttatatttttcctagtatagkgagggatttttcttaaaatcatgtctactctattgtcaaaaaggtaagacctcacttttttgcatattgggtaaattatgtctctgaactttcatttatttcctcagtaaggtgaaaaaacacatatcattaagatttttgtgaggattaaataaaagactggatataaatgccttccatgtagacatttaataaatgatg

SEQ ID NO: 799841 - DNA, 621 bp, Homo sapiens
aaagtagttaatgaaaatataatgcagaaggtgctactattatgaaggaaggaaatatctcttacggtgagtgagtatagaaactgcttgaaatagatgtcctgacccttgacttccaatcatctgtctatggggtgatccttcaaaagtgatttgacctctctgggattccatttccccatcctctacaaaatgaccattttgccagttctgcagtaaacaatggaccccattctctttcttaatgttagacagactctagtcttttaaaactccccataatttctccattctaaaagccattccaaatctataggtaagagctccatggtccttcagcagaccatctggctggcaatatattattgtcccaagttaaagagaaggtcaagagaggttaagtggcttgttcaaggtcatgcatctagttagtaggggttaaggatctggaacccagaactttttgccactttctgatgtcccmctttcaatacactgctcaaccccttcagggagagttggcttcatggctgctacaacagggtggagaaaatggaagagtagattttccctctttgactgtatgaaaatcacccacttttagaataccaaaccacccat

SEQ ID NO: 799842 - DNA, 642 bp, Homo sapiens
agctccatggtccttcagcagaccatctggctggcaatatattattgtcccaagttaaagagaaggtcaagagaggttaagtggcttgttcaaggtcatgcatctagttagtaggggttaaggatctggaacccagaactttttgccactttctgatgtcccactttcaatacactgctcaaccccttcagggagagttggcttcatggctgctacaacagggtggagaaaatggaagagtagattttccctctttgactgtatgaaaatcacccacttttagaataccaaaccacccatatatgtggtgggaatgaaagtcttgtgtgactaaatatagatgccaagtaccttacaaatatttgagtgtttgctttaggaaatgagaaatggaaaatgaaactggctataaacaraaatcaaaactgtctaaattctctctataaactaattactacttttaatatctgttttttgcaatctcaagaattcatgaatttgcttaaaataaagaatggcatgacaaaaacctcttttactgaaatggattaagttgaacagacatgctttccaatacgcttcttaatgacggcaagccttccaacatattggtctgcctatagtagctgttcaaaaaatatt

SEQ ID NO: 799843 - DNA, 628 bp, Homo sapiens
gttgaatggcagctctattttaagttcttcgagaaatctccaaactgctttccagaataactgaactaagcattttaaacagtttctaagtgttttcctttgctgtggaattggtcttacgacagagccgaggaggggggaaactgataactactatgggcatccttgaaagcagattcttaagatctgtgacttctgttttgggrgatcattagaggatgcccttacacagccacttacttttgggaattggaactttggaattgctgctgcacgtttcctggtcttgtcttgttcaggaggtgaaggagtccatggaatagaatagagcaaagggagctaagcttggaagaaatggttcaacttcctgcacttcaactgcacaggatgaagaggtttcatttgtctcacttggctggaagtacaggaagtggtgcctgacaactcatccaggtctacagttggagctctctggcaaccagagtacagaaaccagatatattgacaggtaaaacagtatgagctcctgatcatggtaaaagcttgggatatgcctgcttctgatatggctcttttgcctacagccatcaataataatttagcaaatcttgtctctgtttatactcat

SEQ ID NO: 799844 - DNA, 628 bp, Homo sapiens
gttgaatggcagctctattttaagttcttcgagaaatctccaaactgctttccagaataactgaactaagcattttaaacagtttctaagtgttttcctttgctgtggaattggtcttacgacagagccgaggaggggggaaactgataactactatgggcatccttgaaagcagattcttaagatctgtgacttctgttttgggggatcattagaggatgcccttacacagccacttacttttgggaattggaactttggaattgctgctgcacgtttcctggtcttgtcttgttcaggagktgaaggagtccatggaatagaatagagcaaagggagctaagcttggaagaaatggttcaacttcctgcacttcaactgcacaggatgaagaggtttcatttgtctcacttggctggaagtacaggaagtggtgcctgacaactcatccaggtctacagttggagctctctggcaaccagagtacagaaaccagatatattgacaggtaaaacagtatgagctcctgatcatggtaaaagcttgggatatgcctgcttctgatatggctcttttgcctacagccatcaataataatttagcaaatcttgtctctgtttatactcat

SEQ ID NO: 799845 - DNA, 614 bp, Homo sapiens
agccaccacacctggcctcatgaatttttttttttttgagacagggtgttactctgtcacccagactggagtgcagtggcatagtcatagctcactgcagtcttgaacttgggctcaagcaaatctcctacctcagcctctgagtagctgggactacgggtgcatgccaccaagcctgggggatttttttttttatttttaatagagatgaggttcctccatgttgcccacgatggtctcaaactcctgagctcaagcgatccacctgcctcggcctcccacagtgctgggtcatgatttttaattgtttaaatttttcgatacttcaatccttcattcattcattcattcattcagcrtctactatgtgccaatgaagttttaggctctggggacatggctgtgaataagacagagaagcctctacactcattgagctaacattctaatgatggtggagtgacacaataaatgtagaaataaaagatcaggtagtaatatgagccatgcagagaagtgtgacaggtgaaacaatacccaatgcttcggtagcgcatttagactgaaaggccaggggaggcctcactgacctttaagctgagatatgaatggca

SEQ ID NO: 799846 - DNA, 601 bp, Homo sapiens
atttcccattaaaaaaaatcacccaactcttttttctgatgcctttcacgtgggacttcaaaaagcttttccaaatattttcactatctgtagttctcattctaattttgtaaattaaaaaaaaaaaagagccaaataactgacccaaagttatgcagtcagttggtagtaaaagccaaataagagctcaaatttaatctagtcgttagaatctgccacagtgtcctcttcgctaagttgtactactgcctcattttatttcccttaaaaaataattgtttgcatatcagttaaactggtcacattgaaatataaaacacgccagtattatcaagaggtcctttcttaaagcaacaaaatacaatcacctttgtgctaaaaataagctataaaaataattgtgtaccttataaatttatctacaagttttagccttcattatattcattaattaaamtgccataaatcttcctttcctattgctaagatattcttaaacttgcatacaaagcaccaaaatgcacatcagccacaacacacacaaattcatcactcaatctcggtccattactcttgccaaggtcagtatagaatattcttg

SEQ ID NO: 799847 - DNA, 542 bp, Homo sapiens
atgctctgagagttccaaagggagaaaccacatttgtgtgaagacagtggcagcggaaaggggcaaagagggtgggatcagagatggctttctgcaggagcggctcagccccttgaattcattgtgaattgcacatattacgtactactaatcttccagagagggtagtcattcttcttcccttgatcaattttattgaagggatatatgggcctgtggaaagttgtggatgttgtctaattatactttcttaagaacgttccaaaccaaaaatgattaaggtgagtcattagattgaggggagcactgttttgtcrcaggcagtgaacttgttcagaatcacatgcttcattaggatacatgagccctctggagagtgggcttttctcactttcaataataatcttttattaaaagctcagggagaatatacagaaagatatccaagtttagagagaatactaaattcttctaggtaatgaaaatccaagatggtcctcataagccaagcaggaaaatctcataaggcagagcaactgggc

SEQ ID NO: 799848 - DNA, 542 bp, Homo sapiens
atgctctgagagttccaaagggagaaaccacatttgtgtgaagacagtggcagcggaaaggggcaaagagggtgggatcagagatggctttctgcaggagcggctcagccccttgaattcattgtgaattgcacatattacgtactactaatcttccagagagggtagtcattcttcttcccttgatcaattttattgaagggatatatgggcctgtggaaagttgtggatgttgtctaattatactttcttaagaacgttccaaaccaaaaatgattaaggtgagtcattagattgaggggagcactgttttgtcgmaggcagtgaacttgttcagaatcacatgcttcattaggatacatgagccctctggagagtgggcttttctcactttcaataataatcttttattaaaagctcagggagaatatacagaaagatatccaagtttagagagaatactaaattcttctaggtaatgaaaatccaagatggtcctcataagccaagcaggaaaatctcataaggcagagcaactgggc

SEQ ID NO: 799849 - DNA, 657 bp, Homo sapiens
aaagaggtattacaaatccttgtcagtgcgttcaaaaaggtttatagtccttttcatgtgaaaataattgataatataaaactattagtaaatcatggcatatcataaacagaaatgaaaggtagtctgattttcactataagtcgttggctgccatcagtcctcagggtttgaactatctagcagttctgcttaataacatcccagatagcattgcttcaaaagctccataaaaggtgaaggctgaaaaaacttcaagtaattaaatgttggactgaataaacacaactttcctgaaaaaatatttgcatgcatacttttttttctttccaagcctagttttggcctatttttcaaatttttttttgaaaaaatttttcaaattttcaagatttttttcaaatcttgagcagcagataactttccacacccaaatgaacgatctgagaacattaaaaaggggctrgatttccccatcaaagtctgagagttaaaaaaatttacttcagtgtgtctcccatgctagagtatgctggctatctattcaatgtctattctttttttcttctgcagtaatagaaaccccagttttcatcttggtacatggaagccttcaataaagtatacatttcccggatcctcagaaagcttggtgta

SEQ ID NO: 799850 - DNA, 507 bp, Homo sapiens
cactgttgatactgtcacagactatcacttgcaagaaaccagcttcacaaaaaacacctacaagaactacatcaaagattacatgaaaacaatcaaaggcaaacttgaagaacagagaccagaaaaagtaaaaccttttgmgacagaggctgcacatccttgctgattgcaaaagcttctagttctttactggtgaaaacatgaatccagatggcatggttgctctgttggactatcatgaggatagtgatcccataaatgattttctttaagggtggttcagaaatggaaaagtgttaacaaattcggcaattactttggatctatcacctgtcatcataactggctgctgcttgtcatccatacaacaccaggtcttaagacaaatggtactgatgtcatcttgagcttttcatttattttgactatggatgcatggagaggatgcattgtttttaagaaaaacgtgtaatgtaggttatctaaaaacaaaatgcatttaaactc

SEQ ID NO: 799851 - DNA, 507 bp, Homo sapiens
cactgttgatactgtcacagactatcacttgcaagaaaccagcttcacaaaaaacacctacaagaactacatcaaagattacatgaaaacaatcaaaggcaaacttgaagaacagagaccagaaaaagtaaaaccttttgagacagaggctgcacatccttgctgattgcaaaagctwctagttctttactggtgaaaacatgaatccagatggcatggttgctctgttggactatcatgaggatagtgatcccataaatgattttctttaagggtggttcagaaatggaaaagtgttaacaaattcggcaattactttggatctatcacctgtcatcataactggctgctgcttgtcatccatacaacaccaggtcttaagacaaatggtactgatgtcatcttgagcttttcatttattttgactatggatgcatggagaggatgcattgtttttaagaaaaacgtgtaatgtaggttatctaaaaacaaaatgcatttaaactc

SEQ ID NO: 799852 - DNA, 507 bp, Homo sapiens
cactgttgatactgtcacagactatcacttgcaagaaaccagcttcacaaaaaacacctacaagaactacatcaaagattacatgaaaacaatcaaaggcaaacttgaagaacagagaccagaaaaagtaaaaccttttgagacagaggctgcacatccttgctgattgcaaaagcttctagttctttactggtgaaaacatgaatccagatggcatggttgctctgttggactatcatgaggatagtgatcccataaatgattttctttaagggtggttcagaaatggaaaagkgttaacaaattcggcaattactttggatctatcacctgtcatcataactggctgctgcttgtcatccatacaacaccaggtcttaagacaaatggtactgatgtcatcttgagcttttcatttattttgactatggatgcatggagaggatgcattgtttttaagaaaaacgtgtaatgtaggttatctaaaaacaaaatgcatttaaactc

SEQ ID NO: 799853 - DNA, 621 bp, Homo sapiens
aaggaacttgttgcaaatcttgttagtcaaaagtgtggtccatggaccagcatcagagtccagtccagtctacttaatcagaatctgcatttgaacaaaatccccacgtgattatttttacttattttataattattttcactttttattctttctctttagcttttatttagtctttacacttagctataacttggggactgtggcagtggggttccatgttattcttttcagcagttaggcagcttatcttaatcaggagggaaaaaactactagatcacatagtattgctcctccccatagcattcacaaagaagcaggcattaaggtggaattcaatacaaccttctttagcactatgatgttataaaccacactctcttcttcctcttgcatgctatagaatgacttctctgtcttcacaaccctgctggatattgagaagtcartcataattccactattttatcccacactgacatgttttttttctcttccagccagtatatatcttgataataggtactgaatcctttttaactaataatgaaaataataacttggtcactaatttctgaaatttcgaatacatgcaaaaaaaaaaaaaaaaaaaaaacctt

SEQ ID NO: 799854 - DNA, 558 bp, Homo sapiens
acgaagcaatctctttttgtgttgggattattacagtctctaatccatcctgctatcccacgctgttgtctaccgcttggctgattactgcttgcctgataaaatgtatttgtctaatgggaagatcacctgtatctagaccaaggtgtttgccccaaggcagggaagctgtcatggttctctgcttacttatgaaagttcaatttttattttcctctggaattctattcatcaaagcttctttactcattttaagccccacagaaaatgttataaccatgggaataaaggcctttcttgtgctccatctgaaccttcargaacagaattcttcttcagaaatttttagttatattggactactctttgaagtcttttgactgtttaccaaccagtcttatacagaaagattaatatttacctaccttctattctatatctaggcctttttaaaattttgaacaaatatttttagagaggggctctcgctctgtcgcccaggttgaagtgcagtggcctgatcatagctaattgcagcctcaaactcctgggctcaag

SEQ ID NO: 799855 - DNA, 365 bp, Homo sapiens
ggcgtgatttcactgtttttcatggctacatagtatttcatgtaaacccattcttatcagaaaactaacacctgagtttaaggctttctgtggggatcctgatctggttggaagctctctaacaggatgtccctgccccttcyacactgaacccctagacaacacctccatcagtgtgcaaatctgtgtctgtcctctcaatctctcccccactgtaaggcaggctcacagcatcactgccttctctagactttaggagaaatcagattctcttagactttaggagaaaccagatctacatccaggtgaagcaatgccatctgcattttcttccttcttttcttgttttaattggtatatcattg

SEQ ID NO: 799856 - DNA, 640 bp, Homo sapiens
ttcaaactcctgggctcaaaagatcctactgccttggccccccaaagtactgggattacaggcatgagccactgcaccagctaggaaaaaattcttaagcacgatgcctagtagaatattctatagaggctaagggaaaaagaatggaagaatatcaatgtttgattgggatcccttcctggcttcaccctgtttctgggccttgcttctctgccttgagtccccaccatccattctcccgagaggaccccctccttcagttcttcacagtgcgcctcaccacacaattaaaaaacctctcatgccctggcccctgcagccattcttcaattgaggtacaacttgcatatactaaaccaatcttaagggtccagacgggtgartttttacagtgtagcccatttccccaggacattttggaggtcccactaattcatagcctcacatttcccaaagcatggtgtatgtggtccagctaataagcagagcttgggcacagtagactctggtgggttctggcttctgagtcaagcgaaatagtgcagggtgtactgtgcaccccatgggcgagttccttcccgggtccctatcagtgtgggggtgaagatgtgcttcctccatcttcctggggcctgctggt

SEQ ID NO: 799857 - DNA, 606 bp, Homo sapiens
agaaacctgattgtaaggtgttattcatggtgccagcctacaaatattgggtgccagttcagtcattcatctgataattttagtatcagttgataattttagacaagctactttttgtcatctctgtacctctcttacttgactataagatgcctctctgaggctgggcacagtggcttatgtctgtaatcccagcacttgggaggtggaggcaggtggatcacctgaggtcaggagtttgagaccagcctgaccaacatgctgaaaccctgtctctactaaaaatacagaaattagccaggcgtcgtggtgtattcctgtaatctcagctactcaggaggcttagggaggagaatcrcttgaacctgggaggcagaggttgcagtgagccaagattgtgccattgtactccagcatgggtgacagagcaaaactccgactcaaaaaataaataaataaataaataaataaaataaaaatgcctctctgagaaaaggagaggattgttaatacagctcatcaggcaccatgcaaatagtagtttgtaaaaacgtattagtcttgggagaaaccacacacacgaatagtgtgcaagctgactaggtg

SEQ ID NO: 799858 - DNA, 624 bp, Homo sapiens
gtatttttgctttgccttgtttgggcacatagtttgatttaagaaaggagttgaattaagctcaggttttgatcttagcctgagaaggttagagttcagatggaacagccactgttatttgaaaggattatgttgcaattttagtaccactacaggattcatatgcagaaaagttctgataattttgaagtagtatacatagtttcatattttaaagagtgatacacactgaattgtgttattttgtgaggaatctggacttttagtcaaatatttctaatatttctaatttcattttttgtgtatacatatttattaaattgaaaattttgtcatatacatgaatttgaaattatatatatatgaacatatacatacatatgtatgtgcatttgtgtatgacttgaaatgaatttgtgtattttagggcaatctcatgtgctttccatgccatgarggcattactgttctgttctttgaaattttctgaatattcttttctgcagacaaaatgggattgaggaaaatactctagacaaagtacaataaagcattttagagactaattataatttagtccagtaaaaggtagaaaatagataactacaaataatcctaaaacct

SEQ ID NO: 799859 - DNA, 512 bp, Homo sapiens
ccgtaataataaaaacgcttgcatctcagcatgcacagcagcggacagccgggcagattcatgacagaacaatcattttattttccacttattcagccacatcaggatcatcctgcttagttcagtgtggcactttttacaggagatattcacaaattggcatgtatccaaaggagttgataagatgatgattctgaatattataatttataagagatgcaagagagaatcaggcatcttggagtaggaactgaggtgaaaatgataacattttcaaacagtaaaggtaaaagaggaaatatgtttattattcakataatgcttcaaatgtattgtcatttttataaacattttctttcttgatttttttaaacaactctatgaggaatgtaagataaatgctactaggctaattttagagattaaaagagtttgtatagtaaagtcaccctgatgtagtcacagttacgatgccagaggatgggaataagttgaagtggacccgaaaccca

SEQ ID NO: 799860 - DNA, 588 bp, Homo sapiens
cggccttgaactaaattatcttaattgtcccttccatctctataaatctatgagtctctaacttgatgacaatttcccaaagttaaccaaagttatgcaattggttttcactcttgcaatcatttctaactaaaagactaatcaatataaaaagtacaatttaaagcaatctgccagatttaaggaagaaatagaagtgacatttactgagggccaatcttatgtcaagtactggaataaccactttatataagagatatatatagatagatagatagatagatagatagatagatagatagatagatakatggcaagaaccacctcaggtaagaatcatcatcatcatcaccatcaccatttcatagagaagaaatacttagagaagttaagtctctatctaaatatagttaattagtaaatagccaagataggagtcaaacccagtttatttcccaaagtcatgcacagaacctgggcactttactggctatagcattctgctttgaagtgtacactgttttgcttcacactcttcatactcttcaagtcatttaagttttctgagctttatttatattcattatt

SEQ ID NO: 799861 - DNA, 654 bp, Homo sapiens
tagctaaagcacacaaggcatgataaatacttggagctgaatctggaaaactctacagttgagaagcccttggtatctcatgctaatgttatagaactctatcctgaagaaacgagggagtcctttgagaattttaagcataatatatttatgtaataagaaagtcccatcagaagcactgaggaggcacaactgggacaagggragtaggtggctctgtgtagaagtaggacaaagtgattggcatctagcagtacacacagcctcccacaaagtcaaagaaagaatcaacaattgggatagaggagcagttggatctgagagatatttggaggatgggtgggcaagacagaaaggattttggtggttgaacagatattgagataccattggctgtgcctccagggtttctgatttggctgatagaatggatggtgactgcttccattattgggaaactagtctacagaaagaggggacgattgtgacgagagcctcaattccatcaggagcatgtcatttttgagttgcctgtgacgtttagttcacatggaaaaatgttactactattaaatatgtaaggtaagacctggtgctacttttggttgatatgtatttgttggaaaggcagagttgcaaacagataacttgaat

SEQ ID NO: 799862 - DNA, 593 bp, Homo sapiens
tcatactcttaactcagtgttctttaaaccaaggattggccttcctgggccaagtaggttaccatcatgtctccactgtgaccttttgaggggccctccacctggttggaactttctttctctttttttttttttttttttttttttttgagatggagtctctctctgtcacctaggctgtaatacagtggcatgacctcggctcactgaaacctccgcctcccargttcaagcgattctcctgcctcagcctcctgagtagctgggattacaggcgcccgccaccacgcctggctaatttttgtgtgtatagtagagatggggtttcaccgtgttggccaagctggtctcgaactccagacctcaagtgatcctcccaccttgtcctcccaaagtgctaagattacaggggtgagccaccgtgcccagtcagaactttatttctttaatcccgagactgcagtctgtgttaagtacatccccgtcagagaaattagggtatttaatctatttaatgccagattttaacccttggtcacagctgagttgcagatgaccataacagtcacaggtggcagtcctcacagggccct

SEQ ID NO: 799863 - DNA, 637 bp, Homo sapiens
aggagagtcatgaagacttgggacgtaatgagagtgtataaccgaaaaaatctaatggaacctgggcttctctggagtgttagggaccaattgaaaaatagacacagaaatcaaatatgtttcaatatgtcagccttgttgctgatattggttcagagaaagtggcttggacccaaaggcaaaatgacttccaactcctgctcatcacagattacatttagccactcagtcgaaacagagatgctacaccattagtgctccctgggctgggcttgttgcctgaagaaagtagaaatccagaacaggtgtagcttgtgggtggttggtaacacmagagaaagccagagatggagatttgcacactcactcatccttatcccgaagttttcaaccagctaagttacttcccctgtggagggaagccagtaaagaacagagaaagcaattgaatgaaaaatatcctcctcctgtgggaggagagagtgccaccgtttgttagaaatgtgaggcacgggaaatacgcgtgtagctagggagaaatcaacctctaagccgacccctagaaagtatacaagaactgacatgaggggtggagctgcagactgtggctcttccaggcatcagaaacacactagat

SEQ ID NO: 799864 - DNA, 602 bp, Homo sapiens
gcccacattgacaagaaatgccccttcactgggaatgtctccattcgagggtgggtcctctctggcgtggtgaccaagacgaagatgcagaggatcattgtcatctgccgagactgcactacatctgcaagtacaaccgcttcaagaagggccacaagaacatgtccgtacaactgtccccctgcttcagggacgtccagatcagtgacatcgtcacagtgggcgagtgccagcccctgagcaagacggtgcgcttcgatgtgctcaaggtcaccaaggccgccagcaccaagaagcagttccaggagctctgaggctggacatcagcctgctccccacaacgaaataaatttattttctcattcccaggcaaaaaaccacaaaaaacaaaaaacraaaaacaaaaccatcagatctcatgagacttactcactaccacgagatcagtatgggggaaaccgtccctatgattcaattatctcccactggagccctcctataacacgagggtattacgtgagctgtaattcaagatgagatttgggtggggacacagccaaaccatatcaaagtgatacactgtttaacttaatccattgtaa

SEQ ID NO: 799865 - DNA, 634 bp, Homo sapiens
aaaatacattatacgttacagcatatggaagaaaaaaatgcacacaatgatggcttttcttgttaactttgtactataaatatattcatcattcactttgtatataatcccaggccacttttgaaccccaggctggctggcttccttgctacacaggatgcctttgtatcattcactggtgggagtttaatcagttaaaaattatttaaaggctatcctaaacaaaacaaatttctaaaggcaagtctaccatccttaagaatcacatgccttcaaataccagatgttggagttaatctgtggggttgaaggctgcattactttggataattaaaagatacactcgtttcatctgtgggctttttaagatttaccatttaaaataacccaactaaacatgtgacttccagatgagtaaattctactaaagaaagatttaatatgaacctatgayattcagaaccccttcttcaatgatggaagtcttcaggggtatcaattgtgctaaaatgttgtacaatattagtaaatagaagttgttttattcaaaatgagaggataagacttctaaatatttgaatgctaatattctcacttgtattacattgcttaaattggagtttgtagaaattcg

SEQ ID NO: 799866 - DNA, 634 bp, Homo sapiens
aaaatacattatacgttacagcatatggaagaaaaaaatgcacacaatgatggcttttcttgttaactttgtactataaatatattcatcattcactttgtatataatcccaggccacttttgaaccccaggctggctggcttccttgctacacaggatgcctttgtatcattcactggtgggagtttaatcagttaaaaattatttaaaggctatcctaaacaaaacaaatttctaaaggcaagtctaccatccttaagaatcacatgccttcaaataccagatgttggagttaatctgtggggttgaaggctgcattactttggataattaaaagatacactcgtttcatctgtgggctttttaagatttaccatttaaaataacccaactaaacatgtgacttccagatgagtaaattctactaaagaaagatttaatatgaacctatgatattcagaaccccttcttcaatgatggaagtcttcaggggtatcaattgtgctaaaatgttgtacaatattagtaaatagaagttgwtttattcaaaatgagaggataagacttctaaatatttgaatgctaatattctcacttgtattacattgcttaaattggagtttgtagaaattcg

SEQ ID NO: 799867 - DNA, 498 bp, Homo sapiens
tataagtaggaaagtttgagcagacaaaaagcatcaatctgaagttaaaaaaaatgcatcaacctggagaaatagtcatttttcaaatggcattgcttatcttgggacaacaaaagcatccttcacaaataaagtcagagagtggttttaatttaccatttaccaatagatttgtatgttcttttcaagagaaggggtgagatagacatagtcctsgttttcctcaatgcaggcttaggtacaaagagatgtcacttacccagagtccatatattgaagtgaaaatggaatttcatgaagcaaatatagttataggatggtaactctggacaaattttataaaagatgaactccaattgcttcatttcacagataacagctctgagcactagggagagagggagggattggcctagcatttgctttgtgtcttgagcagtcacatctattatggaagtactcactactcagctatactcactccctgagacaggatgg

SEQ ID NO: 799868 - DNA, 576 bp, Homo sapiens
ctggggctaggaccaggaaatctttacaggagtcttcctcccacatcatctgggcttctcaatatgtttcagaatcgctcccctctgtctgctccatcagcctctgctgctgcccctcatctcttctcatcctaagactgcacttctcctgctttttccacccagttggttgagtctcccatctcagtagatccatggctcctctctctcctccctcagtggatgctctgatccagtgatatgctagtaaatggcaataaactctcctcatttgtagtgtttgccaatctctatagttaattacacccaccatggcctatttgaatcttgcmctgtgacatcgctgagcatggatttaggaagagatgggcagtagcacatcgttgtacagattttccaccatgcagacacaatagaggcaagtaacctcaagagaaaaggtagacaaataattaggaagtgatgagttctgaggatacatgacctttacttttaacctaatttgtttaattgcaagtctatatgatttaattgttattgatgactgtcttcacaaccagctcagaacaattgtga

SEQ ID NO: 799869 - DNA, 525 bp, Homo sapiens
aagcccaacataaatacgtaatagttctaaaaatatgtgcaaatatatattcgtatatattggtatgtataacagttgtatgtataatagttgttatggagagcttataacagttcatctcaaaagaatgattcctgacctatcratggctctaaaaactttacatttgaatgtttacatagtataaactatcataactgtgctcactgacgagtaataactattttctttttgacaaaatcaggatattgaagtgagaaattttaggtagcatctctactctgatcacatggctgtagaggcactaaatatgtggacctcttgcctcaatggcttaaataattacactaaaatatgcatactcacccaaccagtcatcttttaaaattattttacaatttggagtttcagattatttgtgaactttagctccagcccatgtttgggttgctctctctctctctctttcagtagatataggagcactatgaataattatttgtgattaattacttcataaatgaa

SEQ ID NO: 799870 - DNA, 565 bp, Homo sapiens
acagaacaagacgggatttctacaatgcttttccatacaatgtctagaatctatagataacataaccggttaggtcaggggtcaatttttaaccaggcccagggtgtggcgccgggctgtcagcctgtggatttcatttctgccttttagtttttacttcttctttctttggaggcagaaattgggcataagacaatatgaggtgtagtctccattattcccccacctttgaraacctcactcattagtgggagttctcactttcatcctcactacccatgtcttcttacaagacagatcgatagtgattcatgtagtacacttgtgctgaagtattttgatggactaaggtagtaacaaaactttttattacttgaaggagtaaacgcagcacacagggaagcaacaagcaggttcctattactattataatttttattataggagttttaaatcctcctactgctggaaaccattttccaaacatggacctaggattaaacctatgccactcctgcatgggcacatgtgccagctttgttatatgtttaactacatctttaac

SEQ ID NO: 799871 - DNA, 660 bp, Homo sapiens
caccaaaatattgactcaaatcctgcagctatttgatttcaagctttaaattgatctggtattccccatgggactccaattgcatctaaatagatatgagagtcgaaagacccataaggggcttctctcgctttatgatgtcttattttctctccctctggttgatgaaatgccagggtgraagggacggccaattggactaaagcaaaagtgacactccagttattcagcagagtgcccagtaaaggtttaccacaataccaccacacatccgctgggggatgaacaagggctgactgattgataagctcttgaaaattctcaagctcactgcatcctttcaggtctccaaggaatgctaagtttcctccctgtcgtgagagacacaaagcaaacttagtgttgggagacagaagctggatggccctcggggactgacctgcagggtgccagacttcgggatatagcagagaaagcttggcatgacttattactccaggctgtacaatcctggaaaagaactaacatgcagcccacacctggtcaacaggaggaccaccttagtggaaaggggaaaatctgggtctctggcctgccatgtgcacaagcataacaattgcttttgtttaacatgtggacagaatatttgatccattccaa

SEQ ID NO: 799872 - DNA, 616 bp, Homo sapiens
taaaaaagagtatcttctgttacacaaggcctgttctctctttacatcttcagacttaaattctgtagaaggtaacagctttgtattaagacagaagcttagtggtcacaaacaaaaaataacactgaaatacaattcrgaaattaatgatactgtgtgtctcaaagaatacctgaactatacattcactaataatttggcaatgagattccatgctgttcaacttttgtcttttatactcacacgtagaaaaaaaattcatgatttaccccaaggttattattaaatatcattttgtgatatgaactttagtaatagaaattaataacatttcccataccaacagaaagtaagttgctagaataaaggaatcatttttcccatcaggcctgggtttgtttggttttctttactattttatcaaggacagaaaggtaaaagtatttcagttacttttctattctgactgaggaggacacaagcaaaaactttaaatacatttccatgctcataagcatcttgatttcatgtactattgagaaaatgaccaacaaaaactttaagaacagcctgaaatctgctggaaacttccctcatcccattattaggatgacca

SEQ ID NO: 799873 - DNA, 616 bp, Homo sapiens
taaaaaagagtatcttctgttacacaaggcctgttctctctttacatcttcagacttaaattctgtagaaggtaacagctttgtattaagacagaagcttagtggtcacaaacaaaaaataacactgaaatacaattcagaaattaatgatactgtgtgtctcaaagaatacctgaactatacattcactaataatttggcaatgagattccatgctgttcaacttttgtcttttatactcacacgtagaaaaaaaattcatgatttaccccaaggttattattaaatatcattttgtgatatgaactttagtaatagaaattaataacatttcccataccaacagaaagtaagttgctagaataaaggaatcatttttcccatcargcctgggtttgtttggttttctttactattttatcaaggacagaaaggtaaaagtatttcagttacttttctattctgactgaggaggacacaagcaaaaactttaaatacatttccatgctcataagcatcttgatttcatgtactattgagaaaatgaccaacaaaaactttaagaacagcctgaaatctgctggaaacttccctcatcccattattaggatgacca

SEQ ID NO: 799874 - DNA, 620 bp, Homo sapiens
tatatgcacctaacactggagctctttagtttataagacaattagtaataggcctaagaaatgagatagtaagacaataatagtgggggacttcaatactccactgacagcattagacaggtcatcaagacaaagtcaacaaagaaacagtgaatttaaactataccctggaacaaatggagttaacaaatacttatacaacattctacacaaccaccacagaatatacattctattcaacagtgcatgttctttctccaagatagaccatatgataggccacaaagtgaacctcagtaaatttaagaaaattgaaattatatcaagcactctctcacaccacagcgaaataaaactggaaatcaactccaaaaggagccttgaaaaccatgcaaatacrtggaaattaaataacttactcctgaatgatcattgggtcagaaatgaaatcaagatggaaattaaaaaattcttcttactgaacgacaatagtgacacacctttcaaaacctctgggatagcaaaggcagtgctaagaggaaagttaataacctaacttttaacttaaaagtcaacttaaaagttaaaagttgatgcctacatcaaagactgtgaaagag

SEQ ID NO: 799875 - DNA, 620 bp, Homo sapiens
tatatgcacctaacactggagctctttagtttataagacaattagtaataggcctaagaaatgagatagtaagacaataatagtgggggacttcaatactccactgacagcattagacaggtcatcaagacaaagtcaacaaagaaacagtgaatttaaactataccctggaacaaatggagttaacaaatacttatacaacattctacacaaccaccacagaatatacattctattcaacagtgcatgttctttctccaagatagaccatatgataggccacaaagtgaacctcagtaaatttaagaaaattgaaattatatcaagcactctctcacaccacagcgaaataaaactggaaatcaactccaaaaggagccttgaaaaccatgcaaatacgtggaaattaaataacttactcctgaatgatcaytgggtcagaaatgaaatcaagatggaaattaaaaaattcttcttactgaacgacaatagtgacacacctttcaaaacctctgggatagcaaaggcagtgctaagaggaaagttaataacctaacttttaacttaaaagtcaacttaaaagttaaaagttgatgcctacatcaaagactgtgaaagag

SEQ ID NO: 799876 - DNA, 628 bp, Homo sapiens
aatttacattgaattgctcccccattcccagatcagagcacttattgccactccagcttccccccttaaaggtagttttatgaaatgttgtaggagaaggaaatagcatcccttataatagactacacctcaatccttgaattgtggaggtgagagcatcaaaaaagctgattgccatacctttcccactggtgacgtgctaaagaactcacttttgtttctcattcaaaacccgaaagtggcaaatatgttcagctcgttggtccagtttaatctctcgttcagatcttagtagtattagcccattctataggaattatttgaatagccagcttcattttaagacatcttcttatataactgaacaattaattatacacagacatagtccactcccttcatattgatcttgtttctsaatattaaattattggtatgcatttattgttaacacaacattgctatggcttatatcagttttggaaaccagctggaggtagtgtaagcaaaagggcggattggtgacatgatagcgaggtatctcaggcaatccgagggcaagaagagagccaggcttatggaaggccctaactggaacgtggaaagccattaggatcctagcagttct

SEQ ID NO: 799877 - DNA, 628 bp, Homo sapiens
aatttacattgaattgctcccccattcccagatcagagcacttattgccactccagcttccccccttaaaggtagttttatgaaatgttgtaggagaaggaaatagcatcccttataatagactacacctcaatccttgaattgtggaggtgagagcatcaaaaaagctgattgccatacctttcccactggtgacgtgctaaagaactcacttttgtttctcattcaaaacccgaaagtggcaaatatgttcagctcgttggtccagtttaatctctcgttcagatcttagtagtattagcccattctataggaattatttgaatagccagcttcattttaagacatcttcttatataactgaacaattaattatacacagacatagtccactcccttcatattgatcttgtttctgaatrttaaattattggtatgcatttattgttaacacaacattgctatggcttatatcagttttggaaaccagctggaggtagtgtaagcaaaagggcggattggtgacatgatagcgaggtatctcaggcaatccgagggcaagaagagagccaggcttatggaaggccctaactggaacgtggaaagccattaggatcctagcagttct

SEQ ID NO: 799878 - DNA, 544 bp, Homo sapiens
acatgacaatgatgcttcttgggaattttcagaaagccctgagaattttgtccactgaaatcaaatccatctttcaaatttcaattgaaagatgattttcaactttcagaggtctctgctctaagaaataaatatggtattatgttgtgtattggtcagaatggttgaaggagagagtctatagaacagctgtagaagacgtgactgaaaaggaaaaccaaggtcacrttgaagaagacttgactgtaaggcctgttaacgtaatatcagacttaagttgtgcagtatgaatttttccagaagctcatgaagccagcagtgctaaggcccatgttggagtccaatcttccttttctatatgtagttgattgtgaagacaaaaatcaataggcagtttaggtggttcttgttaaaactaaattgaaatgattgactttcttctggaacatgcagattccagaaatctctgggcctcattatggacagataaatatttactcttaaagttttatagcatagaaaaaagcagatgcaatccaaacat

SEQ ID NO: 799879 - DNA, 602 bp, Homo sapiens
gaaactttgctgaagttgctaatcagcttaagaaaatttggggttgaaatggagttttcacttatataattacacaatatttcatgatcaatgtaagaaaacagaaaatatgatgggcaaacagaagaaaaacaatactcacaggctcagaacagtaacaaagtcactcttaatgttttgctgcagaactttccagatgtttgtttctctgcatatataaacgtgtttattcagaaaattttaaagaatatcatatatttcatatatttttgaaacaacttttttcrgttaataatacacttatcaagaaaaataaacctctgacttctaataatagtggaatagctctatcactctaagacttatgcaggtaacaattatataatgtagcaaaacattcataggattatttttgcaggcactggagaatagcaagtattagaaactggagtgaagactacctgtcttagtctgcttcagctaccataacaaaatcccaaagactgagtggcttaaaaatagacttttatttctcacagtgctggaggctgagaagcccaagttcaaggtggattttattctgaggcttcttcttttggctt

SEQ ID NO: 799880 - DNA, 602 bp, Homo sapiens
gaaactttgctgaagttgctaatcagcttaagaaaatttggggttgaaatggagttttcacttatataattacacaatatttcatgatcaatgtaagaaaacagaaaatatgatgggcaaacagaagaaaaacaatactcacaggctcagaacagtaacaaagtcactcttaatgttttgctgcagaactttccagatgtttgtttctctgcatatataaacgtgtttattcagaaaattttaaagaatatcatatatttcatatatttttgaaacaacttttttcagttaataatacacttatcaagaaaaataaacctctgacttctaataatagtggaatagctctatcactctaagacttatgcaggtaacaattatataatgtagcaaaacattcataggaytatttttgcaggcactggagaatagcaagtattagaaactggagtgaagactacctgtcttagtctgcttcagctaccataacaaaatcccaaagactgagtggcttaaaaatagacttttatttctcacagtgctggaggctgagaagcccaagttcaaggtggattttattctgaggcttcttcttttggctt

SEQ ID NO: 799881 - DNA, 640 bp, Homo sapiens
taggcaggttgttatcatggagacagagcatataaacatggaaatttatatgtgttataaagtcactagagaccagtgtgaaagaggttctctatacaatatatgatgctgaaacaactgcttttctatgaaagaaagagagagagagagagacaaaggtaggaaaagaggaaaaaagaaagcaaaggaaaggaaaagggaaagggaaaggagaggagaggaaaggaaaagaggaaaaaaggaagggcagtcacggtggttcatgcctacaatcctagcacttttggaggctgatgcaggtggatcactggagcccacctgagtaacatggcaaaaccccgtctctacaaaaaatacaaaagttagccgggtgggcaacagagagagactctgtctcaaaaaaataaataaataaaaaataaaaaataaaawaaaataaaataaaaaagtagccaggtgtggtggcagatgcctgtaattctagctattcaggaggctgaggtaagatgatcacctgagccctggagtttgaggctgtagtgagctgtgatcatgccactgcactccagtctgggtgaccgtgaggacctgtctcaaaaaaaaaaaagaaagaaagaaaaacggggtccctacctcacag

SEQ ID NO: 799882 - DNA, 416 bp, Homo sapiens
aggatccttaagaacaattcttcttccaaatcggcattattttatttccaatatatatgactcttctgagagatgtattttttgtaaatatcagatgctcttgctagctagtgcacagagttgctctcagctggttctaatcattgktcttttattcccctttaacactttcctgtccctcccatgtctcaagttaccatacccagctaaatatctaagcatcgcttaagaaacccattttcctcacctgtaaaacgaaaatttcaggctaagcaatgcttaagaggctttcctagctttaaatttctgcaattacatctcattggtaccattgcaagtgtgtccaaaaatagcatccaccttttactccctgcttcgattgtgacactacaacattctgttataaacaccatttg

SEQ ID NO: 799883 - DNA, 658 bp, Homo sapiens
ttttttaacgtgtctagcgtcacaaattttctcactagatgatatgcaaatatttctctaaattactcttcaattttatttctggcctaatacttcagttacaattacagagacaatgcaaaaccactcaaaatttagggatattgctcgtctggtataagtctccacatgttacacttcttgtcacctttcttccttttttccacattctgctttggccttaatgattcctgcgtgaaacgagagaagtggaggtaattccacttgaaaataaatatgctgccttatcttatcctggatacttatgtagtttacaggtataattattcttctacacaaaaagatcactcctctcctcctcataaatgaaggcaatagattttacttgcaagagtcacaagatcacccttctcctaacttcctaacatcctgtcgaccagcaaaaatttttttgccatttcatttccttgtactaaagctaatcatagtggtttgtcctgtttyatgtttaaattgttatcttctaaagtcatcaattattttttaacaaaacaacaaaaagtcggtattctcacctttttatacactgtaatcaatgctgttagagacacatgaaatttgcagaattccaaacacaatgttgcctttttattggcaa

SEQ ID NO: 799884 - DNA, 619 bp, Homo sapiens
agttacttgtactactacataataatcctttatcaagaacctggaaatgccttggatatctttccaaatcctggtgtataagtagtcatggcctctctttccatacctaatactatttactcatccctttcttctttttccttatcaatctcaacagaggcttatctatcatattagtcttcataaaataccaaccgtttactctggtgatcagtgctaktgtaggtttgttttctattctttaatttctgttcttatgtttattttctccccctttccacttctttgaatttattctgttgaaaatactaattttgcagctaattcattttgagctatcattaacactcactatacatagtgataggaatccttttctgtctttacttcacaaatttaatctaaactatttttattattaataaagatgaaagtattttaaaattcatatgataatgtctcctaccacaagttgtttatttgtgtattccaaattctcaacttatgatttttttaaatgttacatttggtactaatttttacttaattgcaatatggtcattgcatacccatttttaataatttattgacttgttctatgtaaacggtcatttgaaaa

SEQ ID NO: 799885 - DNA, 527 bp, Homo sapiens
gatgggaaagcataggggtctccgggacagtgagggggccagcctgttcccacatgccagatgctgagggacccaaagatgacaaagttctaggagataaaacatgaatcaaataaaatgccgagaaggaaatgtagacaacttccagggggtgctcagaagggcaagagtgccttcacctggagtccttagagaaagcttcaccttcaggtgaggttagaagtgaagtatgcaggtggcaggacctgcccacatggtggcctggagsgaggaaagtacaagtatgttcagcaaggaaaagagatctgtttcagccaggtgcactgtctcagcactgtgccaggcaagcacagagattacatgtagaatcggacgttatggaagactcttgaacgtcatgatcatttcagctatgggtgagagttcagcctggtgtaatggcaattccatcaaggccctggatcactgggcagatcaaaagatctaagactcaaagggtgtcacgcagagcagactccaggcccctg

SEQ ID NO: 799886 - DNA, 619 bp, Homo sapiens
cacacagacaggcctcaccccttcctggtgccccaagtctctcctaacattttattagctgagttttctggcggtttgttacttttcacctgcccgtccaaggcagctacactaaactacttgtccagggcagatccactcgtaatgaccatcagctcagagttggaagtagcgctggagaatgaggtggtttcaggttgctatgcttccctgccctctcttccagggatgccaagtaagtttctgccrtggctgatgatgtcagtactacactgaaattagttcaacggcaggccaccaattagtacttactgaacaacgtccttaagagtgaaaccctgtctctactaaaaatacaaaaatttagctgggtgtgttggtgagcacctataatctcagctactggggggctgaggcaggagaattgtttgaacccaggaggcagagattgcagtgagccaagattgcaccattgcactccagcctgggcaaaaagaacgagactccatctcaaaaataaaaaaaaaagaaaaagaaaaagaaaaagaaaaaaatgattctcacgacactgtcaacatcttaagttcttccggagggtagcgtaaaattatcacacaca

SEQ ID NO: 799887 - DNA, 378 bp, Homo sapiens
gaatcttcagagcagcctcagtcttaaaattcaagcttctttttcctactttttatttcagtgatatttaggacactctatatttcataagagttatgatctaactggctctataagcccaagtataaaaatccttaccacctagcaagagacccacagaactagtcagtagtaagactgaggtcacatattggaaaaaatatactagaccagggttatacacagggaccatccagcrataaagatgttgctggcaagtaaccatagtggtgggtgaccactagcgaaaagggctgaagagacctcagaaggttatccgggttatctgggtagacctatgtctttttccatgcccgagggtcacgacgtcactatgca

SEQ ID NO: 799888 - DNA, 378 bp, Homo sapiens
gaatcttcagagcagcctcagtcttaaaattcaagcttctttttcctactttttatttcagtgatatttaggacactctatatttcataagagttatgatctaactggctctataagcccaagtataaaaatccttaccacctagcaagagacccacagaactagtcagtagtaagactgaggtcacatattggaaaaaatatactagaccagggttatacacagggaccatccagcaataragatgttgctggcaagtaaccatagtggtgggtgaccactagcgaaaagggctgaagagacctcagaaggttatccgggttatctgggtagacctatgtctttttccatgcccgagggtcacgacgtcactatgca

SEQ ID NO: 799889 - DNA, 506 bp, Homo sapiens
agacgacagtctgatttaggccggaggcgtgacagcagggcctcccagggctagcagtgcatcggtgggctgcagtggccatcggggctggggccttacaccttccaccatgtgtcaaaatgagtttaggtctggccgggtgagctcccatctgrgtctgtcgtgacgacagctcggggtatgttggctgctttccagagacataccagaggcgccttaatctccctgacacgtcttcccagctcgctggaagctgggcccttccgggaaggttttctgtgggcaacaaatgcagctgatccagctgggtgtggattcctgcgagctttagtcaccgaggggctgtcctgacctcgctgagggctagtcctttcccacatttgcctcagaggatgggagaaagtgactctgtggtggcaactcagacacacgccttcctttttcccttccagtcccccgtctaaatctgtcacttaatggaaatgaggcctgggcgcccataagcc

SEQ ID NO: 799890 - DNA, 598 bp, Homo sapiens
ctcctcccctggttcctggcaaccattattctaccttctgtgtctatgaatttgactactccaggtatctcacgtgaataagaggaatcgcacaatatttgtcttttgtgacttgtctatttcatttagcataatgccctcaagactcatctctgttgtagcatatgtcagaatttccttccttttgaaagtgggataattttccattgtatgtrggtaccatgttctgtttatccagagtgaattttaaagacatgtattaggctcagtttactccacaaaaaaatgacataggaaagaagcaaatggataaactgtaatgtgattatacagtgatttgaacaaaccaactggaaaaagatgtatttgagacaatggagcaattcgaactagaattggagatttgttaaggaaatattttaagaaatagtcattttttgcttttgtgataagactattgtggctaggtttttaaaaaactttttatcttctagggatacctgctgaagtattaatgaataagtcactacctggaatttgattactctagaaaatctacgtgcatgtagggagaaatcaggtgaaataagatgggcaa

SEQ ID NO: 799891 - DNA, 627 bp, Homo sapiens
ggcactttgtaattcaatcttttaaaactgagacttgtggactaacatgttttattctgaagaatgttccatgtgaacctgagatatcttggaatgtctttttccacttgctatggtttgaatgtgtgccctccaaaattcagatatttaaacttaatggccaacatgatggtattaagaggtgggacttttaagaggtggttaagtcttttttttttttttttttttgaggcggagtcttgctctgtcgcccaggctggagtgcagtggcgcaatctcggcttactgcaagctccgcctcccaggttcacgccattctcccatctcagcctcccaagtagctgggactacaggcgcccgccagcacggccggctaatcttgtttttgtatttttagtaragaccgcgtttcaccgtgtctctactaggaccaggatggtctctatctcctgaccttgtgatccacccgcctcggccttccaaagtgctgggattacaggcgtgagccactgcgcccagccagtaagaggtggttaagtcttgagggctcctcccctcatgaatgagattaggtgcccttaacttagggcctgatgaggaatttcattcctttttgcccttttacct

SEQ ID NO: 799892 - DNA, 627 bp, Homo sapiens
ggcactttgtaattcaatcttttaaaactgagacttgtggactaacatgttttattctgaagaatgttccatgtgaacctgagatatcttggaatgtctttttccacttgctatggtttgaatgtgtgccctccaaaattcagatatttaaacttaatggccaacatgatggtattaagaggtgggacttttaagaggtggttaagtcttttttttttttttttttttgaggcggagtcttgctctgtcgcccaggctggagtgcagtggcgcaatctcggcttactgcaagctccgcctcccaggttcacgccattctcccatctcagcctcccaagtagctgggactacaggcgcccgccagcacggccggctaatcttgtttttgtatttttagtaaagaccgcgtttcaccgtgtctctactaggaccaggatggtctctatctcctgaccttgtgatccacccgcctsggccttccaaagtgctgggattacaggcgtgagccactgcgcccagccagtaagaggtggttaagtcttgagggctcctcccctcatgaatgagattaggtgcccttaacttagggcctgatgaggaatttcattcctttttgcccttttacct

SEQ ID NO: 799893 - DNA, 560 bp, Homo sapiens
ctgaggcagaggcatgcttggtatactggagaaaacagggagggagggtagaatggtgggaaaagaatgagaaagcagggctgagcgcggtggctcacgcctgtaatcccagcactttgggaggctgaggtgggtggatcacgaggtcaagagatggagaccatcctggccaacatggtgaaaccccgtctctactaaaaatacaaaaattagctgggtgtggtggcacgtgcctgtagtcccagctacacagaaggctgaggcagaagcaatgctatgaacctgggaggcagaggttgcagtgagccaagatcatcccactgcactccagcctggcgacagtgagaatcagtctcaaacaaaaacaaaaacaaaaacaaaaaaagagcaaataaagaagtcagtggataagmagccagaagtaacaggcagtttacatatggcctagtggatcatggctataactttggcttttattcaagattggaatattatctgactttttaagggattactgcactgtatgagacagcaaacaatgtggaagcaggcatagaagg

SEQ ID NO: 799894 - DNA, 619 bp, Homo sapiens
aacaatacacgagttgtttcttggaccagtcataccagaggcagcactattaactgggcaaaagaaacacaaacaagaacctaaaggcaatggagaacaagaaaaaagtagccaaacactggagaagagccaatgcttagaagaaaggaacagcactggggttctcagtttccagcttttcgtcagagggcaggccccattccatgtcctgggccgcggctaaaattcagatagatcctatactgtktaactgcgttggagaaccaaaggacacagcagctgcaaaaggagggtgttatctcagaaaggagtgagcagtagaggagagctccaggccctgtgcatgaactctgcccaaacctctggccgacttctgtagggaaggctctgagcagcccattacaggctgaaaaaactgggcagcgagttctgctgctgcccaccacagtaaagaagacagagtttgcagtctgaatcaagccaaaataactacttgcttaaaaataaaacttttcagaggcataatggaatccagattctctacaagtgtcacgtacaatgtcaagtacaatccagtattaccaggccatcttgatttgattgacactgtacccagtaa

SEQ ID NO: 799895 - DNA, 430 bp, Homo sapiens
tgggtatgctaaaagcctagactttaccactacacagtatattcatgtaacaaaagtgcacttctaccctctaaatctataaaataaaaattaaaatgaaagaaatgaattaaggatcagaaacttgctttgcatcgcatggttggtgagtgatgatgacaccaggaatcagatccaggacttcccagctccatagcccatgctttttacacttacattgcaaagcccacttcaaccaaatttctytgattcctcacatcctcttctcgcacaatttataccccaaaataagccaacctttcctggatgaactcttagccatggcttcctcaggctaaagttttgaagcatggcaggttagcagagccaaaagatagttgggttttgctttaagtgttttctcaagttgttaaaactggctctcaaattg

SEQ ID NO: 799896 - DNA, 625 bp, Homo sapiens
cctgatcctcattttcactgcatggtctcattctctccacaaagtagcctttgagcccaccagccacagaatgtgatataaagatcacccctgcttattccagaatgaacagcctgagacacatatcccttcagtagttggtcttgtgaatgcagtgtcctagtgcaaatgcccatcatctgttgaccccatccttgcccctgcctgccccatgctgtggatatctgggccccctcatcacccatcctggccccctgaccagtgaggatgccccctcccatctagggtactctgcgtctaaggatgaattccagtgtaattttctctcttctgtaggtttatttatggaagattggacctgttcatacatctgtggggcagccctccatctcccagctatataaagtctctaaccacagtgttgcattgtggggttaccatgtggtctgacacttccttgcatgaactaccctcactccagccctgracagtccagggcctagcaggcagtgtgtggggcctaccaggtcctggcatccaagctgtgtccaataaagttcttagatgtgactggaaaaaaaattggattaaaaaaaagcttcagaagttacagagccaactacag

SEQ ID NO: 799897 - DNA, 638 bp, Homo sapiens
gcctggatgaccatccccaaggaaaatgggaaatgcatagcccatggatcagggtgatatggtttggctctgtgtccccacccaaatctcatgtcaaattgactcccaatgttgaggagggacctagtaggaggtgactggaccatgggggtggatttccttttgctgtactcacaatagtgagctctcatgagtactagttgtttaaaagtatgtagcacwtcccccctttgctgtctctctcctgctttgccatgtgaaatttgtgcctgcttcccctttgccttctgccatgattgtaagtttccagaggcctcacagccatgcttgctgtatagcctgcggaactgtgagtcaactcagcctcttttctttataaattacccagtctcaggtagttttttatagcagtgtgagaacaaactaacacatggggcaaccacagctttttttgtaagagaatgtgctcacctggacaacttagacagctttgtggtcatatactgatccctctccatggatcaaacctctcaaaatgtcaaacttcccaaaatgtcagattaaagatctgctgaaattttctggaaattttataattattgggcacaaaagaattctaaaaatgcacaaatctatgc

SEQ ID NO: 799898 - DNA, 641 bp, Homo sapiens
ccacgttcaaatataggtcagaaaattattgaggctttatttactctctcttttcagggctgctggctgacatacacccccttctgctgaaaggtgttaaagaaatatgcccagagcatagtaggccctcattgcattctcattgacttgatgtcagagaaaaaaaaaattagcattttcaaaatttgctgttgaaaatttgagacccaaaaaagtgtatatagatcaagttgttgttttacagagcaatggtgaggggagggcagaatgctgtaagcatcaaaccacatgcggtcaattcatctataatgatggttaccaatttttacggacttccttctgcctccacaggcactgcttcatgtgatatgcacaaaactctgtgagttgttcactttcccttcccctcgttcattcatccatccaacaaatatttactgagcatctgctatgtgcccatgcgtgggaacagcacaytgatggagacaaactgacccacggccacacggagcattatcttggctcaaagagctgcaggctgtgatcttaggcctcttccagctccctgttggtggttatatgatccgcaagctaagaatggtttttacattttttgatggttgaagaaagatcaaagaaga

SEQ ID NO: 799899 - DNA, 619 bp, Homo sapiens
aggcttcactggcatcaaaccctgaggtcttgaccctatgctatgccaccttcctcagcagatcccaggcagcttgcaggcagtcaagggcttcctgagacccagaagtcttgctcttattccttcagcactcactcacccttgctctgtgcaggacagtgtattgggttctgaatgtggcccctagagacagagtgaactctgccctggggctttcctgccacaggaatgggaggggtggtgctgtgtcctctggtcccttgcttgatcccggcacatagtaggcgttcaataaatgcacatgggctgggctccgtggctcacgcctataatcccagcagtttgggaggccaaggcaggcagatcacttgaggttaggagtttgagaccagcctggccaacatagcaaaaccctgtctctgctgaaaatacaaaaaaattagctggccctgatggcaaacacctrtagtcccagctactcaggaggctgaggtgggagaatcgcttgaacctgggaagcagaggttgcagtgagctgagatcacaccactgcactccagcctgggcaacagagcaagactccaactcaaaaaaaaaaaaagcatgttggataaataag

SEQ ID NO: 799900 - DNA, 673 bp, Homo sapiens
ctgcttgctgcccttttccagacttccagattggagaggcacctggatcccgagaaccccagcctccttgcacctgggggtcttggcttaggggcaggtgctcagggcagggcactgggatggttcctcattcttagatgcatctgccgtcgtttcgtggggaagagactagcacaacccccagtgcccacttgcagcgcttccgggggtcccaggatggccctctaagcccacggcctccacagtggccactcatacgatgatccccctgagtatgggcagaaattggtagctatttttatctcatccagtttcatttctatttttgggatgtgtgtttcataatgtatgtaatctatcgatacagaagcatgtgagtagcacgtatgcatggatatgtatgtctttggcagatacatgcttaaaagtcgatcgccaggcaagcgcataactaaaacaggatagtagctgctggaaatgaggttctggggtgtaaagggaaggggrtgtcatcgggggtccaggaaaggctgtgccatggggaatgcaccttacgaggcagagcaggcagactgggagtgtagggttgggcacgagctgggcagacagcaggatctgagcacttgtctgtgcttggggagcagctggccactccagtgcaccaggatgcaag

SEQ ID NO: 799901 - DNA, 609 bp, Homo sapiens
cgcttcctgtgtgtagacaggacgcaccatctctgtattgactctgtagcaatcttgagggtgcaacgtgcgatctcattactgcttttcttttatgacctttcgtctacatgggaggctgagcttttttctctacaagtatactgactgactgcattgactttttatttgcattgtctgttccagtcctctggctatttgactattgtgtaataaaaggaccaaaaacaaatgtgccaaactgttgacagtttgagtgttgaaaatatgtgactcttttgtacrtgtttgaattacagattttcaaaatttaaaaaagccttggccagacgaggtggctgatgcctataaatcccagcactttgggaggccaaggtgggaggattgcttgaggccagaagtttgagaatagcctgggcaacatagtgagaccccacctctaccaaaaaaaaaaaaaaatctcaatgagagcgttttaggaagatttgtttgagtgggctgagatctaagggacttggagactcttgcagtggccttgcaagtgatgacttaaacagtgagagtgaaggtgggattcagcaactatgggggcagcaatttacaatgttt

SEQ ID NO: 799902 - DNA, 621 bp, Homo sapiens
gactgagttcccagccctggtcccctgtgaccttccatggtccaattaaagaggctggcatcagccaaagtgaaatgagtgggagggaccgggatggaagaacctgccagtctgtgccacacctcccaggccacgctcaaggggttggggacrgtcctgctatggaggatctgctccaaggggtgcctcattgcaaagctgtctgtgaaatttctgcctctcccagagggtcctgtagggagctcagacagaacattccagagcattcttagggtgcctgaaggatgtactgaaatcagggccccatcaccacctcaggaaggtgggatgcttcggaaaccaggcacccccctccgctgcactcgaggcagaataggctcgggctgagcaggagggatcaggctgccgagcaaaggcctgtgggccagtgccaggaccctgaacccgccggggcaagctgaactctggcgggaggcaggctgctaaccagtaagcaagttgtaaaaacccaattcagacacaacatctggcagctgcttcaaatagttctctgtctgaagttggagtcgctcgcagccctcctgtaaatcaaaccgtgtgcacagaggagacctgtgccga

SEQ ID NO: 799903 - DNA, 628 bp, Homo sapiens
atgctaaatgacaagttaatgggtgcagcacaccagcatgtcacatgtatacacacgtaactaacctgcagattgtgcacatgtaccctaatacttaaagtataataataataaaataaaaaataaataaacaaataataataataaaaataaaatattggttgatgraccgatggccctttagtacaaagaaaagaactacatttttttctaagtatataataaaaatatttatttgacaaaaaaaagaaaagaaatctctctacagttatttattaatttcaaagggggaaaacagtaactttaagtggataatctggaagacaccagcttaagccatgtgccttctgacacaatgcactgagacagatacaatattgcttctgtaatgttcctactactgaaaataaatgaccctaatcattaggtgacaccaacctaacttaaatttaaggactttctacaaaataacaggctgtactcttttaaatatgccagcatccttcaagacaaagaaaggtaaccccagattaagagaaattgaaaagacatgacagcaaaatgcgatgtgtgatctcagtttggatggtggaaaggatggactattgtttagataacaataacatgt

SEQ ID NO: 799904 - DNA, 655 bp, Homo sapiens
cccacatccctggccctggcctgagcagagatgtccagacacttccccaggcacctgcaacccaacactcctccctgtcctttcaacacggtttggctgggagtatagggaggctcccagcaaagtcaccatgactggcacgagtaaccttacctgcatgttccaggacagcactaaccccttcaacaaatgcagtttgttgtatttttcaaaggagaacaaattttmctggtggtggagattgcatttttcatgtgcgtttttgctggtatagaaataatacatataggttgcaaaaagaaacttggatgaaatagaaatatacgaagaaggaagtatcatcactcctgtacagcgttgaatagtgctcccccatgatttatgtccatccagaacctgtgaaagtaacctgtgaatggaaataggattattgcagatgtatcaaattaacatgaaccctgaatccagtattactggcgttcttacgagaagaggaaaatttggacacaggcacacaggcagaatgccaggtgatgacagaggcaaagaatggaatactgcagctacaaaccaaggagcaccagggattgccgcaaaccaccaaaagctaggaagaagcaaggaaggatcctcccctggaggcttcagagggaat

SEQ ID NO: 799905 - DNA, 415 bp, Homo sapiens
tcatatggatgtactataatctacttactgcttaaggatgagcttgctgaatagtgaaaaaaagagaataaaatcaaataaacttattgttgccagtccttcacgtaacgaatagtgctgcaatgaataactttgtgcatctttgtacagttatttaagcctgtaattttataaatatagaatttctgagagagaatccgtatttttcattttaaacaaatattgccaagttgttcctgaaagtatataccaatttatacyccacttatagcaaatcttactgggcactttatcaatcaaataggcaaaaaatatctcactaaaatctcatttctgatcaaactggcgaaaaagtgctttattttacattttttaaattatggaagaatatttttatttgcctgttggcgatttg

SEQ ID NO: 799906 - DNA, 627 bp, Homo sapiens
gttaattcaggtgtatccttaaaactagaatataactaaagaaaaacaacttatttatactgaaatgtattttttaaaacaaaacaaaacaaaaaaccctgggctaatagaagagtacggtgcttgactcaagtctaaaagaacaacaacaacaaaaaaaaacagaaaaatggatcagtactgctacaacgaatgaaggactatacagaccagccaaaacaagttttcagcttccctttgataagagaatttcagaaaacttctggcagtggcagtttctagaattaagtgtaacttaatataattaagtatattaatgtattcttaagtatataagaagaatgacaacttcaaartataaaactcataggaatgtagatgtttcaacatggattacttttgaaagggcttattagttttaagcctttaagcattaatatttaagaattagctttaaggcttatgtagctctgaatataatttggtttgtgactttgggcaagtcacttacctctctgggcctctaattcctgcctgtaaactgaggaggttagattgtttctgagcgcagatgatctgtaggctctcctgtaagtctcatatttggttgtatgacttcaccatctc

SEQ ID NO: 799907 - DNA, 615 bp, Homo sapiens
aacatctgatagaatctctcatgactttgtccaaatctagtcatagttctggggactatgaccacagcaaatctcaggctttctcaaggtcccagatcctcaaagacttctgctgggctggactagccaataccaacaagaaggacagtgataatagtaatggtagaagtagcagtaacagtcataacagctattaacagaaatcagggcacaaaacgagtagccctacgatgaggagccataattccaaacttcacagacaacagtggggctgatgctgatatttataacccaattagtccacagtccagcttaacttcagtaaatgtatcttctgtgcaatacgtatttttaaacattgacattctccctcacttttttatacctttgggctttcaactgacagtaaacatttcaaaatactacatagtgctacagcaacccatcaatggtttactttcagmaccattaccatctttgtctgtacaacattaatttgagtagtttattgcattataatcctattgtttaagaagaaaatgaaaacaaagggcaggtgccagtgatgcaaaacacagatttcataaacttattctaattgagttcaagacagaa

SEQ ID NO: 799908 - DNA, 599 bp, Homo sapiens
atagttaacaacaatttattgtatgttttaaaatagttagaagatttggaatgttcccaacacaaaaaaatgataaatgtttgaggtgatgtatattgcaattacctagatttgatcattacacattgtatgtttgtattataaaaaaatcacgtgtaccccataaatatgtatgactatgatatatccataaaaataataataaatttttaaaaagtatttgtagtttgtctaaagttcaaatttaattagatgctctgttttttacctgagcattctaaggggaaaccttagatggtgctgtggtacaagaaaggcctctttaaagggataaataagcatagaaccaaagaataaggactcagtaattattggccaatagaagagtggtggaaaaaggtttgcaaacagaaagaatagcctgtgtaaaactccttaargtaagaaagagcttgccacatttaagacatggaaagaatgtgagtggctaagttgagtaaggaatatcatagcctggaatgggatcagagaggtatagatagggtcagaccaaggagagagtattctctcttaaagcagtggtttaatttttttaaggt

SEQ ID NO: 799909 - DNA, 388 bp, Homo sapiens
taattttattttttaaacagatgaagaatcattttaagagagattaagttagttaccaaagcttgcagtgctaattggcagcaaagttgggtctcagacagaggtcttttattagtccagcctgagtttgcaccccagccactgaaaaccatctgtctgttctaggttcccgcctcatcatgaccartaaagttatccggtgaagacgcttaatctcccctagtaagagtctgaaatgatgatattaacttgagctcctgacttgatgttagcaaagtttccttgatcaaacaggacaggctcttcccccaacaacactcttgatgcgtagagagcctgcattcctgctgcacttgtttagcaactagcagagctgtgactccaaatt

SEQ ID NO: 799910 - DNA, 636 bp, Homo sapiens
tatgctgtattttcttaaatagattacctgtatttaaaatgtttcatttatacctcaaagggatcttaccaataatctctacttgagagaactgcattcttaaaaaatagttttgattatttgactgctaggaaattatagatgtcagggacaactttaaataaaggggcaaacaaatgcttaacatgattttcagagctctaagttcatcttcctgtctcaaaatatatcctttatctccaatgatgtccgaaatgtcttgcagaagtcgtggtagctattaaagattaaattattttggaatttcattttatattttagaacaaaatactttatggagaggttcaaggtagttgattagatgtagctgggatgcacctcttccataaagaggagccaaaacattgwgtaaaacatacttcaaacacatcttttgagagggaacactgaaattcaatagggaggtgatggaagacactgtgattgaagaaggaaaaaacagggctgcctacttaacatcgctgggtgccgggaccagccctcagacccagacccaggcccaaggaaggggtaagtgaaggaaccccaggataccacattcctgctgctggcccctgggatcctagctacaagaga

SEQ ID NO: 799911 - DNA, 631 bp, Homo sapiens
ggcttatcatagcttccgccccacgctgggtactaaatatttattcattgttgaatgaatccatgaatgaatggatcaattccattctttcagagtcctggtctctcaatgcatttcttttctcagtttgtatgctgcttaaaggatcttgagtctgaggcatcaaccaaagcaacagtgggattttcagaaaggaatggttgtaggctgttgggaagaactgcaagaagccaggtttccacaatccatttctcttcatttctggctttagtgccttcatcaatgcacagacagatgtctgaagatgtcagagtttagcttattaacaaatgagctacacaaacttcctcagtattcatactcaagggggagaagtcaaatttgggccctggagttacatgcagctctgaagtgggtgcctctgcctacgaatcagtcactcacggggtcctttatgcaatscctgatggttgctatgatcttacagcaggccctttattttcctttttggtcttaaactcctctgccaagtacaacaccatgccttcctcaaaatcatagtaaggtatacccaagtcaaatgaggctgattttagaaggaagaggttattggcacttttgtcaccattgg

SEQ ID NO: 799912 - DNA, 572 bp, Homo sapiens
tataaaatcagctaaaaatttaagagaatgagtgaacaactactaaggctgcttaaaatattaccaaaaatgtccccagaaatcaaaaaatgagaagaggatgtagcaaggggggaaatgtgatagtgattttggaaaaggaaagaccctgaagttaccgaccaagtaataacattaaaccagcaggaaaaaaaaatctrttcttgacttagatgataatgaagtcccactatatgtagaaagctcttatgaaggaaagcgttgtcaattgattgctcttctggcaaatctgtgaactctgaaggtacatttgcagtgatgcaaaacacttctcatgaaatgttgctaaaatgatttccgttactttagtaagaagctgttcaacattctttaagtattacttgtatgattacacagggaaatttcaacagagaagaattatgtagtatagagtacaattgtaagtctcaaattattgacttggcaaaaataatctataattaagattccttagcgaattactatttttgtgcagttttataaaggaaaatgactaagctagggacccctcc

SEQ ID NO: 799913 - DNA, 572 bp, Homo sapiens
tataaaatcagctaaaaatttaagagaatgagtgaacaactactaaggctgcttaaaatattaccaaaaatgtccccagaaatcaaaaaatgagaagaggatgtagcaaggggggaaatgtgatagtgattttggaaaaggaaagaccctgaagttaccgaccaagtaataacattaaaccagcaggaaaaaaaaatctgttcttkacttagatgataatgaagtcccactatatgtagaaagctcttatgaaggaaagcgttgtcaattgattgctcttctggcaaatctgtgaactctgaaggtacatttgcagtgatgcaaaacacttctcatgaaatgttgctaaaatgatttccgttactttagtaagaagctgttcaacattctttaagtattacttgtatgattacacagggaaatttcaacagagaagaattatgtagtatagagtacaattgtaagtctcaaattattgacttggcaaaaataatctataattaagattccttagcgaattactatttttgtgcagttttataaaggaaaatgactaagctagggacccctcc

SEQ ID NO: 799914 - DNA, 656 bp, Homo sapiens
tgcgtgcactcagtatttgtttgttaactttaactgaatataaacaattaggtcctatggaagaaagttatgaccactactgaccattttgaaaataccagaacattttataaaatcagctaaaaatttaagagaatgagtgaacaactactaaggctgcttaaaatattaccaaaaatgtccccagaaatcaaaaaatgagaagaggatgtagcaaggggggaaatgtgatagtgattttggaaaaggaaagaccctgaagttaccgaccaagtaataacattaaaccagcaggaaaaaaaaatctgttcttgacttagatgataatgaagtcccactatatgtagaaagctcttatgaaggaaagcgttgtcaattgattgctcttctggcaaatctgtgaactctgaaggtacatttgcagtgatgcaaaacacttctcatgaaatgttgctaaaatgatttcygttactttagtaagaagctgttcaacattctttaagtattacttgtatgattacacagggaaatttcaacagagaagaattatgtagtatagagtacaattgtaagtctcaaattattgacttggcaaaaataatctataattaagattccttagcgaattactatttttgtgcagttttataaaggaa

SEQ ID NO: 799915 - DNA, 656 bp, Homo sapiens
tgcgtgcactcagtatttgtttgttaactttaactgaatataaacaattaggtcctatggaagaaagttatgaccactactgaccattttgaaaataccagaacattttataaaatcagctaaaaatttaagagaatgagtgaacaactactaaggctgcttaaaatattaccaaaaatgtccccagaaatcaaaaaatgagaagaggatgtagcaaggggggaaatgtgatagtgattttggaaaaggaaagaccctgaagttaccgaccaagtaataacattaaaccagcaggaaaaaaaaatctgttcttgacttagatgataatgaagtcccactatatgtagaaagctcttatgaaggaaagcgttgtcaattgattgctcttctggcaaatctgtgaactctgaaggtacatttgcagtgatgcaaaacacttctcatgaaatgttgctaaaatgatttcckttactttagtaagaagctgttcaacattctttaagtattacttgtatgattacacagggaaatttcaacagagaagaattatgtagtatagagtacaattgtaagtctcaaattattgacttggcaaaaataatctataattaagattccttagcgaattactatttttgtgcagttttataaaggaa

SEQ ID NO: 799916 - DNA, 582 bp, Homo sapiens
agctcctacgatgacatctagctactgatggagctacccaggtggagcagtgatttcaccagacatgagaaactcacctctgccattcttacaggtactcttataccttctggagtccttcacagtaccctggttgccagatgcaagtaattgatacaaaactataacacatttctaatgcttattgcaagacagtcagtcaaagaccaattccccaggagcatcctacaactcgctgaagttgcaagactgttggagatctrcccctagagttgtaataacatgaagttagacatggttctgcatatattccaggactccatatttatattgaatgactaaaagtaaagctgtttaaaaaattaaaaatgttgtggtacatcttgctctttttccatttaaaaaaattaaagcataatttgcatatagcaaaatttaccctttttaaagtagttatgtgagtttgacaaacacacacaatcatgtaaccaccaccacgatcaagatatagaacagctgcatcacccctaaaattctctcatactcctttgcagttaactcctccaacccctggcgtctgac

SEQ ID NO: 799917 - DNA, 602 bp, Homo sapiens
gagggtgcgggcaggtgtgtgtagggtagatgtctataccaacaggcatggactagcttggagataaagggtatggaataatcttgagcccccccaagtttgcatttgaagagggtagggcagggaaggaacaggaagatatccaactgtggatagcctcagggggttcacagcggggccagacacagagagccggactcactccatggcgctggctaagatgaagaatgaatttgtcaacaaaacaaaacaaaacaggagccttccaagtgcctccccactccgtccccactcctcttctttttagtgcttctcatttccagarattagattttacaggccaaaagctttgttctttcatggaggaccaggaactcacactaatacgaagatttgcttatggaccaagagctcgccacatgccaggaactgggccaagggctttaacgcattatcttgtttcattctcacaactcaagggaagtgagcgatgcatcccttgttgaaggaaattgaggcttagattaggtcagcacattcgtcagaagggtgtttcggctgcagtctccccagggaaagattttctttcagttcttctcaat

SEQ ID NO: 799918 - DNA, 610 bp, Homo sapiens
catttaaaattcacagatattaacttcaagtggatcctcagtgctatccagctttccttccacatttcctgagtcaccttctcatgattttcacaccttcccttctcagacctctgatacctcctttctcctcatcctcattctcagctggtgagctcgctgcttctttcactataaaaatggcagcaacaagaagagaacgcccatattctcccatgaccaacttacctgcatctgcatttctgtctgcataagctctgccttctcttcccttgtggtaaatgaacactcctgcccctgtcttagggcagccccttcactcgagcagyggctctcattttctttcactcaccaaaggactcgattcttgcagttttttcctggtcctttctggcatcattaattttgtctccaccttactaaagcaatgccattggcatataaacaactaaaatatctcccatcttaaaaaaataaaaagcaacaacaacaaaaataaaacctgtcccttgattctgcttccctgtcctggccagtatcctatttttctgctttcctttatagacaacttgaaagagttgcctatcgttgctgtgtccacttcctcttc

SEQ ID NO: 799919 - DNA, 624 bp, Homo sapiens
ttcacagatattaacttcaagtggatcctcagtgctatccagctttccttccacatttcctgagtcaccttctcatgattttcacaccttcccttctcagacctctgatacctcctttctcctcatcctcattctcagctggtgagctcgctgcttctttcactataaaaatggcagcaacaagaagagaacgcccatattctcccatgaccaacttacctgcatctgcatttctgtctgcataagctctgccttctcttcccttgtggtaaatgaacactcctgcccctgtcttagggcagccccttcactcgagcagcggctctcattttctttcactcaccaaaggactcgattsttgcagttttttcctggtcctttctggcatcattaattttgtctccaccttactaaagcaatgccattggcatataaacaactaaaatatctcccatcttaaaaaaataaaaagcaacaacaacaaaaataaaacctgtcccttgattctgcttccctgtcctggccagtatcctatttttctgctttcctttatagacaacttgaaagagttgcctatcgttgctgtgtccacttcctcttcttcaatttttcttatatccacta

SEQ ID NO: 799920 - DNA, 603 bp, Homo sapiens
cgggattgcagactgagtctcgctcactcagtgctcaatgttgcccaggctggagtgcagtggcgtgatctcggctcgctacaaccttcacctcccagccgcctgccttggcctcccaaagtgccgagattgcagcctctgcccggccgccaccccgtctgggaagtgaggagcgtctctgcccggccacccatcgtctgagatgtggggagcgcctctgccccgccacccatcgtctgggatgtggggagcgcctctgccccgccacgaccccgtctgggaactgaggagtgtctctgcccgaccgccaccccgtctgggaggtgaggagcgtctctgcccggccgccctgtctgagaagtgaggagcccctccgcccggcagccaccccatctgggaagtgaggagagtctccgcccggcagccgccccgtccgggaggtggggggcaactccgccyggccgacgccccgtctgggaggtggggggcgcctctgcccggctgccaccccgtctgggaggtgtacccaacagctcattgagaacgggccaggatgacgatggcggttttgtcgaatagaaaagggggaaatgtggggaaaag

SEQ ID NO: 799921 - DNA, 644 bp, Homo sapiens
tcaagtgctacagcagctccccaagggagatagggaaaaagtaaaccatcaggagaaaatcaaaacactggttaatatgtcaaaatataatcccaacccagaagtttccatcttaataatgcttttaccatttcctggcacttctccactcatatctcttttgagcttagccatctttttttttttttttttttttgagacagastctcactttgttgcctgggttggagtaagtggtgcgatctcagctcactgcaacctccgtctccagggtacaagcgattctcctgcctcagcctcccgagtagctgggattacaggcgcccgccactatgcccagcgaattttttgtatttttagtagagatggggtttcaccatgttggccaagctggtctcgaactcctgacctcgtgattcacctgctttggcctcccaaagtgctgggataacaggcgtgagccaccgcacccagccgaacttagccattttatggactgagaaggacagagatctttgtccttactttgcagaagttgaaatcaaggcactaagtgattctgcaatctcagcatattccacaataggcatatgaaggctgtcagtgatttgagggagaggaagaagacaggctggaagtatttc

SEQ ID NO: 799922 - DNA, 671 bp, Homo sapiens
ttagctaaaacctaatcccaagcttgtgcaaaatattacttgttttgcatgtctagtgtttgctgaacactacaaagcttacagagtttcctgtcaggcctatgtatatgctataatgaaagtaaaatatttaaatctttagctgtatggtgaagtgtcttcttgaattaactggtggraatcccattaagatatttcacacattcataaaaagatgaaaattaggtttgagccatttgatattctgacatgtggtattttgcttgcagataagatccttttaattcaagtcttcaaacctctcagacagaatgaaagactaatatctgaaatttcttatctatccttatcttaaattttagatttttttggagaattagagaaaaacattcagactaatagctttagtaagcaggattcatcattctcttccttgactccttggttgacggggcatttaccaccagctgcaagaataaaagggaattttatccataaaatatggaaagttagactgtaacactgattactgacaatttaataaggattttttcctcatgcatctgatgtatgactccggaaggaatgggttacactgttgaagaaaacacactggacaaattacaggagtctctttattcttcatttcctaatcatggattcatctgtga

SEQ ID NO: 799923 - DNA, 671 bp, Homo sapiens
ttagctaaaacctaatcccaagcttgtgcaaaatattacttgttttgcatgtctagtgtttgctgaacactacaaagcttacagagtttcctgtcaggcctatgtatatgctataatgaaagtaaaatatttaaatctttagctgtatggtgaagtgtcttcttgaattaactggtggaaatcccattaagatatttcacacattcataaaaagatgaaaattaggtttgagccatttgatattctgacatgtggtattttgcttgcagataagatccttttaattcaagtcttcaaacctctcagacagaatgaaagactaatatctgaaatttcttatctatccttatcttaaattttagatttttttggagaattagagaaaaacattcagactaatagctttagtragcaggattcatcattctcttccttgactccttggttgacggggcatttaccaccagctgcaagaataaaagggaattttatccataaaatatggaaagttagactgtaacactgattactgacaatttaataaggattttttcctcatgcatctgatgtatgactccggaaggaatgggttacactgttgaagaaaacacactggacaaattacaggagtctctttattcttcatttcctaatcatggattcatctgtga

SEQ ID NO: 799924 - DNA, 590 bp, Homo sapiens
gtatttgagagtcttttgattggcacccaagcaacatttgctattttcactttaggttattctaaattagcaacacctgcatggaattattttactagaaaattggaacaaatgaatgaggaacaaaaataatagtataaaatttatagtagttattaatgtattgacctgcttggtgcatgcataactgattataatgtttgcaattatttgaagccattgtttaaccaccaatcctatcctattaaggaattgaaaaactaattagggacatcagcaaacagaaagagaatctgagtcctggccttggtcccaaattgctcttcatttttatggttttctgggttttattctttyctaggcagttaaatttctatgctagatacaagaattttctcaatgactacctccatttaactaagtaatttgataatgtaaaatgttttctgaatataccgctccactattgcacttctgtcgctcccatccttttatttctttggcagcaaacttaataatacatgagacatttattctaagtacttttagacatgatgatattgaccactcctagataacccaaatcccaa

SEQ ID NO: 799925 - DNA, 464 bp, Homo sapiens
ctggccttggtcccaaattgctcttcatttttatggttttctgggttttattctttcctaggcagttaaatttctatgctagatacaagaattttctcaatgactacctccatttaactaagtaatttgataatgtaaaatgttttctgaatataccgctccactattgcacttctgtcgctcccatccttttatttctttggcagcaaacttaataatacatgagacatttattytaagtacttttagacatgatgatattgaccactcctagataacccaaatcccaaaggtcaaatttaaacttggatctcattaaaaatgttttatctacctgtctgttaaaaatataacacacatgaagaaaatattacagtttacaggaatatcaattgtaatatattgagccaaagcaaattttattgtgcaagtgagattaaaagccaaaaatacagttatgaaca

SEQ ID NO: 799926 - DNA, 654 bp, Homo sapiens
acaaggttgctggatagaatcaatgcttttagaagactgattccttgatgaagaggttatagtgtaatggttccatggcagtatcactgggaaaatttttgcatttgttcagccacagtgtttaactttgaagtgaacatggatttttatgcttactttaagtcttgtttcaagttataataccaaagaacagatatctctggattctaagttatttgtattttttstccacagccctgggagtgtatcttatgaagttcagaataagttagctttttcagtaatttctttctaaggttgtctctggcttttagattccctttagatttacatttcactctccttagcccccagcccaacttggtataattccttcctttacgtttccttgtcatggacatgagataaaataaatgacctcttcaccctccttcacttccattttctttcttggcttctatcattctaattccactatctcattcttctatatattcgtgatgacagagttcaaataatgggaagacaggtatttggccatgtaaaggctctctttcttgtattagaagtgcctttgaggttgacacttcaagtcaaagctctgtagtcttttgatattgaataacaaattgaaaagaggtcaaaggataaaaa

SEQ ID NO: 799927 - DNA, 609 bp, Homo sapiens
cgagagatcagctgttagtctgatgggcttccctttgtaggtaatcgatctttctctctggctgaccttaagattttttgctttgtttcaactttggtgtatctgacaattatgtgtcttgcagttgctcttcttgagaagtgtttttgtggcattctctgtatttcctgaatttgaatgttggcctgcctcgctaggttggggaagttcttctggatgttatcctgaagagtgttttccaacttagttgcattctccctgtcactttcaggtacaccaatcaggcgtagatttggtcttttcacatagtcccatatttcttggaggctttgtttgtgtctttttactcttttttctctaaactaaacttctcttctcacttcatktcgttcattttatcttccatcactgataccctttcttccatttgatcaaatctgctactgaagcttgtgtatgcatcacgtagttctcatgccatggttttcagctccatcaggtcatttaaggacttctctacactgtttattctagttagccattcatctactgtgttttccaggtttttagcttctttgcgatgggttcgaacatcctcctttagctcgg

SEQ ID NO: 799928 - DNA, 640 bp, Homo sapiens
tcagggctttttgatgaagataattgtttcttcacagcatggtggctggttttctatagcgtcttccaatagaccgaagaagaagctgcaatttttttttaacatagcctgaaaattcattgtgtcacttccaccacattctattgatcaaaccagtcaccgaggccagctcagactccagggaaggggaattagatttcacctctaaataggaagtgaagtaagaatttttagcaatctttgacctaccattatataaatgcaagtaataataatttcttaatgtagtctataktttttgtgcataaagtgaacttcaggcaatcattagttagaatgattatttttactaaaaatgaatgctaatataaacatccctactcggtcatcaaaatggtataaaatataatcacattcttatagttgtgaggaattggctaatacttgatattaaccttagggattatgttatccacataaaaacggcagaagtttaaatgataagatttatagaataaaagaaaaaagaggcacatttgtgatgttgggatttttgccttcttttgaatggccttgaaaattaaacttttcacacctcaggtgggggttttccagtgattgaatattcatgtaaaattcc

SEQ ID NO: 799929 - DNA, 558 bp, Homo sapiens
ttcagatggttagcccactagccaagcttgtcctcattacccaagaatcaatatatacccatactgcaggccaacaatttttccatgtgtctataatcaagtgtactgcttgcagttctgccttctggaaaaaattttccttcattattctcctcctggactacccttaagggcagcaatccatttctggcttcaaccaatgttttgcattgatacaccaggctcaagtccttttaagtcagctggtcataggaaacaaccataaggccataggttatgaactgagaggcattagcgccaccggggtaggtcaaytagacttgccttctggacctgattaagcccaattataagtaaataactttcaccatattctgttttgttttttttggttgttattgttgttgtttggctatgtacactcactcttgtgatttggtagctgtgataacaccagctcatgataagcttcaggttatttagtgctccttagtcagtctatactagggtctaatagtacatcaagagttgattttcaaataaagaattttgctccac

SEQ ID NO: 799930 - DNA, 591 bp, Homo sapiens
tttgccagaatgtgtgccaggcaccttagagactcagtaacagaataaagaatgagataaaaattatgtaacttgaaagaacatttgagatacaagataggatgaaagaaccgataccaggtaacattgcccctagttcctgaatgtaaccctatactcatctaacattatcaccccgtcttcacccctttacaaagatggattcaaattattagggaagctgaatctcagatcaccttgagtgagaaaggtgactggtccaagatctggcctttgaagtcagagaaagagatctgcttttgagacagcccttcagatctgtagaaagcaaccacatctcttaggaattttctctccttcagccggaatattccttccctgaaaggaagggcatgccaggcggcayaacactctggtcacccccactgtatatgtaatatactaaagaaatgaggataaagactatctacatcaaagaattaatgaaaatttattatagaacaaaatagagcaacaaagaagtccttggatagtaaaaatatccattcaaaccccagtcaagtgacaggcaactcatgcaaccttatcccc

SEQ ID NO: 799931 - DNA, 725 bp, Homo sapiens
ctcttattaactggcccatggtcactgagttggtaaaagaaagatgcaggattcaatcctaggtcacctggctttgcagctcccactgttgatgtagcccaccagagatacctactcatttctttgtatattcaaagctcttggttgctttcttaaagcgctgatactaatccttatctgtttgtccttgcttaatctcctcagcaagtccccggaccctgggcagggctgggtgtagattgagtgcccagtgagcattggctgggaaagggagtgtatctgaagactatttgcacaggaaagatatttagtccgatctcaccatcaacatgacagagaggaagccaggctaaaccagaggttacatttcttgtcccagttgcttaacacggtggtggatgaacagagaattgctcccagagtccttgacccatggctgayctgctttccctgtcacagagcccgtttggccaggtggtctccgcgctgacctgtcggctgactccacaaaaggaaatttcacggtggcgtgtgtgcatgtagacaggtcaaggcgtgctttcgtgcaaggcagcctggaatcagcaggaagctctcctgaactcatccctgtgccttgccagatgggcactctgctgggcaggtcactgcacccacactgttcaacttcttcacaagaccgctggccaaaaggaaggatccaagaacaagcctggtgacatcca

SEQ ID NO: 799932 - DNA, 274 bp, Homo sapiens
acttgccacactgatgagcttgagttctcccaacagctttggtcaactagaatcccagctgaccatacaggctggctctttgctgcccccacctgtctggagccagcttccacagtagcaayaggactggaagcccagcctggtgctgcagctttggcctccctcccacacatcctgatatgtcaggaatagaaagtgcagcacctaggactaacctcagctcataccccttcccagtgtgtgtttttgtgtgcttgcagatgcacctgggaga

SEQ ID NO: 799933 - DNA, 570 bp, Homo sapiens
aactaccttggaaaccattctatttgtgtcagagagattaattaatcaattaatagctaatccacaaacataaagccacctctgcttcccacttgaggggattcctcctcacacctggtgccatagcacagtggtatttacatataggagatgccagatgagctctctgaagtcactgtaakcaattctcagagccaccaagtttaagtcaggaaggggtttgaagatacataggagttattccagggtaatgaattcccgaactcaccctggcccttcgatcaggtctctatgcagggcagtgggtacccaggagatcaaaattcaaaatgtggtttggccaacttcaagttgttgtctttttttcccctttctcctcccaagaaaaaaactgaagagaggtaaggggaagtgtttttcaactaattcaaactggcacacttctttgaacctactctgccagtttccaaatgatgcttgggttttttaaataaccatacagatttatcaacattctaacttggaggatgaacagtctacaggttcaaaattcatggttctcaaaccaac

SEQ ID NO: 799934 - DNA, 635 bp, Homo sapiens
atggttttcgatggatccttatctcttcttgccagtttctgcacattgaatcatgcactagcagagtctattttaagagtcataatttttttctttaaatattaaaaaaatctgtggcaattaatttcttccatactgttccatcatgacaaataaatgtgaaatgcatatttacagagcacatgtaattgcttttgggcacatgcaaatgacatgcaaatcttacgttctaaatgagtttgtttatcattcctgaattctaatccaaagaccttactttttaaattcagtttacattctgacatgtatacaaatgagtttgactctggaaaataacttaataaactcagggttagctatgcaattagaggaggcatctgggagctataaaatctgggaagcaacatttacatctttttctgcattcaaggtttcaatttccttgctcaatccctccccatcagcctgcactytcctcaccctaccaccccatttccattcattccagcaatctcatcttttgaaaggcttcctttccttttctttttttttctagaaaagggaatgagtgtatttcactgaagatgatctcaccaagtcattgtcctctgtgtagcgttttcaaaaactaagat

SEQ ID NO: 799935 - DNA, 612 bp, Homo sapiens
cttattatttctggatgtgttgaataacttccaactggcaacacctgcaaatccatcccgaaggttttctctgacccattggaatctggtcattgcatacattgagcagatcagaagtgtcagggaatcaacacctccaccctctctcctgctcctttgtccctgagaagtataactatgtagcttattttccacactggttccatgggctctccagtgggattaagtcccagttgccctctgtggtagcttgcttgataatgaatctttctcggctttttttcttttcctgtctcacttcctcactcctctaccaatgtctctgggatcacctccaatttgcactaaagtctttgtgtaaaggtctgcttcttagtgaaccccaactaagacacccagtgatattacaaatagaggatgactgttcygcctggctgctagaacacaaaagatacaaagcataactggctgcagtccaaaagggacatgtaccaagagtgaataagcctttgctttttaagcttttgcaatttgatgtaattgttacttcagtgtcacaactagtgaatgatgtatacctctcctcagtaattcttattctaggaatttttc

SEQ ID NO: 799936 - DNA, 589 bp, Homo sapiens
gggcacggtggctcaggtctataatcccagcactttgggaggccgatgcaggtggactgcttgagctcaggagctggggaccagcctggacaacatggtgaaattctgtctctacaaaaatacaaaaattagctgggcatggcagtgtatacctgtagtcccagctactggggaggctgaggtgggagagtagcttgagcctgggaggcagaagttgtagtgagccaagattgcaccactaccctctagcctgggcgatagagccaaaccctgtctcaaaaaaaaaaaaaaaaaaaaagggaaaagaaaatgcagcatatatatatatatatatatatatatatatttattattcagccatgaaatagaacaaaatcctgtcatttstggcaaaacagattaacctggaggacttacattaagtgaaataaatcagacacagaaggacaaatagtgcacgatcttactcatatgtggaatctaaaaagttgttctcattgaactcatagaagtagagagcagaatagcagttaccagaggatgggatggtgaaggataggggtggttagaaattggttaataggtacaa

SEQ ID NO: 799937 - DNA, 618 bp, Homo sapiens
atcaatagctgcatattgggagccaaggtctgagatgatttgccccaatatatataccaaattgggaaaaacagctgcaaaacaaaaagccaattaatttataataatctatagtcattctctaaaatgtatctacctcttgcacaatccaaacaggtgcgttaaatggggatgtgatagtgatcactgccttgggatctttccggttttggatggtatcaataaaattgacagttgcccccggggtgcagtattggttttcatttactattctgattaggagagaatgctccaagatgctctacttgctgttcctactatgatagccccacctccatgggtcaggaagccaatgtggatattctgtcagttgcctagcatgtctattcygattatacatttaggaacttggaaaataaccacacatgggtccatggatctacggggctcactgtgggatggacttatgccaaaatgtcatttgtttacctgacctccatattccccctggtgggcttctgggtcctcagagatcagcatcaagttagaacctgtattaatttcctagggctgcaataacaaattaccacaaatttggtggttttaaacaacagaaat

SEQ ID NO: 799938 - DNA, 625 bp, Homo sapiens
tttaaaattcttctgcaggtcttacaaattcaaccctgaaaattgtcaaaatgtccataaccctttattttcaaaatactttcttttcatttttactatcaagacacacaataatcctaagcaagagatcaatattttctccagtataagtaggtgaatagaggtgaaaaaawtttttttcaatgactcgtacttttctcataatgagtcagatacacctggactctatcccaaactattactatgccttgattcaaagttcctcactcccggaaatgtagggtatactttgccaaatgcttttagatgagcatttcatacatacagattaattgcttttctccattttgatcatcttccctatggattcattttttttttttttggttgtgagaattacaaagtgaattttcagctgacatatgttagtaggtcatttcaatatcgaaaatatgatttgagaataattgtgcatgctaagtgctacactgtgactaagatgatgaagaggattatgttcttaggtaggttgtgttatgacactattttcagaagtaaatatactaccttgaaagtcatgattacacacaacctgagtggtgatgttcaccacgctgttcaaaat

SEQ ID NO: 799939 - DNA, 615 bp, Homo sapiens
cacattccttgtattcagaattattatctctgtgatggtggggtcttgctgtgaggttgctggaaggccacaacattttggattgattgtacaggtgtttaaaaaatgaaacaaaacaaaacaaggcctttcttctctgtaagatgccctttgccaatattatggtgagaaagaaaaaggaaccttatagaaatatgcagaaaatgaattggtttgagaactagaatgctgctccaactgatrgtttctctcttggagaggggtagagttggccttaacttcacagaagctactggagatggacttagcacttttttggtaaaagatatgctaaccttcccatcatactctgaggaaataatctgagcagagttctcaactttaggttttccaaattggataacttgatgaaataacaatgaaaattaatttccttgttcccacattgtccaaactgattgctgcagacatctcatctctcttgctagaatggttactgcaaaatatatttcccttgtaaatgttttggttcttcctcttcctaaatcaacattccttaaatatattttctgtaaactaagattcttttcagattctaaaagttataatgattgc

SEQ ID NO: 799940 - DNA, 633 bp, Homo sapiens
taagttctcattagcatgtggtcttcatctcaacagtgtaaagctatggagtaatttgaagtatgcctctgaaattgccttccacactgactaaaaaatgaaaataggccgggcgcggtggctcacgcctgtaatcccagcactttgggaggccaaggtgggtggatcacgaggtcaggagatggagaccatcctggctaacacagtgaaaccctgtctgtactaaaaatacaaaaaattagccaggcgtggtggcgggygcctgtagtcccagctacttggaggctgaggcaggagaatggcaagaacccaggaggtggagcttgcagtgagccaagatcatgccactgcactccagcctgggcgacagagaaagactccatctcaaaaaagtgaaacataaaaaaaaaaaagaaaaaatattacctctccaggctttgaacataactgtgtaatttggaaataatttattctcccactatcttagtgtttaccatttaagagacatgtttctctaggaaaaaaatgtttatcaggaataacgttttttaaaatgctgagaaggttactctcctgctattttataatgttcatcagaaaaagcataaatgtacattctgacaactttcaggt

SEQ ID NO: 799941 - DNA, 615 bp, Homo sapiens
aggtgaggataccttcaatttgggcctgagcatggagaaacatggatggaatcatcgggtacctagggagagaggtcggagggggaggctttgaaataaacttgaaagcgctcttgacaaaaagagagagaaaagtggctatgaaaactgcagtgtggacggtacaattccatttatgtaaaattacacatgtatgtatgtaagaagtactcgaggtgtgtgaaaactggtcattaaaaacaggcagtggttatttctgggtggcaggtttcaggtgatcctttttttccaaatatatttctgtattgattacttatttttaaattcttacaagaagcaggtattatttatatagccagaaaaaaattcartagagccactttttttttttttttttttttttctgagatggcgtctcaccgtctcccaggctggagtgcaatggtgcggctcactgcaacctctgcctcccaggttcaagcgattctcctctctcagcctcctgagtagctgggactacaggcgtgtgccactgcacctggctaatttttgtatttttagtagagatagggtttcaccatgttggtcagactggtctcaaactcccgacctcag

SEQ ID NO: 799942 - DNA, 620 bp, Homo sapiens
ctgtctccagcgggctgtgaatggaagtaatggagccatttccaggcagacacagttaagatggagtatgcctttttatttttacctttcatttttcagactgagtcttgctttgtcacccaggctggagtgtagtgcacgatcaccggtccctgcaacctctgcctccttggctcaagtgatcctcccacctaagcctcctgagtagctggaactacaggtgcgtaccaccatgcccagcaaattttttgtagagacagggttttaccatgttgtccaggctggtctcaaactcctgggctcaaatgattctcatgcctcgaccttccagagtgctgggattacaggcatgagcaattgcgcctggcctcagtgtactttttaaatctctttccttaccttgatggccatgtttttccasagggcatagttgcaagatggaggaggctctgttgacatgcaccagcctctttgtgaatgagaaagaaatctttgttatattaagccttcagatttaaaattaatctgattaagatttcaagatttgttactgcagcatgttatggattgtcctgactaatactctttcaccatgttagaccttcctcgcaattcagttt

SEQ ID NO: 799943 - DNA, 570 bp, Homo sapiens
gggcagaaccaggacttgaatcaggttttctgatgctgagatcaaaccctggtcaggtgtttggtcagcattgcaggtccctggaggctgtacctaccccttacctcccggttctcctacccgtctctcaggagcctcctcctcttcagttccagtcagatccaggtaccaagagcctttgaggcccaagcctggcaggttctgctgctttgctccatcaccccatgaggtgacacttttcaccctggacccargaccctaggaagcccagaggctctggcatttggggtggagcaaggcagcagtctctggagcccagagttctcttcaggctgcatcatcggggaagaggagcctgcacatttgtaggaagtacctgattccaacgaaacctccttcaggcccaggaggatggatcattggcctgacttgggtggtgcttctccttgtctcagagaggctgtggtagattgcactaaaggcctctattcttccctcactctgtatccatgccctttgccatgtgactttgtggatttgatttccttattttttgaatctgggattagt

SEQ ID NO: 799944 - DNA, 579 bp, Homo sapiens
attttaggttatccctacgtgactattaattgctatcaccagatactgtgaatttattatttttttcttttttattcatagtgtatttttatttttaatttgtatgggtagagggaagaaagacatctttaattggattaacattttagttaattaagataagccataggtgagtgataaagagaaaagagataggcttttgattcacacaatactaaatttaatttctagcttcctcacttgataggtgtgaccttgcaaacattagttaataccaactatgattttctatatgaaaaggagaataataatatgtcctttaaggacgattgtgttgaagtaacattataaatatcaacagcatttaattcagtgtttcatacattcttatcagcatcattaagtaaacttactrtaactactactaatatcattattcctaatactgttttaagccttcagattgctcttatttgtctgacttctagctgattttgaagtacaaaatattatatcagagtaaggaagaaatagataattcttcacttaaatctttgcctcttttaggttagtgaacaa

SEQ ID NO: 799945 - DNA, 567 bp, Homo sapiens
atccagtctggcttgttaggcaataagacttcattttcttaaggtgctgagactctgcaagaataatagaggcagaaaccgcttttcctgttcctcttctttgggctacaccctttctcctcacttcccctctcttcccatcgccaccaccacctcttccatcctcaacacacatgcctttgcctgcatatcacgatccaaggacaacttcctccaggactgtactttgaaaatcgggggttgacagcagaatggaaaacaatcaaacaaacaaaaacaaaacaaaacaaacaaacaaaaacttaataaagtaactgtgggagaaaatcaagttgttgcctctgtgctttcgatggtgcrgagatctttgcttaccctgagttgatgccaatgatgtgagtgaagtaaaattagaaggaaaattcagcactaaaccaagaggaagtgtgtgattgtaggtggtggcaggaatgacttcattataaaagtaactttaccaccctaataactgacatacttaaggtcgaatacttcaagttttggtgttaatttgttcaatttgttaat

SEQ ID NO: 799946 - DNA, 615 bp, Homo sapiens
ctgcttgtaattcttatggtagttgtaggcgatattgcaggaaaaacacttatcttactgccttgcaattccaggccttaatacatactacctattattataatagctgttactatattagtattatattaatgttgactttttaaaaaaatcaccattcaaaaataaatagtacatttgtcttcatcttgagtttagcttgtaacagtgacttctaaaggtttatcatttacttacaactaagtgtttgcctataatcaggaaaaactgctatcaggcaaatgttaagattaagcttttctacatatggctgtcaaaaataaagtcatttaaagcctgccccctcaattctacacctgaataaaaatatacatgatttgttaatggaaagcttaacagaaatgttgaacaaagatgacctcatatagtayttaaataagataagcaaaatgagtaagattttaaaatatatacataggcaagtgtaggttcaactagacattttggtggcaaattattgtctgataaaataattgtttaatatcctacgttgcctcattgcttgaaaaatgaaataagatcaaatgacgtcaaaatatacatttatttttctgt

SEQ ID NO: 799947 - DNA, 604 bp, Homo sapiens
aatcccagctctgctgttcactggttgtatgatcttggggaagacatcttccttctctgcctcggcttcctcatctgcagctacgcctgggtgtggtgagggttctaggggatctcagatgtgtgtagcacggagcctgctgtgtcctgggtgctctctacgtggtggccggtagaattctccatctatccaggctccaggagacccctgggcatctcccacctgtggcccctaaacccagagtgactgagagcacttamcattcagcttgtctcatccccagtctacctccttccttctaccctcactgcctcccagtcaggagagtgagctctcagaagccagagccccacccaaggggaccctggtctctccgccttcacctagcaatgggaaccctgcttcccaggggaggaaccaactgctccaccttctagggacccagtttgttggagtaggacagtaacatggcaggaatcggacttctgggcctgtaatcccagtttggatggcacgttagactcttggttgaccgttgtggtccttagaagtcccattctcccttccagttatgagaaaccaatgccttctagattcaggtgac

SEQ ID NO: 799948 - DNA, 570 bp, Homo sapiens
gcattcccctcagctcccttcctgaagcttgatacctagtcagtacccagtggatgtttcctaaacatgtaagtaatgacatcatgaagaagccacatgtttaccttgaccacaaacacagggcaaaggtgactagtgtggtcagagatccctgctggctgggaatcagggaaggctgcatggaagaagtggcattttagttagaacttgaaaggtggtgtatttagttttctctggctgccatattccttgtcacattgccctctccatcttcaagccactgggcaaggctagaaggccctcaacagactatcggtaggaatgtggaagttgaagactcagagtgcagaaagaaacaagtagcattttagagaaaagctaaatcccctccaagaatacctcaatcatcgtgaaragcctgttagtagacgcactaacactcaaggcactgcttcacaaggtaaggaacgtgtaattgaaaacttgagaaaggaagaaacttgttctgtactggcagaaagcttagcagaattgtgtcctgcagtcatatgggacacagagcttgtaaat

SEQ ID NO: 799949 - DNA, 601 bp, Homo sapiens
gatattttaaaaggtgtttctatattacacaattttacactgttaacacaagaccactagatttgtagtccaaagctctgggccacaatttagtcttctctcttagtgtctgttgtgtggccttagacataaactctaaaaagttaaaattaaaatataaatggccttatgtgccagtgaagctgagaatatgtcagatgtgaatggactctgaaggtgctttatgaatttccaaaccatcttgggcagttctgggtgaaggggaatcaccagagcatagatcattcyttactgttcaaactgaaaaacgtgtaactttgggaaaaatatgtatttattataaatcatccatttcattgggtggtttcaaatttagaagccaatatatgcttgtcataagaagaccaatgaatgcaaatgtatataaccccaaagctctcttttcctaccctattctgtctctggtctcccagctagtgaagtcaacagattagtgtggatccttccatcactttctcctatctcattcatgcataatcaaataaaaggaacatacataaggttcaatcttttctgaatacaatcctagtatgcatgttac

SEQ ID NO: 799950 - DNA, 561 bp, Homo sapiens
aagcatcctggagaacctgatctcataccccagggggtccatcagccactctgttctgcccatgcagagaactgtgtgtagctccactctcggtgtaggaaggcatattggttcattcttgccctgctataaagaaatacctgagcctgggtaatttaaaaagaaaagaggtttaattggctcatggtcctgcaggcatgcaggatacatgatgctagcattttctcagcttctagggaagcctcaggaaacttacaatcatggaagaaggtgaaggggaagccagcacctcacatggccagagtaggagaaagaaagagatgggggagatgctgcacacttttaarccaccagatcttgtgagaactcactcacggtcatgagaacagcaccaaacggatggtgctaaaacattcatgaaggatccactcccaagatccaatcacatcccactaggcccaacctccagcactggggattacaattcagcatgagatttgggtggggcacagatcaaaaccacaccagaaggaatctgtcctgattagagaaagcagctaa

SEQ ID NO: 799951 - DNA, 684 bp, Homo sapiens
gagtatgatgggtaaatggatggatggataagtggtgggtggacggatagacttatggacagatggatgcatggataataaatggatgaattagtgggtgaatggatggatggtagggtggatagatatacggatggacagatggatgcgtagatgatggatggatgactgagttgatagttagatggttggatggaaggatggatggacggacggacggacagatggatggacagacagayggacggatggatggatgggtaggtgcatagatgaatgaatgggtaagtagatgggtgaataaatgggtgagtgagagggtgaatagaaagaagagctcatggggcacgggagtgggtaaataaataagtgcatgaattgaataaactggacattccaggaaacatagaatagcctgggaggtcagagatgtgatagagataacacatccagcctcacctcagcagtctagaccactcataagaacagtataaccacaaggaggctgcaaaagccaccatccctctactcccttgtgccccccaacctagaggcttatctatgggcaggagcccccatctgtgtcccctggttccaggctgcaatggcagaggacatgggaccaaaggagcagactggctacctctggaaactcctcttccttctcaggatccaggtcagact

SEQ ID NO: 799952 - DNA, 509 bp, Homo sapiens
tcccagggtaccacaggccccttcaagatgggaccacatctacgtcagcttcgtgtccctgggtccccagcccatagaagcagtttaataaatgtttgctgaataatttaatattctgtgatctctcctacagctagctgggagctagttcagcgaaaacttstaaggatggaattcagagaaactaaaaccccccactctgacttagctaccacggtgctatagagggaaacattaaaaagaaatgttttaatgatcagaatacacacgagtgctgatgtcagcaatcacggacctaatggcactggtactacgctactgcatatgtcctggtgtgtggttcctcttaattatggtggccgagccaagcctaaaattacctaattagtgagatcactggaagtctccatgaaaagctacaattaaaacctgtgtactcgtaaggtggaatggagaagattgcacacaacaggggaaatgttggctagatccgaaatctaaagcgttct

SEQ ID NO: 799953 - DNA, 596 bp, Homo sapiens
ctatgagtctgaaagaggagctaggaaacagggtgagcctccaaagccatgctggccactgcctgtgtaggcgaccacccagtcatggccctgagccctgccccgacagtctcagacacacaggcatagggcaggggaggcagaactgagaccaagagccttgcaaaataaagtggttttttttagcagaagtcatgctacatccttacattaacactgtaagctacagtctattaatttgatccttaagaagtaaacaggctgggcacagtggctcatgcctataatccyaggtattttggaggctgaagcaggaggatcacttgagaccaggagttcaagaccagcctgggcaacacagggagaccctgtctctacaaaaaaaaaatttttagttagctgagcatggtggtgcatgcctgtagtcccagctactcaggaggctgaggtgggagggttgcttgagcccaggaggtcgagactgtagtgagccatgtttgtgccactgcactccaatctgggtgacagagcaagaccctgtttcaaaaaataataataatgaataaagtaaacagagggtttttagggcagtaaaa

SEQ ID NO: 799954 - DNA, 612 bp, Homo sapiens
ctgagatcaggataccccacaacttctccagagaccctggagccgtctcccctcccctaccttccccaagaatggagtgccccagacccctgaggcccacagatccccgcggcccccagggccgcacccaggcaaggctggaggcrccccttgggcagcgagggccggggcccttccccgccccttccttggctgtggagggaactggcgggaagggggacccctttacctgacacgccggcgcctcaggtccgggcacagcctctccagggggcgctgtgctccggggccctggagcggtccctgcagggcaagcacggaagtgtccaaggtggcgctccccgcccctggcctcagtgggaccccaggcagcggaggggctgtgggcactcttgccgatgggggaggggcctgcggagagccccgcctcctcaccaccccaaggaggggtcccagtcttccaggtatggggaaggggctgtttctcatgagcctgggctccgggcagtcaaagctccaggaatggcttggagttgctgagccacccatctctaccctctgcctggccagtgccctgtccttggggaagtgactcccacaggccagctcctc

SEQ ID NO: 799955 - DNA, 620 bp, Homo sapiens
ctcactgcagccttgaactcctgggctcaagtgatcttccttcctcagcctctagtagctgggactacagtcatgtgccaccacacccagcaaattaaaacaaaacaaaacaaaaaaactattttagagatgggatcttgctatattgcccaggctggtctcaaactcctggtcttaagcaatcctcctgcctcagcctctggagtaactaagattataggtgtgcctggcccaatgaaaatctttattcctaaggtttttataaaagatcaaaggcaggagaccagaattcagtaagagggggtctctttaattgaaccctaaagcaaaggctacttgtgagccaagcaaagcatgggctggctggctactcaggagtcaagcccagctcctggyaccatatgtcctagaaatctactgcctgctctgggtaaagattttttcattaaattgcggagcaggctgagcatgttggctcaagcttgtaatcccagcactttgggaggccaaggcaggaggatctcttgggcccaggagtatgagacctgcctggaccacacagggagaccctgtctctacaaataactaaaataaaaaaattggataggcatggttgtgga

SEQ ID NO: 799956 - DNA, 620 bp, Homo sapiens
ctcactgcagccttgaactcctgggctcaagtgatcttccttcctcagcctctagtagctgggactacagtcatgtgccaccacacccagcaaattaaaacaaaacaaaacaaaaaaactattttagagatgggatcttgctatattgcccaggctggtctcaaactcctggtcttaagcaatcctcctgcctcagcctctggagtaactaagattataggtgtgcctggcccaatgaaaatctttattcctaaggtttttataaaagatcaaaggcaggagaccagaattcagtaagagggggtctctttaattgaaccctaaagcaaaggctacttgtgagccaagcaaagcatgggctggctggctactcaggagtcaagcccagctcctggcaccrtatgtcctagaaatctactgcctgctctgggtaaagattttttcattaaattgcggagcaggctgagcatgttggctcaagcttgtaatcccagcactttgggaggccaaggcaggaggatctcttgggcccaggagtatgagacctgcctggaccacacagggagaccctgtctctacaaataactaaaataaaaaaattggataggcatggttgtgga

SEQ ID NO: 799957 - DNA, 620 bp, Homo sapiens
ctcactgcagccttgaactcctgggctcaagtgatcttccttcctcagcctctagtagctgggactacagtcatgtgccaccacacccagcaaattaaaacaaaacaaaacaaaaaaactattttagagatgggatcttgctatattgcccaggctggtctcaaactcctggtcttaagcaatcctcctgcctcagcctctggagtaactaagattataggtgtgcctggcccaatgaaaatctttattcctaaggtttttataaaagatcaaaggcaggagaccagaattcagtaagagggggtctctttaattgaaccctaaagcaaaggctacttgtgagccaagcaaagcatgggctggctggctactcaggagtcaagcccagctcctggcaccatatgtcctagaaatctactgcctgctctgggtaaagattttttmattaaattgcggagcaggctgagcatgttggctcaagcttgtaatcccagcactttgggaggccaaggcaggaggatctcttgggcccaggagtatgagacctgcctggaccacacagggagaccctgtctctacaaataactaaaataaaaaaattggataggcatggttgtgga

SEQ ID NO: 799958 - DNA, 623 bp, Homo sapiens
gagtcaactggagatgtgactagggccagaagactcccaagatggctaattcacatgactgcaggcaggaggccgtatctccttgctaacttttggcaaaagggcaccatttcttgcctgaaggtttctccatagggttatacttgagtgtcattacacgtaacagctggcttctattgaggaggcaatccaagacacagattaaggaggatgccatcagtgtcttttatatcctaatcttggacatcatacaatttaattctgccrtattttatttgatagaagccagtcatttagcactactcaaacatggggggtggggggcagaatttagtgtctgactctttaagggaggaataccaaattatttgtgaatctatcttaaaaccaccacatttaataagggaatattatgaacaactttataccaataaatttgacagcttttatgaaatgaacaaataacttggaagacagaattatcaatgatcactcaaaaagtaagagataaccagaatattcctatatctactaaaaaatttaacttgtagtttaaaaactttcccacaaaatcaaaacaaaaacaaaaactctaggctcagatagctgctctactaatgatt

SEQ ID NO: 799959 - DNA, 570 bp, Homo sapiens
gtttgaatgggatgaaacctcacgggccttgctgtctggccccagcaaattctttgatctctctgggcctgccctgcctcaggagagccagctggctggttctaggttgcagcttggacgggggtgtgaagaggtcaaaggggggtacctgagccctcaagcagatgggtaaccctgggcattgytccatgggcctccccgatgcatgcctgctgtgcccgtggggccgagccacagcctgtgggaccagtctctgggtggggaacttctcagcaggtgagtcatcacccctggggtgcagccagtgacccagatggggcaagatcatgacatatatttatctctgtcatctcccagtgcctccccttccccttcctcttcctgtcctcatcccctcctccagccattgggtgggccaggatgacactgactactcagcccctgatctcacctatcctagacaaagtctatggttcttctaggccgcctgtctcttcctctgtaagtttgacaatggtaacagccgccattaattgagccattagcaattaccagcagctttgcatacac

SEQ ID NO: 799960 - DNA, 718 bp, Homo sapiens
tgagggcagcccccctcatctgtcggcctggatcacggcagcctcccagggccttgagacacagccaaaggaggcagcagagggtggggggtcagcagctatgcacacaaatggagggagggaaactgaggcacaccagaggactggagacccagaggtcacagtttcctccagctcttcttttttttttttttttgagatggggtcttgctttgtcatccaggctggagtccagtggcacgatcttggcttactgcagcctccacctcccagattcaggcgatccttctgcctcagcttcccgagtagctgggattacaggcccacgccaccacacctggctaattttgtatttttagtagagatggggtttcaccatgttggccaggccrgtctggaactcctggcctcaagtgatccacccgccttggcctcctattgtgttgggattacagtcgtgagccaccgcacccggtccctcgaacccatctttgggttgagattctcagggcagccggagcccatgtgttcttgtttctaatgctttttctctctccacttctctcttggtgaagaaggggcttggaccattcctgcaaacagccaaaccggcgagaagaggccagacatctgcctccattctccccagagtggtgcaagctcagcgaggtccccagcctcccccaggggaagcagggatccctggacaccccacacc

SEQ ID NO: 799961 - DNA, 573 bp, Homo sapiens
tgcaaatgaatttgaaacagacaatgaagttccctttagagacacctgggcagaaaaatgaagggaaaagcgccttagggagagctcgtttgtggatttttttttcctgaacccaaaacacacagggaaaaacaaacccacccgtctactcgtctactccgggtgccagaggcgggcaggcacgccctgactcagtgctgggctggcagcaagttgggcacacacgtgaggcccgggcacacgctggggagtggggggcagcggcacagacgtgtgtgcagagccggaagttccgggcacacaagtgtggaagtggcaytggtcctggaaaggagcggagcccctaggcatgggaggatgaggcggcagggagagggcatacgtgtgtgggtagctggaaggaggccagatgagggtgagggggcagggcccatttggggtgaggggcagagctcaggccccgccccccaggggccctggcaccctggtcacgtgagtgctcctgaccccggggtggggccctcccaattgccaggtgggtgaggtgtcagagtgggggcctctgggcctgcc

SEQ ID NO: 799962 - DNA, 654 bp, Homo sapiens
atccacacagagctggggttccaggatcccccacagtcttagaaggctctgaggcctgggagggatgtctttctggagtccctttatcctgggcggagaacccctggctctggctgacttctctctggtcctggaccttcccaggcacaggtgggaggagggagctgcagggggtgcctcagctcccctatccttgctcctgtaccgctgcctctaaagttggcccagcatggcttccagaagacactgaaccttacagagagccagctctcctctttgtagtctaaaacagggacgatgcccaggaagggaagaaaraggtttctttcctagactgtgccaggctgggtcccatatctcccctccgggggtcctaccacgggcctcagggccaggaaagggtggcctgctggctgcagagcccctgccttgtctctcagactcacaggtccaggtgacagtgcttagcagccatcagggtctccctccctccaccaggcagcttctataagcaagggagcaactggggcagagtctggccttccaatttgatggacccagtaactcattatttgcctagaagcctgtctccccattttcactatgagccagtaagggctgggactgcctgcttcttctctgtgacccagcaca

SEQ ID NO: 799963 - DNA, 406 bp, Homo sapiens
agctgggagaagcggcggctttgaggtcaatggggatgaggtcacaggcaggggaaagatggggctgacagcccaccacacccacaggggcagggtgtcaagatgggtccctccaaagccctgtgaccctgggattcaggggagtcgggggaagggaggagagagcagctcccttcccccagccaggagccctgtgctgctgctcrtatatctgtccctggataatgtatatccagcttatggaaaatattcataatgctccttacaccaaactggcccccttccatagtgcgtgatctaaaattaaatccatttcaaatatacagtagatcgagtcaagctaatataaatgaaacatgattaataggcagaacactgtcctccttagcagggctgaggaggcaga

SEQ ID NO: 799964 - DNA, 614 bp, Homo sapiens
taaaacaaaataatctgattagatgatttttttctgttatcttcaaataagcaccttattatcaaatagttcagtatcagaacaagattcctaattccaaaggagttttatttacataatattatattgtgagatacatattagaagaatctgacactatgttccattccagtttctcttttgcaattgagtgacttgttttgatctaaaatgtataaattctcatgcctgtaattccagcactttaggaggccaaggcaggtggatcatttgaggtcaggagttcaagaccaccctggccaacatgatgaaaccccacctctactaaagatacaaaaaattagccaggcatggtggtgcatgcctgtaatcccagatacttaggaggctacagcaggagaaytgcttgaacctgggaggcaaaggttgcagtgagccaagattgcactgctgcactccagtctgggtgacagagcgagactctctctaaataaataaataaatagtataaatttatctcattcttattaatggtgcccatgaaatgtaagtattagttccttttcagatagtactttataattatactactgccagattaaaagacctatttt

SEQ ID NO: 799965 - DNA, 594 bp, Homo sapiens
agttcttttatggtacttttaatgccatatgtaaaaatctttgtctacatcaaggtcatgaagttatgtttttctttataaactttattgttttaccttttgtatttaggcctccccagcaatgcatatacactcatgcamacaaaatgttgcctatgatttctgagggcttgtgcagattccatgaagtccatgcatgttgagaatatctgttctagctgagctaccatctcttaggaatcaacccatttataatgtagattatgtttccctttctagagtctcactctgtgactcaggctggagtgcaaaagtgcaatcatggctcattgcagactcaatcttgtgggctcaagtgatcctcccacttcagtctcctgagtagctgggatgacagctgtgtgccccctggctaatttttgtattttttagagatgggatttcaccgtgttgtccaggctggtcttaaactcctggactcaagaaatcctcctgcctcagctcccaaagtgctgggattacaggcatgagccagcctgcctggccttgaatcatttttataagctcacctcctttgtctttacattcaatcag

SEQ ID NO: 799966 - DNA, 602 bp, Homo sapiens
agtgactcttctgcctcagcctcccaagtagctgggactacaggtgtgcaccaccatgcccggctaatttttctgtttggtagagacagggtttcactatgttggccaggctggtctcaaactcctaacctcaagtgatccacctgccttggcctcccaaagttctgggattacaggcatgagccaccaygcctagccatttctcttttcatttatgatttaattcattgaacagaaatccatctctgtttacacacatacttgtatagtaatatttatgattttagggtctttaaaaaattatttctccaatcccaggacacaaaataaaggggctttcccttctcctgtcttggtagtggctttagggccctgcagaagggtagggcccatcttctctttcactccctctccttgccttatcatgcggaagtaggtgtttttccatgaaacacttcatctcctacttccatcaaggcttctaacacccccaaggtatgtgggcggatcaagagaaagaaccttgccctctaactgactcatgctgcccatactgcatggccaggatgtttacccagctgcttgtattccaggtgttaggg

SEQ ID NO: 799967 - DNA, 606 bp, Homo sapiens
ttatttctaattcttacaaggaccttgcaaggtaaatattattatccctatttttttcagaggttcagagagggtaggtaaattaccagagttattcgctagtaaacaaccagagacaggggctcaagatggtcaactggatacagccaggaagagtttctcccattaagagacaagaccatcaagaagattggaacactctgagcagatcttcagaagaaaggcattgagagtgaatggaggtaggatgtggagcctgggctagagggaggattctgggaagcctgaacggggttgctgagcaccaggactcacttcaggccctgagtagctcctggggaagaggtgagttaaataggagtgcaatggcccattcttactatggacctacctgtaggacaccccacaacccccatagacatttgagctagtaggcagagctgtttggggagttggcagggwcaggactcttgcctgtgcaaagcccaaagggtttggtgcaggaacggttgcagtgaagtatggccagggacatccattccctaaggctcgccaagcacctctaggtagcgctggcctttgttgactgttgaacctgaacagaac

SEQ ID NO: 799968 - DNA, 474 bp, Homo sapiens
ttgaagactggttatttcagtgaacccagtcagacaaaaataaagaaaaaagaatttaaaaaatgaacaaaatctgcagaaaatataggattatgtaaagacaccaaacctacagctctctggcattcctgaaagagaggaagagagaggaagtaacttggaaaacatatttgatgatattgtctatgaaaatttccccaacctcactagagcggtcaacatttaaatttgggaaattcagagaacccctgcaagatagtatataagacaaccatccccaagacacatagtcatcagattctccaaggtctrtatgaaagaaaaaatattaaaggcagctagagagaaggggcagttcaccaacaaagggaacctcatcaggctaactgtggacctttcagcagaaaccctacaagccagaagagattacgggcttgtattcaacatccttaaagaaaagaaattctaaccaag

SEQ ID NO: 799969 - DNA, 523 bp, Homo sapiens
ggcaaagaaatgttttgagctaaatgctgaagtttttatggaacaagtgaagttcactgggtgacaggatacaagcctcaaaggagcagaagatttgtttcttatattttaataagttgagaagttgcaggaaattctgcaggcaaagatacaaaagcaaaaacaatacatacctgttgtcctgattctgtcataattgggatatatgaggacagactccacccagggcaatcaaagttacagtatgtygcaagagaatagccaggtgacagcaagaacagaatatgggagaaattttgaaaagaatttgagaatatgatggaagtggtcaatcaccaggtaagcactttaaaaggctaagtggaacaaagagaaagacagaggggagaggaaaaaggaaagaagaaagaggaagaggaagacaggaacttggcaaatttgttcaattgaggagggaaaacagcaagcgaaagagtgtataggagaaaaatagacaagataacaagaaaagcttagcctttgt

SEQ ID NO: 799970 - DNA, 534 bp, Homo sapiens
tcattccaattaatttttatttttctaaggatttcttacaatagtttccaaattaaaaattctccaaaactgttttcatggctttcacaccttatccttttgtatgagtattatgatcaggctctatgaggttaatttgaaagggttctcagaatattgagaaacaatgtagaattgtattcaaattaaataatatttatctaatttataaatctactgtaaaaagatgtacaataagattctgattaatwaatatattggcaccccaaaagtgcaaagtctgcttgaaaaaccccattagaaatcaggtaattgtgtattttcaaaattaataattaagtatatttcacattcaatgtgccgagtaagaaagcagtaaaaaatttttctatatttcatgcattgtatatttttcatttgcacactagacaagatgtctatttgaaacaatcatttataggtgcaattcaactggattcacaaatttattcaaaattgtagattttttaaaaattatgtcagattctaaatgca

SEQ ID NO: 799971 - DNA, 562 bp, Homo sapiens
taaacaaaacatcgtctcaaaaaaaaaaaaaaaaaaaaagtcttgtgaccaggcgccgtggcttgtgcctgtaattccagcactttgggaggcctaggtgggcaggttgcttgagttcaagactagtctgggcaaatggtgaaaccccatctctacaaaaaatacaaaaattcgccaagcatggtggacrtgcctgtaatcccagctactcaggaggctgaggtgggaaaatcacctgagcccaggaggtcgagtctgcagtaagctgtgatcacgccactgcactccagcctgggtgacagagcaagaccctgtctcagaaaaaagtcttgttaagattacttagggtactaagagaaatctttgcagtgctgcatgaaaatttatgtagaatagatgatatgcaccaatataataaaaggtagcacagatagcagtaaagaacactgactcaagaagccaggactatctgggtttgaatcctgactctacaactcagctgttatcttaagcgacccttacttaatttatattgatcgactgattgattgactgattaaga

SEQ ID NO: 799972 - DNA, 535 bp, Homo sapiens
aatgcttttaccaacccccaaagaaatcccatacacattgatagtcattcccatttcctgccagcacccccagcccctggcaatcagtaatacgctttccgtctctgtggatttgcctaatttagacagtttatataaattaaatcatacaagatgcagcctctttccctcagcataatgttttcaagattcattcatggtatagcatgtatcagcacttcattcctttatttatttatttacttatttatttatttgagacagagtcttgctctgtcgcccaggctggagygcagtggtgcgatctctgctcactgcaagctccacctcccacgttcacgccattctcctgcctcagcctcccgagtagctgggactacaggcgcctgccaccatgcccggctaattttttgtatttttagtagaaacggggtttcaccgtgttagccaggatggtcttgatttcctgaccttgtgatccacccacctcggcctcccaaagtgctgggattacaggcgtgagccaccgcccccg

SEQ ID NO: 799973 - DNA, 640 bp, Homo sapiens
cgctgccacacttccttaggcttcactgggcagctgcctttctaaagggctgtctccttcttgccctgatcctgctgccctctgggagaggcttaggctgcattccagaaggtttccactttctgctgcttctggtccatggatcacatttgaaaaaacacagctttggagtttccaaagcactcgtatacctgctctcatctgacacaaggcttgcaacagccaagacgtatgcaagacacaaatgccggccccattttccaggcacggatgttaaggctcaaagaggtcccccacctggtgagtgcagggtggggtggagttgaggtctgctgctcacccctgcccagtgcttccatcacctctccctccttgggcatgacacttcaactccatacatgtgggtgtatgtgcttcctctgcagtgcaggcacagagagaaatggtgtggctctytcaccccaaaaggcaggttaccgactcggggtacacccagcattgcctaacacagtgtgccatcccatcaccaatccatttacctcccagatgcctactgcatggcagaccccacactaggtgctgggggcacagctgggaccatgtacatagagtcctgtcttaaggagcagacactctagaa

SEQ ID NO: 799974 - DNA, 426 bp, Homo sapiens
cccctgctagtgtcagggccaccaacccatccagggacaccctgggaaaacgtcttttttctaaaggggatttttttctgggagggagggaggatattcagcaaaattcattcccaaaacccgtgactctgacgacaaccattactctccccttcctyccccatcctgtctgggaaaaggacagatcaccccgagcctccccgggacataaaaggacagatcaccctgagcctccccaaagagaaaaagacagatcacccccaggcaaccccaggacagaaaaggacagatcactctgagcctccccagagagaaaaagatagatcacccccgggcatccccaggacagaaaaggacagatcaccccgagcatccccaggagagaaaaggacagaacaccctgagcctccccagagagaaaaacac

SEQ ID NO: 799975 - DNA, 426 bp, Homo sapiens
cccctgctagtgtcagggccaccaacccatccagggacaccctgggaaaacgtcttttttctaaaggggatttttttctgggagggagggaggatattcagcaaaattcattcccaaaacccgtgactctgacgacaaccattactctccccttccttccccatcctgtctgggaaaaggacagatcaccccgagcctccccgggacayaaaaggacagatcaccctgagcctccccaaagagaaaaagacagatcacccccaggcaaccccaggacagaaaaggacagatcactctgagcctccccagagagaaaaagatagatcacccccgggcatccccaggacagaaaaggacagatcaccccgagcatccccaggagagaaaaggacagaacaccctgagcctccccagagagaaaaacac

SEQ ID NO: 799976 - DNA, 614 bp, Homo sapiens
ccctgcatggccgcgcaccctcaggagactaaagcagtcatcttaaggtctctgaactaaaggcataactgggaaactcagcaatttattcaagatgtcagacttctagaagtggccaaggcaaccattccctccacttaaactaaatgcagacagatttgggctagggtaaggggcggggcacagggggaccttctgtcctgtctcttgcatccatcccccactccatccacacacctgttacctggtcctggcccccatatgctgcaatcccacagtttctccacctgcctccacttmcatctaccctagctcaaaatccttcaatggctccccattacctgaaatattacatcctaggccctgggcctggaggtctagaaccacccaactgaactcagccgcctcttagtgtgcacactcaggccttctctcctgggactccccaacaggcatcagtgctcccagaatccaaacagacctgcccatccctctcctcctgcctctaacctttgctccactatccttacacctgatataggctctcctctgtctttatttggcacaatcccaccatcccccgccagggcccatgtcagatggtggctcctcct

SEQ ID NO: 799977 - DNA, 622 bp, Homo sapiens
accacactcttttcaatataaattaatattccatattagcccatgaaattcacttgtctggccacactcacaactttcacctttattcacatcaccaatccactgatctttaactttctttaagcccatcagccctcttaatttttcactccctactcatttctccttcctcaggatagactctaagccttgtattattgtgacgtctttacaaaggccctaaacactcttgttcctccctttttccatcatattctcctggagggtgaaaacaaytctggttaaatactacatcttcttcacatctgtgcccataactgagaaaaccatacaaccatgttgactagtttcacttaaaattcaggataacacattgacaagtaaactctcaactctgcccagcaaccctactgcacttctgttgtttgtatattccctgttctctggaattactatttcaaagtgatatctttcctcaaatttgtctctctacaaattgttccctctttgctgtttaccttctcctaccaaattttacaagtgatgcctgtacttcataatttattgaaaaaaatggaaggaataataaatccttaatattctgacctcaaaagctacaaac

SEQ ID NO: 799978 - DNA, 622 bp, Homo sapiens
accacactcttttcaatataaattaatattccatattagcccatgaaattcacttgtctggccacactcacaactttcacctttattcacatcaccaatccactgatctttaactttctttaagcccatcagccctcttaatttttcactccctactcatttctccttcctcaggatagactctaagccttgtattattgtgacgtctttacaaaggccctaaacactcttgttcctccctttttccatcatattctcctggagggtgaaaacaactcyggttaaatactacatcttcttcacatctgtgcccataactgagaaaaccatacaaccatgttgactagtttcacttaaaattcaggataacacattgacaagtaaactctcaactctgcccagcaaccctactgcacttctgttgtttgtatattccctgttctctggaattactatttcaaagtgatatctttcctcaaatttgtctctctacaaattgttccctctttgctgtttaccttctcctaccaaattttacaagtgatgcctgtacttcataatttattgaaaaaaatggaaggaataataaatccttaatattctgacctcaaaagctacaaac

SEQ ID NO: 799979 - DNA, 618 bp, Homo sapiens
gagttagtatgatggatatagtagaccacttttaaggaatccatccctccatttcttattcattactcaattaatatttactgggtacttctaggtgctgcaactgttctaggcattgaatttgaaacccgtctttgccacatataactataaaatgtttggaaaattgccttctatatgtgctgatactccaagatggaagattaccaatataagtgatattcagttaaaacctacacattctttcactactaaccttatctaaatcatctgatcatttgcattattaactttttagaacacgtggctcaggtgttttcttgattattattttgggcacttttagctggttgtgcctttattgtcagttttgcggctatcaggacctcaaaacatttacatatacatactactcattcaartacatcaaaatgatcatcttacatctattcaggcaggagtccaagatttgacttacatagttgttagtaaaatattccacattttaagatcttattggtggcctctacttgatgtttctctattaattttgaacttttgtcattgttttgctgttatgttactgtgtgggagggaggaattgtataatttcactat

SEQ ID NO: 799980 - DNA, 628 bp, Homo sapiens
aaaaatataattatcaaatatgactgggtaaatatttgttaatgcaaacgaggcaaaacatggcatgtcttccaaaagtaattatttctgatgatattcatagatctttgaatcctatcatagtagtcattccatcatgaaatcacatgattgtcagttgaaggtagccatcctaggagcagtattatgcaggagaactttacctaaaagagtttttataatattttaaacctctagttgaaatgcaaaacctgtttaaaaaaataatttatctttgggaggccaaggcgggcggatcacaaggtcagatcgagaccatcctggctaacatggtgaaactctgtctctactraaaacacaaaaaattagccaggcgtggtggtgggcacctgtagtcccagctacttgggaggctgaggcaggagaatggtgtgaacccaggaggcagagcttgcagtgagccgagattgcgccagccctggccacagagtgagactctgtctcaaaaaaaaaaaaaattaatttacactaaaagtgatgtagttttgtgagtcagctgtgtaatgcagaggctaaacatttaaaaaggccatttttaagaaaacaatttaggccatcagtaaagttc

SEQ ID NO: 799981 - DNA, 641 bp, Homo sapiens
gtgattgagttgctaaaatctcatgataaaatttgaatggatgaggtattacttctaacggataagcagggaaagtgtttttttgagatggaatctacccctggtgaagaggctgttcacaaggaaattagaatatgctggatgcggtggctcaggcctgtaatcccagcactttgggaggccgaggcaggtggatcacctgaggtcgggagatcaggaccagcctgaccaacatggagaaaccctgtctctactaaaaatacagaattagttggacgtggtggcrtatgcctgtaatcctagctacttgggagactgaggcaggagaatcgcttgaacctgggaggcggaggttgcggtgagctgagatcgtgccattgcactccagcctgggcaacaagagtgaaactccatctcaaaaaaaaaaaaaaaagaatttagaatattacataaacttagttgataaagaagtggcagaatttgaaaggattgactccaattttgaaagatgttctactctgggtaaaatgctgccaaacagtatccatgcttcagagatacccttttgtgaaaggaagagtcaattgatgcagtaaatttcattgttgtctttttttaagatattggcatagccacctcag

SEQ ID NO: 799982 - DNA, 611 bp, Homo sapiens
actgttgcctatggcaacatggaaaatataaaagatgcttcatatacttctgaagttgatggaaaattttttctaggtgatatacagaaagttttaactcacttttttctagctacctatgagcaaagagatacaacaaaaaagagatagagaaggacttttagtttttcaccagaatttagaaagaatatagaaagcccaggatggccttcctaacttgcaaaaggttctcaagggaggattggcctcaaggcaaagttcaaatccggctcaataaaatttgatctcagggtaaaaggaaagtcagaggcatggctaagagacctttattaagacctaagaaaggttcagctttctaagaatattcagaatatgctgtactaatccattttcacgctgctgtaaagaaatacctgagactgggcaatttatgaagaaaagaagtttaattggctcgtggttcygcaggctgtacaggaagcatggctggggaggtcttaggaaacctacaatcatggtggaaggcgaagaggaagcaggaacatcttacatggccagagcaagaggaggactgccaggtggggataccacacacttttaaacaaccagaa

SEQ ID NO: 799983 - DNA, 618 bp, Homo sapiens
caattcttgtacaaatttatggggtacagagtgatatttggatacatacaaagtttaatgatcaaatcagggttattagcatattaatcaccttaaacatttagggggtgtgtgtgtgtgtgtgtgtgttgggaacattgaaaatcctttcttctagctatttgaaaagatagaaaaaattatcattaacgataatcatcctagagtgctatagaacactagaacttattcttccaacatagttataaatttgtactcattgagcaacttctctctcttctcttaggccctcgtgtttcccagcctygagtaaataccattctactctctacctctatgagatcaggttttttaaccttctgtatatgaatgagaacatgtagtatacatccttctgtgccctggtttattgaactcaacataatgtcatccaggctcatccatgttgccaccaactacaagattttattctttttatgactgaatagtattccattgtgtatacataccacattttctttaactattcattggttgatgaacatgtagttgattccatatcttggatattgtgaacagtgtggcactaaacattgaggtacagatgtcccttcaata

SEQ ID NO: 799984 - DNA, 619 bp, Homo sapiens
tcatctgtggcatcatcgcaccattgatccctccctcttcctggatccactggtcacttaatatccacaactacatactctcttagatcagcgacagccctggtttttcacacttgtacagggcttcgtgtctttcaatctaccttcatttccttcacagtttcaggcagtctcttgacttgaatgctgtcactttgctctcagccctcaaatttatgtctcaagcttgaacagaagcgtcctgtaaaaactgccctatgtgaaatgctcactcatgactagtcagcatttgcaatttaacgagacctaacttagctgaccagcactcctgactaccccagcctccctcagtgcagccttcccatctccatcctcccacttgctcagaycagaaactctgaatttgactcttgttcctttcaaacccaatgtccaatttttcagcaaaattgactggctccacctgaaaatgtattcagaactgatctgatcaccatttacgaccaccatcgcttgctgcctggaaaaggcaccactatctcttatctagattgttgcaatagtttcgttaaagcacctccacgtccagcctgccccactcaagaaagcagtcaaagag

SEQ ID NO: 799985 - DNA, 662 bp, Homo sapiens
gcaacattccaattccattctgttatttttaattatacaataaattactgttgattgtagtcacctcgttgtgtatcaaatactaaatcttattcacattttaaatgatatttttgcacccattaactattgctactttcctccaaactccttactaccctctcagtctctgggaamcaccattctactctctatcttcatgaattcaattgctttgatttttagctcccaattagagtgagaacatgcaaaatttgtccttctgagcctggcttattttacttaacataatgccctctagttctatccatgttgttgcaaatgacaggatttcatttgtttttgtgggtaaataatactccattgtgcatatgcacaacatttttaaaatctactcatctgttagctattctgaacagtgaataaaaatgcaagtgcaaatacctctctgatatactgatttcctttcattcagttatatacctagcaatgggattgctggatcatatggtagttttatttttagtttatggaggcacctccatactgttgtccatagtggctgttctaatttacattccctccaacagtgtacaattcccttttctctacatcctccccagcatttgttattgcctgtcttttggataaaatccatttta

SEQ ID NO: 799986 - DNA, 662 bp, Homo sapiens
gcaacattccaattccattctgttatttttaattatacaataaattactgttgattgtagtcacctcgttgtgtatcaaatactaaatcttattcacattttaaatgatatttttgcacccattaactattgctactttcctccaaactccttactaccctctcagtctctgggaaacaccattctactctctatcttcatgaattcaattgctttgatttttagctcccaattagagtgagaacatgcaaaatttgtccttctgagcctggcttattttacttaacataatgccctctagttctatccatgttgttrcaaatgacaggatttcatttgtttttgtgggtaaataatactccattgtgcatatgcacaacatttttaaaatctactcatctgttagctattctgaacagtgaataaaaatgcaagtgcaaatacctctctgatatactgatttcctttcattcagttatatacctagcaatgggattgctggatcatatggtagttttatttttagtttatggaggcacctccatactgttgtccatagtggctgttctaatttacattccctccaacagtgtacaattcccttttctctacatcctccccagcatttgttattgcctgtcttttggataaaatccatttta

SEQ ID NO: 799987 - DNA, 662 bp, Homo sapiens
gcaacattccaattccattctgttatttttaattatacaataaattactgttgattgtagtcacctcgttgtgtatcaaatactaaatcttattcacattttaaatgatatttttgcacccattaactattgctactttcctccaaactccttactaccctctcagtctctgggaaacaccattctactctctatcttcatgaattcaattgctttgatttttagctcccaattagagtgagaacatgcaaaatttgtccttctgagcctggcttattttacttaacataatgccctctagttctatccatgttgttgcaaatgacaggatttcatttgtttttgtgggtaaataataytccattgtgcatatgcacaacatttttaaaatctactcatctgttagctattctgaacagtgaataaaaatgcaagtgcaaatacctctctgatatactgatttcctttcattcagttatatacctagcaatgggattgctggatcatatggtagttttatttttagtttatggaggcacctccatactgttgtccatagtggctgttctaatttacattccctccaacagtgtacaattcccttttctctacatcctccccagcatttgttattgcctgtcttttggataaaatccatttta

SEQ ID NO: 799988 - DNA, 606 bp, Homo sapiens
cctaaggaaggctctctcggattgctcagttttccttatccttcccctatgtcacccttagctcatattccccactccttccccatgggaattgttggcatgcaaataaataccatgactacccctcagaaaaccacaagaaaatctytgtggacaggaggaagtgaccctgtggttaacgtaaaaaattgacaggagctctttaaggaaagatgatggatgagtataggaggttctcaagcacaagtccctaggggtgttaaacaggtgtttaatttataatttattaaactttacattgatgtgccctgcactttttgtatgggtattgtatttaacaaaaaaatatagtttttaagaaagagtgcggaaaaatttcttgataataacctgacatggtggaaaggaagatcaagagaagaacagttggtgaaagtaagggatgggaaagataagtgatgagtttaggggaggagaaggtgctattagtaagtaaaacaaataaaaagagcaagaactttaaaagtgtctattatttcaagaataaagatttctgggtcctctatttctaatcctcatgttaagtgctattagtacccatttaca

SEQ ID NO: 799989 - DNA, 521 bp, Homo sapiens
tgtgggcagtcagtagtctccccgacttggggaaagaggaataagcataggatgaggcgtgagccttgagagatgggtggggcttggcccacttctgattcccctgcgtagaagatgtaatgagttttaacacttctttatatgtttttcatcagctacatctggtaccttggctggcattatgggaatgaggttctaccactctggaaaattcatgcctgcaggtttaattgcaggtgccaggtactttcattctattactcttctttaccatgtagagttcagtttattccccaggatacyttatgcattcaaaaccttacttgtttcaggatatctgatgctatgtatcaactgacatttgatatatacactaataggaaatgtttcaaaaacaatagctagtttaatgtcaaaatggcatgagtatatccattcaccgtggaaatgggtttgttctcatatttgctttccagtccatccaaactcctccctatatggtggcagaagttttagtgcaa

SEQ ID NO: 799990 - DNA, 497 bp, Homo sapiens
caatttcttttttgagacaggatctcactgtgttacccaggctaaagtgcagtggcctgattttggctcactgcagccttgacctcccatgctcagatgatccttccacctcagtctcccgaacacctggggccccaggcgcacatcacaacacccagctaatttttgtattttcatagagatgggatttctgtatgttgcccaggctggtctgaaactcctggattcaagagatctacctgcctgttacaggaaagggatcccgatccagaccccaagagagggttcttggatcttgcaaaagaatgaattcagggtgagtctkcagtgcaaagtgaaagcaagtttattaagaaagtaaaggaataaaagaatggccactccatagacagagcaaccccgagggctgctggttgcccatttttatggttatttcttgaagatacactaaacaaggagtggattattacccccgtttagaccatagagggcaactt

SEQ ID NO: 799991 - DNA, 520 bp, Homo sapiens
tggtttttttctcttgctgcttttaggatccttttcttctccttgatcaattctcctataaaaggattctgatgtattcttcagtatgccaattgcatttttcagctccagaattttggcctgattctaattatttcaatctctttgttaaatgtatctgatagaattctgaactcctttttgtgatcttgaatttctttgcattaccttgacacagctattttgaaatctctacctgaaaggtcacatatctgtttctccaggattggtccctggtgtcttatttagttcatttggtaaggtcatgttttcrtggatgatgttgatgctaacagatgttctttagtgtctgggcattcaggaattaggtatttattgtagtcttactatctacacttgtttgtagccatccttcttacaaaggttttccagatatttgaaaggactttggtattgtgatctaagctgtatctgatttatggggcaccccaagcccagtatcactgtggttcttccaggc

SEQ ID NO: 799992 - DNA, 602 bp, Homo sapiens
agacaaaggtcattttatagtggtaaaagggtcaattcagcaataggatataataattgtaaatatatatgcactcaacagtggagcactcagatatataaaacaaaagttattagagctaaagagagaaatagaccctaatacaataatagctagagacttcaacactctacttccagtattggacagatcattctgaaagaaaatcaacaaagaaacatyagacttaatctgtactatagaccaaatggacctatcagatatttacagaacatttcatccaagtgctgcagaatacacattcttctcctcagcacatgaatcactgcaaaggataaaccatatgttaggccacaaaactagccttaaaacaaaaaaaaattaattatattaaatactttctgtgaccacaatgaagtaaaactagaaatcaataacaagagaaactttggaaactatagtaacacatggaaattacacaatatgttcctgaatgaccagtgggtcaagaagtcattaagaaagaaattgaaaattttattgaacaatgcccatcaatgacagactggataaagaaaatgtggtacatatacaccatggaa

SEQ ID NO: 799993 - DNA, 634 bp, Homo sapiens
ccatattaactgattcattcattaaccaatatttagtggttgccagccatttccaaataattctgctaaattctcagtttttactgtgctcaagcagataagtacacaaataagtatgacatagactagaaagtgaacatacatgaaaaaggtgtggccattcagaaaagaaggcaatgaactctaactggaaggatcaggaaacactttgtggaggtgacttttgtggtgggaattaaaggataggaatgtttggaggtaaagagtagggaattccaaactcaggaaactgtctgcaggatgcatcttgctggcaatactttgctacaaagctgcctgaagaggtgtcaaggaaagcttctggctgctaggtgctgctggctgcyatttgcagtgaaatctgtatactagaaaagctacctgtattgtaggaaccaagttctggagaagctcctgggctgctagaactgggtgctggagaaaccaggtatgctgaaggaggttgatgaaacaaacacactgtaatcagaaagagaatccccttcctcctgcagtattccaccaataacttctactgacaaagcttaacattatgtcagctgacttagaagaaatatttgcagggtccagctgc

SEQ ID NO: 799994 - DNA, 555 bp, Homo sapiens
ggcagcacctccagaccaaaggggatggccaagccctgggtatgctgtggagaatcgggtctgcaggtgctcagcaccagggtgcatggtggtgcttctcttccctcttacccccacaggtctgggattctacagaagtataaattgaagggtgagaggtcttcttgggtttttggcagggagcttctagttgtggtttgtttagtttttaaagataaaaatagtagtgatatatgtatatagggtgtgtatttgtgtgtaatggtagtgaaagatggtgttgaatcactttgaaagctttgctaaactaaacatagttgacctttcctctacccattcctaaaacacgaaggttctaattcaataattctgttgagaggtctggatgtaagtctttggaaaaagagttcaattytttgagactttgattcatgagactccccaggcagcagagagaaccagtaaaagaatatcagcaaagccatctctacctacccccagtttgtttagaagcagaaagttaaagtaatccagaactcttccatgcagggcagg

SEQ ID NO: 799995 - DNA, 644 bp, Homo sapiens
aaatgccttacataaaatctaaacaactcaaatccgaggatacttagaagttagtaaataaaagaaatttaaatcaagaaattagaattcaatatagcaaaagatgatgggagaaaaatgagaaatcttcaacacgttctaaaaggaaatactgatcatgagaagaatgactggttttatcaagcaaaatttttaaggctsatttattagcaaattctttctcagatcagaaagatagcagagaactttcaagtttttaaatacaggtggtcatttgtctcttacagaaacatccattatcagcttcctgaagagactcaggcatgtcttggaaagccacagacctttggggataggtcagaatcagaaaacatctctaaacccagcagcacttttcaagacaacctattgtttgaaacccaaggtttaaatataacaagtgagacagtgtgagaatctccttgctttagtttactgcactgattcatcatggataactctgtaaaagtagagaattgttcagttaacaagctagctatcctctaggggtctgaaactaggatgtcgggcaggatctgtgctctcactaagcctctagagaaggatccttccttgcctctcccagcttctggtggttcccaata

SEQ ID NO: 799996 - DNA, 663 bp, Homo sapiens
ctgaaagagggaagagaaatgaggggatcctacttccctgtctttaagaatgggcaaccaatcgtcttcaccgtcctcagtctatatacctctggagtgtatcctgaatcactgggactgctttgaccctcagactctggaggaaaaacacttcatagtcctttgcacaaaggtttggccaaattatgwtctgcaggaaggactggcttggcctcaggaaggaaccattcattttgataccatcctgcagttggattttttctgtaaacgtgacggcaaattgcctgaggtcccatatgcgcaggctttctttaccttgcagggtaattcagaagcacagtaggactgatcctgcactcctgttttcccatctcaggagctgcaagaggcaatcccagagaactaaggaaataaatcccagaggaacctccaacaggaaagccagctccctctggccctgcttctccaggtccaccctgttctccctatccagtttctctctctctcacttgccccctcctagaaatccttaccctagacaattcccagtctcactcttgcccttccaacagatgcctggtgaatttggccccagtaaggtccaggtctccttctctgtacaggacgtaaggtaaattaagggaaatcttggcaagttttcag

SEQ ID NO: 799997 - DNA, 602 bp, Homo sapiens
ccatagtgccaaaaataagtgtggggccaggatctgaatgcaggtctatctgatgagagtctgatctctttctttcccttgacaatttatcctcagggatcctgcacactttatgtctcttcatttttttaagggttgtttaccaatgcacgtgagaaatggagggcggccctcccaaccaactgaatggaccccccttttggccaaggagaccacaaagaaacttacaaactgagctcttggccatgacagggtgggaraggaggtcagacaggccttgctgtgccccctccctcactaaacaccattagactttctttcccagagttcagctgaaaccagccctttcaaaagatttgctccactgctgatttccaccaaccacctgatgctgtggctggactcctcgccatttttgtggttttggcacagcaactgaccagcattccttcctgataagagaccactgaccacagactgattctggccagtccatggaggctgcacacagggacacttctgtgtcctccgttttcccttttgacttatggagcctaaattcactgcatttaaatgttaagtctccaacccaaagtgaacat

SEQ ID NO: 799998 - DNA, 655 bp, Homo sapiens
aatggagtggctttccccaagcagctcccatgcttgtcctggggccccgcccctggcctctaaggccttatgcactggttaatcctgatggacctcggttcaaatccccattccagcactgatggctctgtgggtttcctaaccacrccgagcctctggagaatgaattagacaaacctccccgtgggattcttgtgggggtaaaaaggtattaaaggagcatagtgcctgacacacacacagcagatgctcacgagactgtgacatttaaaaatattcatggcttctaagcatcctcacagcagctctgtcagcaatgtcagtataatcagcctcattttcagatgagaaagctggctctcacacaagggaagggactggcccaaggtcatgcagccaatcagcagacagctgggatttcctgcagcaggaacggagatggagcctggctctccaatgtcggagcttgactgaggctcgcctggccctgcccctaggcccctggaagcgctaagctccaggagggacgctgagggcagcaggggatgttaggagacagctccacaccagggcgaagactcccccctcccgggctgccccagcaccacgacgccttgggacaaagggctctgggccaagtaaggatttttgtgaa

SEQ ID NO: 799999 - DNA, 598 bp, Homo sapiens
gaaagcaaaatagaaaggccctgtgtcagcagccaggcccctgggcagccgggctctcggctccattctgttcagtgggattctggttggcaccagctgcagtcaggaacaatgcctggatttctttctttctttctttcttttttccattttaatagaggggggagaaggaccagagccactcattgaacagctcagaattgtggaggcatctgggaccgtgtgtccttgaaaacagcacagtcgcaggggccccacagctggctgcaaggtgcaagaaggcatgatacactgggagctccaggtcccagccctgctgctgtytcatacttgcttgctgtgtgaccttaggcaggtccatgccccactctggcttccccacagccccaccagagcttgccttccaggacccactcaatgccaactcttcttcttccccgaactcttagaatggcattgggtggccgggtgcggtggctcatgcctataatcccagcactttggggggccaaggcgggtggataatgaggtcaggagatgcagaccatcctggttaacatggtgaaaccccatctctactaaaaacacaaaaaattag

SEQ ID NO: 800000 - DNA, 598 bp, Homo sapiens
gaaagcaaaatagaaaggccctgtgtcagcagccaggcccctgggcagccgggctctcggctccattctgttcagtgggattctggttggcaccagctgcagtcaggaacaatgcctggatttctttctttctttctttcttttttccattttaatagaggggggagaaggaccagagccactcattgaacagctcagaattgtggaggcatctgggaccgtgtgtccttgaaaacagcacagtcgcaggggccccacagctggctgcaaggtgcaagaaggcatgatacactgggagctccaggtcccagccctgctgctgtctcatacttgcttgctgtgtgaccttaggcaggtccatgccccactctggcttccccacagccccaccagagcttgccttccaggacccactcaatgccaactyttcttcttccccgaactcttagaatggcattgggtggccgggtgcggtggctcatgcctataatcccagcactttggggggccaaggcgggtggataatgaggtcaggagatgcagaccatcctggttaacatggtgaaaccccatctctactaaaaacacaaaaaattag

SEQ ID NO: 800001 - DNA, 598 bp, Homo sapiens
gaaagcaaaatagaaaggccctgtgtcagcagccaggcccctgggcagccgggctctcggctccattctgttcagtgggattctggttggcaccagctgcagtcaggaacaatgcctggatttctttctttctttctttcttttttccattttaatagaggggggagaaggaccagagccactcattgaacagctcagaattgtggaggcatctgggaccgtgtgtccttgaaaacagcacagtcgcaggggccccacagctggctgcaaggtgcaagaaggcatgatacactgggagctccaggtcccagccctgctgctgtctcatacttgcttgctgtgtgaccttaggcaggtccatgccccactctggcttccccacagccccaccagagcttgccttccaggacccactcaatgccaactcttcttyttccccgaactcttagaatggcattgggtggccgggtgcggtggctcatgcctataatcccagcactttggggggccaaggcgggtggataatgaggtcaggagatgcagaccatcctggttaacatggtgaaaccccatctctactaaaaacacaaaaaattag

SEQ ID NO: 800002 - DNA, 589 bp, Homo sapiens
ggagcactggaaaatacaggcatgatcacaatagtaggcccacacacagaaggaggcagagccagagccaaaggcatacgggcagctgtggctgctaagaagcgtgaggacagtggtacagaaacaggtgggcagaggacacctcggggcagctgccccaccctgggcagactgctcggggtttcttttgggtcatgaattagsgtaaggcttgctgccaccagtggtctccctccctatctgggtgctatgataccaatgtctaagacaggccactgagtccccactggctccttgcgaggacccccttgctctgtacctgtgaagcctggtgaggtgacctggaaggtacacattggctcttctctttcctagctggctccaaccctcagcctcagctcacgctcagagagaggcctgggaggaaggtcaaagacacacaatggaaggaggaaagcccccatggagggcaggtgtcacctggggatgctgcgccctcctctgcaatggcctgggcttcttcgggcaaagccccttatgtcctcagtttctcccatccaaagggggtgggactgttggaccctcggat

SEQ ID NO: 800003 - DNA, 603 bp, Homo sapiens
aaagaaaaacaaaaaaatgtggaagtgggcaggatccaaggggaaaacagggtgaagaaaagtcagagagagggacaagaagcagggaggggaggagctgctctccaggatgtggagtttaagttcagaaatgagttctgaaattctcaktctcacctctattttcccacaggaggtggaaacttcaagtgctggatttacaggatgtctgtgagaacttctggatggtttggtctgaagctatggcccgtgggtgcttcctcaatgccaagaggaacaaaacaccagtgcaggactgtccaaggatgagaggacagcagcccttgactgtgttcgtagaactttggctcaagaacaggactctggatgaatacctcacctgcctccttctatgggtcaagcagaggaaagatttactacacctgtgctgtaagaagctgaaaattttgggaatgcccttccgcaatatcagaagcatcctgaaaatggtgaacctagactgtatccaggaggtggaagtgaattgcaagtgggtactgcccatcctgacacagtttaccccatacctgggccacatgaggaatcttcagaagctcgttctct

SEQ ID NO: 800004 - DNA, 603 bp, Homo sapiens
aaagaaaaacaaaaaaatgtggaagtgggcaggatccaaggggaaaacagggtgaagaaaagtcagagagagggacaagaagcagggaggggaggagctgctctccaggatgtggagtttaagttcagaaatgagttctgaaattctcagtctcacctctattttcccacaggaggtggaaacttcaagtgctggatttacaggatgtctgtgagaacttctggatggtttggtctgaagctatggcccgtgggtgcttcctcaatgccaagaggaacaaaamaccagtgcaggactgtccaaggatgagaggacagcagcccttgactgtgttcgtagaactttggctcaagaacaggactctggatgaatacctcacctgcctccttctatgggtcaagcagaggaaagatttactacacctgtgctgtaagaagctgaaaattttgggaatgcccttccgcaatatcagaagcatcctgaaaatggtgaacctagactgtatccaggaggtggaagtgaattgcaagtgggtactgcccatcctgacacagtttaccccatacctgggccacatgaggaatcttcagaagctcgttctct

SEQ ID NO: 800005 - DNA, 610 bp, Homo sapiens
aatttataaagtttataagtatggttgcaatttcttccagagtagccttaacctaagccctgagaccactcaggtcctcagtggcacctctcttccaccagcaggagtgaaaaaattgctaccttaggtgatataaaacccacaagaccattsaatacatggagatttttattttgattttgtagggacgactcctctgtttttataaagctattttaactataaaacatttttgtgattttgatgtggccaaagatctcccaacaatactactttcagattttagttttctgtctaatatctgggaaagattagacccttccctgcttcagactcaggactatgcaggtcacatattagtgaaattccatcagtgtttgtgaagttcatgaatgaatgaattttttttttccgacaaattctccctctgtcacccagagtggagtgcaatggtgcaatcttggttcactgcaaccattgcctcttgggttcaagcgattctcccacctcagcctcctgagtagctggattacaggcatgtgccatcgtccctgtctaattcttgtatttttgtagagacggggtttcaccttgttggcctggctcgtct

SEQ ID NO: 800006 - DNA, 424 bp, Homo sapiens
gggtaattgtgagtatgtggaagtgatgtctataggaaccttcatcttagagttacagtgctctagaatagcatggtagcacttttacagtttctggttgattttttttttgagatggagtttccctattgttgcccaggctggagtgccatggtgtggtttggytcactgaaatttctgcctcctagttacatgtgattctcctgcttcagcctcctgagtagcttggattacaggcactcaccaccatgcccagctaatttttgtatttttagtagacacagggttttgccatgttggccatgctggcctcaaactcctgacctcaggagatctgcccccctcagactcccaaagtgctgggattacaggagtaagccagcatgcccagctacagttagcatttctatacataccttccaaa

SEQ ID NO: 800007 - DNA, 425 bp, Homo sapiens
agagaagtaacccaagtgcggcccagagtcttctgatggtgttggcgaggaagctcagggaggctttggccattgtccagatcctcagagaaaggactgctcaccatacagggtccactgtgggaacagaaaccggcctttaytcagtggaaggtaaagggaatagaagtggggaccactcagaatccaaagggaaaagggattgataaaagacatagagaacagggagcactgaggacaggagcagctgatttatgggatgagaatgaaagcaaaggtcagggatgagtccctctaaattgctgagcctctcccttactttacccacaggaggtggaaacttcaagtgctggatttgcgggatgttgatgagaatttctgggccagatggcctggagcctgggccctgtcctgcttcccagagg

SEQ ID NO: 800008 - DNA, 617 bp, Homo sapiens
gcagaaagtggatcattcccacatacttcatgaccccactctagcgcggactcctaaaggatcaacgtcctgccccagcgtggtccatttgctccaatgcatgaaccacacgaaccatccttatcacccaaagttcataattaacattaagggttcacatctggtgctgtatattctatgagttctgatgaattgakgatgacatgtattcacccttatagcatcatgcagagtagcttcagtgccctaaaaaaatcacctgttctctttctatccatcccactctaccctgactccttgcaacccctgggctttctactgtgtccatagatttgccttttccagaatgtcatgtggccttttcatattggcttctttcacttggttatgtgcatttaagttttttttatgtcttttagggcttaataatttacactgtcaggatgtgctacagtttattcatccatttatctgctgaagaatatattggtccctattaagttttgtctattatgaatgtagtggttaaaaacatccaggttttaggttttctcatttgggtaaatgccaaggagcgtggctgctggaccatgtgcctaggttgtgtttgataatga

SEQ ID NO: 800009 - DNA, 617 bp, Homo sapiens
gcagaaagtggatcattcccacatacttcatgaccccactctagcgcggactcctaaaggatcaacgtcctgccccagcgtggtccatttgctccaatgcatgaaccacacgaaccatccttatcacccaaagttcataattaacattaagggttcacatctggtgctgtatattctatgagttctgatgaattgaggatgacatgtattcacccttatagcatcatgcagagtagcttcagtgccctaaaaaaatcacctgttctctttctatccatcccactctaccctgactccttgcaacccctgggctttctactgtgtccatagatttgccttttccagaatgtcatgtggccttttcatrttggcttctttcacttggttatgtgcatttaagttttttttatgtcttttagggcttaataatttacactgtcaggatgtgctacagtttattcatccatttatctgctgaagaatatattggtccctattaagttttgtctattatgaatgtagtggttaaaaacatccaggttttaggttttctcatttgggtaaatgccaaggagcgtggctgctggaccatgtgcctaggttgtgtttgataatga

SEQ ID NO: 800010 - DNA, 598 bp, Homo sapiens
ctgagagggaacagggaagggaaggcaccatgggtcccaaaacctggaactgatggagaaggtcccctccagaaactgtttggagagaaccagctgggaagaattaaagtctctgagatcttccacctaagagctggacatctgaattcaggaagacttacccgaggccttcccatggcgcaatcgagaagagytcacgggactcttgccagtgcaggatgcattggttctggaggcatcaggaagagatcggaggtcccctttgaatcccacttctaacaccaatgaggtccactaaaaattatggggtctatagatttagaaaaaaggagcgtaatttcttctaaaggtttacaacctgctcgctgggaaatgggcctccaggcaggacctgaggcaagcgcttggagggagggaaggtgacccaggaatctatgctgaacctgttggccaccaagtgtgcatattcagcaggtcattggagcagctatgaaaattcacagggtgggggatgcatgcatgtatggtaagcaaatatacatgtcacatacatcccaggttcacctggtggttgaggctttacatttaaatgcattat

SEQ ID NO: 800011 - DNA, 598 bp, Homo sapiens
ctgagagggaacagggaagggaaggcaccatgggtcccaaaacctggaactgatggagaaggtcccctccagaaactgtttggagagaaccagctgggaagaattaaagtctctgagatcttccacctaagagctggacatctgaattcaggaagacttacccgaggccttcccatggcgcaatcgagaagagttcacgggactcttgccagtgcaggatgcattggttctggaggcatcaggaagagatcggaggtcccctttgaatcccacttctaacaccartgaggtccactaaaaattatggggtctatagatttagaaaaaaggagcgtaatttcttctaaaggtttacaacctgctcgctgggaaatgggcctccaggcaggacctgaggcaagcgcttggagggagggaaggtgacccaggaatctatgctgaacctgttggccaccaagtgtgcatattcagcaggtcattggagcagctatgaaaattcacagggtgggggatgcatgcatgtatggtaagcaaatatacatgtcacatacatcccaggttcacctggtggttgaggctttacatttaaatgcattat

SEQ ID NO: 800012 - DNA, 648 bp, Homo sapiens
gactgactctttgcccctggggtgagatggggcagccactggaacctcatgtagaccagggtgaaatcaaagggccttagaaactcacagctccacatccaggcacaggtcctttgaggatctcagacacaagtccacagcttatcagggaygcggctctgtgaaagccaaataacccggccccctaccctgctgccatctctctcctctgtgcttactctggcccacatcagctcctctgggccactccctttctgggccctgttcttttccttagtcctcctggctccatccagcctgcagcgagttccgagaccttccccaccccaggctgccacaagcaccttcttaggcatctactctgctttcagagtgacttctcctcagatctttattggggaaaaaaggaggggcagcccctgatcttggaaaagacggtcacaaatgcgacctggaatgagatcctgttgaggactaaagaagtccagcagggcctgaacagtgatttctactgttagaaacatggagagggcaaacaccatgggcaaagaaagccctgactcagaaacagactcactgcattccaggtgcagcctcgtcagctctaagactgggcaaggggatcctagaagggatggccccctgcac

SEQ ID NO: 800013 - DNA, 573 bp, Homo sapiens
tcaaatttatttaaaaaactagaagacttaatgcagttggaaaaatagtacagagaatttctgtatagacttgacttagattgaccaatttttaacattttgccacttttgctttattattctctctatatatgtaaatttatatgtctaaccatatattctgaaccatttaagaacaagttgcatgcatcatacccctttacttgttaatacttcagaatatatttcctaggaagaagactattctgttgtataactctagtattgttaactaatttcaggagatttaacactgacataatactttaatctacagtgcatattttgacaattgtctcaataaggttccttccagctttttttctctctagtccagtaatctagaacaggatcacatattacattgtaatgtctctttttagttttctgtgatctggaacagtttcccagttttgtcttycttgacaatgatattgattgaagaatataggtcttatttaatagaatattcctcaacttagatttgattaatattttctcatggttagattcaggttatgcatccctggctgg

SEQ ID NO: 800014 - DNA, 659 bp, Homo sapiens
aaagaatagatgtccatatcaaaacctttattagctttcttgttccaattaagtatacaaaatcacaaattgaacatgtatatcctaaatatacttaatccatcaaatagaacacttgcaacactttaatgaatacracaggcaaatatgaaatactgatttcaaatagttccaaagatccttgatttcaggattttcacctattcaggcttaataatctgaactaattccaaattagtgagttttcaccacaccatatgctggtgaacaatcttgtcaccaacacgattctggaactccagtagcattgtcgcagccgccacttactcagatgttatagagagacttcaaaatgtcatgcaagtatttatttatttatttacttatttaaactttaacggaaggcaacacaaaggaatttatcttataaacacatgtggtgcttgctgttatgtgcccaatctgtgttctaaacattttaaaaatattaaccaatttaatcatcatacaatgctatgaagtgggtactattattctaccaattttacagaaggtgaaacaaatagagagtgaggcaatgaatgtccctcccaatccttaatattgtatgattaggagcactaggtgggttaactaatactctggggcaaacaaagcct

SEQ ID NO: 800015 - DNA, 624 bp, Homo sapiens
aagacagggtaagactttataacttcaggactgacaaggatttggggcaagacagagtactgggaaacaagcttaaagttgagagagctcattatagaaacaatgcattagttttgaagttgagaatagagacaatcctagataattctggcttaaaaccactttacctaaagtayacaaatattagtttcaactacttggttcattacctcaaatatccactttactcaactatgtaataatcacaaatgattgacctgtaaccaataggatttctggagaaggtaacttccattcctttgtggactccggctggaaaagtcccttgggttaataaagttagattccatactaagacttattgaagtgtgtattttcatcattgagtggagtaaatcttttctgatggacatggcacactagactgtgatagaattctataaatattgatcattgacctcaagaaactgaggttacatgacatttggctgtctataatttatgtaacataattatcatgcctctgttctgcttatttatatgcttgagaatctaatgctatttgcggacacaatgagatgagagtaaagacagccagaaggtttttaggcatcttggagagtg

SEQ ID NO: 800016 - DNA, 616 bp, Homo sapiens
cacaaaggaataaaggagacatcctgctataatattttccagattctagtttgaatgggttcattcattcaatgacatttactaagcacttcaagtgccaggctctgtgccacgagatgggagttaaaaagacatactttgttgcctcagttttgaaggaagttgctgaagaagactgacagctaaacacacattacaaatcagcgtgatatatattttcatagaggtgttgtgtaaggacttagctcaaaggaaagaacacagtttagcagtaggaaaaggggaagagaaaagggagggcgggccagatgcactctgagaaagtctcctggaggtaacagttaagctggatcacaaaggatwttaagagtttttcagacagataatgacagggcattctaaacagagggactgttatgtacaaaaccagaggcatgacagagcatgcctggtgtgggcatatgggggccagagagaacggagatatgaggtgtcctccctgggccagcctggaactagcctctaggttagttctgtgtccgaggtactcccaagccctctgtatctacactgggttgatgtggacaccatattgtttttgtctgatttcttgtgt

SEQ ID NO: 800017 - DNA, 582 bp, Homo sapiens
ttacactgattaaaagatgggttgggagaggaaggtttgtgctcatgagatttagaagctagtttgacccaaggaaactcagccagtaaatacagaaactgttctaatttaatttctcaggattgtttttgttcagattgattgtgctatctatccaaagggtcaaaacaatcaaagagaagaaacatttttcccaaacacttagcttcatatatttcaaagaagtcttagctttcatacaaataccaaaatctgatagaatgcagtgcagaaatagagcattattagtgagaactggggctggcctccttttttaaagctaaattatccagtcggttcaatattaagagagctgatcctgtcctaatcttgtaaatatctttctgttgtgttctacagaggagagtatataatatatattatataatttattatatrtaatgtaatatataatacacatatatataatatgcattgtataatatacattataatgtataatgtatatataatatataatgtgtatataatatatattatatatacactgcagtggttaaacacatgtacttaggtgtcaga

SEQ ID NO: 800018 - DNA, 502 bp, Homo sapiens
attcagaattgtgttaaatataattcagacattttgccttgggtctcctggttagacaagtttaggctgcctcttctagctgttttaaggtcataaaactgtttcttccatgatattttggatacttgtttgatttgtctatgagtttatatctttgattttgatgcagattttcaggttctrtgtaagcagccacagtgaggcctggtggcctagaccatcatctgcaggaaagccaagcccagtacgtcctccctggcccagctgtgcctctgggacatgctaggtagattcatattctccatgcattgtcttcatagggctgtcttctatcttgggtcctacatctggtgtatagcatttaaattgcttactttctagaatttgcactgaaaattaggattactaagggttaacattttaataaatatatgtaatgaaaaccactaaatagaacaggaacacttctgtatacaaagtatataagtaaagtaggaaatgt

SEQ ID NO: 800019 - DNA, 655 bp, Homo sapiens
ccccctctcctttggaggaagggagcaggatttggttttcttttgaggaattgagtataccttctgtgtgcagtaagaattaaatggggagaagtcagctatagaataaatctattccattccaccaagattgatttaggacacaatgggtgccagggttgtgagttccagtctttaaggagtttaaatcttttgagaaaagcagatgtaaataaatgtcattcagtatggaaactgccaaaataaagatacggacagtatgttatgggagcacagagaaggtcacataaaaacctgcctggagaagctaagaagagccaggcaaggaaagtggaagagaatcccaagatgacagaccagcctgtcacactgcacggaggcactgaagaatgtatcatgcatccagaacgacaggagctttgacactgctggactacaggtttgtgtcggtagtggctttamattgtttttctgtttgatggcttcttctttggttattttcatttgattgtttcttaatttttttaatatatgaaaaggtaaatgttcttattttaaaataaaggaatagatcttatattaagattctccaaagaaacaaaaacaaaaggatgtgtgtgtgtataatcatatatatatgattatattatatata

SEQ ID NO: 800020 - DNA, 525 bp, Homo sapiens
agggcataattgcacacagtatatagttatggggtacaatgtgatgttttgatatatgtttgcaattttccttggcttggggagggaaggcctcattgaggtgcgcaattgagagctgaaggagtgagtaaaccgagmgggtatgtacgtgggtctccaggcagagggaacagcaaaggccagaggcaaaaatatgcgtgtgagctcccaggaactgcctggagggcagtgcagctttgcaggttggagccaagggactggagtagatgaggtcctagagataaggcaggaccttggctttggctgagtgaggtgggagctgtccatcaccttgttttgtttcgagttctgtgaggcagtgtcttgctgaacaaactgagaagatttctttgtagtattttaaattgggaagttctattgagggccatgatgtaaacaatacaaagtaactgaaagtacattctatatgctataacctctgatcaaagttataaaaggtcatatgtggtttttacttgactattt

SEQ ID NO: 800021 - DNA, 629 bp, Homo sapiens
aaacaaatggggactaggagggtctaggccatgctgggccttgtaagaaaggagttcagattacactctaagtgttgtgtgttgtaatgagtcctttaggtctccaagtgagacaatttgattgacatttctgaaagagtctctggctgttgtgrggagaatggattaggggaaggtaaaagcagaggaggctgcagtggcagttctggtgagagaggatggtggcgtggtctaagatgcaagggagaagaagggataatcaagaaatatttgtgagctagaattgacaggacttggagacaacttgaataggaagacagagatgaaatgctgagaatgacagccaggtttctgacaagagccacagtccttccatttgttgccagtgggaagccttacaggttctaatgctaagatcaagagttcactttagcctctgccccaggtcccagggtcttcctgcttctctggtctctttactcaggtaacaggaggattctgcttgggtttcctctccctgagagttggctgcagaactgaatcctcctaatttcttgttgcccacaaccctatgccccaggcatgaccacaaaaacatatggctgtcaaggccacaccacaatgtccag

SEQ ID NO: 800022 - DNA, 519 bp, Homo sapiens
atagcaaaaccccgttgctcaaaaaatgagttaaaaaaaaaaaggaaaaaaagacaagttggactcaatcaaaattaaaacctttttctgcttcaaaggtcactaccaagaaagtaaaaagacgacatatagcatgggagaaaaatatttgcaaatcatatatctgacaagtgactagtatccagaatataaaaagaactcttacaactcaacaataaaaagacaaataacccaagttaaaaatgggcaaaagaactgcatagacatttctccaaagwtatagaaatggccagtaagcacgtgaagagatgcccaacttcattagtcattaaggaaatgcaaatcaaaaccacgatgagataccacttctcactaggatggcattcttttttttttttttttttttaacaataacaagtgctggtgaggatgctggagaaattagaaccttcatacattattcatgggaatgtcaaatggtgcagccactttgaaaaacagtttggcagtttctcaaaa

SEQ ID NO: 800023 - DNA, 629 bp, Homo sapiens
tctcttgactttttgtcaactatttttaaaaagttaatagtcttatgagctgaacaaacaaacaaacaaacaagcaattgtttagatttggcccatgggctatatatagtatggcataaagaaaggacagagaagggagaggcagcaggaagaccggttaggaggctgatatgggaaaggatggcagcttggatgaaggtgatgccagtggaaactatgaaaagttaattctgaaaatcttttcctgttgttgtttttttgagacagagtcttgtctgtcaccccagcttgagtgcagtggcaccatttcagctcactgcaattctcacctcccargttcaagagattcttcttgcccggactccctgtagctggattacaggcatccgccaccacgcccagataatttttgtgtttttagtagagatggggtttcaccatgttggccaggctggtctcaaactcctgacctaaagtgatctgcctgcctccgcctccaaagagctgggattacaggcgtgagccactgcaccctgcctgaaaatcatttaagaagcaaaaccatcagggttagctgactgaaaggatgagaggcaaggaaaacgatgaagaatgactgcttagcttga

SEQ ID NO: 800024 - DNA, 332 bp, Homo sapiens
tgggtgcccctgcctgtctcagtgatatctcactcccaaatgaaaatttgcaaaccccagagtcttgttgacacccatttgtttatttacacggcttcactttttatgtggctttccttctttctgcctaatgcttgacaaaggaaataatgccmgaatttaggaacccacgttcagaatcctcactcattagagcacttaaggtgttcacacgtaacaccagggtggcaatctcaatctcctctgccctcactacctgcactagagtcccctgtgcagtgtttgatggaaagagccttgaggagggcacacaggtgcttctgacagattct

SEQ ID NO: 800025 - DNA, 622 bp, Homo sapiens
caacaaaatttcagaaagaatttctctgcagtgggttcaggtcatgactgcaagcccttgacagctctcagaccgcctctccttcatctgctcatgttgacactgcctcccacatctgggcagcacagcaagtggggaggagttggctctggaaccggttccaccttgagcaagggacatatccgctccgtgcctcagtttcttcatctgtaaaatggaggtgataagaggacccacctcacaaagttgctgtaaggattaaattagctcatgggaagcactcggtgcagcgcttagcatgcagtgagcgctgggtgctcaagagctttggtttccatgactacaactggctactctgagtcttagtccttggggatggctcagtccccctctcggcatctaggtctgcttctgtagcccacacccaaattcttcttaccgcatccatcagtgcctgctygtgatggggctctgatcctcagcttcatggaggacacagccatgattgagctcccactgtctacaaggctcagtgaggcacagcagctgtgacgccccagggaacttagttaccctcttcatacttcatcttcctcatctgaaaaacaggcgtgtaaacagt

SEQ ID NO: 800026 - DNA, 656 bp, Homo sapiens
catttcttcagtattcttccccaactctttgagttgcataggttccttttcttggtcttatgtccagagagacaggattttgctcagtcttggctgtgctggaaacttgtctcaggtcaaagtttgagagaaaacaggaaaataaaacaaataggaacctcaccctctgcaggttgcttctccaagttttgattctcttcagtctgcctgttatttttttcactcattgtcctcaggttgttgggttttttgttttgttttgttttttgttttttatttgttttttcattttgtctagaatttttagtcctactcagtaggaaagagggctgaaggaggcttacttcatcctggtgagcatcagaagcctgtggtaatgtaycttaatgccatttttttttttttttctgatctgggatcagaaactgtgcgtggtgttggctgccatgtctttcaattttgaacacttctttaatatttcattgttgtgtatgctgtgatatttttgcagagcctgggccagtttggtagaattgctctcaatctctcaccctttcttgaatcaaccttttcaagctttttctcacctcttcaatggacatgctttagccaaggctgctggtaacttccatgttgctaaatccaatggatagtcc

SEQ ID NO: 800027 - DNA, 627 bp, Homo sapiens
tctgtgtatatatcttttacagtaatccccacatccaccagagaacctaggttattggcagaatgaggtttgggaattttggtcctctggccagacactatcagttagtactctgattccaccatttttgaaattatatacaacaaattttaagtattgtttattttggagagttcaggttaaaggaaatgaagactattattcagtattatttctgtaattttgtaattttaaccataacataggtttcttatcaaaacgtatggaagccagaaagcagtgaagcaacaatattttctccaaaacraacaggacaaactttggcaggagtgacaaatctggcatgcaatggtggcttctatatcagaaatcaagccttttactttgtgagaggcaggagtttttagttctttgtcttccttttggctgccagaggaattgaacattgtgaattcattggcatagtcccaagaaactttacttggcaagcaagctattgattttggcgggggtgggatggtgtttatcagtcacccctactagcagagatgtgataacactgcagtcagagtagttgagttttaaaattttgacttgccaaccaacagaacattatttatgtggtaa

SEQ ID NO: 800028 - DNA, 529 bp, Homo sapiens
actatcagttagtactctgattccaccatttttgaaattatatacaacaaattttaagtattgtttattttggagagttcaggttaaaggaaatgaagactattattcagtattatttctgtaattttgtaattttaaccataacataggtttcttatcaaaacgtatggaagccagaaagcagtgaagcaacaatattttctccaaaacaaacaggmcaaactttggcaggagtgacaaatctggcatgcaatggtggcttctatatcagaaatcaagccttttactttgtgagaggcaggagtttttagttctttgtcttccttttggctgccagaggaattgaacattgtgaattcattggcatagtcccaagaaactttacttggcaagcaagctattgattttggcgggggtgggatggtgtttatcagtcacccctactagcagagatgtgataacactgcagtcagagtagttgagttttaaaattttgacttgccaaccaacagaacattatttatgtggt

SEQ ID NO: 800029 - DNA, 627 bp, Homo sapiens
tctgtgtatatatcttttacagtaatccccacatccaccagagaacctaggttattggcagaatgaggtttgggaattttggtcctctggccagacactatcagttagtactctgattccaccatttttgaaattatatacaacaaattttaagtattgtttattttggagagttcaggttaaaggaaatgaagactattattcagtattatttctgtaattttgtaattttaaccataacataggtttcttatcaaaacgtatggaagccagaaagcagtgaagcaacaatattttctccaaaacaaacaggacaaactttggcaggagtgacaaatctggcatgcaatggtggcttctatatcagaaatcaagccttttactttgtgagaggcaggagtttttagttytttgtcttccttttggctgccagaggaattgaacattgtgaattcattggcatagtcccaagaaactttacttggcaagcaagctattgattttggcgggggtgggatggtgtttatcagtcacccctactagcagagatgtgataacactgcagtcagagtagttgagttttaaaattttgacttgccaaccaacagaacattatttatgtggtaa

SEQ ID NO: 800030 - DNA, 607 bp, Homo sapiens
actgtgaacaaaggttgttttattattcagataaagcctctcaggtactctctctgagctgcccttggaggaatacatgaaaagtctgtcagggcaaggtgaggactactagtttcttctcttgtggttaatctttcctggttatttcatgagattcctagggagggagttttaaggcaattgcatttctattttattttattttattattttattttattttattttattttattttattttattttattttattttattttattttattttattttattttattttttgagatggagtcttgctctatcacccaggctggagtgcagtggcacaatctcaactcactgcaacctctgcctcccgtgtttaagcaattctcctgcctcagcytcctgagtagctgggactacaggtgcatgccaccacactcagctaattttttgtatttctaatagagatgaggtttcgtcatgttggccaggctggtcttgaactcctggcctcaagtgatcctcctgcctcagcctcccaaagtgctaggattacaggcattagccaccgtgcccagcaattcttttggaaagaatctttcttagtcagctga

SEQ ID NO: 800031 - DNA, 607 bp, Homo sapiens
actgtgaacaaaggttgttttattattcagataaagcctctcaggtactctctctgagctgcccttggaggaatacatgaaaagtctgtcagggcaaggtgaggactactagtttcttctcttgtggttaatctttcctggttatttcatgagattcctagggagggagttttaaggcaattgcatttctattttattttattttattattttattttattttattttattttattttattttattttattttattttattttattttattttattttattttattttttgagatggagtcttgctctatcacccaggctggagtgcagtggcacaatctcaactcactgcaacctctgcctcccgtgtttaagcaattctcctgcctcagcttcctgagtagctgggactacagrtgcatgccaccacactcagctaattttttgtatttctaatagagatgaggtttcgtcatgttggccaggctggtcttgaactcctggcctcaagtgatcctcctgcctcagcctcccaaagtgctaggattacaggcattagccaccgtgcccagcaattcttttggaaagaatctttcttagtcagctga

SEQ ID NO: 800032 - DNA, 640 bp, Homo sapiens
aatcaaaacattgcaaaggtgggtgtggggaaatcaagctattatctttaggtatattctattcctaggtgtttaaaacactaatattaaaaagtgatatggagcttcacctaccctctggcaatttgcagttattgtcctttgatcatgtaaagcaactgagatcatttgctcctgacttcacttcactaatctatatccttcattttttsctccaagtgttccttcttctgagtgcctagtgctgctccagtacctagatatctctctctccccctctctttctgtctcaatatccaatcaatcccaagctgtattacctctttaccaactttgggaaagtggaccagtatccaggcttggataagccaaggaaaaatactaaggaactgcttaaagctctagtagttcttctactttgctgtttctggctttggccatctaaagcaaagttccttggattggttgacagtgagatagtctctagattcttgtgtctctttttagtaggaccacctaagatgtatcatccattgtgtaatgagttcttgaccaaagaaaagaaatcttaaggtcttcggactctgtcatctttcttgtttgccactctttggactgtaatttgaagagaaaaaacctt

SEQ ID NO: 800033 - DNA, 639 bp, Homo sapiens
gggctcatttgacttataggtgatgtgctccacttgaatatatgtgttgagagcactattaaataaacgtgaaggtttctaatacttaagaatttttcttaatgtcatttaatttgcataatcatcgagtctgggtttttgttgtcttttaaaaaatacatttattaaaattatatgccatactgcataaaaatggaactgaataattcaggaggtattaccatgaggccaaattcttacagccctttgtatgccaatcacataattgaatccatggtttttatatatcttttgatatatctagtactaaaaaaatgaacttattcttataacgtgtgtaggaagagaattacaatcgctctttactttttgttactaaatcatgacctttttaaaatgatcttctgtcctcacatactttatcarttacatttttgacaccattattttttattagagagtgagcaggagagaggggtggagaagagtcactcgtgttattgagtaccctgtgtccaagtcctgtgctagggtcgctgctgagtactttgcttggatatcccatttaatccttcatgtaactggagattagaattctttgttcacactgtaagatgaggaaacagaagtttgagtgaa

SEQ ID NO: 800034 - DNA, 605 bp, Homo sapiens
atccacatgtagaataataaatttggagccttatcttatgccatacaaaaaatcaacccaaactagattaaagacttaaaagcaagaccagaaactaaaactactagaagaaaacataggaaaaatgcttcatgacattgatcagggcaatgatttttagatgtgactccaaagaaaagtaaaaatagaaaaatgggattgcttctaactaaaatgcttctgagtaacaaaggaaacaataagcaaaatgaaaaggcatccaatgaaacgagagaaaatatttgcaaactatacatctgataagggcttaatattcaaaatatataaagaactcatacaactcattagygagaaaacaaataatcaaattaaaagtggggtaagttcctgatagacagttctcaaaagaagacatacaaattagtcaacaggtatatgaaaaagtgctcagtatcactaaccatcatgcaattacttttgcaccaacatagttgtactcaaaggcaaaaccacctccaattttttgaatgatttttttcttaatattctatttcttagtttctcacttatagacattttctatttattttaattcttttacatgc

SEQ ID NO: 800035 - DNA, 612 bp, Homo sapiens
aataaatgaatgttattttaagctgctttatttgtggtagttttttacacagcaatagaaaactaagacagaggcccgtaagatattttataatatggttcatcaaggttaattacaaaagcccaaacttttgaattaagaacattcaagaatktaattgtatagctttaaatctacttaccagatttttttttaatttagaaatttgttttcaaggacaattttggttaagacatgggacagtcttcatcttatccatttgatgaatggatctattggaatctattgtaatgaatatatatatatatatatatgagatggtgggggtaattttctaggattggcccaggagttagatgtattcttagtgatttttctttacatcattatagtccacctctgcaacacatacttgttgtcacctgaagctttcccacagcaggtgttcaagatattaatttaataccactctttccccatactttgatgatgcctattcagtttggattctggatacatttgattttattaattctgtcattcaatcttgatcttcatcctctaactcttaagacatgacatttgggcatgttctgtcttataaatgtatac

SEQ ID NO: 800036 - DNA, 628 bp, Homo sapiens
aaaatttgtatggaaaggcaaaggaactagaatatccaagacactcttaaaaaaacaaagctggaagtcttataccacttatatagacatcaagatgtatttaaagttacagtaattaagagaatatagtgttggtgcattggtagacagaaagtccagagacagacccacacatatacrgatacttgaattttgttaaagatggtactgcagagataaggacaatgttttaagtaatggtactgggtcgaatggatatttatatggaaaaaatatatataaattttgacccctatcttacaccaaacacaaaaatcaattccgtattgattgtagatctaaacatgaacagcaaaacagtaaatcttcagaaaataataatgagaattatcttcataaccttgggtaggcaaaaatctcttaaaacacaaaacccactaaccattaaggacaaaattgataaactgggttatgttaaaattaggaattctctttatcaaaagactgcatatagacacagacaagcaagacacaaaggagagaatatatttgcaacacaaataactaaagatttatctgatcattaatttctccatctataggattacatgaggtaatatatctaaga

SEQ ID NO: 800037 - DNA, 628 bp, Homo sapiens
aaaatttgtatggaaaggcaaaggaactagaatatccaagacactcttaaaaaaacaaagctggaagtcttataccacttatatagacatcaagatgtatttaaagttacagtaattaagagaatatagtgttggtgcattggtagacagaaagtccagagacagacccacacatatacggatacttgaattttgttaaagatggtactgcagagataaggacaatgttttaagtaatggtactgggtcgaatggatatttatatggaaaaaatatatataaattttgacccctatcttacaccaaacacaaaaatcaattccgtattgattgtagatctaaacatgaacagcaaaacagtaaatcttcagaaaataataatgagaattatcttcataaccttgggtaggcaaaratctcttaaaacacaaaacccactaaccattaaggacaaaattgataaactgggttatgttaaaattaggaattctctttatcaaaagactgcatatagacacagacaagcaagacacaaaggagagaatatatttgcaacacaaataactaaagatttatctgatcattaatttctccatctataggattacatgaggtaatatatctaaga

SEQ ID NO: 800038 - DNA, 582 bp, Homo sapiens
catatagacacagacaagcaagacacaaaggagagaatatatttgcaacacaaataactaaagatttatctgatcattaatttctccatctataggattacatgaggtaatatatctaagaggttggcacagtgcctggcacatagaaagtgttccatgaagtttctattgcctctgttatgactgagtcatccaggccaaggactgtacctcaaatcactctcaggctgacagatctctctacagtttttgacactccrcaaaggagtcagaagagtttcctcagttcttcttttacaaaccagtgttgaagacatttcctgaggaaccccttcatccccccagctgcagtccctatgcagacccccatgctcgattgtaaataacatagttgaagcattacaaggcaccagtggggaggatgagagtgggttttcatctcagctgagtcagctcgcgtggtgggaaatgccacaagagtgctgaaagcaggagggaggagtggcttgtcacggggaagaaagcctctcttctcccaaatgctatatcatctatcttcacagctgccaggatgcccagaag

SEQ ID NO: 800039 - DNA, 555 bp, Homo sapiens
cccagctgctctggaggctagggtaggaagattgcttgagcccacgaggtcaaggctccagtgagctatgaccataccatgccactgcactccagcctgagtgacagagcaagagcttgtctcacaaaaaaaaaaaaaaaaagaaaagaaataagccagacatccagacatgtaaggacaaacactccatgagggcactttgctggtgatttccaggggctgctggagggtgaatgaggggttagtgtttaataggcgaggagtttcagttgggaaagaagaaaatgttytggaaacagatggtggtaatgattgtacaacaatgggaatgtgcttaatgccactgaaccatagacttaaaaatagttaagatgggctgggcgcggtggctcacgcctgtaatcccaccactttgggaagccaaggcaggcagattgcctggggtcacgagttcaagaccagtctggccaacatggtgaaaccccgtctctactaaaaatgcaaaaattagccgggtgtggtggctggcgtatgcctgtaatctcagctactcgg

SEQ ID NO: 800040 - DNA, 555 bp, Homo sapiens
cccagctgctctggaggctagggtaggaagattgcttgagcccacgaggtcaaggctccagtgagctatgaccataccatgccactgcactccagcctgagtgacagagcaagagcttgtctcacaaaaaaaaaaaaaaaaagaaaagaaataagccagacatccagacatgtaaggacaaacactccatgagggcactttgctggtgatttccaggggctgctggagggtgaatgaggggttagtgtttaataggcgaggagtttcagttgggaaagaagaaaatgttctggaaacagatggtggtaatgattgtacaacaatgggaatgtgcttaatgccactgaaccatagacttaaaaatagttaagatgggctgggcgcggtggctcacgcctrtaatcccaccactttgggaagccaaggcaggcagattgcctggggtcacgagttcaagaccagtctggccaacatggtgaaaccccgtctctactaaaaatgcaaaaattagccgggtgtggtggctggcgtatgcctgtaatctcagctactcgg

SEQ ID NO: 800041 - DNA, 633 bp, Homo sapiens
aagcattgcactaggttatttcagacattgttagtctgacataatataggaagtatttttgtgctacacttttatcctggcgtaaaatgtggcataatttttaggttcaagagctgttttactcctattcaaaactttcttccagtgacctaaccaaaatagtatgtattaaaagcatgtataasctactacttttctatgaacaatagccttacaatctgtttgccttgcataaaacacatacatatgtgcacacctatgcaccataagctgtggatcctttgtgtgaagaagacacctgtccaccatggagaagtcccacttcccaggttttacatctccaaccccagagttcaaagccagctattcttcaatgattggaatagtttgctaaaaattaaaagtgaaatacgcaattgcaaataaatatgaaatgttttgctttctttaaatgtgcaccttttaaattttatctcttggatgtattaacacactaatatgagttggctttctcaaagtatttattgtctaaaacatggtttctcaaactttcatgataacaaagttttatgaaaattttttagatttttaaatgaaacgttagatatccctgcaaatgtgctaacacttgaa

SEQ ID NO: 800042 - DNA, 359 bp, Homo sapiens; identical to SEQ ID NO: 773726

SEQ ID NO: 800043 - DNA, 613 bp, Homo sapiens
ggctggcgaatcctctcaagaccctggccacttggaagaccctaagcctccttgcaggtggccatactaagcaaagtcacttgcagccacccttccacgatgcgttctacatcacccagctgtgaaaaccacccacccccatccccatccccttcacactcatgccttcctcctgagctcaaggggccctggcccaaggttcctttagaaccaggaaggaggttttgtccctctgaaaatcatccttttcaaacagaaggcatttatcttggccaggcttaaaagacaaaaagatgatagctgagctctagggcccatcccacagacaatatccagaaaccttctccccacaattcccacaccagcctcccagcagctggwtcttttctccacgggatttgcctacaagacttctctccggctttatctcaggcgggtttgtcaggggagcaatgtcaccatccctccaccaaattcacctcaacaacatttactgagcaccaagtgtgtccccaccgtggctcagccttcccacgcactgtcctgatttaaccccacgtgcttataacccaagggagaatcactgcgatattttatcaatgtaaagacacac

SEQ ID NO: 800044 - DNA, 622 bp, Homo sapiens
ctgaggcctggaggtctggcctctccagggcctttcctgtgcagcttccggagccccctccctggcaacaggaacagatgaggttgtggcacttttgctgtgggggtgggggagctgcaatgcctctgggagccgcgttctcgtctgtctcctccaccatcagcagtgcctttgtgctttcccatgaagtgatggcccagggcagacccatgcccaccatagtggcaccatagttagcctcctttgtctgccccccactcccccacctcctccagagcatgagcaagcygccatactcatggtgtgtggggcctggcgccctcctacaagcagcctggcctgcttcctccccctccgcctcgcctctccccactctctctctaggcagcatgccctgggcacacaacctgtagtccggtgcccgtggcgtctatgcatgggagactttgcctttattgctgacaaagttccagaaggcttcatccagaatgaaggatctgtgggtgatggagttaaacttcagaagagcctcctgtcacttttcctccggttctggagaagagctgtgggtctgtttctgccacagcctctgcagccagttctgtggccccatgctttgcca

SEQ ID NO: 800045 - DNA, 649 bp, Homo sapiens
accggcctggaatcaaggaccatggggttctgcccagtgctgtgttttactgtagcagagctggtactgggctccaaggcaaagtttaatgcacactctcttctccctcctggaagtggacacattgtctctctgcactgcctggggttgagggagggatggtataggcactgcaagactgtcttttccaccctgtttaatgtgtcttttcttgttttyaagctaaaaccaggttctgtgatctgtcacctgatttctttggctcttgtgaaggtattctcttgcttagattgttggtggttcaatttgatgttcctgcagggagacaatcttgtagagttctattctgccatctcgctccaccacctctcatttatttaattgttcttcaacttatttcaacaatattttgcaggtttcaaagtatgaattttgcactgctcttgttaatttctaaatttattacttgttttgttggtattatacatgggtttgtttccttaataccattttaaagcagtttattgatagtatatagaaataaaattaaatttttagtattgcatttatatcttgaaactacgtcaaatttatttctaatagtattttactgaatttcttagaattatatatgagatcgtgccatgtg

SEQ ID NO: 800046 - DNA, 649 bp, Homo sapiens
accggcctggaatcaaggaccatggggttctgcccagtgctgtgttttactgtagcagagctggtactgggctccaaggcaaagtttaatgcacactctcttctccctcctggaagtggacacattgtctctctgcactgcctggggttgagggagggatggtataggcactgcaagactgtcttttccaccctgtttaatgtgtcttttcttgtttttaagctaaaaccaggttctgtgatctgtcacctgatttctttggctcttgtgaaggtattctcttgcttagattgttggtggttcaatttgatgttcctgcagggagacaatcttgtagagttctattctgccatctcgctccaccacytctcatttatttaattgttcttcaacttatttcaacaatattttgcaggtttcaaagtatgaattttgcactgctcttgttaatttctaaatttattacttgttttgttggtattatacatgggtttgtttccttaataccattttaaagcagtttattgatagtatatagaaataaaattaaatttttagtattgcatttatatcttgaaactacgtcaaatttatttctaatagtattttactgaatttcttagaattatatatgagatcgtgccatgtg

SEQ ID NO: 800047 - DNA, 599 bp, Homo sapiens
tctctactaaaaatacaaaatttagtcaggtgtggtggcacatgtctgcaatcccagcaacttgggagttctgaggcgagagaatcacttgaacctgggaggcagatgttgcagtgagcagagattacaccactgcactccagcctaggctatagaacgagattctgtctcaaaaaaaaaaaaaaagaagaaaaaagaaaaaattttgctgaaatcttttatttagtgttgtctcctctgttctctttgtccctgtgagactatatatatatatatatatwtttttttttttttttttggtcatattaatggtatccctaaagagagggtgaggacagacatgggtgttcaatctgccatgtttaacttaaaatatatttctttgaatttttaaaaggaatttggggaatatttgtattttcatgatcccaagaacataaggaaataagagactggacaggtggggaaaaagatattattaaaatttcaacccagcctttatttcctataattttactgaaaagcttcctgggatatttagtccaaatctctccctgggctagtcattcaatgagaaacacagggctttcctttaatct

SEQ ID NO: 800048 - DNA, 393 bp, Homo sapiens; identical to SEQ ID NO: 773550

SEQ ID NO: 800049 - DNA, 614 bp, Homo sapiens; identical to SEQ ID NO: 799138

SEQ ID NO: 800050 - DNA, 628 bp, Homo sapiens
atgtagaacacagaaagcactaagcctccaagaaaaattgataaattgattttcatcaaaattaaacccttcagctccttggaaagacaaactacagacatggagaaaatatttgagacctctctttccccctgtttccctccttttctctttctctccctccttctctctctctcaccccaaccaagaagttgtttccagaatttataaagaatacttataattcagtagtaagaaaacygagtaaaacaggtaaaagatttgaatagatactttaagaagatatacattaaaagataatcattgtcactggtcaccagataaatgaaaattaaaaccataatgagatattactacacacccactagaaagactaaaattaaaaggactgactttgtcaagtgctggcaaggtgatggagcaactggaactcttgttcactggtggtgagaaagtaaagcgttatcattgttttgggaaagtttagtagtttgtaataatgttaaaggtgtacttactgtatgacccagcagttctgctcctagttatttacctaagagttatgaaaacttacatctacaaaaacaacttgtacataaatgttcaatgttccaaacctggaaacaag

SEQ ID NO: 800051 - DNA, 628 bp, Homo sapiens
atgtagaacacagaaagcactaagcctccaagaaaaattgataaattgattttcatcaaaattaaacccttcagctccttggaaagacaaactacagacatggagaaaatatttgagacctctctttccccctgtttccctccttttctctttctctccctccttctctctctctcaccccaaccaagaagttgtttccagaatttataaagaatacttataattcagtagtaagaaaactgagtaaaacaggtaaaagatttgaatagatactttaagaagatatacattaaaagataatcattgtcactggtcaccagataaatgaaaattaaaaccataatgagatattactacacacccactagaaagactaaaattaaaaggactgactttgtcaagtgctggcaaggtgatggagcaactggaactcttgtycactggtggtgagaaagtaaagcgttatcattgttttgggaaagtttagtagtttgtaataatgttaaaggtgtacttactgtatgacccagcagttctgctcctagttatttacctaagagttatgaaaacttacatctacaaaaacaacttgtacataaatgttcaatgttccaaacctggaaacaag

SEQ ID NO: 800052 - DNA, 628 bp, Homo sapiens
atgtagaacacagaaagcactaagcctccaagaaaaattgataaattgattttcatcaaaattaaacccttcagctccttggaaagacaaactacagacatggagaaaatatttgagacctctctttccccctgtttccctccttttctctttctctccctccttctctctctctcaccccaaccaagaagttgtttccagaatttataaagaatacttataattcagtagtaagaaaactgagtaaaacaggtaaaagatttgaatagatactttaagaagatatacattaaaagataatcattgtcactggtcaccagataaatgaaaattaaaaccataatgagatattactacacacccactagaaagactaaaattaaaaggactgactttgtcaagtgctggcaaggtgatggagcaactggaactcttgttcactggtggtgagaawgtaaagcgttatcattgttttgggaaagtttagtagtttgtaataatgttaaaggtgtacttactgtatgacccagcagttctgctcctagttatttacctaagagttatgaaaacttacatctacaaaaacaacttgtacataaatgttcaatgttccaaacctggaaacaag

SEQ ID NO: 800053 - DNA, 646 bp, Homo sapiens
accagaataaaaactgcaactcctttggcttcgacaataaattggcttcacaagaaaatacctacattcatgacagaagaaactggctcttgccttaacctatatagttaatgcagatttatatataaataacattatatactttttagaacatatatttttataaatgtatatttatatacaaaataactaaattattttctgaaacagccttgaacattgtgtgtaatctcattttctgtaagtcattttccttctactttctctataaaattggagcactgtcctctacccctccgaaaagacatttgttaaaatcacagtgaaggttcagcataccttagaaaatcagacattttaaattctatgaagttcagacaaaatattaatacaatatgatattcctatttaaataaactcctatttaagtgattaatgaatcatttatgtattattgtactatacttagtacagataacatatttttgttgagatagcrttcttaaagatcacagagattctgaaaatgcttctaggttgaggaacttaggtagaggaagctaacaatcgatgaatacaataaaggaaactcatgagtgatagagatttgaggaaagtgctagataatcatccagactttaaatag

SEQ ID NO: 800054 - DNA, 619 bp, Homo sapiens
catcttgatgtgcctacctgactcccaaagccagctgtttgaagggtagtagtttgtctagggtagtgcttttcaatgaggctgtactggcccctaagggaagactggaaagtgttttctggatgccgcaatgcttggagagcactactggcatttagtggactgcagtcctgttaygtgagaggactggacccggaagttgtgtcctgcattttcaacaatccctttgggtagtcatataggtgaaacacctgtttataattatttgagcctggaaacaaaactggttgcacatataaaaattgctttaattcaattttagtatacgttgaatttcctaagactacagctactgtataatttcaggtaaaattgttctttgctttggaaggtttactgtgcattgttcaccatttggaaaaccatgttgctgacaacaaggtggctcatggtatttgaataaccaacacagtgcagctccatcagtgctcatttgtagcacccttgttcaatacaacaaaaagcaaaattaacactcctttaacattttttatgaataagaaataaatatcagatcttatgagagaatattaattcttctttgtgtgttctttacttt

SEQ ID NO: 800055 - DNA, 622 bp, Homo sapiens
agtagcttcgctgggtggttagatgtggaagagaaataacaatctctgcactttgtttctcaggaacccccatccctagaagaaggggtagagcaccacatcaagggagcaccccatgggacaaaagaatctcaacagcagccctttagccccagaacttccctctcacatagtctacccaaatgagaaaaatccaggaaaaccattctgaaaattgacaaaacaagrttttctgacacccccaaagatcacactagctcaccagcaatggattcaaacaaaggagaaatttctgaattgccagaaaaagaattaagaaggtcaattattaagctactcaacaaagtaccagagaaaggtgaataccaacttaaatttaaaaatgtgttacaggacatgaatggaaaaatctccggagaaacagatagcataaataaaaaacaatcacaactgctggaaatcaagaacacactagaaaaatgcaaaatacactggaaaatctcagaaatagaatcaaacaagtagaagaaacaagttcagagcttgaagacaaggctattgaactaaccgaatccagcaaagacaattaaaaaacacacctttaactgtgttttcttatact

SEQ ID NO: 800056 - DNA, 626 bp, Homo sapiens
ttgacaaatgctctttaattcatacaaagttagagtatgcattttatattgtctgagttcaggaaaaatattaaaaactagttctctcatatttttccaaagcactacagaatctttatattatagtcataaaataattgagtgtggtgagagaaaagaagaatgtgtactgttgaaaacacctgattattcgcaagttgtacatagccaattaggaagttatagcatgcagctaccacatgtatgcttttaggtaacaggttcagcaggccccacctcaaatgccctcctatcagcctattctcgggtaaaggcatggtcgactccacttagatcaacatcatttagatyaccattctcatgtacctggtctctatgtttttggtcttgcacatctccaattgatcaccacacaaataacatttctaaaatacaaatctgatcatttcactattgtttgtaaaaccctgggccacacaagggcaagaaataagcctaacatgaaataagaaagatctactgggcattgatctctctcgcttgctcagccctgtctttgctcatgctgtgccttttcccttgcagcgtgtctcagcaagttcccctggctccaacatcacacactc

SEQ ID NO: 800057 - DNA, 649 bp, Homo sapiens
ttcttctgcatatggctatccagctattacagcaccatttattaggtagggagtcctttccccattgcttgcttttgtcaactttgtcaaagataaacagggtggaggtctgtggctttatttatttgttctctatttgattcaatttggtctatgtgtctgtttttataccagtaccatctgctttggttactggaacattatagtatagtttgaagccaggtattgtgatatctttagcattattctttttgcttagggttactttggctttttggtctctttttttgtttcatcttaattttataatagttgcctctaattctgtgaaaaataaagtctgtagttttttctgaataacaytaaatctgtagatttccttgggccactttaatgagattaattcttccaaccagtgagcatggaatgtttatctgtttgtatgagtcttattcactttctttcagcagtgttttgtggttctcctagcagagatctttcacctctgtggctaactgcattcctagattttttatttttgtggctgttgtaaattgaattgagttcttgatttggatctcagcttgaatgtttttggtgtttagaaatgtcactgaattttgtatattaattttgtatcctgagtctt

SEQ ID NO: 800058 - DNA, 544 bp, Homo sapiens
ggaaaagtttgagaatagcattaatctgtctttagatatttggtagcaatcaccagtaaaagcatcaagtcctgaacttttaagtttattattattattattggtgatttaatctctgtactagttattaatttgttcaggtttattctttcttcaggacatacatgtctaagaatttatccatttcttctacgttactcaatttattgacataattggtcatgataatctcttatgaccctttgtattttggtagtattgactaatttctcctgytttacttatagttttatttgagtcatctctcttagttttcttggtttgtctacctaaaggtttgccaattttcctcacgtttttacagaaccaactcctcgtgttactgatcttttcttttgtctttcttatctgtttaattctgctctaacctttataactttcttctttcttctaacttttggcttttttcttcttttctaattcccagagtgccaagttaggttgcttatttgggatcatttctctctctgtctcagtagctatc

SEQ ID NO: 800059 - DNA, 554 bp, Homo sapiens
tatcacatgtattgacttgtatatgttaaaccatccctgaatccctgttatgaaacccacttgatcatgatgatttatctttttgatatgctgttggattctgttagatagtattttgttgagaatttttgcatgtatgttcatcagggatattggtctatggttttgttatgtcctttcctgggtttggtattagggcaatactgacttcatagaatgatctaggaaggtttccctctctatcttgtggaatagtgtcagtaggattgatgccaattaattcagctgtgaatccatctggccccagactttttttgttggcattttttaattaccattccaatcttgctgcttgttactggtctcttcaragtttctatttcttcctggtttaatctaggagcattgtatatttacagaaattaaatcatctgtaggttttctattttacacgcataaaggtgttcatagtagccaccaataagcttttgtatttctgtgatattggttgtcatatcacctgtttcatttctagttgagcttatttgactatt

SEQ ID NO: 800060 - DNA, 422 bp, Homo sapiens
tacttcagttgtcccacatatgccttctgaatcattccttctctatggcatataagccctgggttctggggttaatggcacaggaatttaccatcttatctcactgctgcctgagacacagacatggcttctgttcataagtccctattaattgtttctgcctaaraaactgtatttatcagcctctttcttcagcatctcagcttcctccaactttggataggtttgtatagacctgctcactgcaaaacaattttgtatgtgattaagctggtgataatttaaaaagaattattcgtattagtgtttttagagattgggatttaatattaaaaatacacaaatagaaaaaccacctattgggtactatgcttattacttgggtgatgaaataatctgtacaccaatcccttgttacatgc

SEQ ID NO: 800061 - DNA, 627 bp, Homo sapiens
cctttatttgcattcgtcttcaaaaccccagagaggacttattaacagaaaacttttatctacacccctaatggacacagtgaagccagggatgatgtcacttttgtttttctttgcacacttaagccagccacacaccatgagcccctccaaatgagggtcaagacatcatctgatggtgagttacaccagataggtagacagtattgcaggaacaaaagatggtcacggttcttgacttgttctgcttttgaaacatttctattagttcttgactgtatttcctcatttccctctatcatctatttttatggagaaaagccaatctgttttatttttcctttgagtctcattttatataatacttatttactgcaacatattagtaaacgggtttttcatttccaaagtatttatggacaaaatcayatatattcttcctctgttattgaatgatacatttgttttagtgggatgaaaattttgcagaggaaaaacaactaatttttctttgaatggaaattaggtcttagagttagaaaacactagcaacaaatgtttcaatcatatttatgtttccctggtgaaaccaatagtgagttatctaaaacccaaattttagtctac

SEQ ID NO: 800062 - DNA, 596 bp, Homo sapiens
tgacaagatccaatatttttacatgttggagctgaaaatggaagttttataatcacattttaatgccaaaaaactattttatgtgctaagttataaagataaaagctataattttttctgtagtaacacatatctaacagactccaggaatggctgaaaaattatctttatcaagtgatatttattaatttataaataaattatttggtgagagttggtgtttctgtattaattattcatttttctgcactttttgacagttctcaccatgaatatrgattatcttgtcaaataatttaaatgaaaacagcagtgtaaatggaagttttctaaatagtaatttcaggtatataagatagataatcgcttgggaggaacagaggtttgcttttccatataaaagatgttattactttatttgtcaattaattgtagtgtttttgaaataaggttaatttctcaagcatcagaactaacattcctgagtatattcagaatactatagcacagttttccagcaatgtaaattatatacactgactactgccaaagaagtagctgtggttcccttctatgtgtattcagttctaaaattt

SEQ ID NO: 800063 - DNA, 605 bp, Homo sapiens
taaatagtaatttcaggtatataagatagataatcgcttgggaggaacagaggtttgcttttccatataaaagatgttattactttatttgtcaattaattgtagtgtttttgaaataaggttaatttctcaagcatcagaactaacattcctgagtatattcagaatactatagcacagttttccagcaatgtaaattatatacactgactactgccaaagaagtagctgtggttcccttctatgtgtattcagttctaaaattttggaaagcccccaaagatgttactggcatgaaaagtactgagcattgggcatcttgtaaacttaatcagtcatttgagtttttttccttgaaatgggtgctttctgcagttttggcattggtatttacaatagttaaatcaagaataaaatactgcaaaatattacaataaagacgacatgtattgaaaactwctataaaatagtaatgagattccagcatgaatctcatgcctatgaacgtgaaacatttgtccaatgctcttttatcatgacttcttttcatattggataaagtgatctcttcattattgcaaggcataacttatttgtcagtacaa

SEQ ID NO: 800064 - DNA, 606 bp, Homo sapiens
gaggaacaaattttgatacattacttgatgtatggaagaaaaaaacctgctgggtgccacttcctcccgctcactgaattaggggagcaaaaaagccacaacaaaaagaactgtatataagcattatcgtctagttcataaacattttttctaggaagtacagattaataattctgaaatctctgtgagaaaactagaataaaaaatctaagtaaatggctggtggattttgggagctaagttttcacttttggtgtagtagggtacagatatttacatataaaatatgtatagataaggcacatatacttccttgttcttttggctgtgagagcatagatgccaatgatatcccaatagcaacaagcacatctagagtcaagaacttgttttataatatcatttttttattacaacataagtgcaatacctatwgtatgcaatcccataagagcaaccaggagttcttggggaaatcactgactctaggactctaacttctaggataaatgatggattcttaatttccatcaagagaaggaaattatcaaggtaaacctggaacatcttgtagtgccaaacaatattgatttaaaaaaaatcaaa

SEQ ID NO: 800065 - DNA, 628 bp, Homo sapiens
cagtgttattaactatagtcaccacattgtacaataggtctcttggacttattcctcctgtctacctgaaattttgtaccctttgaccaacatcttttcccctttcctaccccagcctctggtgcccaccagtctactctctgcatcgatgagttcagttttcagattccacacgtgagatcatgcaatattcatctttttgtgccttgcttattttaattaacataatgtcctccaggttcatccatgtttttgcaaatgatagtatttccttctttyttatggctgaatagtactccattgtgtatatatgccacattttctttattcatcctttaatggacacttaagttaattccatgtcttggctattgtgaatagtgctgaaataaacatgggagtccagatagctctttgacatactgatttatttcctttgggtttatactcagcagtgggattgccggatcatatggtggttctatttttaattttttagtgaaaatccatactgttttttatagtggctatgctaatttacatttctaccaacagtgtgcaagggttttcttttctctacatccttgccagcacttgttatctttcgaaaataggctttctaactggg

SEQ ID NO: 800066 - DNA, 628 bp, Homo sapiens
cagtgttattaactatagtcaccacattgtacaataggtctcttggacttattcctcctgtctacctgaaattttgtaccctttgaccaacatcttttcccctttcctaccccagcctctggtgcccaccagtctactctctgcatcgatgagttcagttttcagattccacacgtgagatcatgcaatattcatctttttgtgccttgcttattttaattaacataatgtcctccaggttcatccatgtttttgcaaatgatagtatttccttctttcttatggctgaatagtactccattgtgtatatatgccacattttctttattcatcctttaatggacacttaagttaattccatgtcttggctattgtgaatagtgctgaaataaacatgggagtccagatagctctttgacatactgatttatttcctttgggtttatactcagcagtgggattgccggatcatatggtggtwctatttttaattttttagtgaaaatccatactgttttttatagtggctatgctaatttacatttctaccaacagtgtgcaagggttttcttttctctacatccttgccagcacttgttatctttcgaaaataggctttctaactggg

SEQ ID NO: 800067 - DNA, 518 bp, Homo sapiens
ctcaatttgttttctaataccttcaggatagaggcccaccctccctatgtagtgtacaagatgctcctgaatgtgatccagcctcattatccacacccatttccatccatatatggtccaggcacacacatacttttactttctctgatcaacatttggggaccctaggctttcatgcacatccttcgctcagtgacgtttcattcaaagaataaacatcctagtccttcttcacttacaaaataatttttcatctcttaaaccccaattcaaaatgccctttcccacaaaaaagccctttctaacctgactcttacagcactccatamatgcatacttgaaagtgcttgccccattttgctccaaaatgtacttgtttgtctctctccatcactatactgtgaatctcccagcaggagagatcaggtcttattcatctttatgtcccaggtgcctggcacaaaatctggtacatagtaggggtatttggtaaaagtttgttggataaatgaactcaa

SEQ ID NO: 800068 - DNA, 632 bp, Homo sapiens
agctgtttttttgaaaaacattaataaattagatagaacaccagatagactaataaaaaagaaaaacaaatcaaataaatgcaatcagaaatgataagggaatatcaccactgaccccacagaaatacaaacaagcaccagagaatgctataaacaccactatgcacataaacttgaaaamcaaaataaaattggtaagtttctggacatagtcacccttccaagactgaaagaagaaaaaactgaatccctgaataaatcaataatgagttctgaaattgaggcagtaatatatagcctacaaaccgaaaaaaaaaaaaaaaaagcccagtaccacacagattcacagctgaattctaccagaggtacaaagaagggctagtaccatttctactgaaactattccaaaaaattgaaaaggaggtactcctccctaactcattctatgaggtcagcatcatccagatacaaaaaccaggcagagatacaacaaaatgaaaactttaggcaaatatccttgatgaacacaaatgcaaaaattctcaagaaaatactgttaggcctaatccagcagcacatcaaaaagcttatctaccatgatgaagttggcttcatccctaggatgcaaaatt

SEQ ID NO: 800069 - DNA, 600 bp, Homo sapiens
ccttccaagactgaaagaagaaaaaactgaatccctgaataaatcaataatgagttctgaaattgaggcagtaatatatagcctacaaaccgaaaaaaaaaaaaaaaaagcccagtaccacacagattcacagctgaattctaccagaggtacaaagaagggctagtaccatttctactgaaactattccaaaaaattgaaaaggaggtactcctccctaactcattctatgaggtcagcatcatccagatacaaaaaccaggcagagatacaacaaaatgaaaactttaggcaaatatccttgatgaacacaaatgcaaaaattctcaagaaaatactgttaggcctaatccagcagcacatcaaaaagcttatytaccatgatgaagttggcttcatccctaggatgcaaaattggttcaaagtatgcaaatcaataaatgtgaattatcacataaacagaattaaatgaaaaaaacacgtttatctcaatagatgcagataagactttcaataaaatttaatattgcttcatgttaaaaactctcagtagactagatattaaagaaatatacctcaaaataatagccatatatgaca

SEQ ID NO: 800070 - DNA, 532 bp, Homo sapiens
ctcattttccctctggtggcctattttttgaccacttcactgtcaacagtagttccttagaggacaagccaccgtgggagaggctggcgtcatctgtggtgttaaccagcccatgttctcttgccttccttccaggatatgcctgtgctacagacacaacagcaacttctggcatgttcctgrcccctgtggctggggttctggcctcagagaagactggccctgggcacagggaggcagggaggggctcggtttgccttctgggctggaagtctgggtggaggttcagcctggaatctgttggaagaacttggctggctccctgcaaaaatgaagtgctcatcttcctgtctacacggggctcttggagtctggagcggagttcctgcttcggccgaggtccagtggcactggcctgggtgtgatacccagaccctgggagggggccatagcagccagagtgacacataatcaaactcctggccctcagaatggcaccttcccagagtagggttggcaaccgtgtagatgc

SEQ ID NO: 800071 - DNA, 655 bp, Homo sapiens
ttcccttgccgtcaagatacagttccagccagtgaaaaataaagacaaatctgagggagggcttcttgcttcctgataaaagagatagacatttaatggaagaaactgtccctttcttctccttcttgccttgaatgtggttgagtgagggcacgatggctgaagctgtggcagccatcttgccatcaaaaggtaacaagcttgtccaggcactgtggctcatgcctgyaatcccagcactttgggaggccgaggtgggcggatcacctgagctcagaagttcaagaccagcctgaccaacattgcaaaaccccgtctctactaaaaatacaaaaattagctggtgtggtggtgtacatctgcggtctcagctactcaggaggctgaggcagaagaatcgcttgaacctgggaggtggaggttgcagtgagcagagatcgccccattgcactccagcctgggtaacaagagcgaaactcgatctcaaaaaaaaaaaaaagtaacaaactgaagaaaagcaaacacagtgaggatgactaagcagagagatggaaagagcgtggatcctttcaacattttttatctgctcatcaactctggatcagacttctcagataattcagtgtcatcgtggtttaagccactgtccatgggg

SEQ ID NO: 800072 - DNA, 655 bp, Homo sapiens
ttcccttgccgtcaagatacagttccagccagtgaaaaataaagacaaatctgagggagggcttcttgcttcctgataaaagagatagacatttaatggaagaaactgtccctttcttctccttcttgccttgaatgtggttgagtgagggcacgatggctgaagctgtggcagccatcttgccatcaaaaggtaacaagcttgtccaggcactgtggctcatgcctgtaatcccagcactttgggaggccgaggtgggcggatcacctgagctcagaagttcaagaccagcctgaccaacatkgcaaaaccccgtctctactaaaaatacaaaaattagctggtgtggtggtgtacatctgcggtctcagctactcaggaggctgaggcagaagaatcgcttgaacctgggaggtggaggttgcagtgagcagagatcgccccattgcactccagcctgggtaacaagagcgaaactcgatctcaaaaaaaaaaaaaagtaacaaactgaagaaaagcaaacacagtgaggatgactaagcagagagatggaaagagcgtggatcctttcaacattttttatctgctcatcaactctggatcagacttctcagataattcagtgtcatcgtggtttaagccactgtccatgggg

SEQ ID NO: 800073 - DNA, 534 bp, Homo sapiens
tattcctttatgctagtttattcgaatcttaccatagcaatgtgacataaacaataggtggttttattccggctatatgaagctcaggaaagttaagacagtagtccagtctctcaactagatcacaaggagttgggatttgaacctgaatcttccgtttaaaaatccaatgagttgggccaggtgtggtggctcatgcctataatcccagcactttgggaggccgaggcaggcagatcacctgaggtcaggggtttgaaacccgcctggacaatgtggcgaaaccccctctctactaaaaatacaaaattagccaggcrtggtggtgcatgctggtaatcccagctacttgggaggccgaggcaggagaattgcctgaaaccgggaggcagagttgcgatgagccgagatcgtgccattgcactccagcctgggcaacaagagcgaaactctgaaaaaaaaaaaaaaagaataatccaatgagttggccaggcacagtggctcacgcctgtaatctcagcactgcgggcagat

SEQ ID NO: 800074 - DNA, 608 bp, Homo sapiens
aactcgggaggtgaaggttgcagtgagctgagatcatgccatttcactccagcctgggtgacactgtgagactctgtctcaaaataaataaataaataaataaataaataaacttgcatttgagcttgtgtgttatgttaacatatgttctcctttctcaaaattgccaacgtgtacttggtttaactcargaacagtttcttctggattccttatctgatttatttaactgaattatattctaatattgcaaatatcaccataagtgggtaatagtaaaattcctcttctgaaaatgtgtactgtgcttttagatttttaaattccacaatgtaaaatacattcttaattttcaaccccctccaaaaaacacaaaaattagctggacatggtgcacgccggtagtccccgctagttgcggggctgaggtgggagaattgcttgaacctgggaggcggaggttgcagtgagccgagatggctccactgcactccagcctgggcgacagagccagaccatgtctaaaacaaaacaaaacaaaacaaaacaaaaacccaaaaaccaaaacaatccgcaggtggtctttaggcactgttgattcatgatct

SEQ ID NO: 800075 - DNA, 608 bp, Homo sapiens
aactcgggaggtgaaggttgcagtgagctgagatcatgccatttcactccagcctgggtgacactgtgagactctgtctcaaaataaataaataaataaataaataaataaacttgcatttgagcttgtgtgttatgttaacatatgttctcctttctcaaaattgccaacgtgtacttggtttaactcaggaacagtttcttctggattccttatctgatttatttaactgaattatattctaatattgcaaatatcaccataagtgggtaatagtaaaattcctcttctgaaaatgtgtactgtgcttttagatttttaaattccacaatgtaaaatacattcttaattttcaaccccctccaaaaaacacaaaaattagctggacatggtgcrcgccggtagtccccgctagttgcggggctgaggtgggagaattgcttgaacctgggaggcggaggttgcagtgagccgagatggctccactgcactccagcctgggcgacagagccagaccatgtctaaaacaaaacaaaacaaaacaaaacaaaaacccaaaaaccaaaacaatccgcaggtggtctttaggcactgttgattcatgatct

SEQ ID NO: 800076 - DNA, 601 bp, Homo sapiens
ttaagtttcagcatctgaattttggagggaacacattcaaaccaaagcagtagccctgaataacaaaggccttttcctaccctgtgaatgccaaagctgccatctgtaacggaataatgtgattggtaattgtgtcacgtaggaccaatagagatcagcaacctcagccagactgatagagatcctggcatcagatatttcttctccatgtccttttgacttcagatcccagttccctgactttcagcctccctgtaaaatatatcagtaagatcttggtgcttgtgggtctgagttaaagctggtgtgtacatttccttcttttctctgcttgtttaaacccatttcttcttatgcrcttattcaccatagaaacaccaaaaacatttttttccaatctaggccaagcattctggaacatgtgattgctagcattatacctgtgaaaggaaaatttatatcacccaaacaagtaaactgccttgttgaatgattttgttgttatgtagtttgcttgtatgtttttgtggaggcgtttctatttctgaatcatggagtcaactcagactccactgcacccccttggatccccagattctgt

SEQ ID NO: 800077 - DNA, 608 bp, Homo sapiens
gtgacactccagctgcaaagcccagaaggtggctggagctgagatgctggcggtgggaattgacttcctattcatgcgagcaagtctgctctgtgggtgcacagcatctgccagcaaatccctaggcagggggctgtccggagtgcaggggaggagttgggaccagcccccaccttgcaagcagcccagctctatgagattcccctgggcagaagattaaaaacaaatgtttgakgccattcatggagcacatgcctcgtgttttattctcttttctccacactgccctggatcctccgctgctctggacatcttgaggtctgaggcagagacctgtgtgacagcacgattgcggaaagagaaggtttctcagatcagagagccttcatgggaaattttcttacttgaaagcactcttagatgttctcttcccttttactcaacaaagagccagagtgcttgtgatctggcaaaggaagatgaatggggcagaatcactgcctggaaagatctttgcagagagggacgtaaccctccgtcctgaagaaggccagacctaacctgctcggcctcgcctccctccctgccctcacagaggccctcggctg

SEQ ID NO: 800078 - DNA, 608 bp, Homo sapiens
gtgacactccagctgcaaagcccagaaggtggctggagctgagatgctggcggtgggaattgacttcctattcatgcgagcaagtctgctctgtgggtgcacagcatctgccagcaaatccctaggcagggggctgtccggagtgcaggggaggagttgggaccagcccccaccttgcaagcagcccagctctatgagattcccctgggcagaagattaaaaacaaatgtttgaggscattcatggagcacatgcctcgtgttttattctcttttctccacactgccctggatcctccgctgctctggacatcttgaggtctgaggcagagacctgtgtgacagcacgattgcggaaagagaaggtttctcagatcagagagccttcatgggaaattttcttacttgaaagcactcttagatgttctcttcccttttactcaacaaagagccagagtgcttgtgatctggcaaaggaagatgaatggggcagaatcactgcctggaaagatctttgcagagagggacgtaaccctccgtcctgaagaaggccagacctaacctgctcggcctcgcctccctccctgccctcacagaggccctcggctg

SEQ ID NO: 800079 - DNA, 414 bp, Homo sapiens
gcttttctccttgtgttacaaacgattcaattatactctttcggttattttaaaatataaaattaaattgttttttactataatcacactgctgtgctagcaaatactaggtcttattctttctttttctgtatccrttagctatctctgcttacccactaccactgcctgactgccctctctgtctctggaaaccatcattttattctctatctatatcagttcaattgttttaaattttagctcccacaaataagtgagaacatggcagtttgtgtttctgtgcctaacttatttcacttaacataatgacctccagctccatctatgttgttgcaaatgacaggatctcattcttttttatggctgaataatattccattgtatatatgtatttaacacattttctttatc

SEQ ID NO: 800080 - DNA, 516 bp, Homo sapiens
agagggctctgcctctgtgctcccatagcctccaagcctgcactcatgcatcctcttctccaggacattttccctaaatcctggccaggcagagggctctgcctctatgctcccatagccccagggcttacctctctgttatcaygtgcggtatttagaaatgatacatttgtttggccgtttcaaccactggaatgtaagctgaggccacatctcagctgtgtcttctcagatccagtacctggccctggagtgcactggggagatgttgtcatatattgagctaaagagcacctgaagggcatgagatttattccccgtagtgccacagacttggtcacttttgtgtctattgtaaataaactatttgtgcaaaagcagagaacatgggagacagaactgtagattgagcagacaagaaaaaagaaaagcaaaaccatcaatacttgcagcaagtcttaaccatgtcggcacgaagagtgacagcatgatcgcagagattcggagcaatggctg

SEQ ID NO: 800081 - DNA, 547 bp, Homo sapiens
ttccttttctggcctgagcaggatgctgatatgctaactggtgatgagcaagtatggaaggaagttcaagaatccctgaaaaaaattgaagaactgaaggcacactggagtatcctttcgcctgtggattgaggtggactgttgggattgtttccttgttttcttgaagccctgtsgtaatgaggtcagaggcggggtttgacctctccatgagccagtggttttcattctgttccatggtcacaggccgcacctccgaccctggccagcagtttgagtaatgacaaggaagttcgtggcaaaatcagcgtgaataataactcactaccgttaggtaataatcaaaactcatggcctagcagtagtaggaaagtaagaattagtctctttatatgtaaaaggtaacaaattcctcaattttcttctcccataaccactaacatctctaggaaagagtagcttagaatccttatcattcagtgccattgaccgtcagacccagaagcttcatattaaaccagccacgactacaatggcagtggggatt

SEQ ID NO: 800082 - DNA, 543 bp, Homo sapiens
cccatttttatactcttccctggctatgccaggaccctggaaacccataccttttctctctgtcatcaagacagtgaataggccggacacagtggctcacgcttgcaatcccagcactttgggaggccaaggcaggcatattgcttgagtcctggagttcaagaccagcctgggcaacatggtgaaaccccatctctactaaaaatgtgaagattagctgggagaggtggcatgtgcctgtagtcccagccaccagggaggatgaggtgagaggatcgcttgagtctgggaggtcaaggctgcagtgagctgtgatcacgtcrttgcactctaacctgggtgactgagcgagaccctgtctcaaaataaaataaataatataaaataaaataaataaaataaagatggtaaatagcagagctcctaatttcaaatcagaagtgataatcctgcactattaccaccttagagaggcccaagttctggtaagaagtacactgatcaacactgggttctagagaactctcctaagtggcagtgcca

SEQ ID NO: 800083 - DNA, 541 bp, Homo sapiens
ccctcttttaacactcaagctcccagtcaagaaccatgtgctaaggggagctgctggatttcctgtaacagcatgagtcattctaggtagcagtagtctactgggaaaagttcagaccaggagggagccactagaatctactttgtacctttggataacttcctagtgaaagtttttgtccaacctggagggaccccagtcctgtgcctccttggtwgcagtatccaaggaaaacagaagttcccagctatagctttcacccagcccatagatgctcgtggtcctaaaaggcttcctgaactctaatgttttagatactaattccaggatctgtcttcagaatccatttgtttttctgtctggcctatcctccttggagatatttcattctggctcatatactttctctctgctcactgtctaccttctacattctcctctgctgctcctccctacctgcagcaaggatacctgtttccctttactccaaaatcccacagctgtggaccaaccccacttattccccgtctaccttgcttgg

SEQ ID NO: 800084 - DNA, 508 bp, Homo sapiens
cgtgggtagatgcacgggtgaaatctaagtaaagcctggggtttagttaatagtcacataccaacatttgcttcttagttttgacaaatgttccttggtaatgtaagatgttagcaacagaggactgggtaaagggtrtataggaacactctactatctttgcaacttttctgtaaatctaaaattattccaaaatgtgtattttaaaaacattgttatgaatcagcattataaaagcaggttttttttttttttttgtcacatattccgggcagtaattaaaggcaacagagattgccaaatgtctaggaatggatcgtggaagcttcactgtgcggagaaggtggtttgacagttcttggaatgctgattcccccattatgaagaactatcactccatctccaagaatctgtcaagagcttccagctgacacttagcaaagtcaatacctttcagtcacgttattcaattaaggaaaatatgaaacaataagcttataaaaaaagg

SEQ ID NO: 800085 - DNA, 508 bp, Homo sapiens
cgtgggtagatgcacgggtgaaatctaagtaaagcctggggtttagttaatagtcacataccaacatttgcttcttagttttgacaaatgttccttggtaatgtaagatgttagcaacagaggactgggtaaagggtgtataggaacactctactatctttgcaacttttctgtaaatctaaaattattccaaaatgtgtattttaaaaacattgttatgaatcagyattataaaagcaggttttttttttttttttgtcacatattccgggcagtaattaaaggcaacagagattgccaaatgtctaggaatggatcgtggaagcttcactgtgcggagaaggtggtttgacagttcttggaatgctgattcccccattatgaagaactatcactccatctccaagaatctgtcaagagcttccagctgacacttagcaaagtcaatacctttcagtcacgttattcaattaaggaaaatatgaaacaataagcttataaaaaaagg

SEQ ID NO: 800086 - DNA, 481 bp, Homo sapiens
actatcactccatctccaagaatctgtcaagagcttccagctgacacttagcaaagtcaatacctttcagtcacgttattcaattaaggaaaatatgaaacaataagcttataaaaaaaggcacatgaaacttgaatatttctttacaggattcaacattatgttgtttattctaaggatacaaaggagaccaagatcataagtttatgaaaagcaacttgtccctctaagattccatataacttctaatggtcaaaagtgactcagtgaacccttagactcagatggcaaagagtgattagatgcaaactrtaactgagatactaaagaagaaatcctgagtgctcatctagataaatgtaggctcttactgtgtgttaaaaacaaaactatattacttataatcaggtgtcgtcttctcctcaactctcaaaaaaaaaaaaacaaaaaaaacattaaatcgatgaggagcttaaaactg

SEQ ID NO: 800087 - DNA, 539 bp, Homo sapiens
agttcttcatagcagtgtgaaaacgaactaatataaggagagagttttaaggaagcaacttgatgaaatgggtcatttaagaaacttggcgtgggaaataaaatgtagtgtttccagccttaataaacaaggaaattttggctggatgcagcggctcatggctgtaatcctagcacttygggaggctgaggcaggaggatcgcttgagcccaggagtttgagaccagcctgggcaacatagtgagaccccttctctatttaaaaaccaaaacaaaacaaaaacaaggaaatcctgtcacatgctacaacatggatgaagcttgcagacactacgctaagtgaagtcagccacaaaaagataaacactatttgattccagttatatgaagtatctaaagcaggcaaattcaacgtaaaaaggtggttgccagagactggagggaggagaaatggggaattgttcaatgggtatagagtttcagttttgcaagatgaaaaagttctggatgactgttatacaacagtgtgaatatacttaa

SEQ ID NO: 800088 - DNA, 617 bp, Homo sapiens
caccacgccaggcctccattttttaaatgtatcttttacagagtagatgtttttaattttgatgaaatctaatttttccatttttttcttttatgaatcatatttttggtgtcatatttaagaactcttgcctaactcarggtcatgaagattttcccctacgtcttctaaaatttttacgagtttgtatttaggtcaatgatctatttgagttcatggcctcatcattgaccttgatatgtaagttatgaagttcaggttgaagttcgtttttcttcctagactagactatacattttccaaagaagatatacaaatggctgataaacacatgaaaagatgttcaacattattaaccattagggaaatgcaaatcaaaaccacagtgagatagcacttcacacccactgggatggatataatagaaaaggtagataacaggtgttgttgaagatggttaaaaatgccatccttactccattgaattgttcttatgcctttgggaaaaaaaaagtaattggctacatttgtgtgaatcaatttcttgaatttctattgtgctccattcattttgtgtctatctctttgccaatgccacactgtcttgattactgtgg

SEQ ID NO: 800089 - DNA, 617 bp, Homo sapiens
caccacgccaggcctccattttttaaatgtatcttttacagagtagatgtttttaattttgatgaaatctaatttttccatttttttcttttatgaatcatatttttggtgtcatatttaagaactcttgcctaactcaaggtcatgaagattttcccctacgtcttctaaaatttttacgagtttgtatttaggtcaatgatctatttgagttcatggcctcatcattgaccttgatatrtaagttatgaagttcaggttgaagttcgtttttcttcctagactagactatacattttccaaagaagatatacaaatggctgataaacacatgaaaagatgttcaacattattaaccattagggaaatgcaaatcaaaaccacagtgagatagcacttcacacccactgggatggatataatagaaaaggtagataacaggtgttgttgaagatggttaaaaatgccatccttactccattgaattgttcttatgcctttgggaaaaaaaaagtaattggctacatttgtgtgaatcaatttcttgaatttctattgtgctccattcattttgtgtctatctctttgccaatgccacactgtcttgattactgtgg

SEQ ID NO: 800090 - DNA, 604 bp, Homo sapiens
gccaccgtgcccagcctccagcagttttttttaataaagaaacttctaacaagatctaaataagtttcccttggaaagtatatggctatgattaattcttttgcttacaattatgatttctacacacctattatacatactcagaaattttgcaaaatgaaaaaaatctgacctagaaatggcttcaaatgtaatgatattaaaatttgaatatcaaattaaaagttattaaagttgacaaaatgctgactttgcatacttttaaacacttattaatttcagcatgcagtttcttgtattttgaagccgatacatttattcaggtcttaaacatctgagaagcttgtaggccctggcagagcccaagataccaaatggctaattggcctactcccactaaagggaagaccaccatcgctttcacctggaccattcctaaccrgcctgcctgcttccttgctcaatctaattgttctcttgcatcaaatgattttttttttaaaagataacgctgtgctcttgcgggcacataaacccacataaacccttcaatggtttcctagagcatatggaataaataaaaaccacattcttcaccatggcc

SEQ ID NO: 800091 - DNA, 626 bp, Homo sapiens
aacataatgaagtggctaagatgatgaattagagaaataattgtaacagtgcagctcagaaagatgacagttaggccgggcgcagtggctcacgcctgtgatcccagcacattgggaggccgaggcaggtggatcacaaggtcaggagatcgagaccatctggccaacatrgtgaaaccctgtctctattaaaatacaaaaaattagccaggcgtggtggcacgcacctgtagtcacagctacttgggaggctgaggcagcgggaattgcttgaaaccaggaggtggaggttgcagtgagccgagattgttccactgcacttcagcctggcgacagagcgagactccgtctcaaaaaaaaaaaaaaaaaaaaaagatgacagtcagagataggagtttcagagtgaagaaatactaaatgtatattcgacctaaatgtaaattacaaagtcaaaacaaattagaagaggcagaaaggtgaatcaaatctgagtctgattgagaccgactctaatagcactatattttgagtatcctttgtctgaaatgcttgggaccagaagtgtttcagatttcagatgtttttggattttggaatatgcatataattacctgctgagcacccca

SEQ ID NO: 800092 - DNA, 624 bp, Homo sapiens
ttgattccatgtctcacatcctgggaacattagggtagaggttgggccgccaaggcctcacgcagcctcattcctttgactttgctgggcttagtccaccagcagctcacgtaggttggagccccaggcctacagctctgacagcctgaagctgtaagctggtagctctatagttctgggtccaggggtggccccatttccaaggttccaataggctttgtcatagtaggagctctccgcagtggctctgcctttgtgacaagtttctgcctgagcccccaggctgtccatgacatccttcaaaatttagatggaggaagccatgcccscacagctcttgctctctgtgcacctgcagaattaacaccatgtagccgttgccaaggtttacagcttataccttccagagcagtaggatgagcctcacctgggcctgcttgggctatagcaagggtggatgaggagcaaagtgccagaatgcagagagcagagacccaaggtagctctgggtgacaagcctgtggagggtgccttgggctggtctctccaaaccattctgccttcctagagctctggacctgcaatgggaggggcagccatgaagctctgaaatgccttcagtat

SEQ ID NO: 800093 - DNA, 624 bp, Homo sapiens
ttgattccatgtctcacatcctgggaacattagggtagaggttgggccgccaaggcctcacgcagcctcattcctttgactttgctgggcttagtccaccagcagctcacgtaggttggagccccaggcctacagctctgacagcctgaagctgtaagctggtagctctatagttctgggtccaggggtggccccatttccaaggttccaataggctttgtcatagtaggagctctccgcagtggctctgcctttgtgacaagtttctgcctgagcccccaggctgtccatgacatccttcaaaatttagatggaggaagccatgcccgcacrgctcttgctctctgtgcacctgcagaattaacaccatgtagccgttgccaaggtttacagcttataccttccagagcagtaggatgagcctcacctgggcctgcttgggctatagcaagggtggatgaggagcaaagtgccagaatgcagagagcagagacccaaggtagctctgggtgacaagcctgtggagggtgccttgggctggtctctccaaaccattctgccttcctagagctctggacctgcaatgggaggggcagccatgaagctctgaaatgccttcagtat

SEQ ID NO: 800094 - DNA, 586 bp, Homo sapiens
gtgggttttgcccatttgagagttctagatgatttaaagcagtgattctcagacttttggatttcatagactattaaaatttcagaaaaaaaataaggctggttggcaggtaggtaggagttacggaaagtagagacaagtttctaattttttgtattgttaactaaggacgctaataaaataaatttctctcaccatagtttcatcaatgaaataacattagttaatactcaagagagtacttgcttcaatgtaagaagcactttacatatactgcattaaattatctaattctcataagaaccctatggatggagccatgacaattttccatcttgacaaggaaactgaggcacagagaggttatgtaacatgcctaagatcactcagtcggtaggggaagrgtacagattcgaaccgaggcagagttcattcatgtctcaactctccggttttcttttaccagtacaagaaattaaaggtcatttgaaaaagccaaaagtcccaggtacatgatttcagaagaaaaaaaataactaaacacatttagccttatggaaagctaaccaatgtccttattctcttt

SEQ ID NO: 800095 - DNA, 586 bp, Homo sapiens
gtgggttttgcccatttgagagttctagatgatttaaagcagtgattctcagacttttggatttcatagactattaaaatttcagaaaaaaaataaggctggttggcaggtaggtaggagttacggaaagtagagacaagtttctaattttttgtattgttaactaaggacgctaataaaataaatttctctcaccatagtttcatcaatgaaataacattagttaatactcaagagagtacttgcttcaatgtaagaagcactttacatatactgcattaaattatctaattctcataagaaccctatggatggagccatgacaattttccatcttgacaaggaaactgaggcacagagaggttatgtaacatgcctaagatcactcagtcggtaggggaagagtacagattcgaacygaggcagagttcattcatgtctcaactctccggttttcttttaccagtacaagaaattaaaggtcatttgaaaaagccaaaagtcccaggtacatgatttcagaagaaaaaaaataactaaacacatttagccttatggaaagctaaccaatgtccttattctcttt

SEQ ID NO: 800096 - DNA, 625 bp, Homo sapiens
tcaactttcataaaattatagagccaaaactcaggcgcttcttctctcagtggatttctcaaatgctagatcaaaacagctgccaattgtccattctcactcatccaatgcctgtaaagtaaaatagttgctgtaataagaaagggttttataatggccttttccctcaagttcaatatgagatgcactctagactttttatgatacatctactactagtgaaacattgccttacataaagaacttaatagttgttctttagttccttgtcattgatattaacagctaaagaccatcatctcacatgacattgctgctgaaatttccagcagtggggtcagggataatcttttgatcactrtgttcaatagcatccataaccttccttttgagacattgaattaaaatattacatttatctgacgaaaatcattgaaaaacattggctggcctgtatagaagagcttagatttttgatttcagaagcaatcagcgttacttttaggcgacccattatctactctttatttttcttctgcctctatttcccctgctagatgcaattcaaagtttacactttagaaaattgctgctgtaaagttaaaaggactgtacattcaaaagt

SEQ ID NO: 800097 - DNA, 600 bp, Homo sapiens
gtggatatccagttttcccagcacctttccccattgtgtattcttggaacctttgtcaaagatcagttgactgtgtatgtgtgagtgtttttctaggtgttctattggtgtatatgtctgtctttacaccaaggtgtctttacactggcatatctttacaccagtaccatactattttaatttctgtagcttataaaatgttttgaaatcaggaactgtgatgccttcagctttgttctctctcaatattgttctgaacattccagattsttttttgtttcatatgaattttagaactgttttttccatttctataataatcagttactgggagtttgataggcaacgcattgtatctatagatcacattgggtaacatggacattttaacaacattactcttccactccatgaacatggaaggttttaccatttatttgtgtcatctttaatttctttcagtaatgttttgtgattgtcagtgttcaagtccttcacttccttagtttattcctaagtattttattctttttgatgtgattgtaaatgagactgttctcttaatttcttttgtggatagtttgttattagtgtgtagaa

SEQ ID NO: 800098 - DNA, 639 bp, Homo sapiens
gcatgatcttgtccttgagtttcttctgaaattttactttctttatctaaagtttaataacatttattatgttacccaaaaatattttaaatcaatattcttatggtcttctacatatgttaactttgagggcctgttgtttttggttgggggagggcaggggttatagtgatrtgtgagccttttatgtaaaaatatacttccaagaaatttctcaaattgagtgccccgtggaaggatcaatagaaaggaataatgatgaggttatagccttctgttccatcattttatggcttacaataaaataatgctataatctttataaggatgatgttacttatccttctctcatagaaacttctctcacaaatagaattctatctcatcacattctagtttctctgactctaaattaattcttttatttcaagtatctgtgataagtttatgcttttttaaagttattttatagaaacatttttatcttgtttccttcattcctcaatttattgggcatgattaactcctgaatactttaaggccttcttcatgatgtactaccaaacaatgatgtggaatcatggcagttggtcatcatgaaggattttatgaatatttgaatctaaaaagcctcattct

SEQ ID NO: 800099 - DNA, 538 bp, Homo sapiens
tgagactttcggtaacccatcaaagatcacagatttagtgtagggacatagctctgagcccggggggttgcaccattaaccaagaagccatgctgtctcctgtaaggaaactgaggcccagagataattttttacttgcccaaagcaacttgactagctgaattcaaacctgggtccaaatctttctaaatttttatgctcgtaatcygaaacgaacaaccttatacactaaccaaatgaagaacagggaacagtttatcactttatttttttcaatgaaagctgttccttaatgaatctggctaagattacaaaaggttttattgggaggcttggagaactgtagtatcttcgaaacatttttatcattttctgtacacatcccacatagcaccttgctctgaagtcacagctctcttgacagactttaagcagaatggatattttgatgcttccatgattatcattcccaaatggttttttcttccatctgccagtctaatcatctaagacaaatcttgtagcaaattgaaaaact

SEQ ID NO: 800100 - DNA, 636 bp, Homo sapiens
gaattatagcatttttacaaaccccaccaccagttgctattttcattagttcatagcatttctgagtttatgtatgtatataaatatatatacatacacgtatgtgaatttgcatctataaattttgcatttcataatgacatattctttgccactagatcagctatactatttttggaaacattactctctacttggaaatcataacctcttagtcaatctgaatatgacttcataacttttatagtttttacccatacttttgcacaaccttactgtgattgcaaaatagctctgtgtggttaaggggaaaaaaagagagtaactttgcattacataccctaaaaatgcttcggagtctctgtttgggtattgggatctggatatgtctgatgtgtctgtgtgctagtgtgagcagaaaatctaagaggttaaataagtgacrgtttctaaaccaaaactttgactctattgcttctccagttgctaattaaattaaagtcgaatacccagaacaatgcttccaggattccctcaatcctggaaaaaagattaacattaacttaaaatgcagagcagcattaattttattcattaggcctaaataatgctcttattaatttatcattccccttt

SEQ ID NO: 800101 - DNA, 532 bp, Homo sapiens
ccctcagtacccatgcaactttgtgaacagaacacccacaaaaacaataacaaatctgtaaaatcactagtacagtttaaaagatgtgttaggtttctataaatactactataaatataggactctatcttaaaacgtaaaagtttaatgacaggggagataaggacccatcctgctcattcaataagcacaagacactgcaatcagcatctaggatgctgtaattggcctaacagtcctactttatgaaaagtattttaggttaaatttttaggtaaataaaaacaacactttattttagtaaacactagactttatcagatgtataatatatatatattatatatatctttaattcaaagtcaaatacttcttttttataagtaggctttcytaaaaattaccgcaattttaatatgatgcatcattttgaagagatggtcatatttaagggccatttactttttccagtaattattactgacatatgaaagtggaagaggggaaaatcaagagctttatttttacttac

SEQ ID NO: 800102 - DNA, 578 bp, Homo sapiens
agtaattgtaataatgttccgtaagatgggataattttgggtgactcacatgacccatttataaatacataccgcataatataacatccatctctgtggttttgcccttacaagtaccaggaagccaccagctttcatctgttttctcatggtgtctccattctgctttagagcttgcagttaagagaggagaaagttgagagagaaatttcataattttaaaagctgctacttccagccctgtgcttacaagcttcctattctagcaaccaaccaaacaaaaagcagttcttccatggaaagacccaaaggaaacttaaaatgcgtattgctaagtgaaagaagtcaatctgaaactgctacataatgtatgattccaactatgacattttggaaaaggcaaacctgkggatacagtaagaagatcagtagctgccaggggttgtggggaaagagggataaataggcagagcacagaagatttttggggcagtgaaacaattccacattatagtacagtggcgactacatgtcatccctttatcaaaacctgtatgaatgcacaaggcaaaaagtga

SEQ ID NO: 800103 - DNA, 584 bp, Homo sapiens
tattaaagaggaaattacatttcaccttgctttcttcacttcccgcactcagcccattttgagctagggttttagaaatactctaatcccaaagcaaagggccagaaaatgtcctgaatgatgtacctgagaaggatcacccaatgaatgtccatgcacccagcattctgtccagagaaggtggacaagagakaattgagaatattctcttagcagagccaaattatctaggaacccctcagggcaccctacactcttcaaccagagctgtgtcatcggatcccagccacactcactatagctccagggtattcattttggtgtctgtgggggtaacaaaattacacagaataagtcggtggtcttaatggaatctcatcacctttgggtttagaatcaaacagaccttgctttttcatttggtcattcagttacgtggtcaatcattccctcacattcatttattgaggctctaactatgggctagattctacagtaaacagggaacacacagatgagaaagacacagtcaaaccccacctccatcatctattaactccttgacttcaaggcttcagttctac

SEQ ID NO: 800104 - DNA, 646 bp, Homo sapiens
atgcatttatggaatttagcatcttacgtttatactttttcttcttaattttatattattatagcagagtattctccgtatgagtctattacaatagaactttttcagtgttatagatccagtttgattcattccattaaactgaaaactacatatgtgaagtttaatatacaaacacatatgctgagatctaagttatatatacttgtcactgctgttttaatatggaaactaaccaagcaatttcttttagtttcagatgatcacttttttcctaaaatcagccaaattttgaaaagaaaaacactgtagaggtctttacagagtaaagttttcatttttraattactttctgtaaaattggggagaaggtgttttgaggggagtctgtgctaaaacttaaaacaaaatttaacatttattttttgtttttgattttcttttacagacagggttctgctcagttgaacaggctagagtacagtggcatagctcactgcagcctccatctcttaggctcaagcaatccttccactacctcagcctctgagtagctggggctacaggtgggcaccatcatgcctggctaatttttaaattttttgtagacacagggtctcattatgttacccaagctggtcttgaa

SEQ ID NO: 800105 - DNA, 617 bp, Homo sapiens
atttttattttccaaatgtttttccagttttcccagccctccttgattcttctatagtttgttcacaagactctgcatgagtgttcttcatatgtgtgtgtggttttagtggttttattttagcattcacctgctactgagagcctgtgaggacctttcccatttaagtgcattctcatcgctttctcactcagaaagtggaaataaatatagggaaggaatatgaataattttacacgtatgtatgtttgtgtgtgcatgtgtgtgtgtgtgtgatttctgtgtggttgatcagaatgaagacgaataaagaaaatgggaatgagtatttaatttggtgatttctgagtgacccatacgctaagtttccctctaacctctgcttgtccttycagtcagccctgtggcactgctgctgaatctatacaagtgctgttcacaggtagtgcagccatgactcatccctgccaccaataattattttagtaatattatccacgctttcattcttttgtattactggttgctttccctggctttaggtgatgatcagaagtgatttttaaaatgtgtgaattagttttctattgctgcacgactcattaccacaaacacag

SEQ ID NO: 800106 - DNA, 341 bp, Homo sapiens
aaccacccaccccaatcaggagaaactatgttctgcattggtttaaggaacccgcttctttctttgatacctgacctacagatccaatctattcccaggaattttgataagaattctcaaatcctcagcaaggctatgccactgtcatgactctcctattcctggtagtgtcattctcagtgtagsctgtttgataggtagttttgtgaagtcttgttcatcataatggatcatatgatttttaaaagcaggacctgggtcatatgcccagattaatttcaacaaagttggtatgttttcttcctaaaattaattttttatgattatcaaagttttatatg

SEQ ID NO: 800107 - DNA, 531 bp, Homo sapiens
ccacatcatgaatcagttcattctctgaggcaacagagaacttctcctggtaaacagtgatcaagtatatatgcagccacattggtcaaaactggctcttacccataagcaccatctactggcttgtaggttgaattgcacagcccagtataaaacccatctccagaagtgcatggggctacagaagaaaacccaagagaccctacccagaattctctagagtcacagcccccagggaggagcgcaaatgggaagggaaagaaaaaaatagagaaagaaaaataaaaataaaaatttagacatgaatgaaaakaaatacacaacccacaaatgctagggtctctagatgaggaagaactagcacaagaattctggcaccataaagaatctgaatgtagtgacatgagcaaaggataacaccagctctacagcaaaggtccctaactaatatagaaaccaatggtgctgggaaaactggcaagtcacatttagaagaataaaactagatccccatctctcactttataaaaa

SEQ ID NO: 800108 - DNA, 559 bp, Homo sapiens
gtctttaccctctcttaatttaatactttacattctcctatgtagatagtcaggtgtagtagtagttcactcttcctttttttcctttttttttctttttatttgtatatgtgtggttgggatgggttgagataagaggaatacagggaaatatttggatacaatatgaaatacttataaaattggttacatcttaaagaaaatttaagttatgctactgtaggttgctgagaccagctcattcggggagatgccaacccagtggcgctagaggaattaaagacacacacacagaaatatagaggtgtggagtgggaaatcaggggactcacagccttcagagccgagacccccaaacggagatttacctacatatttattgacagcaagccagtgataagcattgtttytatatattatagattaactaaaagtattccttacgggaaacaaagggatgggctctggctagttatctgcagcagggacatgtccttaaggcacagatctctcatgctattgtttgtggttcaggaacgcctttaagcggttttccgcc

SEQ ID NO: 800109 - DNA, 628 bp, Homo sapiens
tgatactcagctgatatctaggttaaaatggctaactttgtccaagattattgatattctggtactgtcccaaactgcacttcagattaaatccataccttgtaccaagaaatatttggacatttacctgggtccagacaaacaccttatttaccaatcaaacaagttacaattcaagggaytatactctttctaccatgagcaggtctgtctttgggatattaccacaaaggtgcattgatgtgaaaagtactcagagatcaagctttagcttttttttttttttttttcattgccagaatatatatatattttattttttcatttaaaaaattcaagattttttacttctgttaattgacattgaattcagcacctgggctgaagtcattctttttattttattttatattatttttactttaagttatgggatacatgtgcagaacgtgcaggtttgttacataggtatacatgtaccatggtgttttgctgcacctatcaacccatcgtttaggttttaagccctgcatgtattaggtatttgtcctaattatctccctcccctttccccccacccaccgacaggccccagggtgtgatgttcccctccctgtgtccgtatgtt

SEQ ID NO: 800110 - DNA, 628 bp, Homo sapiens
tgatactcagctgatatctaggttaaaatggctaactttgtccaagattattgatattctggtactgtcccaaactgcacttcagattaaatccataccttgtaccaagaaatatttggacatttacctgggtccagacaaacaccttatttaccaatcaaacaagttacaattcaagggactatactctttctaccatgagcaggtctgtctttgggatattaccacaaaggtgcattgatgtgaaaagtactcagagatcaagctttagcttttttttttttttttttcattgccagaatatatatatattttattttttcatttaaaaaattcaagattttttacttctgttaattgacattgaattcagcacctgggctgaagtcattctttttatkttattttatattatttttactttaagttatgggatacatgtgcagaacgtgcaggtttgttacataggtatacatgtaccatggtgttttgctgcacctatcaacccatcgtttaggttttaagccctgcatgtattaggtatttgtcctaattatctccctcccctttccccccacccaccgacaggccccagggtgtgatgttcccctccctgtgtccgtatgtt

SEQ ID NO: 800111 - DNA, 628 bp, Homo sapiens
tgatactcagctgatatctaggttaaaatggctaactttgtccaagattattgatattctggtactgtcccaaactgcacttcagattaaatccataccttgtaccaagaaatatttggacatttacctgggtccagacaaacaccttatttaccaatcaaacaagttacaattcaagggactatactctttctaccatgagcaggtctgtctttgggatattaccacaaaggtgcattgatgtgaaaagtactcagagatcaagctttagcttttttttttttttttttcattgccagaatatatatatattttattttttcatttaaaaaattcaagattttttacttctgttaattgacattgaattcagcacctgggctgaagtcattctttttattttattttatattatttttactttaagttatgggatacatgtgcagaacgtgcaggtttgttacataggtatacatgtrccatggtgttttgctgcacctatcaacccatcgtttaggttttaagccctgcatgtattaggtatttgtcctaattatctccctcccctttccccccacccaccgacaggccccagggtgtgatgttcccctccctgtgtccgtatgtt

SEQ ID NO: 800112 - DNA, 573 bp, Homo sapiens
atgatccacgaaattactgtaatgaagtcgaaaggtcaggtttttttgttctgttttgttttgttttttaccatatgctgaaagtcctttgggttgaagatggtatgtttagctttgcttgaaggccacagtaacttgttcatttagtgggccttcatatttgacaattcaaacagggtccttctcaagttttggttgcatacatgtggctgaagaaatccaattatatccagccactggagtragaaaagcattagatccatgaacctgaagagcagagcaagtttttccccaacactcatatttatgtttcttgctacaaaaattaaatctctcaaagataaaaattattattcctagttatggacatattgctaaaagcttccaggcagatggtggggaaaaatgaaggtgatgaattacatatttggaggataacaaatattacaatttgtagtctagattgtctcattacacattcaaatgtctatttggcctttgaaaatctctgactgcaaagttattgacataaatatcctcaatttatgtaaatactggcctactaattttgca

SEQ ID NO: 800113 - DNA, 599 bp, Homo sapiens
atgacattttaaaggacagggataaaagtatcccaatataatgttcttaacatagagttaggtaaaatgaacgatgtgcgctcyaaatattcaccggacaactagcattttctaagcaattttccagcttgaagaaaactacttttcattaaaattgtggctcatgagaaaagtgtagtcagggaataaagtgtgtgtgcatgtgtgtagatgtgtgtatgtgtgtgtgtgtgtttggagagagagaaagaatatgctttttgaaaactgtaaacaatttaacacagcaatgtattgtgttagacattaaaggccaataaatgctattagaatatggtgttttgaggcatatttctttagaggtaaggggttcagaatcaagacaaatacacatttatttttactgaaaactaaatttgttttaaagtcgttgagtaatgtaattaaagtcattcaattcaatcatttagagtcttcaccgatacaccaagaaagatgagaagaggaaagcaactcataaagatcatctaaatatcatttacagattgattgtaatcaattaccaatgtcttcagggacttcatgctcatatacttgtg

SEQ ID NO: 800114 - DNA, 599 bp, Homo sapiens
atgacattttaaaggacagggataaaagtatcccaatataatgttcttaacatagagttaggtaaaatgaacgatgtgcgctctaaatattcaccggacaactagcattttctaagcaattttccagcttgaagaaaactacttttcattaaaattgtggctcatgagaaaagtgtagtcagggaataaagtgtgtgtgcatgtgtgtagatgtgtgtatgtgtgtgtstgtgtttggagagagagaaagaatatgctttttgaaaactgtaaacaatttaacacagcaatgtattgtgttagacattaaaggccaataaatgctattagaatatggtgttttgaggcatatttctttagaggtaaggggttcagaatcaagacaaatacacatttatttttactgaaaactaaatttgttttaaagtcgttgagtaatgtaattaaagtcattcaattcaatcatttagagtcttcaccgatacaccaagaaagatgagaagaggaaagcaactcataaagatcatctaaatatcatttacagattgattgtaatcaattaccaatgtcttcagggacttcatgctcatatacttgtg

SEQ ID NO: 800115 - DNA, 599 bp, Homo sapiens
atgacattttaaaggacagggataaaagtatcccaatataatgttcttaacatagagttaggtaaaatgaacgatgtgcgctctaaatattcaccggacaactagcattttctaagcaattttccagcttgaagaaaactacttttcattaaaattgtggctcatgagaaaagtgtagtcagggaataaagtgtgtgtgcatgtgtgtagatgtgtgtatgtgtgtgtgtgtgtttggagagagagaaagaatrtgctttttgaaaactgtaaacaatttaacacagcaatgtattgtgttagacattaaaggccaataaatgctattagaatatggtgttttgaggcatatttctttagaggtaaggggttcagaatcaagacaaatacacatttatttttactgaaaactaaatttgttttaaagtcgttgagtaatgtaattaaagtcattcaattcaatcatttagagtcttcaccgatacaccaagaaagatgagaagaggaaagcaactcataaagatcatctaaatatcatttacagattgattgtaatcaattaccaatgtcttcagggacttcatgctcatatacttgtg

SEQ ID NO: 800116 - DNA, 642 bp, Homo sapiens
aaatagctacttccaattttataacaactaaaataagtggggaaaaaacttagtggaaataatcttattaccagggggtggaaaaaaaagaaagaaaaacagatactatacagatttggcactatattactctcaaatattcactgaacgtacaaaaggtgccggtgttgtgattaatacaaagcaatagatattctgacaaatcatcaccatctggctgtgaattatatttctgttgagcatctctgtattttgttacactttcaaccaaactatatgatgatatttgggaaactcctctttcccatgttttaaaatgtttttaaattatgtctgcttatcattggagcagaggacatttctaagaagagcatcaaagcttttgcatgccaaacagtatctttcaagaaagsctcttaaatggcactgtaataaataaaataataataataacaataacaataataaaatcttagagtacaaaatcaatgttgaaaaatgctcatgcataaccagcaacatggttctaaaagtcacatcactcagcctgtactaataagaaaaatccttctgatgaactatttaattgagtttaacaaggctgtttatagctaatcttaaatgcactaataggaaattgaa

SEQ ID NO: 800117 - DNA, 615 bp, Homo sapiens
gcctcttttgatactctcaaaaaactacaaacattttactaatccgttgtctatttattctactgtgcttaacatggtaacaggcaaattttagacaatgaaatatacctggatgtgacccacacatgtagtcattcatttattccactctgcttatcacaggaagagtacattccagacgataaaagttacctgggtagttcagttgctgatatgaatatgtttagaaaaatattttccatgaagcaatttgtttttcttttgtattttcaaggattaaaattttttgcttacatatccatcaaggtggctttctgttttccaaatctctcccttccagcccatcaatcatctactgtaattgctacaacmatgattatttttctgctcaaagacattcaatgtctcactattgcttacagtaatattataataacacccagcatgattttcaggcattctgccatgtgactctctgaacttttgtttcctaactattatctatttttatacagtaattcattgatgttgcatttattaacaccaatatattcatgtgaaaaattacaaaacccattagtgaacataagagctcacaatcaataaggaatagtg

SEQ ID NO: 800118 - DNA, 615 bp, Homo sapiens
gcctcttttgatactctcaaaaaactacaaacattttactaatccgttgtctatttattctactgtgcttaacatggtaacaggcaaattttagacaatgaaatatacctggatgtgacccacacatgtagtcattcatttattccactctgcttatcacaggaagagtacattccagacgataaaagttacctgggtagttcagttgctgatatgaatatgtttagaaaaatattttccatgaagcaatttgtttttcttttgtattttcaaggattaaaattttttgcttacatatccatcaaggtggctttctgttttccaaatctctcccttccagcccatcaatcatctactgtaattgctacaaccatgattatttttctgctcaaagacattcaatgtctcactattgcttacagtaatattataataacacccarcatgattttcaggcattctgccatgtgactctctgaacttttgtttcctaactattatctatttttatacagtaattcattgatgttgcatttattaacaccaatatattcatgtgaaaaattacaaaacccattagtgaacataagagctcacaatcaataaggaatagtg

SEQ ID NO: 800119 - DNA, 635 bp, Homo sapiens
tgactgacttagtgaacttactatgtacttcataaggatgaaatataaaataagtttacaagattcttggacataaactcttgaaaattctaggggcacagtaggaagaggcaggatacagtgatgatttcaacgtctctgaggcagtgagtcaaattacatttgttgatgaagagataaacaggtaagactgtttatgtgggtaaaatgcttactctcaggagagaagatggatttctgaaagctttccctactttctttttatgttactgkgagttcgatatgtggagaatattactgtaaatgtgagaaattttgcacatttttagacaagagtaacaagtgcaactcctttttattacagaattattagatcaaaatacggggaacttggattgtgttataggaaatatacaagtcaattttaagttgaattcatgctaaaatcaagaaatgtgcaaaatagtctaatccagtgtcaatgtttaaaatataaaggtattaacatcaaattgggaaaatacactatgagaaaaaagctattataaattttccattttacctggaaagctgatatcttcatacattttaaaaaatagccctacattcatctggaaaatacattattcagtttg

SEQ ID NO: 800120 - DNA, 635 bp, Homo sapiens
tgactgacttagtgaacttactatgtacttcataaggatgaaatataaaataagtttacaagattcttggacataaactcttgaaaattctaggggcacagtaggaagaggcaggatacagtgatgatttcaacgtctctgaggcagtgagtcaaattacatttgttgatgaagagataaacaggtaagactgtttatgtgggtaaaatgcttactctcaggagagaagatggatttctgaaagctttccctactttctttttatgttactgtgagttcgatatgtggagaatattactgtaaatgtgagaaattttgcacatttttagacaagagtaacaagtgcaactcctttttattacagaattattagatcaaaatayggggaacttggattgtgttataggaaatatacaagtcaattttaagttgaattcatgctaaaatcaagaaatgtgcaaaatagtctaatccagtgtcaatgtttaaaatataaaggtattaacatcaaattgggaaaatacactatgagaaaaaagctattataaattttccattttacctggaaagctgatatcttcatacattttaaaaaatagccctacattcatctggaaaatacattattcagtttg

SEQ ID NO: 800121 - DNA, 633 bp, Homo sapiens
aataaatgtttttgaaactgaattggattgaagtggatccagattttcacaggaaaaaaaagtttccttttcccttagttctccttacacacctggctttgcaggaaaagaaattatcatttggaaacacacatctgcctcagccacaggtgagatattaatgcattcccacatgtcccaaatcctcgatctttgatcagtatgatgggaactttcattgtccartaaagcaagggacggactctttgtttcattcaagtcagtatttcttctaacggaaactcaccccaggatgaaacagccctgcatttccagcagcctctggagtgtcaggtggcccttcagcctttgaatgccgtgggctggattgactcaaccatggttagctgacttttatttcttttcttccttcctgctcattcaatatcatcaaccagagggaaggagctctgtgtcataaaagtgaccacagctgagccaatctcgccctatgccagtccatgtggtaattttggaagggccctgggatatctgaccttatgatggtaagaaagttttgtgattaatggtgatttttatcttccgacttcaaagattgactcatgcagagaatgagcaatctataggtcagat

SEQ ID NO: 800122 - DNA, 604 bp, Homo sapiens
aaacagaaaaatatgactcataatctggagaaaaaataatgaatagaaacagactcagaaattgtagaaatgttggaattaataagcatttaaataaagatatacatgtaaaatagagattaaaaatgagagatgaaaagcacaatatctgaaagaaaaaaattcactggatgggcttaatagcagaagagatactggaggaaaaaaagatcaatgaacattaatacataacaataggagttttccatactgaagcatggaaagaaaaagatggaaagaaaaagcagattctcacttagctctgtgataatgtaagaggtctaagaaatgtgtaaattggggtcctaggaaaagagaaraatacaaaaaatttgaaaacgtaatgctcgaaaaatttcctggtgatgaaaactatgaacacacaggtccaagaaacccaacatacccaaagtaggacaaacacaaagaatctaacccctgtgacatgagtttaactatataacaaacatgcacatggccccctgaacctagaatttttgttttaaaagaaagaggcacattgtaataaaattcctgaaaataagtgagaaagagaaaacattct

SEQ ID NO: 800123 - DNA, 634 bp, Homo sapiens
acttaaattccagctctgccatttcctagttgttatttgaacattctgagccttagtttagtcaactgtaacatgggacaatggtattcattttaaaagaaagtgatcaataagtcagctattttcacttctagtggaagtaaattttgcttttctcttttggaactacattacctaagtttatatgactcctcctcgcttttatttcgtggttttaatacatgtactgactaggtcactttttccaagtctgggcttcactatttgttcttgttttcttgtcagaattaaaactttagagaaatctgaaggaccaattcaaaagtcactacagtcctttctttccagattccatctttattccataattatttaatgaatgctgagtattctgagggttctgtgctaggcactgaggctatggtaggcaagggtcctaccgctatgaatattagcagcmtgagaaaccagggggacccagaattaaagaacactcatctctaggctgaaagacctttgttgtatccagcatatgaatagaaaaataaccacagcaaggcacattattacaatacttcaatacaccaagaataatggaaagatgtccaaagtaaaataataaaaacaggacata

SEQ ID NO: 800124 - DNA, 590 bp, Homo sapiens
actcccaagcctgtaaaacaggacttcggtgagagtggggagaaataatttaaagtgtacttttccaaatcgaaattgccaagctgtagaccctttttacgaagcaccctccagaggcttttgcctgcaaggctaaaagaaaaggtggttttaaatgtatcttctaaacacattcatattttggggattgaggggaggaaggtctgtgtgttctttaaatgtgtgagtaataaagaataaatagaacatgtcyttttggtttgtttggttttcaaatcatcccagcacaatttgcagtaaaaactgctttcatttttaagtgatcaaagcagtccatgatccaatcaggtcaacaactgcaacaagccagaacaatgcaaacatgcctaagctccctgtttactaaagatgtccacagaagataataatgtgcacttctcaggatacttaaagaaaaataaatacatacagaggaaaccggtttgaagatgactccaaggcaggccagtacctaaaacgtgcaattggcatgtaatgtcttcgttgttttaatcgtaattgggaggagtagttgaaatgaattttatctt

SEQ ID NO: 800125 - DNA, 602 bp, Homo sapiens
tgtctttatagtagaatgatttataatcttttgggtatatacccagtaatgggatcgctgggtcaaatagtatttctggttctagatctttgaggaagcgccacactgtcttccacaatggttgagctaatttccactcccacctacagtgtaaaagcgctcctatttctccacagctttgccagcatctgttgtaccctgactttttaataatctccattctaactggygtgagatggaatttcattgtagtttcgatttgcatttctctaatgatcagtgatgataagcgttcttcatatgtttgtaggccatataaatgtcttcttttgagaagtatctgttcatatcctgcgcctgctttttgatgagattgtttgttttttcttgtaaatttgtttaagctccttgtagattctggatattagatttttgtcagatgggtagattgcaaaaattttcttcgtttctgcaggagaggtttttagacacaggtctgataagattcttcttgttttaagatccattagctcttgctattaatgcaaaggattgtgcaggatgtcttggaacattttatttcagccaagcaaacacagcac

SEQ ID NO: 800126 - DNA, 634 bp, Homo sapiens
ctccacaatgcaaaactaaagtattataaaggttttcctgtggcccccagtgaccattaagagtacttcaaaatatacaaatatacagaatcatagaaaaatagcttcttcatctagacagagacagctatttgcttcggcaaatattgggtctttgagaagacagtgtcaattttattgctttttgaaatgctgtgtaaagtgtggtacttaacaatttgcacattgggcaatttccatctgtaagtttaaatatatgtgataagaaaaagtacatgcatattaggaatatataaaatttttcaaaatcatcatctttacattagaaatttctttacacaaacatcttaacttttaaaaaaagtagcaaatggctataaygctctaagactgcagaaaatccagctttctgtttaagcagcctttcactgagagacacgagtgatggcagatgaaggcctcttaagaatagactcaacagaaaatgacagtggttcattcaccgagagttttgttccaacttgtttggctacaaaaaggtcttttgcacatctatctattgtaaatgtgtacttctggttgtccttaactaaacactctctgtgtttcttaggggtctcttcaaaggcctctt

SEQ ID NO: 800127 - DNA, 623 bp, Homo sapiens
aacaggttatcctgtgttctttgaaaaacttttactgatttctactgccatcattgtcacctcatggaggcattaacaattggaattgcggttatctaggggcagcttttgctccctggcccctgtgtatatcagtaaaattggggtgtgggcaattggtaaaggcagatttggcctgatgagtctattgcagctgcctgagtagaaatgccaatgcaaagctgagctgytaattggaaatggaataaactaaaatcttggttcaaatggcagctatattttttaaagaaaagatttcagttgaaatgccaaaggagacagttagccaaaacatttgtctatggaaatttctcttctcatttttactcagatttacagctgggtgttaagcgaagcatttcttgagaacacatgtcacggataaaccaagatgtttattttcctaagtagcagatcagattgaactcacaacaaatagttcaattagtatgattactaagaggctgattaattcgggctgcaataaatgaaatagggtgtgttagaactggggtcctaggaaggccatgtcaacaagattatgttattagctgggcaaagcagctgcagtacattttaagttt

SEQ ID NO: 800128 - DNA, 615 bp, Homo sapiens
atacaccccctcccattttgaagtccttaataaaaacctgctggttttgcggctcaggtgggtatcatggacctaccgatatgtgatgtcacccccagtggcccagctgtaaaatttctctctttgtactctttctctttattgctcagactggctgacacttagggaaaataggacctacgttgaaatattgggggcgggttcccccgataatccacccaaatgcccatcagtgatggactggataatgtggtacctatgcagcatggaatgctatgyagccataaaaaagaatgagataatgtcctttgcaggtacatggatggagctggaagctattatcctcggcaaactaatgcaggaacagaacaccaaacaccaggttttcactcataagtggaacctgaacaatgaaaacatatggacacaaggaagggaacaacacacactggagactgttggttggggtcagggggtggaagaacaacaggataaatagctaatgcatgtggggcttaatagctaagtgatggattgattggtgcagcaaagcaccatggcacatgtttccctatgtatcaacttgtacatcctgcatatgcaccctggaactta

SEQ ID NO: 800129 - DNA, 615 bp, Homo sapiens
atacaccccctcccattttgaagtccttaataaaaacctgctggttttgcggctcaggtgggtatcatggacctaccgatatgtgatgtcacccccagtggcccagctgtaaaatttctctctttgtactctttctctttattgctcagactggctgacacttagggaaaataggacctacgttgaaatattgggggcgggttcccccgataatccacccaaatgcccatcagtgatggactggataatgtggtacctatgcagcatggaatgctatgcagccataaaaaagaatgagataatgtcctttgcaggtacatggatggagctggaagctattatcctcggcaaactaatgcaggaacagaacaccaaacaccaggttttcactcataagtggaacctgaacaatgaraacatatggacacaaggaagggaacaacacacactggagactgttggttggggtcagggggtggaagaacaacaggataaatagctaatgcatgtggggcttaatagctaagtgatggattgattggtgcagcaaagcaccatggcacatgtttccctatgtatcaacttgtacatcctgcatatgcaccctggaactta

SEQ ID NO: 800130 - DNA, 535 bp, Homo sapiens
tgttgcccaggctggagtgcagtggcgtgatctcggctcactgcaaactctgcctcccaggttcaaccctttctcctgcctcagcctcccgagtagctaggattacaggtacccaccaccactcccgtctaattgttgtatttttagtagaaaaatacaatacatataatttttgtatttttagtagagatggagtttcaccatactggccagctgatctcaaactcctgaccttgtgatcttcccaaagtggatccccctcagcctcccaaagtgctgggattacaggcatcagccactgcgcccggccggagtcaactcttgattattcaaggttgactctgagaattggtgtgatccttgcctcttttgttttttcttcctttcttgtagtcccttccatgaaagaactttcaagctcagggagaagaaaaaaaakgagagcaggcaatttggtttccaattcattgctcaattagtgttttgggagatggggatgtagggccagattgaaattgtcattaatcagtatcac

SEQ ID NO: 800131 - DNA, 555 bp, Homo sapiens
agtagtggcaaaatcccctccccgacccatgctgcagtcagcctttccacatttgtctgaggagataaatcctgtgcttcctgagacagcagtgatggcctcccctgaggcagttgctaggcaagataatgctgattctcctcaggagccacscctaacacccctgtttgcttcttgacctataactaaagtcccagatgggcccctagaggtgaggttgggagtgtgacccgtgaggagatgtgcctacactagaaaaaagctgcttgagttttcttatttatataaacggaaatctggagaacaggcatgggaatggttattaagggtatgagatgatggtggaaggaacacagagttggatcaggctaaatttattgatttgggcccactaactagggagtctgtatttaatgctgcagctcgggagttaaaaaaaggttctaatagtttatttgcttggttagctgaaatatggattagaaaatgttccactgtgagcgagctggaaatgcctgatctcccttggtttaatatagaagaagggatccaaag

SEQ ID NO: 800132 - DNA, 635 bp, Homo sapiens
gctcagtagagtacacgcatcatgaaaacgacttcttaatccataaagtcagtaaaatacacactttagaaattgcattagtctgttttcatgctgctgataaagacatacctgagactgggcaatttacaaaagaaagaggtttaattggacttacatttccacatggctggggaggcctcacaatcctggtggaagacaagcaggagcaagccacatcttgcatggatgrcagcagacgaagagagcttgtgcaggaaaactccccctcataataaccatcagatctcgtgagacttactcagtatcacaagaacagcacaggaaattcctgcccccatgattcaattaccttccaccgggtccctcccacaacatgtgggaattcaaaatgagatttgggtggggacacagccaaaccatatcagaaatcattgcactaattcttataccttgcagaatattaaaacacctacaaataatactgctgacagaagaatttctaagacttcctgaggtatatggtaaaatacttatctatcttcttaagctcccttaagtccaaacagcaaaggcaaatgtagaaatgcagaaaggcaataagaaagagatgctgagtcaaataacaggggtgg

SEQ ID NO: 800133 - DNA, 645 bp, Homo sapiens
cttttcatttaaaaacaagtcaggattcaatctatgtttgctatataaaggtattaagtatatgaggaaaataagtgtatatatattaatattgcaattatatgtctttggagctcagagagattaaattatcaagcctgtgctcagccaggattagaaacaattctttttaattccaattactttaaattttactaaaaccaattgactaaatccaaaagtaaaaaaaagtactgaattttgcaagaaatgaaattttataaacatttttagaaaacattatktcacacatactaaaaagttgcaaaaattatacaaagaactttaggaggccaaggcgggtggttcacttgagcccaggagttcaagatcagcctgggcaacatggtgaaaccccatctctactaaaaatacaacaattagccgggcatggtggcttgtgcctgtaatcccagctactcaggaggctgaagcaggagaattgcttgagcatgggaggcagaggttgcagtgagccgagatcacgcccaccgccctccagcctgggtgacacagcgagactccatctcaaaaaaaaaaaaaaaaaaaaaaaaaattatacaaagaatctctgtcaacactttgctaaaggcctcaaatgttaac

SEQ ID NO: 800134 - DNA, 601 bp, Homo sapiens
tatggcattaaagttcaacatgaaaaagcaaaaaaaaaaaaatgaagttgctctcttcaataaatgttgaagacagattgcaaaggactggtaaagaaaaccattcactggccaggtgcagtggctcacatctaaaatctcaacacttgtcagggccaaggcagaggagtgcttgtggccaggagtttgagaccagcatggacaacataccaagaccactgtctctacaaaaaatattaaaaatattaaaaattaagaataaattttattaattaagttgctttttaattaacaggtgtggtggcatgtacctgtagtcctagmaactggggagcctgatacagaaggatagtttgaacccagtaacttgaggctgcagtgagccatccatgatcataccgatgcactccagcctaggaaacagagcaagaccctgactctaaaaaataaataaataaataaataaataaaactcacttgattgacttacagtatgtttcattgcataccacaaacttgaaaatgcacagatgttcctcccataatataccagaaaacctggtgattcactctttagcaagaaagatcctggaaaactttg

SEQ ID NO: 800135 - DNA, 511 bp, Homo sapiens
gggtgttaacaggcagaaaaagccaccaatgcaacattcctggaacgttcaatagcaaggaggcctgtacggccgaaacagaaccagaaagggagagagctgcggaagaagtcagaatactaatggagagtcccatcacattcagaaccttgtaggcccatagcaacgataacagcagctataccaggtaaccactgaaaggtctgcaccagagaagaaccatgctgtaaagtattttgtcaagactcattctggctgctacgtggagaagactgcaaagaaacaaaagaggaagaagcaaagagactagtaaggaggctacagcagtcatccagatgaaagatgaagatggctcarggtaagcaccaatcagtgctgagaaatgctaagattctggatatattttgtatgtagaaccaagaggatttcttgatgaattagatgtgatatgcaagcatatgcatgcgtacaccaggtacaggtaaatgtgtaatcaagtataatttcaaag

SEQ ID NO: 800136 - DNA, 633 bp, Homo sapiens
atgcagagataattaccccccaaaaaagagatacatgtgtcttaaacccatgaaaagatattcattctcactataataaaagaaatggaaattactatttttttttcttttactaacagcaaagatgaaaaagtttgataacatgctgttttaaagagggcagttatggggaaatagtcactctcaygcattgttggtaggagtgtaaattggtacaatatctacagaaggcagtttagcgagagctatcaaaatttaaaacatacataccttctaacttcgcaatttcactttttaaaatgtattctacaactatattttacagataggccatatgacacatgtaaagatattcactgcggtaacagtaaaatattggtagcaagctaagcgtctctcagtggacagctagataaataaattatgatatagccatgaaaggtaatacaattcaaccattttttaaaatgagacagctctataacaacaaataacatccatgatatattaagagaaaaatcaaaatgtagaacagtgctaatatttttgttgaaatggggagagtcatttgtactgaagagtacaaatacttttatatacttagaaaattttgtgaaaaggccaggcatggtg

SEQ ID NO: 800137 - DNA, 401 bp, Homo sapiens
ggtttggctgtgtcctcaccctattcccatcttgaattgtagcttccataattcccaggtcgtgggagggacctagtggtaggtaacagaatcatgaaggcaggtctttcctgtgctgttctcatgattgtgaacaagtcttaagagagctgatggttttataaagcagttcccctgaacatgctgtcctgcctamcgccatgtaagatgtgcctttgctcctacctcaccttctgccatgattgtcaggcctccccagccatgtggaactgtgagtccattaaatctctttttatttataaattattcagtcttggatatttcttcatagaagtgttttaaaatggaccaatacatcattctgtgtagtattccttagggtatatgtatcacattgtctt

SEQ ID NO: 800138 - DNA, 611 bp, Homo sapiens
attctctaagctgatcagatgaatagatttgtgttctaataagagtacaactctgtgggttgggcacggtggttcacgcctgtaatcacagcactctgggaggccgaggcgggcggatcacgaggtcaggagatcgagaccatcctggctaacacagtgaaaccccgtctctactaaaaaatacaaaaaattagccgggcgtagtggcgggcgcctgtagtcccagctactctagaggctgaggcaggagaatggcgtgaacctggaaggcggagcttgcagtragcagagatcgcgccactgcactccagcctgggcgacaaagcgagactccgtctcaaaaaaaaaaaaaaaaaaaaaaaaaagagtataactgtgaatatcttacaactcttatgttgatcagatcaatttccttatcacttgaataaacattgtgtccagatagactctgcactattaacaagttatctatgaatatttcattaattccagcatgactcatagtatataaacaatatcatttgatatcagtcaaagtagccacctttaatccccagaacactggtgggtaagactggcatacgtaaagggatcctcctctccaattt

SEQ ID NO: 800139 - DNA, 607 bp, Homo sapiens
cagtgagccaatattgtaccactgcactccagcctggatgacagagggagatgctgtcaaaaaaaaaaaaaaaagctaaaaaaaggcaaattaacccaggttagtgtgacccaaagtgtcaacttccaacagatgccagcttagagaatatttgttagtacattgtaagtatagaaattgagagtagagggtgagatacatttaccacaatttgaatttactataatatcaaataacatagtcagtggatttgagtcattgaagaggatattggtcacttcaggtgttatcaaagtcgtggtatcacagtaagaccccacaaawattcatggtattttggtttattatttaggatatttgggtttgtcacagttacatcaaagatgattgaaaatctgagaaaataatattactcatataagttactttcaagattattttgattttattcagcttacttttatttttaagtttaaatttatcctcaattatggaaatagaattaatatttttactttaataagataagcatcacttgattcacatagatttatgaaaatacactttttcataatgcttcagaagtcatcaatgataacaaaattaa

SEQ ID NO: 800140 - DNA, 587 bp, Homo sapiens
tctcttttggcccatgattttttataaatgtgtttaatttataaatattttggttttccagatatctttttgttactgatttttttttttttaaagcttactactttgatcagataagatgttttgtatcatttcggtccctttatgtatccagaagtttgttttatgttaaacatggtttgtctttatgaatgttctgtgtacacttgaatgtgtagtctaattttgttgggtgtagtgccttttaaatgtcagtgggggccgggggcggtggctcatgcctgtaatcccagcactttgggaggccraggtgggcggatcacgaggtcaggagatcgagaccatcctggctaacacggtgacactccgtctctactaaaaatacaaaaaattagccgggcatggcagcgtgtgcctgtagtcccagctacttgggaggctgaggcaggagaatggtgtaaacccgggaggcggagcttgcagtgagccgagatcgcgccactgcactccagcctgggtgacagagcaagagtccgtctcaaaaaaaaaaaaaaaaatgtcagtgggacagactggttgaaattcag

SEQ ID NO: 800141 - DNA, 647 bp, Homo sapiens
ccaagcttatctaggtaataaaagtttcatgctctttctcagggttatttattaatttgtcagacagagtctcactctgtcgcccaggctggagtgcagtggtgggatctcagctcactgccacctccgcctcttgggttcaagcgattctcctgccttagcctcctgagtagctgggattacaggctgtgcaccaccacgctgggctaattttgtgcttttagtagagacggggtttcgccatgttggctgggctggtcttgaacccctcacctcaggtaatctgcccacctcggcctcccaaagtgctgggcttacaggcgtgagccactgtgcccagcctctttctcagtttttaagtttttattcgaaaacaataaaaaaaaattmtgtgctggcaagcctatagaaaaaatttaagtgctttccctaattattacccaaatttcatgtagttaggtggagttggttaggtttttgtcctggatgatgcctattagtttcctttctttatttctctctcttttttttggagcccgaggtctcactctgttcccaaggctagagtacactggtgtaatcatagctcactgcagccttaacgtcctgggctcaagcggtcctcccacctcagcctccctaggtag

SEQ ID NO: 800142 - DNA, 596 bp, Homo sapiens
ttaaaaggtgggacctttaataggactctactctcatgagtggaattggtgacatttgaaaagagtaagtttggctctctcttgctctcttgactttttgccttccaccatgtgaagacaaggcaagaaggtcttcaaaagatactggccctttgatgttgaacttcttagcctccaaaactgtgaaccaatagatttctgttaattataagttaccctgtctcagatgttcattttaatagcacagactaagataataaccaaacagctatttttataatcacccctatatgctcataggaagacatgcaatttaattgccatcagtcaaatgtacctgcttgagattgatatttagaaactggccaagtgaggagatagcagtgtgcatgacacccattgtattgagtggaggtagcagcagagaagatgcagttytgggatggatgggaggtggcagctcctgactgaagcagagggaacttagtttcagtattgccagcagtgtcagcactcttgctagaatgctgttgtagtaaaattcttgaatcattctgggaagctcaccctagagctttatcaaaattttataatct

SEQ ID NO: 800143 - DNA, 644 bp, Homo sapiens
gtttgacttagtctttccacaatgcatacatatatcagaacaccatgaggtagaccataaaaatgtataattttttatttatcaataaaaattaaatacagtaaaaagcaaaatgctttctaaaacatactctctttggtggatcctgtattaaaaagaggtggccacctcaagacctaaagtacatcatattgtaactaaatggtgctactgtattttccaaactctttcataagcatcctacataggaagcatgtaacagatgaacagtaacaacctcagagccaataattagtagtgcctttactagtactcagtatttaagagagagttaatattaactcagcattaggagatttattttcaagtaacaggcaatctgaaatctaaccattttatttttataccaaatactgagtttcttgtttatttaatgtatgtcattacgtatagactccttgtcctcaaaaatacagcatttgatgtttgcaatkagtaaggtaaaaacttgtaaagggcttctatggtgttttcttttcattttctagttttcctttttttaaagttcagagaatgtctgtgacaaaacatcattgtgtaataatttttggtttttcaggtgcttttttggatatttacattaa

SEQ ID NO: 800144 - DNA, 625 bp, Homo sapiens
taacccatttggccattaagaacaatgttgtttactttccaggtatttgtgaagtttccaaaattattcctgttgttgatttttaatttatttttagttttatattaatgtggtcagaaaagatgtttgaaattatttcaatcttcttaaatcttttaaaacttgttttgtggcctaccatataatctatcctagagaatgttccttgtgctcgttagaaggaagggtattcagcagttgtttggagaaataytctgtaactgtctgttaggtttacttagtctagagtacagtttaaatcctatgtgtttttgttgatttcctgtctaaataatctgtttattgctgaaagtgggatgttgaagtctcctactattatttcgttgcagtctatctctccttcatatttgctttatatagttagattcactgatgttgggtgcatatatatttacaacatgctcttactgatattataaatcttgaagattttactcctttcttattatataatgaccttctttgtcttttttattacagcttttacattaacatctatttgatttgatataggtatagctactcctgctcttttggttttggtttatttgaaatatctttttct

SEQ ID NO: 800145 - DNA, 592 bp, Homo sapiens
tggaagcctttgtctatgaccccttgctgaactggaggctgatggacagtgagtatcatcaagtgcctgggagctgagctcagtggctcacacctgtaatcctaacattttgggaggccaaggcagaggagttgcttgaggccaggagttcgagaccagcctgggcaacatagtaagacccctttctgcaaaaactgaaaaaattaggcatgtattagtctgttctcacgctgttataaagaactgcctgagactgggtaatttataaaggaaagaggtttaattgactcacagttctgcttggctggggagaactcaggaaacttacaatcatggtgggaggggaagcaaacacwtccttcttcacttgggggcagaagagagaagtacagagtgaaggggagaaaagccccttataaaaccaccagatctcatgagaactcagtcactatcacgagaacagcatggaggaaccatccccatgatctaatcacctcccatgaggtccctcccacaacacatggggattacaattcgaattgcagttcaagatgagattttgggtggggacacagccaaaccatattaaggt

SEQ ID NO: 800146 - DNA, 597 bp, Homo sapiens
agttgtgtggcagtcatacctcttatgggaatactaaccaggtcatccaagttctagtaacatgctgtttttgcttaaggatactgaattttttaacccttactctaccctaaatagcccaattttctttggagtaaaagtacacagaattgctagtcatttggcatgagaagtacataaatgacttgctgtttttatttttccatgaagttggcaagttccctgtagtctaccagaggcttaaggatcacactgaggaaaacattgctctagagctgcagttctgtaactaatttcatatctgacaattgagaaccaagtatggccctggctggatttttggaatgttagatcttgtggaccttcgcctccctgtatggaagagatggaagaaaaggaagaaagtagaattatgcatttttgctgtcccctttaaagtctctccttcctctgcacrtttctttcctccccacagacaagcaaaataaatacagatgggggaaaaaagttgtgattgctgattaattgattgctgtacatatccataatacctatcatgacatgaaagttcttaggaacggctttcatgtttccatg

SEQ ID NO: 800147 - DNA, 590 bp, Homo sapiens
ggatttacatcaatttctccatatcagataccccacatcaaaccaaggttaaatattctgcctccaaaatttctttcaccattactttttctatgcacccccagcctcctcctcctcctcacatcactgaatgatcgtttaaagttaactataccaggagttgatgaaacaaccaaagagcttagtyggatttgagggaaaagaggcaagggcaaacttttaggaatggccacatctagaaggtgagaattggaagaagaattgatgaagacaggaagggtagtcaggattaactgaatcaaggaattgcaatgacgtacaaactgagggaaaaagagttccaagaagaggctgagtgtggtggctcacacctgtaatcccagcactttgggaggccgaggtgggtgaggtcagaagttcaagcctagcctgaccaacatgatgaaaccccatctctactaaaaatacaaacatcagttaggtgtggtggcatgtgcctgtggtcccagctactcgggaggctgaggcaggagaattgcttgagcacaggaggcggaggtttgcagtgagccaagattgtaccactgcaa

SEQ ID NO: 800148 - DNA, 463 bp, Homo sapiens
tctgcttatcattagctgtgtgaccatggacagcttactttccctctctgaacatgtttccttacttgtcaactggggatcacagacctacttttatagttgaggtatggattagtgagcttgtatagactctagcctatattasgtactcaatacatatcagatcccctaattttctttacagtcacttattcagtgactactatgtatttggattcagggtcctttattagatgccgaggttgcaagggtgacggccagagtctcctggcattgcatcagaatttctagcacactccatcgcacacatagcacacatccatagtaggtgctttgtaaataaaagttcgtgaagccaaagagggttttagagacagttggctttgctgagccctgcattatcagattctcagaagcatttttgcaacatacaacaaaaatacaaacatagaataatccagtt

SEQ ID NO: 800149 - DNA, 649 bp, Homo sapiens
ttattttattttattttattttattttatttttttgagacagggtcttgctccatcacccaggctggtgtgcagtggtgcaatcacagctcactgcaacctcaaaatcttgggttcaagcaatccttccgcctcarcctcttgagtagctgggactacaggcatgtgccaccatgactggctaattttaaaatttttttgtagaaacagggtcttgctatgttgcccaggctgatctcaaactcctggcctcaagtgatcctcacccctcggcctcccgaaatgttgggattacaggggtaaaccaccacacctagccacactatattcttaatagccttacaaagtgaaatttattaatccagtgtcagataatgacagtaagcctcagcaaagggaagtgacttccaagtttcccacagcttacaagtacagtcaggattcaaacatgactgccttatccccaaagccatgtgctttaactctgcctcatcctgaatggtggtaggcagccagtgttgctgtctcttccagaagcctgccagacaagaagaggcctttgccctgctagagtggctaagcctgcagatgcctctagagaaaggtcctcaggatggcggcctggtggactagtgggataactgggcaca

SEQ ID NO: 800150 - DNA, 649 bp, Homo sapiens
ttattttattttattttattttattttatttttttgagacagggtcttgctccatcacccaggctggtgtgcagtggtgcaatcacagctcactgcaacctcaaaatcttgggttcaagcaatccttccgcctcagcctcttgagtagctgggactacaggcatgtgccaccatgactggctaattttaaaatttttttgtaraaacagggtcttgctatgttgcccaggctgatctcaaactcctggcctcaagtgatcctcacccctcggcctcccgaaatgttgggattacaggggtaaaccaccacacctagccacactatattcttaatagccttacaaagtgaaatttattaatccagtgtcagataatgacagtaagcctcagcaaagggaagtgacttccaagtttcccacagcttacaagtacagtcaggattcaaacatgactgccttatccccaaagccatgtgctttaactctgcctcatcctgaatggtggtaggcagccagtgttgctgtctcttccagaagcctgccagacaagaagaggcctttgccctgctagagtggctaagcctgcagatgcctctagagaaaggtcctcaggatggcggcctggtggactagtgggataactgggcaca

SEQ ID NO: 800151 - DNA, 583 bp, Homo sapiens; identical to SEQ ID NO: 759697

SEQ ID NO: 800152 - DNA, 546 bp, Homo sapiens
attaggaccaatcaaaggaagagacatatcacataaagtggaatctaggaggattttgaatgttaagtttccattgtcttcaggacatattacctgtcattattgtacaggaataaacatggagtactaccaacctggggagctcacctgatgctaaaaagacactattttgaaaatgaaaaggcaaaggaaaggatgagataagatgaccttccacattaaggcactggaaaaaaaatagcaaactaaacctaaagccagcagaaggaagaaaataaaaattagagaaaataataatttataatattaatcatatttgttagtattgactaattgatattaaytcttgactaactttttaaaaaaaagagaaatattcacttcccaatttattctgtggggccagtgttaccttgatacaaaagttagtgcaaatagcatagaaaaataaaactactataagtataaatgcaaaattccttaaaaaatactaacaaatcaaatctagcaacatataaaagaattatacactataacaaagtgaaa

SEQ ID NO: 800153 - DNA, 592 bp, Homo sapiens
  misc_feature 74: n = A,T,C or G
catttattattgcctgtcttttagaataaggctttttaactggagtgacatgatatctcgttgtagttttgatntgcatttctctgatgatcagtggcattgagcacctttcacatgcttgtttgccatttgtatgccttctttagagaaatgtctattcaaatcttttgcccatgttttgattgggttattagatgttttcctagagaattatttgagctccttatatattctgatgattaatccctcatcatatgggtggttttaaaatattttctctcattctgttgattgccttttcactttgttgattgtattctttgctgtacaraaaaacttgatgtgatcccattcatctatgtttgctttggttacctgggcttgtgaaatattgctcaagaaatttttgcctgggccaatgtcctggagagtttccctaatgttttattgtagtagtttcatggtttggggtcttagatttaagtctttaatccattttgatttgaattttgtatatggtgaaaggtaggggtctcatttctttcttctgcgtatggatatccagttttccaagcaccatttattgaaaaga

SEQ ID NO: 800154 - DNA, 601 bp, Homo sapiens
ctagctctttggatattcagtgaagaggaaaggtaaaaggaagggtattcagaagattggaataagaattgctcatctcagtgatttaaggagagtgggaacttcgtaggtgagcaacgaattaattggaactgataaagtcagagggagaaatggctgatggcaaacacccagcacaggcaacagctcagggagcacatctggcctgtcctgggtggggaaatgtctgcctgtcctctgtcctcctccatccctgggtccacctgcccctcactgtcaccatcctgccacctgatagcaatcaccatctcttccacaagcccagaactcctgagtaaaaaaaccacctccatagtcacaatctcatttgggtctcaaaaygaaaaagatacggaagattagattttaaatgttattttacagatgaggagactgaggttcctggaggctaagtgactgaccgaaagtcccagagtggtacttccagggctaaaacctagctgccctgacttcccgcccaggctgcttccccggctctaactgcatctcctgagactctgctttggattctcctctccacgtgactccacactggacactt

SEQ ID NO: 800155 - DNA, 583 bp, Homo sapiens
agcagttagacctgaatacacacataataggcagggtaggtttcctgggcctgtgcagtcacacaggaccccatactcagaaggtacttggcttaatgctctgctgttgccatgttgaaattcttaataacttttgaacaagaagtcctgcattttcattttgctctggcacccacaaactgcttaactgttcctggcaataggattatattaggccatttttacggtgctataaagaaatacctgagactgggtaatttataaagaaaagaagtgtaattttgctcacggttctgcaggctgtacaggaagcatggtgccggtatctgcttgacttctggtgaggctttaggkagcgtttgcttacaggggaggcaaaacgggagcagcacagcacatggcgcaagagggaacaagagaaggggtggggggaggccccagatctcatgtgaactgagaaataactcatttagcaccaaggggatggtactaaaccattcatgactgatcctcccccacaacccaatcacctcccaccaggccccaccctcaacattgggaatcacatttcaacatgagattt

SEQ ID NO: 800156 - DNA, 535 bp, Homo sapiens
attttccagctgtgatatatgataaattatcaacacagggcctacgtgtcaggtagaaaaccacatctactcatagtgggttatctggaacaggctttacctcccaagggcctcagaaagcctctctcttctgttcccacagccatctccacgaagagtcccatatttggtcccgaggaggtgaatagtgtggaaggtaactcagtgtccatcacgtgctactacccacccacctctgtcaaccggcacacccggaagtactggtgccggcagggagctagaggtggctgcataaccctcatctcctcggagggstacgtctccagcaaatatgcaggcagggctaacctcaccaacttcccggagaacggcacatttgtggtgaacattgcccagctgagccaggatgactccgggcgctacaagtgtggcctgggcatcaatagccgaggcctgtcctttgatgtcagcctggaggtcagccagggtaaggatccaagctccttgggcttctgggggaaagttagagggaatt

SEQ ID NO: 800157 - DNA, 598 bp, Homo sapiens
agcaaatagtcctatgttgcaagaaagtagaatcgtaacttgcctgccccctaccttgcacccctcatcctgcaggtcctgggctcctaaatgacactaaagtctacacagtggacctgggcagaacggtgaccatcaactgccctttcaagactgagaatgctcaaaagaggaagtccttgtacaagcagataggcctgtaccctgtgctggtcatcgactccagtggttatgtraatcccaactatacaggaagaatacgccttgatattcagggtactggccagttactgttcagcgttgtcatcaaccaactcaggctcagcgatgctgggcagtatctctgccaggctggggatgattccaatagtaataagaagaatgctgacctccaagtgctaaagcccgagcccgagctggtttatgaagacctgaggggctcagtgaccttccactgtgccctgggccctgaggtggcaaacgtggccaaatttctgtgccgacagagcagtggggaaaactgtgacgtggtcgtcaacaccctggggaagagggccccagcctttgagggcaggatcctgctcaacccccaggacaa

SEQ ID NO: 800158 - DNA, 600 bp, Homo sapiens
cagagattgttttctccattgacaatgaggaagcagagagcaggtgacctttccaagtcacttggctgctaaatacagagcctgtactggagcccagtctctaggcttcctttgaccaggcatggcccaaggcaaacctgagtgcagggagtgtgaggacatgcctgaaagtgacctttctcctgctaggcaagggcctggaggaggtgaaacctgcgtggtcttcaatgcccctgacatttgaaagaaagtgccagctcctcaatwaaaacatgctcgaggcagacctacccaggttggcactggatgaagacctccctggtggggagaaagaagcagctggattgcatgatccctaccctgtccctcggattcaccaagatgcacatttcccttgagaggttgttgccatgtggtctcaggggcactggtcaccccttaacactctggcccaggaggtggcacagtcctccccctgaaaagcagagcctgagccaaggcattcagataagactcaggggaggcttgagggtgaggcaggggaagtgcacgctttgaggtgggtcctggacagtcagacgttcaagctatgctcgactc

SEQ ID NO: 800159 - DNA, 527 bp, Homo sapiens
tttctcatatgctaatgttattaccaccaagccagggctctggaaggaagtcggtacgttcatttcttgagaacatagaaaacttcctaaagtcctgcagctgcttgttgggcaggcttgttgtttttgattatacagtggtttcctataaatgcacagtaataagcagttgcagtaattgtcatcaaacgtactgaaaaacctaaaagcgtaaagttagccatgaatgttttgtgtaaatctgagcaattctgtagtcagggtttcatcttcaacttagcaatttttaaacaaaaatatggcaacaaaacaaacaggagttgatgctcatagtcagtggacctacttaagtctgtaaccctagwgtaggtattcttaatgagcaccttggtttccttttacaaaacttaaatttgcctctgatagacttacatggttggatttgtgcaaagaaagctaacccccaaaatggctataatatttttatatgggctgggcgcagtggcttatgcctgtaatcccagcac

SEQ ID NO: 800160 - DNA, 562 bp, Homo sapiens
tttcctgattgttcctttcccttaggaaaattaacacatagtctctctctggtctctcatagtctctcatttctctttaattttctgttcctgctactccacgcctggtcctattcctatttttcagtgaaaattattcacagagaaggaatccaatgggtccatcttatcctatgtgggaaagagctttttgctggccagcacatggagtgactgtctttgggtcaggtgcacattgcagtctgggttgggtacagtagacctggtggtctacaaggtgaaccactacctcaraaagaggtcatgggcatgactgagggtgactgctcacagtactgtcacagagttagagacactagcatgctttctcatatttctttgaaaagaaaagcaaaaacctgggactaacacagactcttcactttctttttatctttgggcagatccattcctaaatttttccagacaccatcttgaaagtcccccaggataatagaatgagtaagaaacagactacagaatgcagtgggtgaggaaaaacttttgattaagccaaaagcaa

SEQ ID NO: 800161 - DNA, 564 bp, Homo sapiens
ttcaatcttttaatttgcaaagagggaataattctaatacctttcacttaccacccatgttgactattgttgagtatgtgcaaggcataaatgtcatctgtgcaaaatttaaatgtttggaatttactccaaaagcaatgggaccctatttcagggaatcagagaaggtaatgatgatacaagctgaaaccaaaccacagtagaatgtgagtgcaggaaaccctcctttagtatgaaatatcttgtttgcattaagctgttttaccttggaagagtttggttctatttagcagtttcctaaagaagsaaggctgtattttcagccaaagacctggaaaacatttgtttttaagaaaaggtagcttaatcatttttctgatgttgtggggtggggcgggggacagaggggaggcatttcaaagcacagacttctcttattctgatgatccaatgccctctctgagttctaaagtagctaaacacattcatagtagtttcactgaaagaaaggacagcctggagccaaaactttcatgccaaactttaagctagggcagagtttta

SEQ ID NO: 800162 - DNA, 605 bp, Homo sapiens
ctgagagccaggacggagactgcaggggcagctctacttcccctgcaaggggctttcagagtcgtttccaaggctaaaatgccacttactggccacacactgccagcctgaccacacttctaagctatctctttttgccgctctctttctgtcagcaaagagcccccrgtgtcactccacagcagttggagtcccgggaaaccctctgcttggtggaagggaggggctgagctggcagggataggtctgcccctggttccattcagcccttcttctggatttattttcacagctgattgaactcatcacctttttaacggggaaaacagagctggactaaaaagttcccttaaaatgaaacccaagatcagaagaacacggacagaggtagcatgtgtgcagaattagtttgctgtgcattgggaaaggggaggggtcccttccaccagggaaggagacagggtggtcaatttcatgcccttctgagaatgctgcagcagatttggtatttgatactccaaagggggaggggtgttgtcattttccctccatccctcaaaaaactcattcagaaagagagacagagattttcttgagtctaaagg

SEQ ID NO: 800163 - DNA, 640 bp, Homo sapiens
agggggtatcagggttaggtggcccatgccaccgccaagatgactgctgtgtgggtaagcagggctaccgctgactcttcagaaagaggccagcacaggccccatgccctgcaggagacctgaatatcctatatatacatcttggtctccactgtcctgccttcatttctaattgggatttgcccccaggtagttgtacctggctaagtggattcaaaatggtatctgcagtgatcaagaggtgttgagaggaaggtgcttaaaataacraagattggatttactctgtcatccaaggggtagggctgataggaggatgctagggtcgagtataaaagggtttctgagaaatactatgagctgaccatggagaggtgtcaaaatctaaccaagagcaggatgcaagaaacatgacttggaaacacggtccatacagcagaagacttgactgcagggagcagtcagtgggaagacctgattaattccaaaaaggaacgcctctctcatgctaagggttttttacagataggtacagccgtgctttgctcttatacaaaaatgtctgacaggcagccaaaatcgattacagctttccgttaattttaaatgaaggttatggaattattattatttttgagat

SEQ ID NO: 800164 - DNA, 639 bp, Homo sapiens
taagaaaggatgctccgattctaaatgactagcgatagtacttaaaaagaaatacccccaagataaaggacaagagatctcttattgaggttttgtccttggtttcttgtccaccgatttgtaaattggcttctaattgcacctatcaacaaggattaagaggaatgggaaacactcatccttgttacactcagattaaaaattaatgtccagtttacacaaggcagggatgccctctctcaccactcctattcaacatagtgttkgaagttctggccagggcaatcaggcaggagaaagaaataaaggtattcaattaggaaaaaaggaaatcaaattgtccctgtttgcagtgacatgattgtatatctagaaaaccccatcatctcagcccaaaatttccttaagctgttaagcaacttcagcaaagtctcaggatacaaaatcaatgtgcaaaaatcacaagcattcttatacaccaataacagacaaacagagagccaaatcatgagtgaactcccattcacaattgcttctaagagaataaaatactgaggaatccaacttacaaggaacgtgaaggacctcttcaaggagaactacaaaccacttcccaacgaaataaaagaggagacaaac

SEQ ID NO: 800165 - DNA, 639 bp, Homo sapiens
taagaaaggatgctccgattctaaatgactagcgatagtacttaaaaagaaatacccccaagataaaggacaagagatctcttattgaggttttgtccttggtttcttgtccaccgatttgtaaattggcttctaattgcacctatcaacaaggattaagaggaatgggaaacactcatccttgttacactcagattaaaaattaatgtccagtttacacaaggcagggatgccctctctcaccactcctattcaacatagtgttggaagttctggccagggcaatcaggcaggagaaagaaataaagrtattcaattaggaaaaaaggaaatcaaattgtccctgtttgcagtgacatgattgtatatctagaaaaccccatcatctcagcccaaaatttccttaagctgttaagcaacttcagcaaagtctcaggatacaaaatcaatgtgcaaaaatcacaagcattcttatacaccaataacagacaaacagagagccaaatcatgagtgaactcccattcacaattgcttctaagagaataaaatactgaggaatccaacttacaaggaacgtgaaggacctcttcaaggagaactacaaaccacttcccaacgaaataaaagaggagacaaac

SEQ ID NO: 800166 - DNA, 628 bp, Homo sapiens
aataagtttaccaactttacccaatttttttttctgaaggaaagtgtgataatattatagctatggtttcaagtaatcacacgtacaatgtaaagttaattgcactcctttagtgtggaaagaaaaaaagggtaggtggataatttatatctacccatttatttggtagatatttattgaccatcttgactacgtgtaaagcattgtggcaagtgctatgaaagataccaagaaaatcaaatcattcctgcctcaaacaagacattgacacctacacagaggaaayaaaacatgtacatcaataaaatataatgcttgggaaaatccatttgtggcatattcctgattataagtagttttatacattgaattggacaaactggcctggatggaaaaacaggatttatgcattcaacaaacactcattttctactgtgtattaagcatcatgctaagtcctagagatatagttactgccctcccacagcttatattctaactaggaaaggaccttaatgatgtatgtattgaaagccacaaagtaaaatgagaatattttaaatctaaatgttggtaaaagcaaattaatctacagtgaacaaagatagtttagtagattacaaggtat

SEQ ID NO: 800167 - DNA, 583 bp, Homo sapiens
tttggctataattatatttgaatgtagcataaagtattcttcatataacatgaaatgtttttcaaacaactatatggcgaaagcatttctttcttttattaatcctctgatgaagtagtgaaaaaatgttttgtttgcttttccaatatgagattactcaaagtagttaaaataaattcatgctttttgtttgtttgtttttttaatcaattactatgtagaactaaagctaagagagctcagaatataaaatttataggattcaagttaaraatattcattccaggttaggcacctaattaatgtcactatatataaacacctaataagaaatatgcctaataaaataattgactgataaatggataaaccaaggactcatctgttattgtggatttttatgttaaagcactgattccagtgatgccagcaagacaaaatatgtgtgttttctatgagaggaagaagtctgtaactttctttttgagtcactgtagtggggttaattggagtcaggatatagtctgtcattaagagtatccaataaatctcaaatgaagagaagtaattagaaatcaatgtc

SEQ ID NO: 800168 - DNA, 590 bp, Homo sapiens
acatggatatgctaagtgatgctgaagtttgggcttctcatgaccctgtcaaccaagaatgtggtatccaataggatgttttcaagcctttctttctttctctttttctccctccctctttggaatttccagtatctattgttcccatcttgtttccatgtgtaccaatgtttagctcccacttataagtgagaacatacagtatttggttttctgtttctgtgttagattgctgagtcacatggcaattctatttttaattctttgagaaatytccaaattgctttctacaggggctgaactaattagcattcccaccaacaatgtaagcattaccttttttcccccacctcaccagcatctgtgggtttttttttttacttttttaataatagccattctgactggtgtgagatggcatctcactgtggttttgatttgcatttctctgatgattagtaatgctgagcatttgttcatatgcttgttggcttcttgtatgtcttcttttgagaagtgccagttcatattctttgcccactttttaatggggatatttccttttctttttaagttccttttagattctg

SEQ ID NO: 800169 - DNA, 529 bp, Homo sapiens
catgaatctggctgacagaaacaagtaagtactccataatagttattatgattatcaccattaataccattactactgtgaaaggaaagaaaatgtagaaaaagaaagctaaatcttcttctcctcctgtgcccgcctgtcagtgaaaaagcctcattttgagcctaaactgccctatggaggagggagatgaagaattgacagctagccctgtccaagaagtttttattcaacttcagaaggcmaacatatggatacaattacacaatgctgtattgccaaatggcaagtacataaatgcttatgaaaatatttataaaataggccacacctagagattaaaaagctgctcacacatgcccttggcatactgtgtgataatggaacgaagatttttttcagtatttaaatatacttcttttctaattacaacccaatggagctgaattttactgtttcctcggaggactggaacagctaatgcttcatcttacagaaccccatctcctgttattagcataatgacaat

SEQ ID NO: 800170 - DNA, 627 bp, Homo sapiens
aataaagtggatatggcaataaaccaagtcacacaattttttttgtttcttaatgcatataaaagttattatttacaatacaccatagtccattgctagtgtgcaatagcattatgttaaaaaaacacgtatataccttaattaaaaatactttatggctaaaarttgctaacaatcatctgagccttcagcaagtcctaatatttttgctgatagagagtcttgcttccatgttgacagctgctgactgatcagggtggtggttgctgaaagttggagtggctgcagcaatttcttaaaataagacaacaatgaagtttggcacattgactgactcttcctttcatgaaagatttctctgtaatgctgtttgataacattttacccacagtagaacttctttcaaaattggagataatcatctcaaaacctcccaccattgctttattaactaagcttatgtaatatttttgatcctttgttgccgtttcaacaatgttcacagcatcttcaccagaagtagattctatctcaagaaactactttctttgttcatccataaaaagcaacttttcatctgttcaagttttattgtgagattgcagcattgcagttaatcttcaggct

SEQ ID NO: 800171 - DNA, 627 bp, Homo sapiens
aataaagtggatatggcaataaaccaagtcacacaattttttttgtttcttaatgcatataaaagttattatttacaatacaccatagtccattgctagtgtgcaatagcattatgttaaaaaaacacgtatataccttaattaaaaatactttatggctaaaagttgctaacratcatctgagccttcagcaagtcctaatatttttgctgatagagagtcttgcttccatgttgacagctgctgactgatcagggtggtggttgctgaaagttggagtggctgcagcaatttcttaaaataagacaacaatgaagtttggcacattgactgactcttcctttcatgaaagatttctctgtaatgctgtttgataacattttacccacagtagaacttctttcaaaattggagataatcatctcaaaacctcccaccattgctttattaactaagcttatgtaatatttttgatcctttgttgccgtttcaacaatgttcacagcatcttcaccagaagtagattctatctcaagaaactactttctttgttcatccataaaaagcaacttttcatctgttcaagttttattgtgagattgcagcattgcagttaatcttcaggct

SEQ ID NO: 800172 - DNA, 645 bp, Homo sapiens
cctcccactgggtccctcctagaacacatgggaattttaggaactacaatttgagatgagatttgggtggaaacacagccaaaatatatcacagagaaagcaagatttactcctagtattattttatctactattaaaatgaaattgcacatttgtttctttaatacaatggaagataacaacagtgtcaaagaaagggaacttgctcaaggatgcagagcagttgagaacagtcaaggagccagagacacaaaccctsattaaggtaccttgctctctgctagttaagtggtggtcacaaagcaaaaaagaagaaaaaaaaaaaacaaaaaaaaaaaaaacagagaaacacggaagagtccatatagaatacaatgccacttgttcaccattcttccacttggcatttattcaagtgcttcttctgtgccaggtaaaggtcagagctacagaggtgaatagtacaatgctactgaagtaaaagtgcttgaagtcttgtgagcatttggagaattacattaggaatagggaaaatcactgctttgtgggtagtcagactgaggagtgaggaggaacacctagatcaaagaaacagttgcttaatttagaggctcaagctcaattattaaaattaatagctaaaca

SEQ ID NO: 800173 - DNA, 645 bp, Homo sapiens
cctcccactgggtccctcctagaacacatgggaattttaggaactacaatttgagatgagatttgggtggaaacacagccaaaatatatcacagagaaagcaagatttactcctagtattattttatctactattaaaatgaaattgcacatttgtttctttaatacaatggaagataacaacagtgtcaaagaaagggaacttgctcaaggatgcagagcagttgagaacagtcaaggagccagagacacaaaccctgattaaggtaccttgctctctgctagttaagtggtggtcmcaaagcaaaaaagaagaaaaaaaaaaaacaaaaaaaaaaaaaacagagaaacacggaagagtccatatagaatacaatgccacttgttcaccattcttccacttggcatttattcaagtgcttcttctgtgccaggtaaaggtcagagctacagaggtgaatagtacaatgctactgaagtaaaagtgcttgaagtcttgtgagcatttggagaattacattaggaatagggaaaatcactgctttgtgggtagtcagactgaggagtgaggaggaacacctagatcaaagaaacagttgcttaatttagaggctcaagctcaattattaaaattaatagctaaaca

SEQ ID NO: 800174 - DNA, 643 bp, Homo sapiens
acccagtgctcatacaggagaatatattttttcaaattttcatgtatttttagaatttgcaaaattcctctagttattgatttccagtattatttcgttttagactaaagatacttgatataattttggtttttagaatttgttgagacttcttttgtgacctaacgtggtctatcctggagaatcctttatgtgcttatgaaaagaatatatattctgtagttgtggataaaatgttctgataaggtctgttacatccatgtttctaagtccagtttgtattcaatatttctttgttaattttctgyttcattaagctgtctactgctgacagtagaatactgaaatctccaactattattgtgttggagccaatctctcctttcatatccaaaaatatttgcattctatacctgggttctccagtgtttggtacagatatgtttacaactgttatatcccgttactgaattgatctttttgttattatataattactttctttgcctcttttgtctgttttttactagaagtttgttttatttgatattagtatagctactcctgcctgttttgtgtttctgtttgcatggaatatctttttactttgagttgatatgtatccctagctttgagatgagtt

SEQ ID NO: 800175 - DNA, 475 bp, Homo sapiens
gaggtggtatgaagaaataactgcacatgcccaaggactttccaggcctctcctttccttcccctaatcacccactcatctcagaacccaccagctgaacgttttataataaaaatactgccatgaagccagcccaaggagacagatttgagtttgactccttctccttgtgaatcgactttcaacataaagtgttwcttttctcaaaaaacctagtggcatagtgtttgcttttggtgcattgggcactgagtcccttttgtttaataacactcttaacagtaacaaagtgataaatgctacatgaaatttatctgaagtaaggtagtaatacttaagatgtaaatataaacaaacaaaaaatataacaataaaaagattcccttgaattaaactatgagcataggttgtcaagtgatgtgttgggggccaaattcaaagttttataggaacacagggccactcattagtatat

SEQ ID NO: 800176 - DNA, 622 bp, Homo sapiens
catcactaaatgacctcactccctatgtcacagacaacacaaagtatacaggaaaatttcaatttcctgccatctcctttagattcattttcccaaataacctgagagctggttgtctgatttgcttttgtattccactgagttcttcaattcctaaaagtcatgagccagcttgctcaacaatgccccattttaacttattaatcattcccctatataaatgtcctctacaatcttcttacctacagttaggaaggtgctcaacagctgctctgtggcgacaggtttgatctctgtccgaagattaacaaatctgccaactaccaagggggctcggtggaaacccagaatcctggtttggaagattgaagaacagaagagaaaaatcttaggggatgttttttaagtaacagtmttaaaaattacagttcatcatgtcaaatgtgtaaagggtttttagctagtagctaaacctaattttttagaggtacatatatttaggaatttaatgtgaaggtgtgtataatttattttaatatacatttcagcaaaaagaataagacaaatctgataaaatgtgaacactttttaaatctacagagtgggtatatgggctcattat

SEQ ID NO: 800177 - DNA, 603 bp, Homo sapiens
ttaagaaggaaatggaagaattcaggtacattaattgcatattattttgggaaagatgagtcctatacgtggcaatttttcaatgtcatctgaagccagcattatcttccaaagaaatcgatcttttttttctaaaaaaaaaaaatgcttttgccttcccttcccttcccatccgccatatttcttcagcctttcttctcgatcacccgtgtattctttgaccagtaaatgrccacacctcaatgatggtaaaacagcatcatcagtaagctatcttatatgcctcatcctgtgagtttgagcttcaggaaacatgagtaaaagtatatgtaatgtatatagtcgtatatgtattctagcaagaaaaacatatttattttgacaaaggggaacactgactttctgaaggattcagaaagaaccttagtgaaaggttctcagtctctgagagtggaccctaattaacataaagaccattcatcagcgaataactactgagcaactctagtgtgccagcacaggccagacatactagtgagccaggcacatctggccttgggaaactcatcctacaggggaaggccagtttttttcccttcaatt

SEQ ID NO: 800178 - DNA, 553 bp, Homo sapiens
actcacccaagatctagatccagaatgctaatcagacttttgaagagagagatttatttttgtcccgctttcagacctgacttgttttttccccaccccagtataaaagctgcgactttcaatctgtggggaaaattttgggaaaaggattatgagatatgtgtccttagtattataagtctgaaccccttttggcattagcccacaccacaggaggccacattaaagccctctttctccagtttcagttggtaataatttcaggttctttctcacagctaccaatgcaagaggcagctaatcctaaaggyttttgttatgaaaagtgctcgattgaaaaaacacatggcagacagggggcattggagatcacttttacgcaatgacatttaaaatgagggaagtttaagtaagttgcttgagatgcagcatactgtcagcaagctcatcagtgccctccatcaactcaattcctcctttctttccatcttctttcctctgtatatgccaaagggctctacattttagcactgggttgtttatttttaataca

SEQ ID NO: 800179 - DNA, 626 bp, Homo sapiens
cttgtgagccccacagggatgggtgtgctctactcagggttgtcattacttaaaggacattgcctctattttctttgtggagccaaaggtgtttctccgcagaggatgctagcaagagctgcaaggaggggctgggcacaaggcagaatggctccgcgagccccttcagagaccccagagggaagagggaaggaccacccaggacctgggctgctgggtcctaagacctgaacctcagttcagtgtaytaactgtacagacataaacgtgtgaacttgaacaagaacattttgtaggtgataatgtatgccagtggttctcaggcttccgtgtgcatgagaatcctctggaaggcttgctgaaacagatggctgggcccgatcctcagagtttctggttgagcaggtctgaggcgaggcctgagaactggtatttctaagaagcttccaggcgatggtgatgctgctggtctggggaacccactttgagaactactgatgcacacctctgacaaatcctttaacgcacccccagcaccaccagcctgtgaggttgggtgggaggcagtgcgccatagtggttaggagcagagatgaagagcacaggagctgactggggggttcaaa

SEQ ID NO: 800180 - DNA, 634 bp, Homo sapiens
tccagctatgtctaatcctctacaaagctaatgtgtttgaaattcaaatgatcatattttgattcctaagggctctatttgaccctttaaaaattttccttggtctttactggtatttgcaagcctctctttccattattgaaacacagtaaacatgttttacattctatgcctgataattgtaatatctgaactatttgagggcctgattatgccatctatttttttctttargttttcattcacagtgcctcggggtgtgtgtgtgtgtgtgtgtgtgtgtgtgtgtgtgtgtgtgaattttgactgtgagctactcatttggttggttgagagagtgattctttgagacctgagataaaggtcagagttcctccagagggaatttgtatttgtttttcttaagcacttaagctcactacttgtctgggactactttaaattaaattcttcacttaaggattttagatacccaggccgtgtgaatttgggctgcaaatgcagatgtgggccattagggttacaaatccttaagagtcacgttcccctctctattcagcaaagagatttcagagagttcattttcgtttctttcttttttttaaagactggcttgtgtgggggtatgaattta

SEQ ID NO: 800181 - DNA, 596 bp, Homo sapiens
cctggtttgttgttgatgataatattgtaaattctctacaagttggaaagagagagaggaaaatcagtaggcagtgatgttaagatctcctccttggggcagctggggagtgtcttactgagtttaaccccagttcttgcaaaatgtctaggyggggattacagcttctcagaagtgggcatcctcttggcaaagggtttacccgttgttgctgctttgatgtgggaagcacagaaatagccaagcacctaactgggaatcagaaaggatttgtttggtatttggcacttctccgcaccaggcaggcttctgagtgcttcacgtgtaataatccttttaatcttcatcacagccctacgaggtgggtattattaacacccccattgtatagatgaggatacagaggcacagtgaggttaagggacttgctgaaggtcacacaactagaagaagtagagccaggtttggactcggatgttttgattctggagtctgagttcctaattacagtgctaatttttatacctttgccctccctcaagtactacccaggctaatagaacttatggtggagaggctggggaaaggatcctccg

SEQ ID NO: 800182 - DNA, 596 bp, Homo sapiens
cctggtttgttgttgatgataatattgtaaattctctacaagttggaaagagagagaggaaaatcagtaggcagtgatgttaagatctcctccttggggcagctggggagtgtcttactgagtttaaccccagttcttgcaaaatgtctaggcggggattacagcttctcagaagtgggcatcctcttggcaaagggtttacccgttgttgctgctttgatgtgggaagcacagaaatagccaagcacctaactgggaatcagaaaggatttgtttggtatttggcacttctcygcaccaggcaggcttctgagtgcttcacgtgtaataatccttttaatcttcatcacagccctacgaggtgggtattattaacacccccattgtatagatgaggatacagaggcacagtgaggttaagggacttgctgaaggtcacacaactagaagaagtagagccaggtttggactcggatgttttgattctggagtctgagttcctaattacagtgctaatttttatacctttgccctccctcaagtactacccaggctaatagaacttatggtggagaggctggggaaaggatcctccg

SEQ ID NO: 800183 - DNA, 575 bp, Homo sapiens
gttggccaggctggtctggaactcccggcctcaagtgatctgcccgccttggcctcccaaagtactaggataacaggcatgagccacagtgcctggccatcagcagggtatttttaatagggaaaagactaccttctaagtaaattctaacacatatacaactctctccagtccatctctgttayacaagagcaaaaataaagaaataattctagcaacctggtttcaaacattgtattaactgctcctgccagaaaacaatatggcagcctgtatcccaaatatgaaacatccttatacttattaaaacacattaattttcatctggaaatctattctaagaaaacaaatacagaaaaagtttcatgcacaaatatgtccatagcagcataatctgtgataatgattcacatgaaacagcctaaatgtccaatgacatggttgtcactaaattatttaatactgtaataataaaaaaatgatgatgataatggcagctgacatatattgaacacactatgtccctgccacggtgctaggaatattatatccttacttcatttaattaatgtaac

SEQ ID NO: 800184 - DNA, 607 bp, Homo sapiens
ggattacaggagtaagccaccacacctggcctctttcacttaatcttggaactcctcccccaataattcctgtggagcatcctctttttcttccatggtgacaggtcttaatgcagctggcaggtaagaatcagaggtccttaaataatgatgccccaggtcagttatgcaaayccctgtggaccactcctgaccatggggtccagaggaaaataagccacagacacagaacctccaaggagcttctgatcttctgctgatagcgggcagtcaatgctgagggcacagagtagagtgaaaggcaatcattaataggagttcaggagagagatctgagtgccccagcagaggcaacagcatgagcaaaatggtggaggtaggaaaatacatagtggccgggtaagaatagttggagacgaattggttggagaaggcttcagtagataatatatttgtttatattcgtttcctatttctatttttctttttcttttttttttttttaaattgatcattcttgggtgtttctcgcagagggggatttggcagggtcataggacaatagtagagggaaggtcagcagataaacaagtgaacaaaggtctct

SEQ ID NO: 800185 - DNA, 613 bp, Homo sapiens
taatgcaaggccaggcatggtggctcacaccagtaatcccagcattttgagaggccaaagcagcagggtctcttgaggccaggagtttgagaccagcttggacaacatagtgagacccccgtctctacaaaaaatacaaaaattagctgggcatgttggcacacacttgtagccctagctacatgggaggctgaggcaagagaatcacttgagtccaggagttggaggctgcagtaagctatgactgtgctgccacactccaacctgggcaacagactaagaccctgtctctaaaacaaaaagtcaatgccgcggcacggtggctcatgcctgtaatcccagaactttgggaggcygaggtgggcggatcacttgaggccaggagttcaagaccagcctggccaacatggtaaaaccctgtctctactaaaaatacaaaaattacctgggcgtggtggcacacgcctgtaatcccagctacttgggaggttgaggcgggagaatcgcttgaatgcgggaggcggagtttgcagtgagccaagatcgcaccattgcactccagcctcggcaacacagacagcctccatctcacacacacacaaaaatacaaaaa

SEQ ID NO: 800186 - DNA, 613 bp, Homo sapiens
taatgcaaggccaggcatggtggctcacaccagtaatcccagcattttgagaggccaaagcagcagggtctcttgaggccaggagtttgagaccagcttggacaacatagtgagacccccgtctctacaaaaaatacaaaaattagctgggcatgttggcacacacttgtagccctagctacatgggaggctgaggcaagagaatcacttgagtccaggagttggaggctgcagtaagctatgactgtgctgccacactccaacctgggcaacagactaagaccctgtctctaaaacaaaaagtcaatgccgcggcacggtggctcatgcctgtaatcccagaactttgggaggccgaggtgggcggatcacttgaggccaggagttcaagaccagcctggccaacatggtaaaaccctgtctctactaaaaatacaaaaattacctgggcgtggtggcacrcgcctgtaatcccagctacttgggaggttgaggcgggagaatcgcttgaatgcgggaggcggagtttgcagtgagccaagatcgcaccattgcactccagcctcggcaacacagacagcctccatctcacacacacacaaaaatacaaaaa

SEQ ID NO: 800187 - DNA, 653 bp, Homo sapiens
ccatgtgttggggagggacctggtgggagatatttgaatcatggggtcagttcatacagttctcatgatagtgaataagtctcatgggaactgatggttatataaggggaaatgcctttcacttggctctcattctctcttgtctgtcattctctcttgtctgctgccatgtaagatgtgactttcaccttctgccttgattgtgaggcctccccagccacgtggaactgtgagacattaaacctctttttctttataaattatgcagtcttgggtatgtctttatcagcagcatgaaaatggactaatacaggtaagtaaaccaaattttgttctaagtgtttactaactatatatacattgttttcctttaatacataaacaaaatctattcaattacaaaataagacaaatattacatctatccctaaaagaamcaggcagaacatttctccagtttgtaaaatttagaagaaattacccccttttgctattagagaaaagatgaaagaaggagatatcttcataccataccaacaaggctgattttactaagttggtgtctatttcttaacaatttgagttataaaagtgaagatatcaagcaaaatatagagaacaacttattgtaagccatgatgattttgctaatg

SEQ ID NO: 800188 - DNA, 600 bp, Homo sapiens
gtttatggaaagaggccatctccataacataaaagtgcagagtgaagcagcaagtgctgatatagaagctgcagcaagctatccagaaaataattgaaaataattatcctgggataattgatgatggtggctacactaaacaacagattttcaatgtagatgaaatagccttctataagaagaagatgccgtccaagactttcatggctacggaggagaagtcaatgcctggcttcaaagcttcaaaggacaggctgactctcttgttagrgtctaatgcatctggtgatgttaagttgaagccaacactcatttatcattctgaaaatcctaggggccttaagaatgatgctagatctactctgcctgtgtttatcagtggaacaacaaagcctggatagcacatctgtttatagcatggtttgctgaatgttttaagcccacttttgagacataccgctcagatgaaaagatttctttcttttttttctttttttgagactgagtttcactcttgttgcccaggctggagtgcaatggcaccatcctggctcactacaacctccgcctcccgggttcaaatgattctccttactcagt

SEQ ID NO: 800189 - DNA, 611 bp, Homo sapiens
taccttcatgtgtaattttagttatttacatctttattttttatttctcagtatagctaaaagtttatcaatttagtggatcttctcaaaatctaacatttgcttttattgattttctgaatcatttttctctactttattttctctatcttctctaatatcttacttctttcatctggtaaactagaatttaacttgctctttttttctagtttccttaggataaggttaaattactgatttgaaatttctttttttttwaatgtaggtatttacagtaatagattttcttctgagcactagtctctttacaactcataagttttgtcatgttttcatttccattaatctctgagtatattctaatttcccttgtgattaatctttgaattcaagagtgtgtattagattgttctcacactgctatgaagacgtatcaaagactggacaatttataaggaaaaaaggttaaattgactcatagttcttcatggcaggggaggcctcagcaaacttacattcagggcagaaagcgaaggaaaaacaagtaccttcttcataggatggcaggaaagagagaatagagggcaaagggggaagagtcccttata

SEQ ID NO: 800190 - DNA, 594 bp, Homo sapiens
gttctcctgcttcagcctcccgagtagacaactacttaaaataagacaaaaataaggtttcctgcatcagttgactcttccttttacaaaatagttacctgtaacttgtcatgctgtttgatagcattatacccacagtagaacttctttcaaaattggagtcaatcctctctaaccctgccactgctttatccattaagtttatgtaatatactaaatcctttgctgtcatttgagcaatatttgcagcatcttcaccagaggtagattccttcttgagaaaactctttgttcatccataagaatcaactcctcattagctacagttttattataagattgctgcaattaagccacatttttaggatccacttctaattctagttrtcttgctatctctaccacatctggagtgacttcctctactgaagtcttgaacctttcaaagtcatccatgagggctggaatcagcttcctccaaactcttgtttatgtagatattttaaccttctcatgtaaacatgaatgtttttaatggcatctaaaatggcaaatcttttccaggttttcaatttactttgcctggatccatta

SEQ ID NO: 800191 - DNA, 571 bp, Homo sapiens
agacatattcgtgcatatttatgaagataatgtggtgttgtgatacatgtatacactgtgtaattatccagtcaaggtactttggatatccattacttctttatagtagaaacaaacaaaaccctcttttctagctattctgagatatacaatgttattgttgattacagttaccttactgtacagtagggaaccagaactgattcttcctttttaattgtaactttgtacccattgcccatagtcaccgcatcttctcttccccagtccttagtaaccactattgtaatcactcttcctacgagatcaaattttttagattctgaatatgaatgagaatatgcagtatttgtctttctgtgtctgacttatttcatttaaaaaaawgtcctctaggctcatccatgttgtcacaaatggcaggattttattcccttttatggctgtataatattccattttgtatatatgtcacattttctttattctttagttgttaaacacctaggttaattcaatatcttggatattgtgaatatgctgtgatgaatatgggagtgaagatatctct

SEQ ID NO: 800192 - DNA, 612 bp, Homo sapiens
ttatatttcttatttttatgtaaccttaatatcttcaatctattttatttgtccctactttatagacattgctaatgtacagatgaatcttttttctaattaaaaagaagtttgatatttatcagttaatgctattttgactcaattttaaatattttactagatatatgtatgaacaaaatgcacacagtttatattgaccttgtatcttttaacmaaaatgattttcaaactaggtgagatcccctcataacttttatttctattttagttaacaaaaacgttacttgacaaactaagtaaatgttttctctctaacattttaaaatgcctactctcctaaatatctgtttttttttttttcaattttcataacattatgagagtggaaaacaagaagtagaagagaagaaagagctagagaagattttagccttagcatgccatggggaaaagtccatgattcctcatatgttcagaggttgaagtgaaccttcaaacacgggaaattttatgagattattttaggttttgtaattatatatcccatttatttttatcttgttggtttataataggaaacgttatcattatccataactgtttcattag

SEQ ID NO: 800193 - DNA, 522 bp, Homo sapiens
ataatttgctgagttatttatatttttattctcatttttattaatttgattgattaatatgatttatgacaaatcaagcttgcttccatagaacaaacacaatgtgtttgtaatacactatcctttctatatattacaggattctatttcataagatttaattaaacattttgctctctgtgttcatggaagatattggtctataattttctttcttcataatgtctttgtcttatttttgtattaagtttatgatgccatcataaaatgaatagggaactgtagccttcttccctcttttctgaaataatgtatttaayattggtataattttgtctctaaatgtttgatggtttataccattttatgggttgaatttttgttatgggttgaattgtgcccccattctcccaaaattgatatattgaagtcccaagtcacagtacctcagaacatgaccttatttgaaaatagggttgttggagatgtaatcaattacgttacaatgagtttatacaggag

SEQ ID NO: 800194 - DNA, 522 bp, Homo sapiens
taattcctactcatccttcagaactcagttcaaaactatttcctcatcatttccctacctgcctaagctacatgctctcatagtaccttaccctttaccctctgtattagttcattcttgcaccgctagaaagaactacccgaggctgggtaatttataaagaaaagaagtttaattggctcatggtttcacagcctgtacaggaagcatggctagggargcctcaggaaacctgcagtcatggcatatcctgaagagaaagcaagcacaacttccatggccagagcaggaggaacagagaaagggggtggtgctacacactttcaaacaactagatcttgtgataactcactcactatcacgagaatagcaccaaaatggaaattggcccccatgatccaatcatctcccaccaggtccctcctccaacattaaggattacaatgaaatttacgtgagatttgggcaaggacccagacccaaagaatgttgccctcactacactactatgcttatagttaa

SEQ ID NO: 800195 - DNA, 616 bp, Homo sapiens
ataatcattaaaaataaatgcaatcaaaagaagtaggttattatagtggcgcattggaactgcttttgttcttttgttagaagtctgtcagcctcccattagaaatgtttgggaggagtttaccactcagctgcaaaaatttgctggaggttaaaaatgacaatctctgggactcaaccttgttgccgatttattcctgagaaatttggttttagatggttgggtggctttgaagtagcatgcaaagacacacagatgggtctgttttgcttaaggcaattcataactgtttttgtaatactgaaatgcattatgacccaatgacatgctgaggttttatgggccacatwaacttggggaatggggccttcatcccctcaagcatttatcctttggattacaaacaatccgattacagtatatatactgtattagtctgttctcatgctcctaataaagatatacttgagactggataatttataaaggaaagaggtttaattgactcacagttccacattgctgcggaggcctcacattcacggtggaaggcgaaggaggagcaaaaccacatcttacatggtgacaggcaagacagcatatgctggggaactgc

SEQ ID NO: 800196 - DNA, 548 bp, Homo sapiens
atggaataattgctaaataaatttatcatacttattgagaatgataaatattctgccacgttaaaacaaaccggacaataaatccctatgaaaatcataaattattctaattagttctcttaacacagacctatttgaaattatttgttttactttcctttgatggactttctacgttttgtataatgctggctgtactcactgtactttatgaactcacaaattcactcactaatattaatgattaaattaacagtgtaagcattcttaattgatctccatttattccaaaggtgctggaataaaytgacattttcacatatccatcatcattattatttgagctaaataatgtgtgtacacttaacatcacctgattttgatccataagaccctttactattttgcaaggaaatctaagagacaaaaagctgaaatttgaagatgcagtagaaaatacgcagtaacagctgggatggttgtttctggtccttctcccatcaccacaaaaaagctgaatgcaaaatttcattacaagacttaaatca

SEQ ID NO: 800197 - DNA, 559 bp, Homo sapiens
tcaacaagtacttcagtttttcctgatcctactatctgatattcctttaacctccttaaatacataatcctgcctgcttcaggtaggatgttgcctgttcaactctgcagcaggaacctcactgttttataaccagtaacaaattacctaaccttcaacaactaatcatccagttcaaaggactctcttatcattattacaacaacgatactagtgatcgctgatgacaataagctttataaaaaatctcacttcctcagacttcagaccctcaaatgtatytaaaatgcattacaagattcagagtacatgaaccaaaaaaaaaaaaaaaaagtgaaaaaggtatttactaggttctctcccaaaactttgttcctgcagcattattcgtacttatctcatttatgagatactgtaatcctcattttacaaataaagaaacagagtccaagattaggtaacctgctaatggtcacacagctactaaggagtagagctaagaacccaattatgcctgactccaaaacccatgcacataataagccatactactaaattc

SEQ ID NO: 800198 - DNA, 631 bp, Homo sapiens
atctaccaaatagcaagcatccttttatttgccttcaacttaacgcagctcaactttcaagggaatgttcctgacacctgtggagtttcaggatttgacatatcatatccactttatactgctcacaatattataaaatagaaaccaaataacttctaagatttcatctttctaagttaagtcattgtcatttctgccctgtacccttataatcagctattttaattcctgctatgctgtacatattccctgcatcacaagacataaattcttcctaagcatatactgacagagcaagtccaaaccaagataaaagctgcccttttcttccctcagagaaatatcacctactttttctggtaccctgtaacttccaagattatagcatacttaccaagaagaaaagtacttaaactatgctaaaaaaaatcaattcttagtcatatgcttacaacaagaaatcgcayagatctttaatctttatcacagaatgaaaaactttacaagaaacagtagaaaagagtaaacaagcagcagacataatttgggagaaatgaaaagaattaagccttttctctttaaattgaaccatatctaaagctggatttgaaaaaaaacaagggaatgcgta

SEQ ID NO: 800199 - DNA, 612 bp, Homo sapiens
actttctaatccattctataaagacagcattaccctgataccaaagccagacaaagatactagaagaaaagaaatctgtagtccaatatatctgaaaaatattaatgcaaaacccaaaagcacaagcaaacctaaatcaatagcccattacatggtttatatatcatttactcttggaatttattcctagaataagaggatttattcctggaataaaaggattttttgctggactcaagaaatatgatttaatatatagagagcaattaaggtaacataccccattaacagaatgaaggaaaaaaatcatcttgatcattttttacatgatcacatgatcatctcaaagcacagaaaggatttgaaaaaattcaacacgttttcataataaaaagttagcaaactaggaacagaaggaaactacctcaacataataaaggtcatccataaaaaccccacagctgacatcatactcratggtgaaatactgaaagcttttcctctgggctcaggattaaggtgaggatgccaacctaaactacttctattcaagagagtgctaaaaaattctagacagaccaattaggcaagaaagagaaataaaaggcaccc

SEQ ID NO: 800200 - DNA, 677 bp, Homo sapiens
attggtaaatatcaaggtgactacaatttttgtttttaatttttccaacaacttgtgtcacttttcctttatatcttggacttgattaaataaaattttatatatatttacctaaaacacatgttgtattggggataaaattacttacttgcataaatttcatttaccatcccatccataaaaatgttaaaaaaaaagasgtaaaatttataagaacattaattacaacgctatgacaacacctgaaacacctgttacatgttattttctaactagaaacacaagctattttagtagcctacccccctatgtctaattaatcttttaaatgatgccctcctcaataattacttaaatgccagagtatcaaaaagtggtgtaggtgaggctctgggactatttaacttcacaatgactacatattatgatactttaagaatgtatatatttcacctccaataaaaatgaaaaacttttgggaagcagaaaagacaaaggaaaaaaccttcatctcaacaggcagaacataaaaaaaaaaaaaccatttataaatcctaaagccattaaaaattgccatctgcatgaattcacacttagaattctttcagttgcaaaactggtggaatactatcaacggataccaaatgtgaataaaagaacccccacaaacatctaaa

SEQ ID NO: 800201 - DNA, 638 bp, Homo sapiens
actcaatacttctaattacatgttcagtgtttttgtttcaaattttcagcaataatatttggatttccagcaactctcctatccttgggtgagctggtggtggtgggatccatttcttatattatcttctcaaaatcctcttagaatgtcagagcttcttttttgtttgtctacttccttttctgtcacctcaattgtctgtttccttcagaaaacatgattctatttatcttaatttcattcatgcttggggtttttacaattttcttcatatctgaccattcatatttaacaataaaggactagtttgattattccagctagtaagggtggggtttcctacaatgctgtaaatgtaaagctggttttctgttaggattctccctgagtaaaaatgctgtgtaacacctcagggctttgcaaaggtgagtcttgtgaactagyaggtttcattttgaggtaggtaggtctgaggatcccctataatgccagaatgagaactttatgcttatgcagcaatgtcatcccagcactaactgaccctctgtatgcgctggtgctgagctcagaaaccagccacattccacagagcacactggatccaacattagatgaaggctctttctaagttctgcttc

SEQ ID NO: 800202 - DNA, 627 bp, Homo sapiens
agtaacattaataattacacatttagcagaattattcaaaatacaagggagatttcaaacattctttataataaatttatcttgaaaaaacttcataatattcaaaatacttgcaaaaccttgacaatggtacattttatataactttatacatactaaaaaatctttggaaaatgaawattttatttgatttcatgcacatatatatttgcttgccacaacaaaatatatacacaaaatatatatttatacacaaacacattggttgtcaatatattcaaattagttataattacacaacaaattggttatcagtatactgatatcatactctctaatcatactccgaaatcatactctgtataaagtatgtaaaaaagcaggtggtatgctctgaaatccagtgattttatattctacacagagggtcaaaacataatttagatgaactttataattttataatacacactatcatctggagcaaattaatactgttggcactgagtgctgatgagggacaagttttaagtagaatatgtttgccttttgtatcctatgtttttattcaatgaataactttcacacgatttaaggagttgagaacattactatgctatatctgga

SEQ ID NO: 800203 - DNA, 633 bp, Homo sapiens
gagcaaatgtctctggatatttgggcaattatgccaaacagtcaagacaaatatgacccctctgaatgatctagttttgtagacaatagagagaaaacaattgattgtaaaacagatcattatctgagtcttacagatttacttttaacaataagattgttgatttttggccgagcttggtggctcacgcctgtaatcccagcactttgggaggctgaggcaggcggagcacctgaggtcaggagttcaagagcagcctggccaacatggtgtaacccctgtccctactaaaaatgcaaaaacttagccaggcatggtggctggtgcctgtaattatgtaattatgtaattccagctactcgggaggctgaggcagtagaattgcttgaacccaggaggcagatgttgcagtgagccgagatcttgccattccactttagcctgggtgacaagagcaaraaacaagaagaagaagaagaagaagagtatagatttttttaagtgtatgaaaaatatactgctgtgacctaaaaatgaaaattttcatagatacttttacaatttccagtatgacaaggtcagctgaaataatgttcttgtgataatttttagcctcccgatttagctaaggtt

SEQ ID NO: 800204 - DNA, 643 bp, Homo sapiens; identical to SEQ ID NO: 766000

SEQ ID NO: 800205 - DNA, 621 bp, Homo sapiens
tgctaggctaatggcaaagcctgtattcttgctgctatcctgcactgcctttctccttatgcaagggaaaaaaacatgtaaaaataacatcagtgcaatttgcatggtatttttcaaagtattcttttatattcacagccacacttgatccttatgacaaccatatgataggcgtagtagatagctcccatcataacgattaataataatgggcataataatcattaaaataacaacattcgccagcactgattgagtgctcttcatacatccrtgcactgtgctaagggctttgcatgtattatgtaacaactctataagaaaggttctacaattatccttaatttgcatatgaggaaactggggctcagagaggttaagtaacttaataaaggagctgggttcaggtaagttacaagactagttcaaggtcatgtggtgattcctgaactagaacacagatcctccaattccatatccacgcatgctcttttcatgttactattttaaccatcagtctgcagctacaggaaggaagatttgaagaaagagctacaacaggcagaagaagagagaagagagaagaagccaggagagaagccagaaaacggcagaaattca

SEQ ID NO: 800206 - DNA, 625 bp, Homo sapiens
aggtggtatgagcagctcatgactttttaaccagcagaatcacagatatcccaaataccgcttatagtcatcactatgacattacaataattataagacctgccagtagactttttaattaacgttctaataaagaagcacatattactatatcacaaacttgacgtttttaatattcagatcattatatttcattataacctatttttgtaaacctacgtaatttattttatgtgtcttaaatcattattctgttcataggcttcaygagactgctcatgggggcccatgacacagaaaagttgaaatacccctgggctggaggaactcttccctaatccccatcaaacaccacacacacacacacacacacacacacacacacaggcctcactacaaggcctgaaatcccaccattagagaacatttcctttgggtttttaagattcccattaaaatgcaaatgccccctaaggagaagaacttctctgagtgttattagttaaccccttaaatgaggttgtttagcagctagccgggcacaacatcctacaactcaattaaacaaacgtttattgacctcctgccatggttaaggagccagacttgggaatagggagcaaaa

SEQ ID NO: 800207 - DNA, 635 bp, Homo sapiens
tggctcctggttctgcataacagggaacagaagcactaggccaccagtcccagctgtagaagtgcgaggacctagggcctactggtaggtgggcagaatggggttcagcctccttacacgaggagacatcagctgtcaggtgtgagtgggcctgatgaactcctcttccccatacacttggatgtctgaccaagcgtgacttcatgccagcagtgagagcccctcacctgtcttccttgggcagtatgtacaaggatgtgtccacagctctctgttcgatcatccktgcaaatctcttcagcatggggcagcttgggaggttgtgtgcctgaaagggccacatgtagttttagaaaaaaatgcttcttacctactgattctggcagctgatcagcttccatggaacctgcaggagcccatcttctcctggggaagagaagacaggctcaagaacagctatgtctgttaacaggtcaagaagctatgtctctaaagctcttccaaagctattactagatacctgaaggccaggaaaaaaaaaaaaaaagaaagggtttcttccctttctgatgactccccatccactcaaaaatgaaaagcatttttgttgtttttttggttttttttgagacgga

SEQ ID NO: 800208 - DNA, 502 bp, Homo sapiens
gaactcttgccttctaaccttaaacctattttacacataaaagcaaggtgcatttctgcctttagggtacacagtcattttattttcacaagagtggggaggatcctatataactttggatgtccaacttttaaatctagagaaacctttcccattgttagtcttctttatgtatttatyacagaaaaaaagatcctatggctaaataagcttaaggaaaacagatttaaagattaaccagctttctttatgaagggcatctcagatttttttaatatgctgatgtacatatagtactctcaagaagtgatgcaataaataaggattccaaaatttttagaccctactcatccctccctacccattgcccctgcctgcccaaacacaaactgcatattgggtgttctggggaacatgcctcaagaagctctggtctagagttcagtgtctgtgttcctacctgggtaaggagtcttcctcgattgctccctatccctcagtc

SEQ ID NO: 800209 - DNA, 651 bp, Homo sapiens
cacagctgacatttttcaaagatggcctcacatcttactatctaacttaccatgtcttttagaaagatctgtagggagggagggaagcagataagagaaggagattgttaatagtcctcttgaatcagctctcctattttgtctaacccctttctacatttgaaaaagagaaaaaaaaaatccccctcggtaggtgtacagaaatcacaaaatattaattcttgttctgtttggatccaagtgaaatgactaagaaacttgttttttttttttcttttttgctttttctttcaacaacctttgtatttgaacagtgcccaactatgaaatttaatgatagaaggaatttaagccttcagttagaatacactgtgattccttctaactcaaaactttgtaattccataatgaagtggagcattctaggttgtatcagtcaacagggcatttattaggaagawtttgctgttagattttaaagcctctcaaggctatagaactgcatttcttaggagatgatctgaccacaatgcttccccataaagtgcttcaatcctatgacagcctattgggagaagtaagaagactaggactttcttgagaataacagggtagcttggacatttccaaaaggaagaggcattgattaca

SEQ ID NO: 800210 - DNA, 590 bp, Homo sapiens
cgacactccgtctcaaaaaaaaaaaaaaaaaagacagcgaactggagctctccatctcctccaagggcaggtccagaagaaatgagcttgcttcccaacagaggggaagactgtcctaataagaaattaagaatagagttctaaaggaggaagaaaggtgcctgtttgctactttgtggagctttataatgtaaatagaaacatattttggagctttacatacattcttatcctactgaaataaggacttaactaaggccaaggatgagttggaatgaatcagtattccaagcctcaggcctaagaacytagcattgttggcattctttttcttttttttttttttttttttttgagatggagtctcgctctgttgcccaggctgaactgcagtggcgcgatcttggctcactgcaagctccacccgccgggttcacaccattctcctgcctcagcctcccgactagctgggactacaggtgcccaccaccatgcccggctaattttttgtattttttagtagagatggggtttcaccgtgttagccaggatggtctcgatgatccgcccacctcggcctcccaaagtgc

SEQ ID NO: 800211 - DNA, 632 bp, Homo sapiens
agtttaaccacttggtggaactgaagaataaacagtgaaagaggctgcagcaagagaggacatggtgagctggtctttttcctggtacatacacaccaagaaatttctcatagaagggtcctacaaatcagttcatgtacttttatatttatatatatacaagctgcgaataaagtgctaataactgtaactgtrttaaacccccaaattttgtcttttataagacaacttgaaaagcaatccatatacttcacaatttgtctgtagcttattcatcatgataattcaggacaaatgaggcctattttccattgtgctttatataattatcacatgtgtaggccaagttttattttccttttgacatgtgtgtgtattcatatgtgtgtgtgtgttatatgttgagtttatttttatgacccaccataatgaacaaaagcagactatgaaaagtgtatgtaagttgaattaaatacctgagtagcaaataattatctattaatgctgacatgtagtaatcactatttgttgacagtactgatacattaatgtatgaaaaagtcatgcattgctacatttaaatataaaatcaaatggttggaaagcagataatagattagtagcaaaaaggg

SEQ ID NO: 800212 - DNA, 541 bp, Homo sapiens
caccttctgccatgactttaagctttctgaggccctcatcaaaagcagatgctggtactagaattgttgtacaacctgcagactgcgagcctataaaacctcttttctttaacaattacccagtctctgatatttctttatagcattgcaagaacagactgacacagaaaattgataccaaaacgattataattgtctaggctattacaatcagaagcagaggctggtggttactgtgaatraattctgcaggttctgcgggttgggaatgtactaaagtgtttagtaaagcattcttaagattgtggatttttctcattatgtgttagaggttttcaaatctgccctgccaccttttttataaacaaagtttcattggaatgcagccatattctttcatggaagtattggctatgactgcatttatgctacaacagagttacatgtttgtgacaaagactgtatcctccataaagcctaagatatttattatctggccctgacagaaacagtcagcaatctcttccatatataatgggaa

SEQ ID NO: 800213 - DNA, 603 bp, Homo sapiens
gtatatggtttgtctctgtgtctgtacctaaatctcatcttgaattgtaatccccatatttcaaggaaggaacctgttgggaggtgattggatcatgggggcatttttccccatgctgttctcatgatatttagtgagttctcacaagagctgatggttttaaattgtggcacttgctcacttttttattcctgccaccatgtaagatgtgcctgcgtcccctttgccttctgccattattgtaagtttcctgaggcctcccagccatgcagatctgtgagtcaattaaacctcctttctttataaattacccagtctcaggtagtctccttataacagtatgagaatagactaatkcatgtggctttagtactgagtagaaagtgagaaagtaaattttaattaattttttatgaaatatgggagtgatgaagaggagcaaaacaagacagtctgaggaagtcagttgaaatgagggaatatttatttttattataatattttaatagaataaacttgagcaagcttaaagagaaaactattaggagagagagggtgcagttttacaggaaagggcaaaaattactgagttatggtccttaa

SEQ ID NO: 800214 - DNA, 522 bp, Homo sapiens
gtactgtgtctatctttcaaggctgttctctatacaaatatgctggaaaagagatcaggaaaaaatttatattagtcatgcagaaaggttatgaaaatacacagaggaagcttaagtacatattactaagtgaaagaagcagtctgtaaaaggatgtatgttatatgattccatctatgactttctggaaaagccaaaactatatacacagtaaaacaatcagtgattgtygggggttggatgggaaagagagatcaacaggcagacacagagaattttcggggcactaaaactactctatatagtagtataatgatggacatgtttcactgtatatttgtccaagcttatagaacatacaacaccaagaataaaccttaatgtaagctagggactttgggtgataatgatgtgtgaacattggttcatcaattgtcacaagtgttccactctggtggagtatgttgataattcgggagtctgtgtatgtatggggcagaggatgtacaggaaatccctgta

SEQ ID NO: 800215 - DNA, 667 bp, Homo sapiens
tttcaaacaaacaaacaaaaaaaaacattgttagaagatttttatgtgagcaggatagagtccctcccagaatctcaaaatagcaaatattttaaaaatgtataaacactgcatttctagtgttagcaaggcatttcaaagtcacagagcacattaacgcaagttttatcatataaaaataatatatatttctatcctyaccacagaaataagtataaataagtatatttatctataaaattatgtttcaggaaatcacatagaaaaaatgtggtctatgaatgaatagatttcaaaggaaaattaatgaaatattattatgacaaaaagaaaaaacagggcttggactatttcccaaacatttaaaaagaataacaataaattaaaattaaaatgaaaagtaggaaactatttccttcaagtagcaaacatccatgagctagctattttaaaatagtgataaaacctgaaagggtattaatagatacaaaacagttcatatcattacagagctttgtttccactgaaagagaacacaggcaaacacacaaagataatctcattaccgatatataagatataataagatacttgcttattatatgagatagaataagaaaattaaaaaggactttgaaatgctttgctatcactagaaatatcgtat

SEQ ID NO: 800216 - DNA, 635 bp, Homo sapiens
tagcaaacatccatgagctagctattttaaaatagtgataaaacctgaaagggtattaatagatacaaaacagttcatatcrttacagagctttgtttccactgaaagagaacacaggcaaacacacaaagataatctcattaccgatatataagatataataagatacttgcttattatatgagatagaataagaaaattaaaaaggactttgaaatgctttgctatcactagaaatatcgtatttgtacagttatagtggacctttcacagccacccaaaaactggttacaaggagctgacgaaagattccttggaaatcagaaggcaacagacagcccccaaaacgtcatctttgagcatttgtttagttcagagggcactgatgtcagatcaccttgacgtatctatcaggaatgaactatcctgctctcatacctcttacctctatatatgcttccatcttcaagaattcacaagtggaaacactagataaggaaaaatttaaaaattagccatgccatgctcccatctagagtctcaggacctataaagatcccatattgggtgttgagagaggtctccttaaatcaagaaagaacttctgattaatacatgtgagtagacattttaat

SEQ ID NO: 800217 - DNA, 635 bp, Homo sapiens
tagcaaacatccatgagctagctattttaaaatagtgataaaacctgaaagggtattaatagatacaaaacagttcatatcattacagagctttgtttccactgaaagagaacacaggcaaacacacaaagataatctcattaccgatatataagatataataagatacttgcttattatatgagatagaataagaaaattaaaaaggactttgaaatgctttgctatcactagaaatatcgtatttgtacagttatagtggacctttcacagccacccaaaaactggttacaaggagctgacgaaagattccttggaaatcagaaggcaacagacagcccccaaaacgtcatctttgagcatttgtttagttcagagggcactgatgtcagatcaccttgacgtatctatcaggaatgaactatsctgctctcatacctcttacctctatatatgcttccatcttcaagaattcacaagtggaaacactagataaggaaaaatttaaaaattagccatgccatgctcccatctagagtctcaggacctataaagatcccatattgggtgttgagagaggtctccttaaatcaagaaagaacttctgattaatacatgtgagtagacattttaat

SEQ ID NO: 800218 - DNA, 607 bp, Homo sapiens
tgtattactgaaccctacttttaacatgtttaaataattgtgacttctaaagggcaagaaggagcaggaaaagtaaactaaagcaagataatgccgaaaataaatagatgaggttaagtccaacctatcataaaaaattattctccataaacattagaattaacaatttacaatagcatatttaataggaaaaaacacaaataaatatctagtctccatggaaagaaatctgatcacttaagaagaattgtcattcacatacacttgcaatgycaaataaatgtatgttgaagagaagaggagaagtactgagggctagtaatcaggcaccagtcttcaggactcttatttctaaacgtgtaaactggagaatgaaatgaaataagtgagatattagtagtaaattcaatgattcaatgacagtgaaatgtatttaaataatatatatttttaaattcacaatttaattggcagaaagttatcaaagcataaggaatatagaaattgtttaataagttaatcccaagctgactttatgcaaaaatacacaaacaagtgaaaaaaaattgaatcctttaattatctccacactcaatccttatatata

SEQ ID NO: 800219 - DNA, 655 bp, Homo sapiens
gggcacacttgttttcctaaagagctttcagcttttcactactgaatataattttaactgtaagctgtctacatggcttttactgtgttgaggcacattacttctatacgatatttgttgagagtttttatcatgaaaggatgttgaatattgtcaaatgctttttctgcatcaattgagatgatcatgtgacgtttagcccttcattctgttaataaggagtatcacttgtattgatttgaataagttaaactatccttgcatcccaggaataaattttacctgaataaggtagatgatcattttagtgtactgttgagtcagtttgctaatatatttgaggaaattcgcatccatctttatcaagttcttcagcctgtagtgttcttgtcttgcagtgttcttggatggcattgctttgaggataatgctagccttatgaaaaagttttgaagttgtctccctctttaatttttttagargaattaaagaaagattggattaatcattatttaaatgcttgacataatttattcatgaaattatctggttctggaatattctttgttgggagattttttttgattactcattcaatctccttttgctattgctctgttcagattttccacttccttgtaattcagtcttggta

SEQ ID NO: 800220 - DNA, 489 bp, Homo sapiens
tacttttctataatttatttttaaaaacagtgacataaatagctaaatgaatgtaaagctcatgtattttcagatgttatctgtaccatttatatatttatatatgtaagtatataggttagttgaaaaatgtagggtggagcttgtgttataattcgtattaaaacatttttatttttgatcattgtatttatgaattatcaattgtgtatgtttaatactttttagaaagagcctwtattgagtgacttctgtgctagatactatattattatctcattgataatgtattataactcaattctcaaattaacagatttccatccacatttacagataaagtagctaaaatattttaagaagacaagtaacgaaatgtacctaagggtatatatctagaaatgttaagaaatttatttatttatctatgatacatatataacatatttctatctatgtgtgtgtgtgtatgcatgtatatatacatac

SEQ ID NO: 800221 - DNA, 576 bp, Homo sapiens
atttcatgagtttttattatcattacagtttgcttcaaatcgatcaactgagctttcccacaggccaagttgatttgctttaagattacagtgaatccacttgtaagtgtatggagacagggctaaagtggtaacagtctcataagtttactttgtttctaggaaaagaacatttcttatgactacagaaacctgactaggcttcagataccgactcttcagttttgacatagctgccttcacttctttgtttcttagcgtgtagattacagggtttaaaatargcgtgaagatggtgtagaatacagcaaggactttgtcaactgagtaactgctgaagggccacacatagatgaaaatgcatggtccaaagaataaagtgaccacagtgatgtgagcagtcaatgtggagcgggccttcgccatgcttgcagaggagcgattcctaactgtaacaagtattacagtgtaggagacaaccaagaggagaaaggaactcagagaaagaaagccactatctgcaactattagtaagctgacaacataagtgtctatgcaggctaacttggtcactag

SEQ ID NO: 800222 - DNA, 579 bp, Homo sapiens
tcatgaatactgtttacttctcttttaaaatgatttataattcatttacctgaaatttatccttttaaagtgtacaattcagtaaattttatcatgttaacaaggttatgcagctatcaccactgtctatctctgaaacattttccacaaccccaaaagaaaccccataaccattagcatttacttcccattctccctaaatgcagcccttggataccattaaactattttctgactctttggaattgtctattckggacatttctaataagtgatatgacataataataatgtgtctggcttccttaacttggcatattgtttttaagtttcatccatgttatgacatgtatcaatactgtattccctcttatagctatgtaatattccattgtaaggatatagaaattttgtttattcattcatcagttgatgggaatttgggttgtttccagttttgattgtcaatagtactgctgctgtgaacacttgtgtacaagtttttggataaacatcttatatctctgaaatgaaataaaaacctatgaacgctgactagaattggaatttctggggcat

SEQ ID NO: 800223 - DNA, 579 bp, Homo sapiens
tcatgaatactgtttacttctcttttaaaatgatttataattcatttacctgaaatttatccttttaaagtgtacaattcagtaaattttatcatgttaacaaggttatgcagctatcaccactgtctatctctgaaacattttccacaaccccaaaagaaaccccataaccattagcatttacttcccattctccctaaatgcagcccttggataccattaaactattttctgactctttggaattgtctattcgggacatttctaataagtgatatgacataataataatgtgtctggcttccttaacttggcatattgtttttaagtttcatccatgttatgacatgtatcaatactgtattccctcttatagctatgtaatattccattgtaaggatatagaaattttgtttattcattcawcagttgatgggaatttgggttgtttccagttttgattgtcaatagtactgctgctgtgaacacttgtgtacaagtttttggataaacatcttatatctctgaaatgaaataaaaacctatgaacgctgactagaattggaatttctggggcat

SEQ ID NO: 800224 - DNA, 621 bp, Homo sapiens
agccaaatatgtccctggagagaggagtcttgggtctacatggactagtaaagctagaacaatggattgatggtttctgaggagagctatgatcttacatttggtattagaatcacttggttcagaccattacttatgaatgattcttcctgatggtcatcattttgtgaggcaaagatctcaaccacggaattagaaattgtcttatttatttttcttacaatgatgtgtcaacagtaaagagaaaagtctgaaagaagcagggtagtggggaagagatatttacagtcattaacgtaataaagaagtaattatggatctcagatagactctagaggaacaccagatgttactaagattgagagaaagcctgactgggcatgtatgcaaaatagaatttatccttgccaatgccacccgtggcaaacgaggctttaaagaggagaattagggcttgygcagcttcacttgcaagttggcatgcagtattttgtttagaaaaagggaggacaggaactatagaataaaaatactctttttctttgtgcctgcattttatgttacagaaagcttcctactagtgatataaagctagcattaattttccatccaaaaagaatc

SEQ ID NO: 800225 - DNA, 466 bp, Homo sapiens
gtattagtgagagctcctattgatcctcatccccctaatcatttgatgctttcagtgttctggacttgatcattccactaggtatgcagtggtatctcattgttttaatttgcattttcctgatgacacatgatgtggaacagcttttcatgtgattatttgccatctgtatatcttctttggtaaggtatctatctgttgaagtcactgactcatttttaattgaagagttctttgcatatttttgataacagttctttgtcagatgcgtyttttgcacacattttctcccagtctgtggctcttcttcgcattctcttaacattgcttttgcagagcaaaaatttattttaatgaagtccagcctatcaataatttctttcacagatcatgccatttgtgttgtatctaaaatgtcactgccatactcaaagtcattgccattcccaaagttgtctaggttttc

SEQ ID NO: 800226 - DNA, 608 bp, Homo sapiens
aaaggtttggtctagagttctctagcatatcttcaaatggacccatttttcctgtgttcgtctggcccatcttattacaatgctgtttttttgttttttatcataaaacattcattctatacatttattttcatctcaaagtaatgatggccatatttctgtgtgattataacaatcttcaaataactataaatgggaacaaaaataaacatgcagctaaatgccaggtaattttattttattatttttgagtgagacagggtctcgctctgtcacgcaggctggaatgcagcagtgcaatcagggcttactgtgaccttgaagtcctgagcccaagcaatcctcccacctcagccttctgaacagtcagaaccacaggcacacatcagcacacctggctaatttttaattyttttttgtagagatggggatctcactatgttgcccaggcttgtcttgaactcctggcttcaagttatcctcctgccttggtctcccagagtgttgggattacaggcatgagccactgtgtctggccccaggtaatttgaaaacttaaaatgtgtaacaattattctataaatataatgcattgagtctctgattgc

SEQ ID NO: 800227 - DNA, 619 bp, Homo sapiens
attttccagactggctgtaccattttgcatttccaccacatatatgagtaacccagtttttcttcatccttatcagcatttggtgttattgctgttttttccattttagtacttctaaaaggtatgtaatttctatgatgtgaatgtttgcatcccttcaaaattcatgtgttgaaattctaactctcaaagtgatgatattaggtgggacctctgggaggttattagatcatgagagtgcagcctttgtgaatgggattggtgccctcattttttggcatgtgaatattcagttttcccaacacagtttattgaaaagattatcctttcatcattatgttttcttggttcatttgtcaaagattagtttaccatatatgtgtaagtttatttctggacttyttattgtgttccattggtctatgtgtctatttgtaccataatgtttcaattattatagctttgtaatagaatttgaaatcaggaggtgtgatacttccagctttgttcttcttgctccagattgtttcagctattcaggatcttttgggattccatacaaattctaggattgttttttctacttctatgaaaaatctgtaattggaattttaatagg

SEQ ID NO: 800228 - DNA, 615 bp, Homo sapiens
aaaaacaagacatgtttgttttatttaatcttagttatatcagtcagttcttggcggaaagcaagaaaagtaaactcagctatccaaaggaaaaaaaaaatgagtgatttagaaggctatcaaggactcccaggaccaggcttggagagcagacagaaactcaaacgggtcagtaggctgcacagcataggcaggattcgtgtcccaccacagggaaggtctggtcctcgagtttcttctgtgaccgatctgacgccaaacattctttccatctgaatcactcacataaaagtcccagaaaaaagcacttctgactcctggctgaactaaggattcagccctkcagactaaagaccagaagtggaagtctgaagtcagggaacacccatcctttctagattctacacactagagaagtcctacaaaagggcgatgtggtcctagaaggtatgcgttgggggatgggagagtggtatgtgctccacaggaaaaaaaaataaaaagcataaacctatatattgttcaaaatattaataaaaaagaaagtaaattatgtatgaatatttttgtttgatggactaggtaggaagtgacatcacaagggcaaaatgaatt

SEQ ID NO: 800229 - DNA, 613 bp, Homo sapiens
ctgagcctcagaagagttatgtgatcctcccaaggtcgcacagctaataaattggtggacctgagttacagttttaaataatatttacctgtatgttttttcttccaagttatttatatgaacagggtgtacatatgcaggtttgtcacatgagtgaatttcatgtcgggggggtttggcctacagatcattttgtcacccaggtaatgtgcatggtacctcacaggtagattttttaatctcctatctcttcttcccaccctccaccgtcaagtaagccctagtgtctatttttcccttctttgtgtccatgtagtcaatgtttagctctcacttacaagtgacaacatgcagtatttggttttctgctcmtgtgttaattagcttagaataatggcctgcagcttcatgcatgttactgcaaaagatatgatttaattcttttttatggctgcatagtattccacagtatatatgtatcacattttctttatcaagtccaccacttttggacatttaagttgactccatggttttgctattgtaagtagtgctccagtgaactatacatgtgcatgtatctttatggtggaatgatttatattcctttggg

SEQ ID NO: 800230 - DNA, 623 bp, Homo sapiens
aaaacactttatgtaatcaagctggttataattaaattacttacaatagtctttctagagattgggcttttatattaaaaatacactgaagaatgggttagaacaacaaaattttcttaaggtattgatttactcttcataaaatgacaagagattttaatttttaacccaaaagtttaatttttattgtgtctcactgttttcagctttctccccccatcaagaaggcctgatataataactctcttcttcaacatttttgtcagctcctgtaacttttttccttcagattctaactgatgttgtggactgatgctaaaaatgttttattttaaaggtctaaaggaaatgtctttttccaatgtaacgtcctgtgcacgtggctttaaattcttatataaaatagaaaactgtcwcttaggacacgggacacactcttcctacgtctaagtaagtcaagccattttcataaattttaacttgcagcctatctaaatggactccccgtagggaaaagcaatcacatttcagaaggtcttttgtttgtttgtttgccttgtggtaactggcttaacaaatagattttatattttattgaaataatttctacatcattgttatta

SEQ ID NO: 800231 - DNA, 623 bp, Homo sapiens
aaaacactttatgtaatcaagctggttataattaaattacttacaatagtctttctagagattgggcttttatattaaaaatacactgaagaatgggttagaacaacaaaattttcttaaggtattgatttactcttcataaaatgacaagagattttaatttttaacccaaaagtttaatttttattgtgtctcactgttttcagctttctccccccatcaagaaggcctgatataataactctcttcttcaacatttttgtcagctcctgtaacttttttccttcagattctaactgatgttgtggactgatgctaaaaatgttttattttaaaggtctaaaggaaatgtctttttccaatgtaacgtcctgtgcacgtggctttaaattcttatataaaatagaaaactgtcacttaggacacrggacacactcttcctacgtctaagtaagtcaagccattttcataaattttaacttgcagcctatctaaatggactccccgtagggaaaagcaatcacatttcagaaggtcttttgtttgtttgtttgccttgtggtaactggcttaacaaatagattttatattttattgaaataatttctacatcattgttatta

SEQ ID NO: 800232 - DNA, 605 bp, Homo sapiens
cctctgcctagatttctgaatatgtgtggaaacacctggatgccaagacagaagtttgctacgggggcggggccctcacagagaacctctgctaaggcagtgcagaagggaaatgtgggatcagagcccccacacagagtgcctactggggcaccacctagtggagtggtctcactgtcacctagcctggagtgcagtggcacagtcacrgctcactgtagcctcagcttcctaggttcaagtgatcctcccacctcagcctcctgagtagctgggactacagacacatgccaccacaccgagcaaatgccactgtcctccagaccccagaatggtagatccactgacagcttgcactatttgcctggaaaagctgcaaacattcaatgccagcctatgaaagcagctgggagggaggctgtaccctgcaaagccacaggtgcagagctgcccaagaccgtgggaacctaccccttgcatcagcatgacctagatatgagacctagagtcaaacgagatcattttggagctttaaaatttgactgccacacttaatttcagacttgcatgggccctgtaacccctttgttttggccaatttatcc

SEQ ID NO: 800233 - DNA, 597 bp, Homo sapiens
tgagaaaatttggagattttgacttgccatcattccttttcttacaagtatatattcttctgattctgacaaatgtatttttcctaacaatcagttctatgaggttcttccccctttgtttttacatctgtgtttacatagttatgtttatgtatttatgtgcttccagcttgtaaagtaatctaaaaatccaatacatggccatattttaaaaagtgaaacagcagccagacatggtggctcatgtctgttatcccagcactttgggaggccgaggcgggaggaytgcctgagtccaggagttggagaccagcctgggcagcattgcgagaccccatctctaccaaaaaatacaaaaattatttaggcaagatgatgtgtgcctgtagtttcagctactcaggagactgagacaggaggattgcttgaacccagaagttcaaggttgcagtgaggtgagattgtggcactgcattccagcctagatgatggagcgagatcctgtctctaaaaaaaaaaaaaaaaagcaaactataaacaacccatgcaattttagctaagtttccacaacaataaacacgcatctaaaataggaaa

SEQ ID NO: 800234 - DNA, 597 bp, Homo sapiens
tgagaaaatttggagattttgacttgccatcattccttttcttacaagtatatattcttctgattctgacaaatgtatttttcctaacaatcagttctatgaggttcttccccctttgtttttacatctgtgtttacatagttatgtttatgtatttatgtgcttccagcttgtaaagtaatctaaaaatccaatacatggccatattttaaaaagtgaaacagcagccagacatggtggctcatgtctgttatcccagcactttgggaggccgaggcgggaggactgcctgagtccaggagttggagaccagcctgggcagcattgcgagaccccatctctaccaaaaaatacaaaaattatttaggcaagatgrtgtgtgcctgtagtttcagctactcaggagactgagacaggaggattgcttgaacccagaagttcaaggttgcagtgaggtgagattgtggcactgcattccagcctagatgatggagcgagatcctgtctctaaaaaaaaaaaaaaaaagcaaactataaacaacccatgcaattttagctaagtttccacaacaataaacacgcatctaaaataggaaa

SEQ ID NO: 800235 - DNA, 568 bp, Homo sapiens
tttgagctatatattagctatttttgtgtaacatattactccataagttagcagcttgaaacaacaaacttattatcacagtttctgtgggtcaggagtccatgggcatggcttagctaagtatctctggctcaaggtctctcatgagaatgcrgtcaaggtgtcgacaaaggctgcaggctcatctgaaggctcgacttgtgtgagggaggaggtgggatctgcttccaagctcattcccgtggctgttgacaggcctcaaaagatctgcttctacttacagacacgtgggctcctccaggagtctgcctcacaccatggcagctggcttccctcagcataaacaatctccaagagagtgagagagagctgtcaagacagaagccacattttttttttttcttttagagacagggtcttgctctgtcacccaggctggagtgcagtggcacaatgtcggctcactgcagcctccaccttctgagttcaaatgttcctcccaccttagcctcccaggtagttgggactacaggcgcacacaaccatgcctggctaatttctaaatttt

SEQ ID NO: 800236 - DNA, 568 bp, Homo sapiens
tttgagctatatattagctatttttgtgtaacatattactccataagttagcagcttgaaacaacaaacttattatcacagtttctgtgggtcaggagtccatgggcatggcttagctaagtatctctggctcaaggtctctcatgagaatgcggtcaaggtgtcgacaaaggctgcaggctcatctgaaggctcgacttgtgtgagggaggaggtgggatctgcttccaagctcattcccgtggctgttgacaggcctcaaaagatctgcttctacttacagacaygtgggctcctccaggagtctgcctcacaccatggcagctggcttccctcagcataaacaatctccaagagagtgagagagagctgtcaagacagaagccacattttttttttttcttttagagacagggtcttgctctgtcacccaggctggagtgcagtggcacaatgtcggctcactgcagcctccaccttctgagttcaaatgttcctcccaccttagcctcccaggtagttgggactacaggcgcacacaaccatgcctggctaatttctaaatttt

SEQ ID NO: 800237 - DNA, 617 bp, Homo sapiens
cagcctctgaggccaacagatctgtaaagtaatcatcaccatagtaatctctgtgttcatctcagtgactctcctattgattttctcattaccaaacgtgatgtaggtagagtaggcactttatctttatttttacagataaggaaattggcatcagggttaagtgacttgctgaaagaccacagagttaacttgtgtagaggttaatttatgtacacatggaacaagaatttgagtttctaaactcctggtgtcatttctgcatattgagagctgatattcttcatcttctccccagaggggttttgtgttgtggtggyggtggtggtggttgggttttgttaaatcactactctccatcaggaatcatcattagttaggaataatctttagtttgtattcctggatcaataatcactcccacaagaacagaaagttgcagaaagtctgcacagacttccaaccgtctccgtcaacctcctgcatgctgcctttcctgattagatgggtcactgtaagggttatttttcatttttcatgaccgccttctggttgtaagaagaaaaatgactatatgtttttccctcttaaatttcatgcacattttggtggccact

SEQ ID NO: 800238 - DNA, 619 bp, Homo sapiens
gccctgtcttgggtatgtctttatcagcaccatgagaacaaactaataccgtaaataggtaccagtaaagtggggcattgctgaaaagatacctgaaaatgtggaagtgacttaggaactgggtaacaggtagaggttggaacagtttggagggctcagaagaagacaggaaaatgtgggaaagtttggaacttcctagagacttgttgaatggctttgaccaaaaacctcatagtgaaatgtataataaggtccaggctgaggtagtttcagatggagatgaggaacttgttgggaactggagcaaaggtgactcttgttatgtttcagcaaagggattggtggcattttgcccctgccctagagatttgcggaacygaacttgagagagatgatttagggtatctggtggaagaaatgtctaagcaacaaagcattcaagaggaaatttctaagcaacaaagcattcaagaggtgacttgggtgctgttaaaggcattcagttttataaaggaagcagagcataaaagttaggaaatgtttcagtctgacaatacgatagaaaagaaaaacccattttctgaggagaaattcaagcaggctgaagaaatgtgcacaa

SEQ ID NO: 800239 - DNA, 470 bp, Homo sapiens
tagtgtaatttacaacttttatatatgtagtatgtggacttccatctgcactcgtgcccaaggccccgcaaatcttagcggcaagtctgtattttattacggccagacttgtaaagaattatattccccaaacaaagctctatgtaatcaactgcttgatgataaccactactrcatactgggaagtaagaggctctggctgttcattcctttggatgaaaataacagtcaagtgggacctgcctttcactagaaaaagggtcaggctgggctagagctggtgaaaactcgctggggaagaccagcctggccaacatggcaaaaccctgtctctattaaaattaaaaaaattagccgggcatggtggtgcacacctgtaatcccagctgctcagcaggctgaggcaggagaatcgcttgaacctgggaggagaaggttgcagtgagctgagattgtgccactgcactaca

SEQ ID NO: 800240 - DNA, 624 bp, Homo sapiens; identical to SEQ ID NO: 796957

SEQ ID NO: 800241 - DNA, 602 bp, Homo sapiens
cactgtttaatgtgcatagaggccaatggccaataccatggcactggcttttgagaaaataaaagctttattgcaagtcaaccgcaaggagacaggaagatatgctcaactctgtctccctgtgcagggcttgttttctttttcttttcttttcttttcgtctctcgctctctctctttctctctttctttctgagatggagtcttgctctgttgcccaggctggagtgcagtagcataatctcggctcactgcaacctccttctcctgggttcaaatgattctcctgcctgagccttccaagtagctgagattaaaggtgcccactaccacgcccagctaatttttgtatttttttagtagagacagrgtttcaccatgttggccaggctggtcttgaactcctgtcctcaagtaatctgcccacatcggcctcccaaagtgctgggattataggtgtgagccacagcgcctggcctgggccaggttttataagcataaagtcatgagatgtgatctgattggatcttgcaatgaggtgatgctgggaggtatgatttgattggatcctgccatggggtgatgccaagcttgatacgatta

SEQ ID NO: 800242 - DNA, 642 bp, Homo sapiens
ttgttaactaatttgtcctatttctcagctggtggaggacttgggttggtagggggtgttactgggccccctcaaatacctcacatgggtagatagcctccctggccgctcagggccactgggtggaagaggctgtcacatgagcccttatgtaatggctattaggaaactctctttaagatagctgtggcttctcttttcccagtggtatcctgccctttccagaggaggctgccgtgaggtgattggaaggaaygtgtcctggtctccatcagagctgttgagtcagtcacttggccgctcagcagaattgctcaagtagactgggaaggagaccccaggatagttcatgagtggctatgttactgtcccatggcagtgccgagaggagacgctcatgcacaaaggggatcagaagcaggcttaggaagcccagccctgcaagccaagggcaaaggccagcctgctgtcacctgcaggaagggagtgcgggttcatatcctcctcctcaggagggaggccagaagataagagatcatgctcatgtaatccacacaggacaccctgtgggtatagagctggctgaacaagggcaaaggggagatagctgctgcgtcctcctccctgggaaggcatgactac

SEQ ID NO: 800243 - DNA, 527 bp, Homo sapiens
attaaaagaaaaaagagcccttgatcaacactttgacaaatgcacagtcagatgtgtacttagaagggggtaaaaaattatttccaaagaagagccaatcagaaggaggcatcattaggtaaaagatgaagattttacaacagcagcctcagatccaagtcagcacaaacacattcctactggctttcaaaaggattgattytcccaggcatcaccccaaccctcactaaaaaaaaaaaaaaaaaaaaaaaaaaaaaaatcacacaggctggataagagacaactactctctaagttcttctttatttacaattttccaatctgttaagttgcttttacttatagactatatgccaaagtaatttttcaaaagaaatcagctttgggcagtaaataaaggcttattgagtgaacatgttataaatctttgaagaaaacacttccctggtatttttttttctttatttctaatcaaaacccatccccttgttctcctttcatccccacccgcgtcatcgcttctctca

SEQ ID NO: 800244 - DNA, 623 bp, Homo sapiens
gaagaagaaggaggtctcactgacccaaagtgggaaattatgaagaccttatcactggatagaaaccagatctttccttcactcagttgtatgctctgctctatacaatcccctctgaatgggccattctttcctgctcctccatcacccattctcctttgttgtcctgttaataatacctctgttctaatgctctgttcaggttgcgtgaggaccttcctctatgctttcattgtacccctaagcacatctctctaccatagatcctctgaactgcattacaatgatatagcaacatctctctctcctattagaatccctgaaggctgcatcwcattcacagcaaagaacttggtgcatggtaaacatataagcaatcctactgaataaatgagctcacatttgcccactacatttgaagagttggcagaaattcaggggaaaatgtgcaatcagcaggtggtatgcagaactcaaatatgggactagaaatttagtttgagtagttgaatattgaggtgtactcatgggggatggtgcaattatgaaggaagatagaaaagatccattagaggagaggaagacaaccacaaaatcaactaaccagaagaaaaagaatcaaa

SEQ ID NO: 800245 - DNA, 603 bp, Homo sapiens
ttaatagcagaattgatcaagcaaaacaaagaattagtgacttgacgataagctatttgcaaatacacagtgagaggagacaaaaggaaaaagaattttttaaaaatgaagcacacctacaaaatctagaaaatagcctaaaatgggygaatctaagagttatttgtcttaaagagagacagagaaagagactgtggtagaaagtttattcaaagggataatatcagagaatttcccaaacctatagaaagatatcaacattcaagtacaagaaggttatagaatatcaagcagattttacccaaagaagactacctgaagacatttaataatcaaattcccaaaggtcaaggataaggaaagaatcctaaaacaaatagaaaagaaaataatgtacactggagctccaatatgtctggcagcagatttttcagtggaaaccttacagcccaggagagaatagcatgacatatttaaagtgctaaaggaaaaaaatcttttaccttagaacaaaatatccagtgaacatatccttcaagcatgaagtagaaataaaaacttacccagacaaacaaaagctgagggatttcatcaacaccagaa

SEQ ID NO: 800246 - DNA, 613 bp, Homo sapiens
aatgcaatggacatgggagtgagaataaatagagaattggtctttgggcagaaggataaaacactgccctgtgaggagctcaagatgaagagaaaccagcaaagactgagaaggagcaaccagtgggataggaggaaaaccaagaggtgccatatcctggaggccccacgaagagctttcaatgggagggaagatatactgtaacaagtgctgctgacatgccaaggaatcttgagctctgagaattaaccccttaatggagccacgtgaatgtagttggtgaccatccacaagttgtcaggacaactcttgagtgaagtagattaaggagaaaatggaacaaaaggaactgaagccaagtgcatagtcaacctttcaggaatttayataaaaattctctccctataaattctcataaccaattaagagaaagtcatagaaagaggctgagcccttccagtcgaagagctgggggttaagagacactacgatgatacgatgagtacattactattaatatgtccccaagtgtccctgcaggctggtgaaatctggggatgtgcacataatgttaattatcgctgttaataaaacttttgcccaactgaccttc

SEQ ID NO: 800247 - DNA, 629 bp, Homo sapiens
tcttgtgaccttgtgtatcacccaggacctcctaatgcatctgtttcctcactgctaaaaataagtcagcaaaaccttttctgccttttccaccactctgcccccggtgcttatcacacaggttgatatataatatgcatgcatgtgtgttctggccaattttatgttgctatgaaaactaaacgaattatttcatgtaaaatcattttacacactctaaagccctttgcaaatgtaaggaagagcattatcattcccttcttgattwctaccctccactgttgttagtgaaaattgattacctattaagtgctgagtgagaaggttagccttaataatttcatttggcttgcatacagaagctcagatcctgccataccttgtataatcatagaaagatatttcagatgccagctcccttcttctgcctattctagttgagggtgccaaacccttcctataatatgttggatctgagatcctgcaatgtcagatctgatcaagaaaatgtcaaattgaaggaaaggaaggtgactgtatctttctccacagctcctgaagattatggtgtcctgtattagcaaatatttattctgaaatataggtacatcagctgattacagcatcat

SEQ ID NO: 800248 - DNA, 628 bp, Homo sapiens
gtcaaaaattacaatgagtttgttgtattcatgtgacaaatatcaattgagtgcctactgtgtgtttcaggcactgatctaatggttggattcaggagtctgggtcatgctaatgaccttcttgaggattgggatgacacagtttcaaatcttggacccaacatggttgttgaaggattatctgtgatygtgtaagttgtgcacctgccacttagcctaagtcctttctacccctcatctcctgagcggagaagaggagctgttagaaagttctgataagggtaacacaggctgtagtcagataaccagggaacattgtcaagaatgatcagccacaaatacatcacatcaagcatagaatagtttcacctcgggcctagagaaagacataaaaatggcctttgtattaataagtaaaacacacaggtagacaaacctgcagtcaaatattgtctctagtattgtgtgtatttgagcagttacttaacttccctgagcctcagtatcatcaggtcctcacctataaaatggaaataattatagtacccattgcacaggttcatgctgaagatagaatgaggaattacacacacacacacacacacacacatatcccactacctgtcac

SEQ ID NO: 800249 - DNA, 630 bp, Homo sapiens
cctgacatgaggtctgcagcctccacctctgcttctgagccacgaggtttgtgggagatggaacagcttctctgaccagatctccacgagattgctggggaagggggaggtggcaatcagtcttcacagtgctgagcctttttttctaaaagaaacagggaaattgcaattgagaaaatgtgaagaaagtcagcctttctcctyagattccatcatcctgaacacctggaaagatgtctcaaaaagaggaaagattttccctgctatctagacacaatatctgataatgagccactgaaaacacatctgtactgctttgatcagaccctgaaacaacagctaacaactgttgctccttccaaaagagccaaaataatgtttgtcatatgaatatctgagcctttaaacagaatgtcagtggcagtttacaacttttaattaaattgcacttcctttcaacactgaaacatcttttttaaatgtactaattacaaaaagtgatatattcttataaaaaatttaatcagtacagctatgaataaagtagaaagatacagtctttaagctctcccatctccgaagacaaccactgtaaatgtttacgtgtatatcccttgagaatgtttttat

SEQ ID NO: 800250 - DNA, 517 bp, Homo sapiens
aataaatcaatctagtctaataagtgtttaaagaaatagaaaagataagttttctgattttaattttaaaatattaaaatgctttgaaatgttggactagtatccccatgagtgtttatcacacatgttcctcatgttcaggctggtgtttcttgccatgtactgctttctttgccattggttggaccrtttcctttcttgcactctctatcgaaacattttaataatgacccgaatccaattggtcttggctttctcctttaactcccatctttttttcttcctttcttgccagtttgggcacatgccacggtattccaaatcctaaatatcaccaggccatttattgagggattctcctcttagatttcaccttgttataaaatattagcatagcagagacactgaagggaaaaaaaagtaacataaaaatcaaaacttcattagagttagtttttctctggggattggcaatcacttcaaaattggtaatcactgcaaatcactgaaaatgtta

SEQ ID NO: 800251 - DNA, 568 bp, Homo sapiens
atctgatggttttataaatgtccagcagttcccctactggcacactttctctttcctgctgccctgtgaagaggagctttccaccatgattgtaagtttcctggggcctcctcagccatgcagaaatgtgagtcaatgaaacctcttttttttataaattacccagtcttggctagtatctttatagcagtgtgagaacagactaatacactgttttctcctcaaaataattttattgtttcttctattcaccaaaaaatttctyaagtaaataatcttctcaaactgtattcacttcctcttctctcatccatttctccttctctcgcagtttggatcattcctaccatatctagtctttccaaaatctgctttcagagttaccaattacttacagaaaccaaatctactggcttcttctgaaaactttttctggatattggttaatgctaagtttcacctccacccttcataacgagtcttcacaatccaagtgctgaatgcctgtaaactataccttcagactcccttgccagtaggattctggctcaattttgccaacgagagg

SEQ ID NO: 800252 - DNA, 620 bp, Homo sapiens
cttacaatgcttctctggcagcaagaagagaatataagcatgacccgtatgtcttgcacaaaagtgtcagtcgggaaacaaagcctccattttcagggcatgaccacatgaggcggcatttcaaagacaagcatagagatcgttaagctcatggaggatgagtgatggacwaagatttacctagctctggggaaccagaatccaaaataaaattaaaaaaaaaaaatcttggcttccagtacctagttgtcagtttctagtcagcactcttgcaacacaaggaaaaaaaaaagaaaaaagctacataaagctcaccatttataaaatggtccttggagtttaaaactaaattaagaaaaatgtaaaattgaaagaagaaaacatcgtaggtttggtgcaggggtttgggacagagtgagttagttttggcagaaagattgcttcagaactcaggtgacagtgactgctaacaaatgctttgagattcttgttaaataaatgcttgtttggtgggtgtgtttgaagttggaactgaaaagtgctccagttggctggatgtttaacaaggctctctttgggagttcagcatctgtcaggtgaatcagaacaagggttctact

SEQ ID NO: 800253 - DNA, 628 bp, Homo sapiens
ggggaacaggtggtgttcacttgtaagcataagttcttcagcggtgatttttgagattttggttcacccatcactggagcagtgtacactgcatccaatgtgtattctttcatctctcacccactttcacactttcccctgagtccccaaagtccattgtatattcttatgtttttgcataaaactaataagtgagaacatataatgtttggttttccattcctgagttacttcacttgaartaatagtctccaaatccatccaggttgctgtgaatgccattatttcattcctttctatggccaagtagtattccatagtatatatataccatagcttctttatccactcagtgattgatgggcatttgggctgattccatgtttttgtaattgtgaattgtgctgctataaacatgcatgtgcaagtacttttttcatatgatgacttcttttcccctgggtagatacctagtagtggtattgctggatcaaatggtaggtttacttttagttctttaaggaatctccacactgttttctgcagtggttgtactggtttacattcccactggcagtgtacaagtgttcctttttcaccatattcatgccaatatctgttatttttg

SEQ ID NO: 800254 - DNA, 613 bp, Homo sapiens
gtgacttgtgtctttcttggaaaccccagcacctgcaaatygtacagtgatggcacactggaactgatcctctagagggtaggcaaaatgtgtcgcttgcatgctacttcccttaccccacacgtttctcagagatttcccagttcatacactgaactttcaacatctaaggcacctccaaaattgggttggagagcatcacactagcccattattaatttccatctagttagaaaatggttattataataaatagtgttttatttctttttaccatttgaaattactgttacatagattttgtcaattttattactaattatgggtattttctgtcatttaaaatgcattacaaattttactcctactggcagaataatatccaactggacaaatgtaccataactaatttaaccatttatatagttttggaatttgaactctttgactttttttttctttttacttttataactgatgttgtgatgaacatttttatcaaaatgtactagtttgctgtgcccactgttatgaattaccacacacttgctaacttaaaacaacccaaatttattattttacacttctgggggccagaagtccaaaatcagta

SEQ ID NO: 800255 - DNA, 620 bp, Homo sapiens
agaggggcagcaatatagggcttgggtaggcagtggaaagttacagttaaaggtggttatctattattagcagaggaggggtcacaaggttcatggtggggagatcataagacttattgtccagaagaatgtcacaaggttgattgatcagttggggcagggcaggaacaagtcacagtggtggaatgtcataaggttggtcaatcagttaaggcaggagctggctgtttcacttcttttgtggttttttggctgctccagacttcttggctccwgcaggccatctggacatatatgtgcaggtaacaggggttataatggctgagctttggctcagaggcctgacaatgggtactaggcttaatacctgaatgaccaaatagcctgtacaacaaactccctgacacagtttactaatgtaacaaacctgcacttgtacccctgaacttaaagtaaaagtttaaaaaaatcgattttacaaatataagaaaaaatggaacaaggaagcaatgggaaaatagaaaacaattagaaaaataatagaattaaattcaactatattaataattaattcaaatgtaaatggagtagctgctccaaatgaacaggaaagattgcca

SEQ ID NO: 800256 - DNA, 610 bp, Homo sapiens
acattctttctttcacttttagtttctatccaacatcactgattgaggagaagagagtaagaaggacagttaaagggagcagggactacatgtaatgttccaggtgaaacatgataatggttaccacctgggccagatatcgtaaatatctctggaattattacactagtcttcccctccacctctctctcctacttcccatgctcaacacagaagctagggcgacccatttcaagcataaatcatgccactcatcagctcagratcttctaactgctccccactttccgagtataaaagctaaaatctttggaagtcgatatataatctggatgctatcacctttctcactcagcttctacaaccccagcctctgtctcttcagtctccgtaaatgttcacaccctgaatggccttccttgaacacatgacatcaagtatagccaaaacttggacacttaaggggaagagttcagttatccctcaaatcgcaggcttcttcccactaccacagtcagcctctcacccttagatttttttggtcaacttttcacatgttccccaggacacatattaatttttttggccggatctttttgaaatttgtctt

SEQ ID NO: 800257 - DNA, 610 bp, Homo sapiens
acattctttctttcacttttagtttctatccaacatcactgattgaggagaagagagtaagaaggacagttaaagggagcagggactacatgtaatgttccaggtgaaacatgataatggttaccacctgggccagatatcgtaaatatctctggaattattacactagtcttcccctccacctctctctcctacttcccatgctcaacacagaagctagggcgacccatttcaagcataaatcatgccactcatcagctcagaatcttctaactgctccccactttccgagtataaaagctaaaatctttggaagtcgatatataatctggatgctatcacctttctcactcagcttctacaaccccagcctctgtctcttcagtctcygtaaatgttcacaccctgaatggccttccttgaacacatgacatcaagtatagccaaaacttggacacttaaggggaagagttcagttatccctcaaatcgcaggcttcttcccactaccacagtcagcctctcacccttagatttttttggtcaacttttcacatgttccccaggacacatattaatttttttggccggatctttttgaaatttgtctt

SEQ ID NO: 800258 - DNA, 489 bp, Homo sapiens
tgcagttaaaacaacaatgagatacctatatgagctagaatggatacattaaagtgattattaccaagttttgatgagggtatggaaaacatgaaaatcttctacattactggtggaatttgactataatacaataaatctgttacaaaattgtggcaacattttacaagaaaaaaatcaaaatcaaaacatgtatctttcttatgactccgrcattctactattaggtatttacctaggagaaatgaaaatacatgttcacaaaagacttatacaagaatactcatagcacttttgttcataatagcctaatcttaaaataatccaaatatctataaacaggaaaatgggtaggcaattttaatatggttactataactcaacaataaaaaagaatgtattacttctttctctacaacatggatgactctcacaaacctaatatttacaaaagaagccaaaccaaaatggtatgtgctgcacagtttt

SEQ ID NO: 800259 - DNA, 613 bp, Homo sapiens
acatgtgacaccaaacctaactgtctgagaatgtattttagccttttatcacaactccattcaaagcacaacacatttttccttatagcttttttcaccattactgttgtacgttaagttaagccactatgattaatttctttcttcctcacttaacactatgtgccatagattttactgctcattgacatcataacctgaacacagtactttcaaatatagaagtttgagggaacmtataaacatttattaagtggcagtgagagaggaaaactgaagaaagtaatacatgtactatctttactcctaatgtgggtgggccacatccaatcagttgaaggcctgaatagaacaaaaatgttgaccctcccatgagtaacagtgaactgttcctgcctttctgctttgagctgggatgacagtcctttcttgcattcacactaaaagaaacattggctcttctcaagcctgccaggttttgtactggaagtataccattagcttccctacgtatttagttggccaactgcaggtcctggagattctcagcctcttgatactataccttaaaataaatccaccaatttgcaacatctatatctgtatatctatg

SEQ ID NO: 800260 - DNA, 591 bp, Homo sapiens
acagtggatggcagctggttgactggagtacagtgcttggggacggaaaaatgggaaatgctggtcagaatatgcatacgttctggaggaaagccaccatttattagtgaactgaatagaagaggagagagaaacagaggagttcagaaaatttctcctgaagaaaaggcggggtagggttgccaaaactggatttcaggacattgacccagccaagagataaaaaaaaaattgggagtagtgtgtgctagatgtatttacaaccatggggaaggatgaaataaccaagtgagtaagggatgataaagaaggaaataagaaaaataagaaacaaaacagaagkctttttcccaattaggctaaaatctgaagcttgttgcagttatagctttacttgttttaattagtaacatttagtaaactcactaaatgcaggcactgcaaagaagcggagatataataatatgttagtgatagtccttccatcaaaccatgtacagtcttgttttggaaggggattagaataatgatactaaccttagagaattatataaggtttgcttaagagatggaaataaatacattaacctg

SEQ ID NO: 800261 - DNA, 520 bp, Homo sapiens
tctctaaagccaacctctctgctcagctccttggaacacctattttgttttatatagaatgaggttttgcctgattctagaatcaaaaatgaaagcttattcaatctgtaaaataaatctgttgtaatttcatcttttgacatgatttcatagggctgaggtgagtcccgagagtctgcctttctaagaggtgacgttgatgctgctacacctatggttttcaaatcacactgtgaggcagagtcacttgggaagattttgcaactaccaatgcttggatcccaccaraaatggattatcagcttctctgatatcagcttctcctccaacatttggaggatcccaaatgtggtatttttgaagaagtttcccagatgatgctatggtacagttaaggctgagaactagaactagaagctttcagccaatttccctggtatgtggctagtattgcttccattgtacagagaaggtaaaaaggggtaacttgccaaaggtcatttggccagtaaatggtaag

SEQ ID NO: 800262 - DNA, 645 bp, Homo sapiens
ttcccagagatcaggcaacctctaggatcctgggatggaaacttggactttgcatctggggctgcactgctagagatgctgcttctggtgctcatgctggaaccactggagccaggtttctcccagaccctcagccccatgtgaatccaaaccctgtttcaaaaggaatgtccatgggaaaatggggtttgatttacaygttcagttttcaggctacatttgctagaatgcacctcttttgtatgtgcaagaatgccaataggtgctctgaaagctgaattctttagctattcgtcatatcctagtggttagcatcagaaggaagccagtacagttgggtctcggtatctgcaggggattggttccaggcccacctgcagataccagaatccaagcaaacttaagtcccacagtggactctgagggacctgtggatacgaaaagtcagccctccgcatccacaagtttcacaccccaagaatattgtattttcaatccgtgtctggttgcagatggaacctttggatatggaaggctgactgtattttgaaaaaaatctgcatataagtgggcccgcccagtttgaacctgtgttgcttaaggtcaactaatgctctttggcattttgggactgcccctcaccta

SEQ ID NO: 800263 - DNA, 502 bp, Homo sapiens
ttatgctttggcatgaaacacatcaggtctgtagctcataagcaatgaaatgtcccagacaggaagataagaaaaaaggtgggaagctgagtataatgaaaagaaaagcagactcaggactcacagcctgtctctaaccacaaagcctaggataatctgattagcaataaaattctcccattctacaatttcagttcatataatcaactatttaaatctgaagacaggagttcacayagaataggaaaaacatgagaaacactgataaaaataatgtatccaaacccgaactcattttctcctgaccaagaccactatttgttctgaactctttttttgtttttgtttttctttctggtcaagacaattttcatatttaatggcaatgatatttttaagtatgtaatatacacattaaaattaaagggtgatttttccatgtggtatgtattttttcagttaacaaatatttattgaggatctacatgtgctagctacatct

SEQ ID NO: 800264 - DNA, 603 bp, Homo sapiens; identical to SEQ ID NO: 799730

SEQ ID NO: 800265 - DNA, 661 bp, Homo sapiens
ggttctgcttccatgatttgagtgagcttctttctttgtctgtccactggagggcgaatgcaatactggtaggcctgagggattgcaataggcatctgtagctcatggatgaactgtaaacaaaaatacaaaggtacacagttgttctagacggcttttgcattagctggtcacattgcccrtaatatcttctttgagaaatctgcacagatggtttctcattattcaaaattctattaaaatatcacatctttcaaagaggcctttcttgaccaccttacttgaaataatcccttcctccataatcactttctacctccttacattatttactttttgcatcatttaactttttcatcaataactatgaaagtcagttggctgttttgttcactgccatcctgtagtttatccagagagtgcctcccacataggagctactcaataaatatttttagcatgaacaaaagtaaatgaaagggtcttgagggtggaaagcacattttactgctttgattggatataaccatttctttttcacattcacatttcatcttatcaaaactgaagaaaagaaacaagcaacaaataggaaaatcaaatttttagaagtaggtgcataataggggaatagcttaaggggagaactatgatgttaatt

SEQ ID NO: 800266 - DNA, 623 bp, Homo sapiens
tttttttttttgagatgtaattttgctcttgtcccccaggctggagtgcagtgatgtgatctcaactccctgcaacctctgcctcccaggttcaagcgattctcctgcctcagcctcctgagcagctgggattacaggcatgtgccgccacacccggttaattttgtattttttttttttttttttttttagtaaagacaaggtttcaccatgttggccaagctggtctcgaactcctgacctcaggtgatctgcccaacttggcctcccaaagtgctgggattacagatgtgagccaccatgcctggcctatgcaatttgggacacatctcacgggccatccctgcttcagagctccccatgggttcagctaattttcttctgcaactgtatcacaggtcaactttttctctgcccagtcctctggaagggcctctgcttctcattcyttcccaatttgcttaccaagcatgtttctccatagcatttcccagtaaaccagctgcctagaaatctcctctcagaggctacttcccaggaaatctaacctaagataatcacaagggctttcctgggatcctgcttagctttagtgcttatccacctgcatttctcaagtggga

SEQ ID NO: 800267 - DNA, 621 bp, Homo sapiens
ttaaaaagtgaaaaaatgaaatattcaatggcaataatgtttttgttacctataaatgtatatatgcattctttttttagcaaatcaaatatatgtaaagtaatactgtttgtatacatgtatacccatgcccacaaatctccatgattttagcatatataatttttaaaaatagacatgcagttctgcatggggtagtatctttctaacatatgtaaaatcactcatttagtaagcagtgaagtttaaaaacgaaacatacraacagctggatatcctgaaatcacaagatatctttttttatattgtttgtttatggaattttttcccttctctctaggatttgaataaactccatatattcaagctaccttctggcactacataattctagtttccatttgaaagccaaataagttacaaaaaattgtttgtaaaaattcaaagcaaaatatgtgaaatattaaacataagtacacttttctgacaatgtaattcaatagcttttactaaacaagaagatgacattttaaaactcttactgtttattattctttcatctacttttcatgtcttcaaaaaattcaagccctaaatctggaatataagtttcttgttgac

SEQ ID NO: 800268 - DNA, 586 bp, Homo sapiens
atattatgaagtatattgacatgaacattgtgttttgggttatatttttatttatagaaacaaatattttattcaagattatgtctgtcttagagttccttataaaaataaactgttctgttcagacatttcagagcaagaaaatgtgtgatatctcacattttcagacctttgtaacagaggaaataatttattcccttcatgttttttaatgtggcactggtgagtgacaaacattatttttctcttcctttagtcattaaatttctgggttttaactacttattgattcttatttctatattataatctgtatatttctcaataattaaaaaattcaaactaaaataataagatttgtggagatttaatataaagtaatacagtataaaacataaagtaatataaaatctgtaaggtaattcattacttatactttcaagtaartactaaactttttaaaatcttttggtgtgaggtgataattttgtttgatacattatcctttcttatttagtgacatgtgccagttctctctcacttgctttcaaatactgcaagtgatgaggcaaaaattcttaaagcc

SEQ ID NO: 800269 - DNA, 610 bp, Homo sapiens
agtaaagatgtatgttcatcttggagtctttgctcaggaccctggaaatactattatgtaaatgttgtaagctccatgtagagtacttctgaccagtcttacatgtttcttgccacttaatatgtgcctggcttgtaacatagctaccagagcggtgctctgaacacctcaaattaattttcatascattgtaaacaaacagaacatgattttctgttcttctgttctcttttatgtaaattgtcgtctgctgatatttaaatagataaaatatagtaagtttacttggttagtgttgtaaattagatgaagaaaaactaaatttctgtaatgcaaaaaatactgaatgaaaattcagtttgtatattatgactttctcaatattttcagttggttagaattcaagcctacttcacttaaaagatttgtctgcaccaccccccgatataagtcaactgtgagggcaggatctttgtcattcactgtgttgctcagggtctagagcacatcatggtgattaatagttgttgaattaatgaatgaatgttttcactaagtgagagaacttacttgccagtacagaattcattacaggtgaattttggatttg

SEQ ID NO: 800270 - DNA, 610 bp, Homo sapiens
gtcaacatattcacttaataaatccttaaaataagagacacaaaattaagactggcaaatctacatcaatacagttaaaacagagagtaacagcttgccaggagcaggagggcataattttccccaaacacctatctacaaaaggtaaasggcaacagccaattctaaattctaactctttgatttctagttctatttctaaattccacttctaactaatgtccttttgtttgagggacaattgcaaagtgtctgagagccagcttgtgtagtaaaagtaccagcaggacaatgactacaagacacggggtgaagtactcagaaaataccacgggaaatcccaggcgatgccagaaaaaaaaacaacctagaatgaagtgcaatcagtgggcagctctagtcctgggaaaacacacataggaccactttagtattcaattgttataaacaattttttgttgttgttgttgttgtttgtttgttggttggtttgtttttttggaaccagagtcctgctgtgttgcccaggctggagtgcaatagcatgatctcagcgcactgcagcctccacctcccaggttccagcgattctcttgcctcagcctcccaa

SEQ ID NO: 800271 - DNA, 610 bp, Homo sapiens
gtcaacatattcacttaataaatccttaaaataagagacacaaaattaagactggcaaatctacatcaatacagttaaaacagagagtaacagcttgccaggagcaggagggcataattttccccaaacacctatctacaaaaggtaaagggcaacagccaattctaaattctaactctttgatttctagttctatttctaaattccacttctaastaatgtccttttgtttgagggacaattgcaaagtgtctgagagccagcttgtgtagtaaaagtaccagcaggacaatgactacaagacacggggtgaagtactcagaaaataccacgggaaatcccaggcgatgccagaaaaaaaaacaacctagaatgaagtgcaatcagtgggcagctctagtcctgggaaaacacacataggaccactttagtattcaattgttataaacaattttttgttgttgttgttgttgtttgtttgttggttggtttgtttttttggaaccagagtcctgctgtgttgcccaggctggagtgcaatagcatgatctcagcgcactgcagcctccacctcccaggttccagcgattctcttgcctcagcctcccaa

SEQ ID NO: 800272 - DNA, 615 bp, Homo sapiens
ttgaggcaacaaaaatttcttttttataaaagaaaggtgagaagggtaaccaggcatgcagtggctaatgcttataatctcagcactttgcggggctgaggcaggagaaatgcttgagctcaggagttcaagactagcctgggcaatagcaaaacccatctctacaaaaaaaaattttttttttaaattaaccaagcatgatggtgcatgcttgtggtcccagctgcttgggaggctgaggtaggaggatcacttaggcctgggaggttgaggctgcagtgagccgtgatcaccctccactgcactccagcatgaataacagagcragaccctgtcttgaaaaaagaacaaaagggggaaaaagataaatttacatctaggaatggtaaatgattgtaaatgaaactgcgttacatccagctgcatcacagcgatctagtgaaggaaaaaggatgtttcaccccacaccagttacaaaaggatatggaaaaggatatggcacatagacttttactgaaggtggttaaattaatgtaaagagttgaagttaaaagtaaagacaatgtaaagaaacctacagcacgttaactctaaaatctaacacctttagagaaa

SEQ ID NO: 800273 - DNA, 625 bp, Homo sapiens
aggctaaggtgggaggatcccttgagcccaggaggtggaggctgcaatgagccaagatcaagccactgcacaacagcctgggtgacagggcaagaccctgtcgccaaaaataaataagtaaatctaagattgcattctcataaaaatacaggactgtggctcttggtcacctctaagatgttcccatgttaacatttagcaaggaattttattttctatcctcacagagaagacaatactgcaacacttctttccattcagaaatgaatcaccacttstagatcacataaataacaattaaacaagaaaccaaaagtattctctttttttaatgatacattaatgccatgttgaaaccacttaaattttaccaatgatttttttgtcctgggatttacagactatatattcctttcccgggtagaaagtcatgtgtatccttacaccttccagctaggacccaccttttaagctctcttgctcgcacaacgcaaaatttttaaaggcagggggaagggaaagaggatatcagagagagtttgaacccagcaagcttacatcaagagttgactatgaaagaaaacaatcttagtcttcttcccggtaagctgaagaagcagtggcc

SEQ ID NO: 800274 - DNA, 627 bp, Homo sapiens
cccttgagcccaggagcttgagactagcctgggcaacatagggagactctgtgtcaataatttaaaaaaaaaaaaatagccaggtatagaggcatatgcctgtggtcccaggtcctcaggaggctaaggtgggaggatcccttgagcccaggaggtggaggctgcaatgagccaagatcaagccactgcacaacagcctgggtgacagggcaagaccctgtcgccaaaaataaataagtaaatctaagattgcattctcataaaaatacaggactgtggctcttggtcacctctaagatgttcccatgttaacatttagcaaggaattttattttctatcctcacagagaagacaatactgcaacacttctttccattcagaaatgaatcaccacttctagatcacataaataacaattaaacaagaaaccaaaagtattcyctttttttaatgatacattaatgccatgttgaaaccacttaaattttaccaatgatttttttgtcctgggatttacagactatatattcctttcccgggtagaaagtcatgtgtatccttacaccttccagctaggacccaccttttaagctctcttgctcgcacaacgcaaaatttttaaaggc

SEQ ID NO: 800275 - DNA, 600 bp, Homo sapiens
aaatgtaaattaatttttcttagtacatatttgtataagtaaaaattggttattcatcactatagtgagattcacaaaatattatgtgaaagttaatggtgactttaacattttccctgaccagtcatgtatggaattaacaaagtagcaggtatacagaattcttgaatctacatatttttaaacctgaggattctatttttaatattctactgtgttactgtgtgtatgaacatgtatacatatctcttcattatgaggctactggtagggatagaactatttaatacaattytatcttgcataatgttagttgttaaatttttattctatttataacattattaaatatcagttttaacctaatgtttgcatgtgtgtctctttatggttatctattactctatctgaatatgaaataaattatagagttcatattactgtatttaaaaatgcagttttaaatctcttttaaaggagtaatgatgacaatgagaacacccagtgtggaccctttatttacatttagttgggaaaaagagaaaatatggaaaggttattatttctctttattacattcacataggaaacaattttatc

SEQ ID NO: 800276 - DNA, 581 bp, Homo sapiens
aaccaaaagaatgaaccatggctacatgctacaacatggataaatctcaaaagcattacactaaagtgaaagaaacaagacaaaaaggctacattctgagtggttccatttatatgacatccaggaaaaggcaacacaacactggcagaatatagttcagtagttgctaggctctaagtgtgaggttgggggattgcctgcaaaggaacatgagagaaatttggggagtgatgtgttttaaaacttggttgtgggctgggcatggtggctcatatctgtaatctcagcactttgggaggccaatgctggcaractgcttgagcccaggagtctgagaccagcctgggcaacatggcaaaaccacatctctgcagatatattaaaatcagctgggcacggtgacgtgcacctgtagttccagctacttgggaggctgagacaggaggatccattgagcccgggaggttgaggttgcagtgagccgtgatcataccactgcactctatcctggatgacagagagagacccggtctcaagcaaaacaaaacaaaacaaacttgattgtgataatgatttcacta

SEQ ID NO: 800277 - DNA, 614 bp, Homo sapiens
tcagcttcacagttcctctgctgggccacactggctgaaatctggccagctatttttgtgctttcaccatctttccagcccaggactttgacttgtcgaactctcagtgtattttctgggccttttaattcaatttttatgatgtgattatcccctcctggaagttcacttgttacccagccaatgtgcctggaatccagatcaacctggttgagtagaaaagaggcaggaacctgattcagctggatcacttttatcactgtgctggacttagcattgataccagcaagctcaaataacaaagaattgcacagagtaaaggttatgaggttatttcacactgattttcttatttcaaccaggtgaagataagtaatattatttatagtagctattacacagatgaagaaactaaggttaayacaggttaagggattttcagtaaatggtggaattgagaattaaaatccaggcctgactacgatatggcttccgagcaaaattatatgagtgaaataattacaaataatttatatgactgtactttatctatatcatctgtaagtggaaacctcacaagatcagaaaagggttctttttttgtgcatcctcac

SEQ ID NO: 800278 - DNA, 649 bp, Homo sapiens
tggctaccctgagccaggtaattccttgttaggctgtcttgcctcctgtaggatggttagcaacatccctggcctcaactcactaggatgcccactcaactagcccagttgtgacaaagttatttccaaatatttccagatgtcaacagagaggcaaatatcaccctcaattgagaaccactgatttaatgaattcatttattcatcaactttttttttttaaayagaaggggtcttgctctgtcacctaggctgaagtgcagtgacacaatcgtagctcactgtaacctcaaaatcctaggctgaagccatcctcttgcctcagcctcctggattttgatcctaaggggtaatagtaacccaatgagaatcacacttgtcagactagcctcaaaacagtttctaactcttttaaaaagtgtatctcctttagaaatactttatcacttttaaagatataaaaggttgcactgcactctggagaaaatgtcaagagcagcttcaaagaaattctgacgagtaatccacacagttggggaggggagaagttgcatgtatttttaatgaaaaaaaaaaaaaacctcatttggatatatatgtcccattgcgctcattaaagtatttattatattagtttataattatagtt

SEQ ID NO: 800279 - DNA, 553 bp, Homo sapiens
attccaatatatagttaatttttaaaattaaaagcatttgacttagtacaaatattaaatttgtatatgatttccattataaaagctgatcttttaatatcaactatgtggaattatctgatgtagtaagattataacaaggtatttttatacagtgtatccatatcattaaaagtatagctccaaatggaataaaataccttctcccttgcagcagcctgtttttcgcggaggtatttttctctacagcgatcacataccagataccaagtgcttcctcctatgccaccatcaccacagttaccagcccatcctccacaaaaatgcccaatgctattgtaacyttgtccaccagcatatcggccacaaccttgaaacaataccaaaaataaatatttaacactccaagtgtccttaatagtttgatccttattactcatacattaatgacagatttaccttctcaaagaaagcaaaatactgaagtagatatcttatttttcaggctattaactatatcagaaaaatagcttacttgatcaaaaagcaatca

SEQ ID NO: 800280 - DNA, 629 bp, Homo sapiens
ctgtaaaaatgaaaaaaagatccccatgcgccttagttaaaaataatcccagaagacgttttgttttagagaagaatcatgttattttacagttaatatgaacttcattccctagaatttatactaaaccaatttgagtacatagattataagttgtctactcacaatgaacaaagtacagtatcagttcacaagaaatgaaaataaacagtaattacaaatatacaaaaccaacagttacaactttctttcattcatcatagattcacagtatgttttctcttggtctaggttaraatgaaagggcagcattttatcatagtcaatcttttttattgcaaccatttttcataaggctagaaaaccaactggtgatgacatcttttaagaaattcgttcatcaattcttaaacaatacttcctttatctcaaatttatatccacatcatatttataccatgatatgttttaaatatgtaaataaaaattaaaactgtatgtgaatacccctaaactcatttcctactgtttataaaaatatttttataaatctgacttatcatttaaaacatgcaatagattctatataaaatttagctaatggagaggtattgtttcaaatcatcacc

SEQ ID NO: 800281 - DNA, 621 bp, Homo sapiens
ttaagtatttaatcaatcttgagttaatttttgtataagatgtaaggaaagggtccagtttctgttttctgcatatggctagccagttttcctagcaccatttattaaacagggaatcctttactcattgcttgttttgtcaggtttgtcgaagatcagatggttgtatatgtgtggtgttatttctgaggcctctgttctgttccagtggtctatatatctgttttggtactagtaccatgctgttttgcttactgtagccttgtgtgaagtcacgtagmatgatgcctccagctttgttctttttgcttaggattgtcttggctgtacaggctctttttttggttccaaataaaatttaaagtcattttttctagttatgtgaagaaagtcaatggtagcttggtgggaatagaaatgaatctataaattacttcgagtagtgtggccattttcataacattgattcttcctatccatgagcatggaatgtttttccattcgttgtgtcctctcttatttccttggaaagtggtgtgtagttctccttgtgagggcttcaagtcccttataagttgattcctagatattttgttttcttggtagcaattgtgaatgaga

SEQ ID NO: 800282 - DNA, 621 bp, Homo sapiens
ttaagtatttaatcaatcttgagttaatttttgtataagatgtaaggaaagggtccagtttctgttttctgcatatggctagccagttttcctagcaccatttattaaacagggaatcctttactcattgcttgttttgtcaggtttgtcgaagatcagatggttgtatatgtgtggtgttatttctgaggcctctgttctgttccagtggtctatatatctgttttggtactagtaccatgctgttttgcttactgtagccttgtgtgaagtcacgtagcatgatgcctccagctttgttctttttgcttaggattgtcttggctgtacaggctctttttttggttccaaataaaatttaaagtcattttttctagttatgtgaagaaagtcartggtagcttggtgggaatagaaatgaatctataaattacttcgagtagtgtggccattttcataacattgattcttcctatccatgagcatggaatgtttttccattcgttgtgtcctctcttatttccttggaaagtggtgtgtagttctccttgtgagggcttcaagtcccttataagttgattcctagatattttgttttcttggtagcaattgtgaatgaga

SEQ ID NO: 800283 - DNA, 629 bp, Homo sapiens
ctgtaaaaatgaaaaaaagatccccatgcgccttagttaaaaataatcccagaagacgttttgttttagagaagaatcatgttattttacagttaatatgaacttcattccctagaatttatactaaaccaatttgagtacatagattataagttgtctactcacaatgaacaaagtacagtatcagttcacaagaaatgaaaataaacagtaattacaaatatacaaaaccaacagttacaactttctttcattcatcatagattcacagtatgttttctcttggtctaggttaaaatgaaagggcagcattttatcatagtcaatcttttttattgcaaccatttttcataaggctagaaaaccaactggtgatgacatcttttaagaaattmgttcatcaattcttaaacaatacttcctttatctcaaatttatatccacatcatatttataccatgatatgttttaaatatgtaaataaaaattaaaactgtatgtgaatacccctaaactcatttcctactgtttataaaaatatttttataaatctgacttatcatttaaaacatgcaatagattctatataaaatttagctaatggagaggtattgtttcaaatcatcacc

SEQ ID NO: 800284 - DNA, 613 bp, Homo sapiens
tatgatgctggcctcataaaatgagttagagaagagtctctttttttccattgtttggaatagtttctgaaggaatggtaccagttcctccttctacctctggtagagtttggctgtgaatccatctggttctgtgctattttttttttttagtttgtaggctattaattattgcctcaatttcagaacttgttattggtagtattcagggaatcgacttcttcctggcttagtcttgggagagagtatgtgtccaggaatttacccatttcttctagattttctagtttatttgcatagaggtgtttatagtattctcttaaggtagtttgtatttctgtgggatcagtggtaatgtcccctttatcatttttattgtgtctatttgatcctwctctcttttcttcttttttagtctggctagcagtctattttgttaatcttctcaaaaaaccagctcctggattcattgatttttttaagggtttttcgtgtctctatctccttcagtcctgctctgatcttagttatttcttgtcttctgttagcgtttgaatttttttgctgttgcttctctggtttttttaattgtgaagttagggtgttgatttta

SEQ ID NO: 800285 - DNA, 541 bp, Homo sapiens
catgcaaaaaactgcacataattaaagtgtataatttaaaaagtttgagcatagtacacatctgcaatcaggattagtaaatacaggccgggcatggtggctcatgcctgtaatcccagcactttgggaggccaaggcaggtggattgcttgagctcagagttcaagaccagcctgggaaacgtagtgaaaccctgtgtctaaaaaatatacaaaaattagccaggcgtggcggcatgtgcttgtagtcccagctacttgggaggctgagttgggaggatggcttgagcccaggagacagaggttgcagtgagccaagagtgtgycactgcactccagtctgggtgatagaaccagaccctgtgtcaaaaaacaaacaaacaaaaaagatagtggatatatctaccacttccaaagtgtccttgtttacgtagtaattcctccctcacctttctccccacacctcagacaaccactggttggctttctgtcataatagattaatttaaattttctcaagttttctataaatagaattatat

SEQ ID NO: 800286 - DNA, 618 bp, Homo sapiens
gctaccatttctattcttatgagaagcaactaaacagggcatcaggatgacatagtaagaggagtataggtttggaaagcagggttcctaacgggcagtgagtgggacacttgccaatgccaaacctgagaaattaatttattttctcaaggaaaccgtattagatgttccctaaggagagcattttgagattgaacgtaaactttctcagccacatcaaaaagcctggtagtgaagcacagggcgttcgacacactgaagggcaatcattgggctgagcttctgccctgtgctcccagaccacagtctacagaatcaacttctatagactgtaaccatttgatctaaatgccagagcctgggatgcccaaggaagataaaagcaagggtcatatttatgttcytttatttcacatccattgaacaactgttcaacgggcacctcctagcttcctgtctctctggatggggtcctgggagccagaaaaacaaaacagacttcctctctccagaatgttcacagcatgacgggggatgagacaaagccggtcctcagcagtgcaattgcgctttaactaagcatgaagggggtgtgtcccatgccaaccacatctccat

SEQ ID NO: 800287 - DNA, 643 bp, Homo sapiens
caaggatggggtccatggttgaagtggtcttacactttcatgcatcataatatatgtttccaaactactttccagaaaggaaactactttccaacatagactgctgctagcgaagcccacccgagcgcattatcagacagctttccagctgactgtgaggggtggggaccaggcacgggaccagatggcaagcaatgacaagaggatccgtttgtaaatcctgggaactctcgctgccttccatctcctgctttcctctggtgtccttgtacccagatgcttccttcaagtcatctcctctctcttatttggtttaaattaagagtaagctaggagctggagctcgtctcrgtgccaattctgacaggaagttggacagccgagatgccttgtggagctcttggattccatgtgggccgaacgcaaccttcacacatctgcagcctccatctgctgcttcatcacaggacatcatcctctgtccaggcattgcttagtttgcacaagacgtgtctgtgtaaaaatgcttcaccactcactcctccgcagctgcctctgctgagccacacagcgcccatcgctctacatctattgggagcacacagggcatcatcccatggaggaaattcacacagaacttaca

SEQ ID NO: 800288 - DNA, 540 bp, Homo sapiens
tggccagcatttgggagccaaaggctaactgaggaggagggcggtggctggccaggttcaaggtgtgcagctacctctctgtgctcaaagctctggcctttcttctcagtacatccactgctttgaggccaccttccttggaggctggtcagacctcagggagataggcatgccccaatctgtcccaggacaagaggcaccatgagaccacctgaaagtattcagtgaaaagcctccctacaagacagttgccgcacgggctcgcyggcagccatagcccagtaggaaaacatgtaagtaaagaaacaaacggaggagagaaggtgacagaatctgtgaattggatcatgttgctatcctgcttaaagtccttcagcgccttaccattggccttgaactaaaaatacaaatgtctgtgcagaggccacaaagccctgcatgacccagcccttccatctacacccagccttgtctcccgctgcctctgctttgctctctatctcccagtctcaccaaacttcttgcatttcatcaaacact

SEQ ID NO: 800289 - DNA, 613 bp, Homo sapiens
gccttttctccctgacttccacagccacagagaattcctcagggaactgtcaaggggctaggagaagccctctatcacttcacccaatcttttagcatttgtgctttctgctgtctacaaggcattcctgccatcgctggcagttcctaaggtgccagataaagagctcatgactaactgagttttgaggaggaacagttttagaggcaaaattaggagacaaaatagagaaggttccttcagaacagcctcaaataggactagttaattctttgactacttcctattggcttattctggggctagatatcttcaaaaaatgtcatattttcctaaaaatataatttttaagttcctaataccttctaagagtaattctctaagtatgattataatcttaatttgaatggaaatattcaatcacacatgatgcaaatttcrttagcattacgtggcagagttgctttttttcctggcataattattgtttttcttttctcctgtttataaataatttccctccttttatttaaactgcataagaatgtaaattgtacatagtggcttgatgatctcattagatttctggaaaaacaggattctggaagtaaaa

SEQ ID NO: 800290 - DNA, 633 bp, Homo sapiens
tatttccaggcacgttgagaacttcattgacatcagagaccttgcattgataaaggtaccaatccatgtagattcatgccactaatctcttgaggagattaaattggcaaatgggattgccaataccaagaggctgatggacgtgctggaccacccaatctaagttagacagagagagcagttaaggagtggagggagaaaatggaagagtcaaggaaataaatacggtaagaagatgaaaatcaagctaagtaagaataactgaatgaatgaactaaaaggacgctgtgattggagagtgggatgtttgaatttartatctccaagatatcgacattctgggtaatgataaatttcagtttggtgccatgggaagagaaactgaaaaggaggaaacttactggagatgaaaaggcattagggaatacaaaacaaggagtatgcaaaaaatgtctcttagtcctagggcattatggtgtggatgaattggcagtgtattcattagggcactgctcactgttgtaacaaaaaagcatccataatttagtgtcttaaaataaaaattattattactttttgcactcatgcaacaatctcagttgtcagctcttctgactggctctcgtccaagaa

SEQ ID NO: 800291 - DNA, 638 bp, Homo sapiens
gatcactgtgaatacacataattttcttctggctaaaatttcatgtgctcatttttattgtagtaaaaaagcatatttaggtatgcagtacagtagtgttagttatatgcacattattatataacagatgtttgaactttttcatcttgcaaaattaaaactctacacacattgaacaactcccctttcactctttttccagcccctaatgacaactattctactatctgtttctgtgaggttgagtaaatacctcaaataagtggaaccatgcaatatttgcccttttgtagcataatgttctcaaggttcatccttgtgtagcatataacaggcttttcttcctcgcttaaggctgaagaatattccatgatatgcatatatcatattttctttgtccagtcatccattaatagacacttaggttgcttccacctcttggctgttaagaataatgctgtgataaagataagttgcaaatatctcttcaagakcctatttttattccttttggatacatactctgaagtggaattattggatcatatagtatttttaattttttgaggaaacttcatactgctttcatcatggctgcattgtttcataatcccaccaacagtgtactagaattccag

SEQ ID NO: 800292 - DNA, 647 bp, Homo sapiens
ttaaaaaatacatttctaagtttcaattgcctttctaactttaccacttgtaatgatgataaactttgtgattttctagaagtaatcctgattataatccaattcagccacttggtcttacatttttatgttgtgccacaataatatgggtgatctaagttgctagaaggtgtgctcatattttatgcattgcctttattctaagtagaytctttcaagattctcattttaaaaagtcacagtaagaaatattaaaagtaaagaccaggaagtgaaaaagatataaagtcctcgaatgtgtgatacagacagtagatgggacttttgaggacgaattcaaagaaaatataatgattaatagtgatgaagcaggacattgccaaatatgtcattttttagtcaaacacattatatgaggtggaaattgaacttttgaggcttgtgttaacattatgctgttcagctttatcaaggcaaggaacaaagggagaaatatgcaacagcaaaaggactgtaatgtgataagactgtcatcagctaaatatttcacctgcccgctctctaccaaaatgacactggttttaatacagtaattatttgggcaagatatggcccttatttcaaaaatccattttatatttagtcat

SEQ ID NO: 800293 - DNA, 635 bp, Homo sapiens
gattccagagaaacttacagtctatctattccctcagtgtgttcaaacacaacttgtcaattagtccttcctcaatattttaataaacctttcaacccacttcccttctagtaactccctatatctctcttcctcatcttattaaacagaatggacatttttatcctaatatmtcttgatttctcaacattgtttaatacatgtttcttcttgaaaaggtgtcttctcttgacttccatgaaacaataatcttctgttttacctcctacctttctgattttctcttgtgtctttgtttaggcccaggttcctctaccaaacctttatttactaaagttatttaaagtccaaacttaaacaaagtcctcatgtgagtctgatacatgaaagggatctcgatccagaccccaagagagggttcttggatctcatgcaaaaaataattaagggcaagtccatagagtaaagtgaaagtaagtttattaggaagtaaaggcataaacgaagggctacttttacaaataaaagagtaaaagaatgctccatagatatagcagccccgaaggcagctggttgccaatttttatggttatttcttgattatatgctaagcaaggggtgcattattcatgcct

SEQ ID NO: 800294 - DNA, 560 bp, Homo sapiens
gatatttgccagctttcagtagtggcaaaaataatgcaccctgtgttgtcatgatgggaaagaacctggggtaatcattatgggaaatgaatgagaagagtaatcaagagaacctaaatgaaagaaagagggaaatgaataaattgaagaaaccagctgggcatccacagagatgagaaatgggaaagaaagagagaaraggaaacaataagcagactctgccctcgagagaacggcatcctcttctaatagctctccagttttctcctttggactcagtaaggtctggctgtatttttatttctgtcttggactcattttcttagaataaatccttcatttctagagcaagtagaagttagctcttatacctacagtaaaaaacaaacaaacaaacaaacaaaaaacacctaagacatacttcaggttacacaagccgctagcaccccctattaaacctactctgtagctgtcatgcttcttcttttccactttcactagctgtttctggcttctctcagaaccaaaatgacattatttccaatatttgatcaaagcct

SEQ ID NO: 800295 - DNA, 630 bp, Homo sapiens
tgttctctttaaatggtgctgggtaactggatatccacatgcagaacaataaaactaggcccttatctcatactgtatacaaaaattaactcaaaataagttaaataacttaaatgtaagacctcaaactttgaaactcctggaaggaaacataggggaaaagctgcatgacattggtctgagcaatgattttttttatatgaccctgaaagcacagacaaaaaaagtaaaaagagaaaaatgatattacattacactaacaagcttccacagagccaggaaatcrataacagaataaagaaacaacttacacaatgggagaaaatagttgtatcctgtacacctgataaggggttaatatccaaattacctgagtaactcaactcaataccaataaaataagtatccaattttaaaatgggccgagaacctgaacagacatttttcaaaagaagatatacgaatggtcaactgatttaaaaaaaaaacaaaaagtttaaccactaataatcaggcaaatgccaattaaatctaacacatatgaggcatcacctcatatgtgttagaatggctattatcagaaccacaaaagattagtgttagtgaagacatgaagagaaagaaactctt

SEQ ID NO: 800296 - DNA, 576 bp, Homo sapiens
cctcagtcttctttaaatgtatgtatatttttaaaatgaaaccaaggtcataagtgtaattaaaggtaccctaaagaaatcacattagttttgaaatgatcatgaggaatctacagcattaactttaggaaacttcttataaagccccaagaggtttyacattggttgtgtctgttgttaatatgagctatttaagtgtatttaaggagtgtagtgacaaagagacacgtggaaatagcaagatgtttctagtgtgctccaccttaaagccttgttcactttcttttttttttttcagatggagttttgttcttgttgcccaggctggaatgcaatggcgcgatctcagctcactgcaacctctgcctcctgggttcaagcgattctcctggttcagcctcctgagtagctgggattacaggaatgcgccaccacacctggctacttttgtatttttagtagagatggggtttctccacgtgcatcaggctagtctcacactcctgacttcagatgatccacccgcctcggcctcccaaagtgctgggattacaggcgtgagccaccgtgcctggc

SEQ ID NO: 800297 - DNA, 644 bp, Homo sapiens
aaagtctgccttctgacttgggcttctatatttcttcttccatttcctgagccctttttatgagcatggcactgtgccagggctggcagccagtcctggcctgggtaaatgacagcatgaggaggctggtaggaaggtaggtgtgctgtatccttggtggaagggcgattaacctctgggctaagcctaagggtcaggccaccaggccccaggaagggagctgtgcctccagagcaggcatgcatgttctgtctggaacacacgagtatgcaagtgccagaaagggtccctggactctgttgttgtaggtaggttctttgctaggcaatgggaatgtaaagatggataaagcatgatcttcagccctcaaggagctcacagtgtctgctcattcataggcattccctctaagcatgaraagtcccagtggagtggctaaaatcaagtttctggacatgtggaagtaaggaccaaattctgaatgctctttgggccagaaaaatgctgttctaccaggagggcctgaaaaaggcagttggactttaccccttcccagtgcaaacagtggactctattgcagtaaccactatcctctctaactagcacaggtttattagaatgttagaaaatcattatttcctttt

SEQ ID NO: 800298 - DNA, 496 bp, Homo sapiens
aacttacatgatactttagttgctgcatttgtgaaacaggatgtcacatttcctatttacaatttagtagaattactttttacccaatatgagtcccacttttttttttttttttttttgagatggagtctcgctctgtcacccaggctagagtggagtggcgtgatctctgttcactgccagctccgcctcccgtgttcacactattttcctgcctcagcctcccgagaagctgggactacaggcacccgccaccacgcctggctaattttttgtgtttttagtagagacagggtttcaccgtgttagccaggatggtctcgttatcctgacctcgtgatccgcccgcctsggcctcccaaagtgctaggattacaggcgtgagccaccgtgcccagccccacattttttttaatccttttggtcagtggctcatggtaaaaaatatgtctccacctttggtataagtgttagtgtaagtttcagcctaagctac

SEQ ID NO: 800299 - DNA, 667 bp, Homo sapiens
ttgagcattacaaatccaaaatctgaaatttgaaatgcttctaaatctgcaacttcttgagcaccaacatgacgctcaaaggaaatgctcattggattatttcggatttcaaactgtcagatttgggatgctcaaccagtataatgaaaatattccaaaattggaaaaaaattgaaatctgagacacttctggtccccaccatttctgataagggatactcaatctataatagctacatgccagtttacatgctcctccctggttcaaacaatggaatcagatcaatttacagagtctttcaaagaattacagcatacatatatatgcaaagaacaagtataagtttattttagttgcatataactttttccttaatatgagataaaccattttcctaacttatgtttttgcctttggggagcctctattytcagatgcacagaaagcagaaaacacattggggaaaaaatcgctcctcaaggagtggtgtgatcaatgctctttccatgcaccacctctcactccacttccacctggaagatgtaatgcagcaggagaaaccagaccctaaatattttaccaggtgtttttctaacagtttatgattctagaattcaaattagatttttaattttagaataaggatttttaaatcattaaaattct

SEQ ID NO: 800300 - DNA, 644 bp, Homo sapiens
caaaattcagccctccttcatattaaaaactctcaataaactaggtattgaaggaacataccgcaaaataataagggccatctgtgacaaacccacagccaacatcattaaatgggcaaaggctggaagcattgcccttgaaaaccaacacaagacaaggatgccctctttcactactcctgtttattcaacatggtratggaagtcttggctggagcagtcaagcatagaaagaaagaaaggggatccaaataggaagagagtaagtcaaactatctgtttgcagatgacatggttctatacctagaaaatcccatagtctcagccgacaagcttcttaagctgacaaacaagttcagcaaagtctcagaatacaaaatcaatgtacagaaatcactagtattcatttctgtcagtacaaagacttgggaactacctgacttataaaaggatttgttatctagtctttagagtcatccacttttccaaactgtagtattttttattgccttattttgttattccagagaattttataccccagggacatgtataaggtaaacttctgggtgggtaaaagataagtgacaagcctacctgctttgctgccatcccttccttacaaccttctgtacaaagtgaga

SEQ ID NO: 800301 - DNA, 644 bp, Homo sapiens
caaaattcagccctccttcatattaaaaactctcaataaactaggtattgaaggaacataccgcaaaataataagggccatctgtgacaaacccacagccaacatcattaaatgggcaaaggctggaagcattgcccttgaaaaccaacacaagacaaggatgccctctttcactactcctgtttattcaacatggtgatggaagtcttggctggagcagtcaagcatagaaagaaagaaaggggatccaaataggaagagagtaagtcaaactatctgtttgcagatgacatggttctatacctagaaaatcccatagtctcagccgacaagcttcttaagctgayaaacaagttcagcaaagtctcagaatacaaaatcaatgtacagaaatcactagtattcatttctgtcagtacaaagacttgggaactacctgacttataaaaggatttgttatctagtctttagagtcatccacttttccaaactgtagtattttttattgccttattttgttattccagagaattttataccccagggacatgtataaggtaaacttctgggtgggtaaaagataagtgacaagcctacctgctttgctgccatcccttccttacaaccttctgtacaaagtgaga

SEQ ID NO: 800302 - DNA, 504 bp, Homo sapiens
tagatatctctaggtatcactttcccctggcgaaaaatgagttttttgtaaatgatctctaagatcatttcagatatagtattttatgacactagctgcaagctatgcatcctgctagaagatacctgaccttattgacctaaattccaggaacttctttatgcttattgccgcaggggaaagaaaggactcttttttccattgtttctcaggccccaaaatatgtgctcaatatatatckagtgaatggatggatatttagttccaaaaccaacatacaaatacaacaaatctccatcagcattatcatgtggttttttaagggcacaattctaaatctggctctgagacaaagtcaacatgctccatagctgccttcatttaaagttatttagttagagggagtgggaaaaggctcagttccacattgagacatagaaatgtacacctttagtcatttttaatattctattgacatttcacagctaaggatatctgagatcc

SEQ ID NO: 800303 - DNA, 504 bp, Homo sapiens
tagatatctctaggtatcactttcccctggcgaaaaatgagttttttgtaaatgatctctaagatcatttcagatatagtattttatgacactagctgcaagctatgcatcctgctagaagatacctgaccttattgacctaaattccaggaacttctttatgcttattgccgcaggggaaagaaaggactcttttttccattgtttctcaggccccaaaatatgtgctcaatatatatcgagygaatggatggatatttagttccaaaaccaacatacaaatacaacaaatctccatcagcattatcatgtggttttttaagggcacaattctaaatctggctctgagacaaagtcaacatgctccatagctgccttcatttaaagttatttagttagagggagtgggaaaaggctcagttccacattgagacatagaaatgtacacctttagtcatttttaatattctattgacatttcacagctaaggatatctgagatcc

SEQ ID NO: 800304 - DNA, 634 bp, Homo sapiens
ctggctctgagacaaagtcaacatgctccatagctgccttcatttaaagttatttagttagagggagtgggaaaaggctcagttccacattgagacatagaaatgtacacctttagtcatttttaatattctattgacatttcacagctaaggatatctgagatccttggaagtggagtgatttttccagcatcccactggcagagagtggcagagctggaactaggtcccaggtcttctgaccccaagtctaatgcattttaaccccctatgttgcttccaataagtcaataatctttgctcaccaagaccagcatcctgaaaatccatatcactgatcacacaagaatgatttactgcaaagctgttacttgagataatggcagatacataccctgctccttaacaccattacaatgatgatgttgagatgagggcatgacttacagtccatagaacayctttgttcgatactattgaaatttccactgagaatcaggaatttcctgcctgtccttgcctcattcaagaggatcactaaacgattgtgttgtaccaatcagtgtatctatgtgttttctctccagactgtcaggttcctcagggcagtgaccgtgagtatcctttctgacaa

SEQ ID NO: 800305 - DNA, 596 bp, Homo sapiens
ataaacatttttttaatggtacgatatctgggcatacataatttattaataaatctcatgttgtgaggtatttaaatcacttccaggttttcattttatttgtagcactaccataaatatttgctacataaatattggtcttcactttttatatttttctaaggatggcatcttagatggcgaataaaccgtatcactttactctattttctaaccctggaccacccaagacccatcttcaaagagctmtaataccaaaactttcccacatatactccaaaaagaaaatattttaaaatcaaattttacctaaacttgcttctataatcaaatttatcctttctaatatgcacttcagggccctccttaattagtccacaatttacctttcacaactgtattttttattacacctgtatatgaacactgctgcagttcaaataccctattctactttttaaccataccttaacatttcctatcttcatgccttttaagcttttgtcacatagtcaaactgtaccattctcaaagatacctcttaacagtcactttctctatttagacttgccagtgcatacagttcacttagatat

SEQ ID NO: 800306 - DNA, 630 bp, Homo sapiens
tgtcaggcaaaattctaggccccagggatacagtagcagacaagatagacacagagtttctgttctagtggtagtagacaaacaagaatcaaataagccaaaaaaggagggtaaatcacagactttgataagtggtatgcggaaaattacagtggtagtgacgtgaaattgagtggaaggtcaaagaaggtgtctgaggaggtgacccttctttgtgatccgaatgatgaggaaaccagctctgtgaagatcagaaggaccagcctgtacaaaggcccaaagttgggaagraagtaagtgaatgggaggcacagaaaggccagcgtgtctggatgaaggcaacaatagcaggagttgagctgggagagaaaaataggggctacatcacataggtcaggaagaggagcttggatttgatcccatatgcacgggaagccgcttgatgctggtaagtggcacactctggtttatcttttaagagaatttcactccggatgctgagtcaggaagggatgtgtgtgtgttgggcttggacgagaaggacggaagcagggggaccagtcaggactttatcccagcgggccatgtgagagacgatagtgctaggccagagaagtggttgtagagact

SEQ ID NO: 800307 - DNA, 586 bp, Homo sapiens
ggtaggatcctcacccttgggtatggcctcagtgatcagccacatcctgcccctgatcctgctgcttggccattccttccttctattgccttcctcaatctcagtgaacctgcaacatccaaggtctagctgttgyttagcatctctgtgctgttacataggcttcctcttgtttctgtgttctagttatctgttactgtatggaaaatcaccccaaaacattgcagcttagaacaacagtcacaatgttttgtgactcctatcttcatggtggtggagattcaatgcatctaggtcgttcttgcttgtattctctcatgaggttgctgtcggctggtggctgggactggaggcatctcaaaggtttcctcattcatatgtctggcaactgttgctggacatgggctgggagctgggggctcacaagggcatctccatgtaacctggacttcctcataacatggagtctagattctcagagcaagcattccaggcagactaggtagaagtggcatggccttttctaacctaaccttggaagacacatggcatatttctgtcacattctactattaaaagtgagtca

SEQ ID NO: 800308 - DNA, 621 bp, Homo sapiens
agcctctttgctggagcttgtcattctttaatgtctcacccggggcattgggtctaggccaggggctcctctcagctccatagatattgcaacgttactttttctttattcttcctactttttagcctacagcaaggagggaagcaagggtaatattctcttactgtgytctccagcatctacagaaaaggcttttattataaaggggaaataacttcattgctcatccctaaggcagaaggaaaccaggtagaaaggagactgggatctgagccaaggaagagatggggacgcctcccagtgcttcccagcaacgccatggctgggttctttttatcagtttgggtaagtcatgaattatcaaaatgccttcaggcatcgcaagccagaattgcatattggtttggataattaaaagctgtttccatcaaaaaaatttgtattcaagcccttggtagtcttcaggtgaaaatagttttcctgtcattaaagttaattagtaagtgtgtatgtgtgtttatgaatctgcagataatggtttcacaagccgtgagattgggagttggaagggaggggaaagtgataaagaatcaccatcggtgtctagtagtcagctacgct

SEQ ID NO: 800309 - DNA, 481 bp, Homo sapiens
aagcatgttttcaattccctcaggaaaatacctaggagtggaattgctgggtcatatggtaactgcttaattttttgaggaactgccaaactgttttccaaagtggctgcactattttacatttctaccagcagtgtgtgagggttccatttctctacatccttgtcaacacttgttgtatgccttttttatagttattctagttggtgtaaaatgatatctcattgtagttttgtttagatttccttgatkgctaaagatgttgagaatctttcatgtcgttgttggccatttgtatatcctctcttgataactaccgattcaaatgctttgcctatttttcaatttggttatttatctttgtatcattgagttgcaaggatttttaaaatatattctagataaaagtcccttgacagataggtgatccgcaaatatatctcccattctccaggttgtcttttcactctgataatgtccc

SEQ ID NO: 800310 - DNA, 670 bp, Homo sapiens
atgtatgtttttactttacacatttgcttattatgcaaatttcacataagcaaaatcatacattatgtggtgtttagtttctggcttccttcacttagcataatgttttcaaggttcatctatgttgtagcatgcatcagtatttcattcttttaatggctgagtgatattccattgagatatatacatgttgtttattcatcagctgaaggacatttcagttgtttctactttttgcccgccatgaataattactgctgggaagattcatatacaagttttgtgtggaccagtgttttcagttttggagggtatatatcttagagtggaatggmtaggtcaaatagtaactatatttaaccttttgagagtcttccagactgttttccaaagcagctacacattcctaccagcagtgtatgaggcttcttatatcattacaataggaataataaaacctatttcaccattgttctgaagattaaacaaggcaaacatgtaaagtgattagggcgttattggcatcgtgagggtttaataaatgtctctttcttttccttgtcattattagaaacacctcttatcctgatccaaaatcttgagccacaggactctaactgaagagaaagaaaatgaatctactgcctcctccgaagctagtccttcagat

SEQ ID NO: 800311 - DNA, 644 bp, Homo sapiens
acttgctgaaagccacatgttcaagaatggcaaagctagaataaagatatgtgtgctttgtgggattcatataatgtctgtattttgtgtattattgtcaactcagatttcatagattcatgagttaagacataaagttctttccctcatgggattcattttgacatgtttttgaaagacttgaggaagagtctgcaattgtgcacttcaaaaaaatcaaaatgataacagtatggttttatagctattttctccaagatagtgaatattattcccttagaacaaactattaacaatcagtctttggtagaaataaaacgcttcagtggatcaaagtttgcaaagtatcaaattattatttgtccttagatgaattmtctaaaaccagtcccactaaagtttctttaaggattgttcataggactgatacctgatatataaaatatgagataatacacataacataaccttctatagtcaatggcatcagacctcctttcaaagcatccccacatggaagcagtgtactcactcccctgtagttaccatctctcattttttagagctgtcttcagacattatatgaatcccacaaggccatggtctctttataacattttgattttgacttaaaaaccatatta

SEQ ID NO: 800312 - DNA, 602 bp, Homo sapiens
actgatagaaataactgagtactagcccaactctctcctgcggtcctcaggttgaaagctctcagcaggagaaggaggatggccagttctagttcacgtactactacagtttcagcacagaatattgcttcaccaagaaaactaaggctgttttgcctgatccccttcagtgcctcactctctgacctaaaatctgccctctctctgtccctgtgctcatgccttcactgccctcatcctgttcaagggcagtccttgtgactaagcagggtgcactattcttttcrgatttctacctcccattcatacctcaggccaatattttctgacctctaacaccacagttgtactgagcttcctctcggtgatggcacccaagacctcctgattgccaaacgcagtgggattttttttatggtgtgatgcactggagaccttcagctaatctccttgtcacctgctactactttggctcccatggcaccatcctttccaggttctgcttacatctccttggccattcctgtgcctccgtgggctttttttcctctgctcagtccttcagggtcctccaggattcctcctcagctcactgctctggg

SEQ ID NO: 800313 - DNA, 613 bp, Homo sapiens
atagaaagatgcttgtaataaaatctgaagcttatttaagtcattgcaaattgacatatattatataatctcatttttataaacatacatatacatacctataccaggtatatctgcagaaacaaagcctgcaagaaatccacacaaatataaaccctggttatttctggttggtgggattatggatgactttcagttttyatttgacttcgtttattttatattattttctacaatgaactaaaaattattgtttttaagaaaaaatacaggctgggagtgttggctcatgcctgtaatcccagcactttgggaggccaaggcgggtggatcacctgaggtcaagagtttgagaccagcctgtccaacatggtgaaaccccatctctagtaaaaatataaaaattagctgggtgtggtggcacatgcctgtaatcctagctacttgggaggctgaggcaggagaatcacttgaactcggggggcggaggttgtggtgagccaagatcgcaccactgccctccagcctgggcaacagataaataaaaaataaatttaaaaaaatacggggggtgtggttgctcatgcttataatcccaacactttgagaggcc

SEQ ID NO: 800314 - DNA, 633 bp, Homo sapiens
tagttccccttatccttaaaatagagaagctgtacccaaggtgctgtagggtctcatcagcccttacatggtgagaatctgggacaacagagctggattcagatccaccttcaagttggcctgcagtggccccaaagatagtcagrcaatctcaggaaagaaaacattattttattgtaatttgattttaaaaccttggttgttccatttattgtaagggtagcatatgcaaactttcagaaaacactagaagaatataatagtccttaaaaaaaaccttgagtttgcagaaaaatacaaagatgcatataaagttcatctagacctagacacttaacttgttggtgtatgtcactgtaaatttttgattagacaaaatcgatttatagaagtcaatatttaaaatcttgatactttccttttgtataatcttctttcattagttaaacacaagggatactgtctacatatagaaactgtcttttaaaaaattctgattggattcagttaactaatcaaaaatgttggaaaattagttgagcattttgatgtcactatcaattgtctaattgttactaaatctgccaaataaaagtgaaaagcctattagattatgtaaccaattattcttaa

SEQ ID NO: 800315 - DNA, 617 bp, Homo sapiens
tattgtttaatttgatatcctggcgttctaatgttttcatcacgacatctagttgtcccagatctctttatgctgttttctgggagtgacagagtcaaaaaaaatatgcctctttaagctgtcattctgcttaactcctcctctgcaattacatttgcatgcataatacatcgtaacaaattagatattacwaagacacacgacagaaattatgtgagcttgtggcaagagatataactgatgtgatagaagagaaggagattgcagagtaaaggaaggaggagaaggaaaactaatgaatgaaaaccagtacagaaaatggcaactgaaatatatcttctcaactttttaaggccagtgatcaattgcagaaaagtaaatgaaaagggaaaatgcaaaaccagttttgttcctgtgtcagtcagctaagagattaaaattaaacagtgtatttggttccagagggaaagatattcattgggtttttggcagtaaaagtaactgtgactaagaaaaactctttatttcacatgttaatctaaaaaactaaaatgatattggggttgtaattcaggcttattggaagtgttttctagtagactggaaacaatcttctt

SEQ ID NO: 800316 - DNA, 634 bp, Homo sapiens
tctatatgtataataactgaagtacaagaggttaaattactcattccaaaaaaacccttatttagggtaactagttaaaatttgaatctaatcccagtgtgccttccacttccctagaactcccttccattgacagcctattgcagactcatgagccaaaacgggctcaaaagttgttaattgtaggatttgaattcaaaatctgcaaataaaaaaacaaaaacggccgggcacagtggctcacacctataatcccagcattttgggaggccgaggcaggcggatcactagaggtcaggagtttgagaccagcctggtcaacatggtgaaacccygtttctactaaaattacaaaaattagccaggcttggtgatgtgcacctgtaatcccaactactggaaaggctgaggcaggagaatcacttgaacccgagaggtggaggttgcagtgagccgagatcacaccactgcacaccagcctgggcagcagagcaagaccgacacacacacacacacacacacacacacacacacacacaaaccatacatgcaacatgcctatgtacattcccttagagacctctcaggtcccttttaaacccattagctttgtgcacatgctgtgataaattgt

SEQ ID NO: 800317 - DNA, 596 bp, Homo sapiens
gttgtgtggcagtcatacctcttacgggaatactaaccaggtcatccaagttctagtaacatgctgtttttgcttaaggatactgaattttttaacccttactctaccctaaatagcccaattttctttggagtaaaagtacacagaattgctagtcatttggcatgagaagtacataaatgacttgctgtttttatttttccatgaagttggcaagttccctgtagtctaccagaggcttaaggatcacactgaggaaaacattgctctagagctgcagttctgtaactaatttcatatctgacaattgagaaccaagtatggccctggctggatttttggaatgttagatcttgtggaccttcgcctccctgtatggaagagatggaagaaaaggaagaaagtagaattatgcatttttgctgtcccctttaaagtctctccttcctctgcacrtttctttcctccccacagacaagcaaaataaatacagatgggggaaaaaagttgtgattgctgattaattgattgctgtacatatccataatacctatcatgacatgaaagttcttaggaacggctttcatgtttccatg

SEQ ID NO: 800318 - DNA, 562 bp, Homo sapiens
atttgtacagaagttatcatagtagactaatttgtaatagcaagatactcatctgacaaaggtctaatatccagaatccacaaggaatttaaacaattttacaagaaaaaaacaaccccatcgaaaagtgggcaaaggatatgaayagacactcctcaaaagaagacatctatgcagccaacaaacatgaaaaaaagctcatcatcatcactggtcgtcagagaaatgcaaatcaaaaccacaatgagataccatctcacaccagttacaatggcgatcattaaaaggtgaggaaacaacagatgctggagaggacgtggagaaataggaacgcttttacactgttggtgggaatgtaaattagttcaaccactgtgaaagacagtgtagcaattcctcaaggatctagaaccagaaataccagttgacccagcaattccattactgggtatatacccaaaggattataaatcattctactataaagacacatgcacatgtatgtttattgcagcactattcacaatagcagacttggaaccaacccaaatgcccatagact

SEQ ID NO: 800319 - DNA, 562 bp, Homo sapiens
atttgtacagaagttatcatagtagactaatttgtaatagcaagatactcatctgacaaaggtctaatatccagaatccacaaggaatttaaacaattttacaagaaaaaaacaaccccatcgaaaagtgggcaaaggatatgaatagacactcctcaaaagaagacatctatgcagccaacaaacatgaaaaaaagctcatcatcatcactggtcgtcagagaaatgcaaatcaaaaccacaatgagataccatctcacaccagttasaatggcgatcattaaaaggtgaggaaacaacagatgctggagaggacgtggagaaataggaacgcttttacactgttggtgggaatgtaaattagttcaaccactgtgaaagacagtgtagcaattcctcaaggatctagaaccagaaataccagttgacccagcaattccattactgggtatatacccaaaggattataaatcattctactataaagacacatgcacatgtatgtttattgcagcactattcacaatagcagacttggaaccaacccaaatgcccatagact

SEQ ID NO: 800320 - DNA, 625 bp, Homo sapiens; identical to SEQ ID NO: 754771

SEQ ID NO: 800321 - DNA, 637 bp, Homo sapiens
tcaaaaatagctgggcatggtggtgcatgcctctagtacaagcttttcaagaggccgaggcagaaagattgcttgagcccaggagttcaaggctgcaatgagttataattgcaccactgaactccagcctggatgacagagtgagatcctgtcacttaaaaaaaaaaaaaaaatttcggctgggcacgtagtccactagaataaaggctccatttcctagccttctttgcaggtaccagtatgcatgtgactaagttctagccaatgagatgttagcagaattaatatatgtaactttcaggaagtgctttatagtaatactttagggcagggccacacagcaggagggaagcagtgagcgaacaaagcttcatttgtttttacagcygctccccatcactcacattgccacctgagctccacctcctgtcagatcagcggtggcattagatttttgtaggagtgtgaaccctaatgtgaactgtgcatgtgagggatctaggtgcggctccttatgagaatccaatgcctgatgatctgtcactatctcccatcacccccggatgcggccatctagttgcaagaaaacaagctcagggctcccactgattctacattatggtggtttgtataatta

SEQ ID NO: 800322 - DNA, 579 bp, Homo sapiens
tctagcagaggccaagagcatcattcttggatgaatgcccagcctttgaagtcagagagaatgcaggctgttagatgaggagatccagattcaagacttctcaacacacacttccccctactcaacaatgcttacaataaagttacgctcaagaggcactctggctgctagaaaaacaggaagccagaggagtgggtaggtcagttaggctctctagactggcctgaactctgtggaatgtcaggctcactagaaagctgaatgcctccactgaaggtgtgaccaaggtatctttaagctggaactgaccaaccacccctgtcttagtaaaaargtatttctccccaaatctgccttccccaccctcccttcacacacaaagaaagtagccaggccttcagtcttggttctctagagcgcagcagaacaactcaggcagaagcagcttgggagaccttgtgcttctctattcgagtgctttcctaaactgtgtggttggcaaaaaacagatctgaacatttggctggaagcagccatgtttaaaaacaattgtttaatttcaagattgcaagaaccttt

SEQ ID NO: 800323 - DNA, 577 bp, Homo sapiens
gcttcatggagaattttaccaaacatttaaggaagaattaatgccaatcctcaaacttttccaaataattgaagaggagggaacatttctgaactttttttatgaggtcagtattaccctcataccaagccagataaagacacacaagaaaagaaaattataggccaatatccctgattgaacatagatgtaaaaatcctcaacaaaataccagcaaaccgaattcaacagtatgttaaaaagatcattcaccatgacctagtgggatttattcctaggacggttcaacataygaaaatcaattaatgtgacatatcacatttacagaatgaaggataaaaatcacacgatcgtctaagataaaaaaagtgtttgataaaattcaaaatcctttcatgataaaaaaaaaatctcaacaaagtagggatagagggaaattaccttaacctaataaaggctatctatgaaaagaccatagctaacatcatactcaaaggtgaaaaactgaaaacttttccattaagatcaggaacgaggcaaggatgcccattcttgccacttctattcaacacaggac

SEQ ID NO: 800324 - DNA, 645 bp, Homo sapiens; identical to SEQ ID NO: 770293

SEQ ID NO: 800325 - DNA, 535 bp, Homo sapiens
aactaggatctatttcaacccagaccatgcatccatccacatccatctaaccaggaaactctcaggcactgtgcttggtggtgaagagacagagtcaataagacattatagaaacagatgcgagtgtaatgctgccattataattacagggccatggacttattgcttcactttctaagcctcagtttcctcagcttaaaattgtagctgaagataggtacttttgacagttgtattggggattagaaataatgtaagtaaattccctggaatgctcaataagtaacacattactattatgaaagactrctagaggaggagacctaactgaaggttttggtgtagtgcaattagtgccacgacataagaaagcatgggatgttacagaagaagggaaggtttctaaatcaatatttagcgaaggtgtaaaatgaagttccagaatttgaaggatgagtaggatttggctaaacggggaggggaggaagagcatttctggccaagagaaagcaacgtgtactaaggcatggaggtg

SEQ ID NO: 800326 - DNA, 578 bp, Homo sapiens
taaactcattcattcattcattcaacagatacttattgattgtttctgtagttctgctgggtttgaggcttccactcactgcatgtagcaatgctgattttgtgagatcatgacttcatacatttagaatctgataaacccagccagctgaaggctttaaggcattgttggtatctttctcttgctccttcttcagatgtagcttccagtaagtacttcggaaagttaaacaaggatcatttccagtttcaccgcattatcctgggacactctgcacagaatatcttctttaatcaggacatattyaatcagcagatctaccactaaccactggctattgttctctctgataggagtatactgaagcatggaaaaacagaaatacagactttatttacctacttttgaaactccacagctcctgagttaactgtagcaatagaaaccacataggtgatgtaaaccattggatttttaagagcttccttggattttaattgaggatcatgagttatattcttgttcttcaactaagaccatgtgtgtggtgatacctgacatctctggcccttgatttt

SEQ ID NO: 800327 - DNA, 636 bp, Homo sapiens
ctgaccaactggctataaatcagggatcccacacacacccctccttgggttagattaatttgctagagcagctcctgaaactcagggaaacacctacttacattcagcaatctattataaaggatattacaaagggttcagatgaaaagatgcatacggttaggtatgggggaagaggcacagagtttccatgctccctccaacccccaggtgcaccatcctctaagagcctccataggttcagctatttgaaagcttttcgaaccatgcccttttgggtttttatggaggccccactacataggattgattgattacgtcattggccattggtgatcaacttaaccttcagtccctttctctttcccagtggttgagagtggactgaaagtccaaaccctctaatcaarcctcagtctttccagtgaccagacctcatcctgaagctacctagggactgcttgccatcagtcaattattagcatacaaaaagacatcgttttagagattctaaggatttgaggagttgtatgccaggaagttgggtgaagaccaaatatatgttttacatatatctgccaagacccaatgggaaatttacaacataaactcccagggttctggagtaaggctgtg

SEQ ID NO: 800328 - DNA, 622 bp, Homo sapiens
cctaggcctttatgctgactgtaggagaggcagattatctttaaattgctaattttgcctgaaagctcttatcagagactgagggatgattttatacttttctgtttgcttttcaattcccctcacccccaagtactcctagagcagtccaaatctgaggtttagttgacttagttgaacgcgagttcaaatctcaagaaaaataccaccaaagaaacccttttagtgtcatttgctatgagtgtttagtggtcagctgacatcggtaacagcaagttgtccctcaatatccactttcctttatctacagaataatggaactttgagttttgaytgggctcatggtttccaataaaaacatgaaatatttcaagtaatgtgattgacttccagtccacaagatatgaaaggaagtagtatgaacaacttcttggaagtatccttaaaggaaggtctgttcctttcccctttcttctccccactggttggaattcaaatgatgatggcaaagaagcagcatctatttatgaaatgattctgggaatggatgtcatgcatggtggaaaaaaaacataggcggaaactgtgttcctaccatcatgtagggccacaccacctctgg

SEQ ID NO: 800329 - DNA, 614 bp, Homo sapiens
tcagcaattttggttcagtgtcacacccaaaaaagggcacacctctttaacactttcaactcttgaatcaaacacacccttattaaatgtgcttttcacatcaacagtcagtgtctgtcattcagctctgggagagagccggctctggctctgggagagagcagcactgccgaaggtgagctgatgagagctcaccagggtatgctggaaggaggaggatgagacaagggtaatttgagaagtaagaagattgatatggtaatgcacacacggctacattttacttcccatattctcttggtgtatctatagaaaacaaaaaagaagcaacactatggtaagaaactaactgaagtttttycttttcattgcctaagactttgttttggacttatatagtattattaataacatcaagtaacttcacaatgtatttattgtctagatctggtagttttgggggggctcaaaaatctgaagcatttgtgaatatatggaatatagtgggggggctgagtacccttggatactttggctcgaagcaaaaataaaaatgtccagtataggatctgctgctgtctgtgcttttctaggttctttaaaatattacaggt

SEQ ID NO: 800330 - DNA, 636 bp, Homo sapiens
atggaacttaattgctcaaataatgtcatatcaatttcatataaatgataaagaaggaaagtctctctttctagagagaaaactctcctgacggcatcaggctgtcccgggaagtcactgcttcccttttctgttgyggggcataacgggagatgaagctgggaattgacaatctcttttttctgctggactgaaacctcctggagcagaaaaatagttttttattttgcaaatgaaagtcaaagatgtggcaggagttgagggtgggcattgcaagagctaaatccggtgcttctgacagcccagccctagtgagaggccccttctgagagtcccagggactcttatgtaaatgaaactcaaatagagctccccacagcacctgagcttagggtcaccaggctctgggactctgtatgtgctcccaggagattccatccccaggataacactgcaggtcaatttgtgcttttcctaccatgcaaaccatactctggtaactgtgcaggattctaagaaataaacttattgaaccaaagtattgtataacttattttaagttatatatttttccttgtcattagtaaccaaagaataattattctgccatttttaattacagtgtgtgcatataga

SEQ ID NO: 800331 - DNA, 626 bp, Homo sapiens
cagggcagaatcatcacctctccttataggcgagaaaacgaaggatcaggaatcttaaagtcactcctccaaggtgattcgatgggtaagtgacaggaacggtatccgaaccaagttctaacccctgacaccagagcaatgccttttttttttttcatagatgaagccattctctctctgttaaacctctgtgaaaacacatggctcctcagctgagggcctctataaagctcgaggactgatcgagatggttactccacataaatcatgtactcacaagcattctgcacctgtccacaattttaaacttagaggcacgtagggtacaagagcytccacttcatcacacggagctagtgtgtgaatctcagtcccaaggtgtctgagagatggggcttacatctctgcctctccaggagactcctgcctggagacggccctgatggatggggaggaagaagctgatggtttcagcctgaccttggcaaatggctctgtgtccatccctcttaacctctgccttacaaaaataacctgctctcagcacaaaaacaaagaactagcagaacatgaaaatcaggcagagatgccactggtgtggaaagaatagcaatattatcctaatg

SEQ ID NO: 800332 - DNA, 597 bp, Homo sapiens; identical to SEQ ID NO: 797283

SEQ ID NO: 800333 - DNA, 585 bp, Homo sapiens
tacatgttgtaggaaagtcgaacttaagtctacttgaagaaagagaaacaaaaagccatggatctatggccttgtttacacctaactgctactttcaaaggatgaaatatggcttcttctttctcctttgaaacagaaaaataatagctttctattgtcttctcccaaccaaaaatttgcaccaataaaacaactgattatttgaagcagttattctccacttctggtgttagtcttataaagtagccaaaatattctcgagcaccacattcaaacttttcctcctgtgatgaatacgttgcaaatctattgctgtttagggctacttttacattttaaaaccgtattttaacatttttaaaatttcgttatttgtccctgtgtgattcaggcatatatyacatatattaggttattataagacaaataaatgtttgaatcctggctctgcctcagctcactgtatgactttgaggaagtaaactcctgtctctcacctttacagctttctcatcgataaaatgtaaataacaatagcaagctgttatgaagattacatgatacaatatatgtaaaataattctg

SEQ ID NO: 800334 - DNA, 444 bp, Homo sapiens
ataactcctacttaataatatgcatgtgaagggtttaagtgaaatatactgaggtctacagcttcctttgaagtgcaccaaaaaatcaggatgggttgactgacagatgaaaggatggttagaggagagctgtatgatcaagcaaatatagcaaaatgttaacagtgggatccagatgggtgttcactayacaactctttcaacttctcagaatgtttgaaaaattttataataaaatgtcgatgttttaataaaaaaaagaaagggagtgtgatcaggcaggtcttgactggcatctccacacaatttgccctctttccagtcaaaaacacaggacccgtctaccccaggcctgccacagaacacacggcatcttcttgaccagtgtagcccccatcagtgaatcaagagactttcccggacatatgagtcactcaccattcc

SEQ ID NO: 800335 - DNA, 619 bp, Homo sapiens
ttcatcgaaaccactcacaatatatttttttttctggagtacttaatttctcataggtaatatattaatcaggttctaagaccaaggagtataagaagatatttctttcactctggaaagtcctatcccccatctgctcagttctcagttccctccaaccaccgttttgttcatggacccttccagaatttctttatgcatatcgttatcagtccattcttggattgctgtaaagaaatacctgacattaggtaatatataaagaaaagaggtttcactgactctcggttctgcaggctgtacaggaagcataaaagcttctgcttctggagaggcctcaggaaacttccaatcatgggagaaggtaaagggggtgtgagccacttcacatggccagtgtaggaggaagagaggaggaggaggaggtgctaaatacttaaacaaccagatctcaygagaactcactattatgagaacagcaccaagggggatggtgttaaactattcataagaaatctcccccatggtccaatcacctccctccaggccccatctccaacactggggattacaattcaacatgagatttgggtgggaacgcagagccaaaccacatcac

SEQ ID NO: 800336 - DNA, 540 bp, Homo sapiens
ctgaagtccagggtgcttggtggcctgtgcaaggtgagatgaacacagggctgggggagccccagaccttggccttgctgtcctgtaacgccagcactgtcagcctccagaaaccactcatgcagccaagtaaggcagtactcctgcttcgcggcaaggacamcaccaggcctgctggctgtttctgggcctcagaagttctttctcacccagtcctgggcagcatcccctcctgtctgcctgtgctgcagaagaggttacatccacatagctccacttagagacctttcatgggcagccctagccatggctgacctagtcccagggtctagaggatctgttggccccaatctgtgaattgagggcttgccctggataatctctgttcaccccccagcttacctgactctgaaccgcctcaggtgctcactgagaaacttaaagggggaattgccctgggggctatgtacatttttaaatgagacgctttaaatccagggtagtggtgggttgatgaggtgccacatgctgctgctgggc

SEQ ID NO: 800337 - DNA, 495 bp, Homo sapiens
atacatacctgtatgtatatatacatgcatacacacacacacatagatagaaatatgttatatatgtatcatagataaataaataaatttcttaacatttctagatatatacccttaggtacatttcgttacttgtcttcttaaaatattttagctactttatctgtaaatgtggatggaaatctgttaatttgagaattgagttataatacattatcaatgagataataatatagtatctagcacagaagtcactcaatawaggctctttctaaaaagtattaaacatacacaattgataattcataaatacaatgatcaaaaataaaaatgttttaatacgaattataacacaagctccaccctacatttttcaactaacctatatacttacatatataaatatataaatggtacagataacatctgaaaatacatgagctttacattcatttagctatttatgtcactgtttttaaaaataaattatagaaa

SEQ ID NO: 800338 - DNA, 485 bp, Homo sapiens; identical to SEQ ID NO: 748554

SEQ ID NO: 800339 - DNA, 590 bp, Homo sapiens
tcaaagttaacatacttggaaatgggacaaatcaatatcttcttccaggtgataggatgcaatgaaaacaccagatcactttcttccttccgtggtattctatccaaacatgcataatctaaatctaattgtaaaacaacactaacaaaaacaaatggagggatgttttcagggtccaggaagtcgtgtaaacaagtgtaaggcaattgagagcaagagggaagcaacaaactgggcagtgaataacttgcctaaaggaattcaaattcaattaaagaaatttgacgggtgaaattaatcctctgatgaaaacaagactagcaatagccaatgtttatcrtgaacttactctgtgtcaggcaacacagtggagaggttctagtgtggactctggaaatagatttctgggcctgagtcctggctttactccctgttaggggtgagactgatcacaacattacacctctctgagcctcagttgcctcacttgaaaaatggaaataataataacatctgccttataggatttttctgaggattcaaaggctgagtacatggaaaatacataaaatagtgcctggcacatggaa

SEQ ID NO: 800340 - DNA, 658 bp, Homo sapiens
gttttagtcaatccaaaatacctaacgttaagtgttcttcattgttaaaatttactattcagaatgcaccacagccaggccaggtgcagtggctcacctgtgcctgtaatcccagcactatgggaggccaaggagggcagatcatctgaggtcaggagtttgagaccagcctaggcaaaatggcgaaatctcatctctacaaaagcttagctgggcatgatggcacgtgcctgtagtcccagctactggagagcctgaggtggaaggatcacctaagcctgggaggtcgaggctgcagtgagccgtgatggcgccactgcactccagcctgggttacaaagtgagaccctgyctcaaaaataaaaataaaaataaaaaataaatagaatacaccactactaatcctgcccaaccagaatttccactcaacaccaataaaaatttgaatatcaattcccaacctgaagtcccttaacccttccagaagggaagggaatcaatacttggtaagcatttaatacagatccctaaaaaagcataataggtgtcctggaaatatgcccaacatttcaaaaaagcggaatacaaattacacatatgctgaagtaaaattccgcaggctattaataaatgcagactggtaaatctttcaaggtat

SEQ ID NO: 800341 - DNA, 628 bp, Homo sapiens
gcatgagaggttactgtagaggttatgcacacaactagtaaagcatgaacttcagaacctctaaagccactccccaatctgtggttctgtgactcgggtacttcccttgagctcatgtgaataaaacattcaattttgtttcatttatgggtcttgttatcatgttagccaaaagatatatctttttttaaaaaaatctaaaaagtagcccaatagctggctagttcttagcttagtccatagagaacacctaaatcccaagtaaaacagggagcagcaggacattctgcaggccggaagaggagatcgtttcaacactagcatggtcatcagcattaaagagtcagttggggtttgactgtagagcttctagtgaagctcacaatggaggaagcctaaaccattctgaaccagggacgaatgcctaatattctagcttcactgcaacccctgaagtcttcctctcaggcyacatttccaacaggcaatgaagaatcaattatctgaatattctagtattgtctagttagacgaaagtctgattgatcagcattttctactcaggaaggcacgggcttccaacatcgcagctgtccctccataattccattattttaggccgctcatt

SEQ ID NO: 800342 - DNA, 623 bp, Homo sapiens
atctgctttctggaccagtatttttataaaagtgttctttgtagctgtgattaatcaaactcttcaaagattctttctgtaatttagacataattctttcttattgattaagaactataccacattataccaataaaaagcgtgaatatgcccatgaaaattattacataattatttatactaatagagaaacctaattttttgttggctaacaaaaagttgctgaattttcagcatcacagtttcaaaagatttccgttaaattgtgtgaagttgagaaatgtaagcaattgaattgtgatgtagatcgaaggactttgctggtgctatataagctgtattctagttgcataaacatgttaattagtgaaatatacttcttatcaaaaacttaataaaatagaayattaaaaggatgcagaattttctaaaaatttaattgccatgcaacacttttatagccactgtctctaatgactatcatttcctcttccaactacatctcacttcacacaaattctgtgtctgaaaagttgcctttgtgttttattgttataaattgaatcatataggtgcactagagaaatttgttcttttaaagaatctgtgggctgaggtgggca

SEQ ID NO: 800343 - DNA, 647 bp, Homo sapiens
aattcttgaaatttcacacaggaactactcaccatcttcctgctatcaaatatatgaatatgcctacatctttatcaaccatgtcctccttctcacttgttaaaatagaaattctatctgttctttaaatccagtctcttcctgggtgcttacgattcgatttgcctctattttccaggaatttgacagagccccttctctctattttgtatttgacccctcctttcaatttttcttttttatttattacttatyaattttttttttgagatggagtctcgctctgttgcccaggctggagtgcaatggtgcaatctcagctcactggaacctctgcctcctgggttcaagcaattctcccgccgcagcctcccgagttgctgggattacagccacccgccatcatgtctggctaatttttgtatttttgtagagctggggtttcaccatgttggccaggctggtcttgatctcttgacctcaggtgatccacccgcctcagcctcccaaagtgttgggattacagttgtgagctaccacgccaagcctcaatttttctttttttaatagactttattttttagagcagttttaaggtcacagaaaatttgaatggaagccacagagaatttttatgaaccctgttc

SEQ ID NO: 800344 - DNA, 508 bp, Homo sapiens
tagcaggtgtatttggattttggaggcaacacattcctcatttgggtgtgttagtctggcccatttatcgagtgacccaaaaggctgccagtttttagtgggctctagaacaggagaaggcctgcaacaggtccaagctgctgtgcgagctactgtgccacttgggccacatgacccagcagatccaatggtgcttgagatgtcagtkgcagacagggatgctgtttggagcctttggcaggctcccatgggtgaatcacagcagaggcctctaggaacaaggccctgccatcttctgcagatgactactctccttttgagagacagctcttggcctgttacagggctttggtggaaactgaatgtttgactatgagtcatcaagtcaccatgcgacctgaactgcctatcaagaactgggtgctttctgacccatctagccatagagcaggtcgtgtacagcagtattccatcatcaaattgaagtggtatatatgtgattggattt

SEQ ID NO: 800345 - DNA, 457 bp, Homo sapiens
ggttgcagtgagccgagatcatgccactgcactctagcctgggtgacagagcaagactccatctcaattaaaaaaaaaaaaatagacctcagacctcatgtattcctcctcaggctgctaggaggatgtaaaaaaagcctctaacaagagtgctttcacttttgsaattgagaaaggtaaatttcccaaggactgtaaagctactcttgtctcctatattgatatttttctctgaaaaaataaatgtctttttgcattatttaaatagcacataattaaatactaagggctctctgttacttgtacccaaagcaatgcccggtgaggtatggaggcccagagggctgtagagaagtatcgcctctcagagcaggagagaggaaaaacaatagacagagacagacagggacccagggcaggaggaagagaaaggaagtgtttaacattcagaatttgt

SEQ ID NO: 800346 - DNA, 498 bp, Homo sapiens
tttgcttatattctgaggtttgaaatgcgtaagcacttctggttttaaatagaggagggtcatgatctgacctaagctttaaaaggttttctgcgtttgatgtgttaagaataaactattgtgagtcaggggtatagggacaaaactcttgtactatccaacaaaacacrgtggctcagtagtgcagaagccatggcataatcatagtcgacatattctgaagctatagaaataggatttctagcagaagagatgtgaaatgtgagagaaagagaagaataaaacatgacaccaaagttttcggccttgagcaaatgaaagagcgaaattctaccaacagagatgagaaggcaacatatggaatcattttgtgggagaaaatatagattttatttgtatgcatattgaggataagacatgtgttacgagtataaatggaaatgaagataggtatttggaagtctgcagtttgagaaagaatcctggactagaaataga

SEQ ID NO: 800347 - DNA, 498 bp, Homo sapiens
tttgcttatattctgaggtttgaaatgcgtaagcacttctggttttaaatagaggagggtcatgatctgacctaagctttaaaaggttttctgcgtttgatgtgttaagaataaactattgtgagtcaggggtatagggacaaaactcttgtactatccaacaaaacacagtggctcagtagtgcagaagccrtggcataatcatagtcgacatattctgaagctatagaaataggatttctagcagaagagatgtgaaatgtgagagaaagagaagaataaaacatgacaccaaagttttcggccttgagcaaatgaaagagcgaaattctaccaacagagatgagaaggcaacatatggaatcattttgtgggagaaaatatagattttatttgtatgcatattgaggataagacatgtgttacgagtataaatggaaatgaagataggtatttggaagtctgcagtttgagaaagaatcctggactagaaataga

SEQ ID NO: 800348 - DNA, 627 bp, Homo sapiens
gatccatgcaataatatggatgaatttcaaatgccttctactaagtagaggctaaagtgactacagactatataattacatttatatgatattcttgaaaaggcaaaagcataagaacacatgaaaagataagtggtttctcaggacttggattggaggaaagtatatactaaaaaggagcacaaggaactttttcagttgatggaaatgttttgtttggaatgtggtagtaattatatgattggattcttttgtcaaaactcagagctgtaaactaaaaggatggagtttacagtgattaaatattacctcaataaatctgatttagaagaaaaagctatgttagcttcaacaaagaatgtaatacaggaattgaaggaaagaatagatactgaccaaaatcttgaactggaatattagatcaaggattsctcttgaaggaatcagaaaataataaatagaaaaatatgaagagtaagagacatgaaatacagaatcaaaagtgacaaaatcagtattgtgagagtcccatgtgggaataaatatttgtaaaaataatgatcaaaagttaccgaaaatgtaaggggaagaaaagattgaacacttcatgtgaaaggtcatagaagg

SEQ ID NO: 800349 - DNA, 626 bp, Homo sapiens
ctgttttaaatgagatcatttcagacatgttatttatatctctctgtaatgtaaggaatacacatctccaccgcccccccatccctatttttttggtccttggggctctgaaacgttttagaaaatgtattagtcttcattctcactttatttgcttgtgagagtggaaacacttctcctttctctcttctggtgttcactagagcagctgctcaaaatgagtcagctttyccagtcagctatggttcctgcctcatggagggtaggaaaggacataccatctctgtaataacatgcccaaagttgcctgcttctggtgagaaacaaggagccctgtccttgtctggaccatcatgctttcctcaacccaggtgcatccgtctcatgtagtgtgtttcatctcattttcctcattctgttctgattgaacatcaacatttttgaatgggttgttatcatcatctctgtgagcaaatgggatgtgaataccctgaggattcctactcatgaatacaaatgatttttttattctacaaaaggaagaaatatgattgctgaatattaatagccctctgagaattagaatttaagattacacaagatctgtttaatgctcttattatcca

SEQ ID NO: 800350 - DNA, 626 bp, Homo sapiens
ctgttttaaatgagatcatttcagacatgttatttatatctctctgtaatgtaaggaatacacatctccaccgcccccccatccctatttttttggtccttggggctctgaaacgttttagaaaatgtattagtcttcattctcactttatttgcttgtgagagtggaaacacttctcctttctctcttctggtgttcactagagcagctgctcaaaatgagtcagctttcccagtcagctatggttcctgcctcatggagggtaggaaaggacataccatctctgtaataacatgcccaaagttgcctgcttctggtgagaaacaaggagccctgtccttgtctggaccatcatgctttcctcaayccaggtgcatccgtctcatgtagtgtgtttcatctcattttcctcattctgttctgattgaacatcaacatttttgaatgggttgttatcatcatctctgtgagcaaatgggatgtgaataccctgaggattcctactcatgaatacaaatgatttttttattctacaaaaggaagaaatatgattgctgaatattaatagccctctgagaattagaatttaagattacacaagatctgtttaatgctcttattatcca

SEQ ID NO: 800351 - DNA, 604 bp, Homo sapiens
cagtggagtattaaagtcttcccactgtcattgtgtacttatctaagtctcttcataggtctctaagaacttgtgttatgaatgtgagtgctcctgtgttaggtgtatacatatttatgatagttaggtcttcttattgaatggagccctttaccaytatgtaatgcccttccttatgttttttgatttttgttggtttaaagtctgttctgtctgaaattaaagtaacaatctctgctgtttttctgttctccatttgcttggtagatttttctccatcccttcactttcagcctatgggtgtcagtgtatatgagagagactgttgaagacagcatacccatgggtcttgtttctctattcatcttgccactctgtgatttttaattggggcatttagcccatttacattgaaggttagtgttaatatatgtggatttgatcctattatgtcgttagttggttattatgcagatttgtatgggaggttgctttatagtgtcactggtctctgcatttcagtgtatttttgtagtggctggtaatagtctttcctttctatgtttagcattcccttcaagacttcttgtaaggtaggtatgga

SEQ ID NO: 800352 - DNA, 678 bp, Homo sapiens
attgcatgaggtgataaatatgctagcttgattgtggtgatcacttcacaatacatacatgtatcaaaacgtcaagttttttacctaaaatatatacaatttttaattgtcaattatacctcaataaagttagagaataaaaaaagtaaaacacagaaattttattctgaatttcctctttgataaagtttcatgaaaaagcaaaattttcaatttacaaatgtcaggaactttttgttttctaactttgttattaatttataaattttttgtgatcagataaatttgtgtatattgtttccatcttggcaattaataggttttcttttttagcttaatgtatagtcagtttttatgagagttccacagatattaaaaagagtaatattttgttttgtttgcaggatagagtctgaatatatataaattagatttactcgagatgatctacttttgcctattttttatytgatctatgataaactgaacaaacaagttaacaaaatattttaccaataatatattttcactttttccagatcttatctcctgcttttgccttatgaagatagaggttatattttggtttttcatattctaatgactgtattttccttgtaaatgccatcttttagcattataagggggtcttatgtgtcttgcttaaggaacttttag

SEQ ID NO: 800353 - DNA, 599 bp, Homo sapiens
ttgaccaatgatgttattaattagtgtcttctcatttcagcttgaagaactccctttatcattttttgtaagtcaagtctagtggtgatgaactccttcagcttttgtttgtctggaaaaatgtttatttttccttcatttctgaaggacagctttgctagataaagtatttctggttggcatttttttttcttttagcactttgactatatcatcccactctttcctggtctgctggggtttctgctaagaaatcttctgacagtctaatgaaggtctccttgcatgtgataggtctcttttcatactactttcaaaatccatcatctttgctttttgacatttgattataatatgtcttggtgaagttttttttggcttgaacctgtttgggaacctttgggcctyatgtatctggatgtccatatttcactgcacttggaaaaattttagctatgatttctttaaataaacttattttccttcctctctttattctcatttggagactcctataatgcatatattcttttgtttggtggtgacttgtaaatcccataagctttctttgttcaattcttttttcttcttttctcctt

SEQ ID NO: 800354 - DNA, 475 bp, Homo sapiens
cataagctttctttgttcaattcttttttcttcttttctcctttgactgcataatttcaagtgacctgtctttgagtccacaaattctgtcttttgtttgatcaagtctgttgttgcctctctattgcattttttatttcattcattgtrtccaagagtttgtttagttaattatttctgtttctttgttaaacttcttggctgggtgtggtggctcatgcctgtaatcccagcactttgggaggccaaggcgggtggatcacttgaggtcaggagtttgcgaccagtctgaccaacatggtgaaaccctgtctctactaaaaatacaaaaattagccaagcgtggtggtgggcacctgtaatcccagctacttgggaggctgaggcaggagaatcgcttgaacctgggaggaggaggttgcagtgagctgagatcatgctactgcattccagcctgggttacagagtgagactc

SEQ ID NO: 800355 - DNA, 490 bp, Homo sapiens
aaatgcccattttaaatgccactacagtttataaccaacttttttatatttaaatgttcttttatttagtgaatattcataagatggatacaattttataccatatgccttttccacattgctaacattgtttttcattgagttcttgtatttaacaaagcaatgcatatagatagttttaacaggttaatagyacagcaagcttgataaagaaaaacaagtattctctcccatctccttgctcctaatttcccactctacagagacaatcactttcaagtcctttagtatttacccccatatcagtacattacatgcttaactggatgtatatttatttactttttttttttttttttgagacacagtcttactcttgtcacccaggttggagtgcagtgtcacaatcttggctcactgcaacctccacctttcaggttccagtgattctcctgcctcagcctcccaagtagctgggattacaggcacc

SEQ ID NO: 800356 - DNA, 578 bp, Homo sapiens
tgagaaaacccggaatagtagtatttctcatctgcgacccttgatggaattgtattttaagtgattgcactggctgcttacaatgccaagacggaacatacttcagaattagctttttcctttgattatactttgttgggttaaaaaataaaaaagtggacttgcaaatatagcagttgtgactacagcattttaagcatttgtattgaagatgtcccaaatttctaaatgaaagttactaataaaaaatattcatgtatattttcctgttcactttcctctmctaacctcattttgtgtctttagaactctagcctgaaacattggttcagctagtctgtcttgaatatgttaaaatgacattggttgttggctagaagctcaaggctgcgctgcctcccacagacagcagtgctgtgatctctgcagctcacagagcgagcgggagggggccgcgatcatctgcttatcattattgatgtggcttcggcgacctctgctgtgtttctgtccagtgtgattctggatgcaattcagaaaacacctgctgaaatcctggcaagagatccaagtgcgtg

SEQ ID NO: 800357 - DNA, 590 bp, Homo sapiens
agataatagactacttaataggcttgaacattgtgaaaggagatttacacaattgggggacatttgggaattaaattcatgatggtcatatagaaaaataaatgaatcaaacaaaagttaattgttaattttagggaaagcccaacattgcacagaaaaaaaagtaattgtagtatcatgttgtaccacatggctaggctgtgaatagtgttcatatggtcataattatgtaaactccagctaatgatctacccaaaatatgatctaaccctgctgagaggagggggaaggtgggaaatgtatgaagastgaaattctcatattccaaagacagaagaaaataggtattttctaaatctgaaaaaaaccaattagtaacaaaataggcatacaatgtaaagatatttaggtaagcattttaaaaaatccgttgagaaagttgaatgcaattgcctccagggagcagaaaattgtggtgagtgttgggtagaaactgatgttttttatgtcaagacgggatgctattagctactttatgtgtttgtgaaacttggataaaataacaactaagttaaaaaataagtaacaaa

SEQ ID NO: 800358 - DNA, 590 bp, Homo sapiens
agataatagactacttaataggcttgaacattgtgaaaggagatttacacaattgggggacatttgggaattaaattcatgatggtcatatagaaaaataaatgaatcaaacaaaagttaattgttaattttagggaaagcccaacattgcacagaaaaaaaagtaattgtagtatcatgttgtaccacatggctaggctgtgaatagtgttcatatggtcataattatgtaaactccagctaatgatctacccaaaatatgatctaaccctgctgagaggagggggaaggtgggaaatgtatgaagagtgaaattctcatattccaaagacagaagaaaataggtattttctaaatctgaaaaaaaccaattagtaacaaaatargcatacaatgtaaagatatttaggtaagcattttaaaaaatccgttgagaaagttgaatgcaattgcctccagggagcagaaaattgtggtgagtgttgggtagaaactgatgttttttatgtcaagacgggatgctattagctactttatgtgtttgtgaaacttggataaaataacaactaagttaaaaaataagtaacaaa

SEQ ID NO: 800359 - DNA, 599 bp, Homo sapiens
ccacataaatttcttcttttgagaagtgtctgttcatatccttcgcccacttttggatgggtttgtttgtttgtttttattgtaaatttgtttaagttccttatagattctggatattagcccttgtgagatgcacagattgcaaaaattttctcccattctgtaggttgcctgataactccgatgatagtttcttttgctgtgcagaagctctttagtttaattagatctcatttgtcagttttgacttttgttatcattgcttttggtgttttagtcatgacrtctttgcccatgcctgtctcctgaatggtattgcttaggttttcttctaggtttttttatggttttaggtcttatgtttaagtctttaatccatcctgagttaatttttgtataagatgtaaggaaggggtccagtttcagttttctgcatatggctagccagttttcccaacaccaattgttaagtagggaatcctttccccatttcttgtttttgtcaggtttgtcaaagatcagatggttgtatatgtgtgatgttgtttctgaggcctccgttgtgttcctgtggtctatataactgttttggtatcaga

SEQ ID NO: 800360 - DNA, 599 bp, Homo sapiens
ccacataaatttcttcttttgagaagtgtctgttcatatccttcgcccacttttggatgggtttgtttgtttgtttttattgtaaatttgtttaagttccttatagattctggatattagcccttgtgagatgcacagattgcaaaaattttctcccattctgtaggttgcctgataactccgatgatagtttcttttgctgtgcagaagctctttagtttaattagatctcatttgtcagttttgacttttgttatcattgcttttggtgttttagtcatgacatctttgcccatgcctgtctcctgaatggtattgcttaggttttcttctaggtttttttatggttttaggtcttatgtttaagtctttaatccatcctgagttaatttttgtataagatgtaaggaaggggtccagtttcagytttctgcatatggctagccagttttcccaacaccaattgttaagtagggaatcctttccccatttcttgtttttgtcaggtttgtcaaagatcagatggttgtatatgtgtgatgttgtttctgaggcctccgttgtgttcctgtggtctatataactgttttggtatcaga

SEQ ID NO: 800361 - DNA, 632 bp, Homo sapiens
tgtatgactgagttcttttcagaaacctagacttaaagcttttcagaaaggaaaatggtaaaagacttgcagcttggagccgttactcaattggtgatgatgttacagcctagacttttgtccttgatctatttcctggaaagatttttgattttgctttttgttgtttagattttttaattaaagatgatgatgatgatgatgatgatgacttggtttaatatagcgaagataaaaaaatttcaactcacttcccaattctaattgattattagtagcttcctgaaaagctgccttgcactgtgtccaagcttatcagaaagaccatgctggattcatcagaagtgcctaggggaggggagaagcagtatacaccacattgcyccctccttggcctaattgcttgatacaatagaacttccctaagtgttttagaataaaggcatcatccagaggtagaaacaggtaattacaaccataaaatttccaaattaatgcttaggcagtttaggttggtggagtccacatttttgttggtgggtgggaggagcagggaagaattgtatttttgtaactaatataaattgttagtccctgagatttaaaaaatcatcattatataacatcctaga

SEQ ID NO: 800362 - DNA, 643 bp, Homo sapiens
aacagtattcataaatatgagagggaacaatgcaatgcaaattgatgatcagaaaaataatgttgtgaataatgcgcccacaaagtgaaaaacaaatatgcagtactctgcaattgctacactccctatgcctgattttgcatgctgtttggctacctttgaaaattttgagggacaaaactaagaacaaaagatttagaacactccaacaagcaaatccttgcctggcttgtcaaattgtacatacttactttacaatttatcacagctggtattcctgacctgactccaggctaagagattcaagagcagcatgctcctataccttagcatactcacctatagagatattttgatagcttctttggaaaaatgtatagtgctcaaagacaaaataactagaaggttttaaccttgtaagtgcttaaacgtaatttattttctttactttctttttattttgatcatttgttttgtacmacatggggttttatgctttgctcagttagattataaactcctgtagggtatagatttaatttacagtgtctggcagagtatcagctgccaagtgttactatatgtaattatggaatgttaaagatttaagaagtatgactcattcatatatggaaaaattaaa

SEQ ID NO: 800363 - DNA, 483 bp, Homo sapiens
tttttaaatgagccagatgtggtagtgtgtgcctgtaatcccagctacttgggaagctgaagaaggaggatctctcgagcccaggagttcgagattgcagtgagctattatcacaccactgcaccaaagcatgggtgacagagcaagactatgtctctaaaaaaaaatcaatcaatcaaaaaatayatatgttaggtgaatagtatgtggcaagcactttcctaatttccagttttgtacaagagtaaaccttcctagtttaatataaagtgaactaagcaggcaaaattattggcatgtgtggagttcactttctgctaaaaaaattcattaaaaaacacaaaatagctaaaaagaaacaaagtatgggaaagggggatattgctcatggatgcaattttaacagggtagctaggaaaagcctttcagcaaagagaacattttaataaagacctgtaggaagtgatagagaaagctgtgcaa

SEQ ID NO: 800364 - DNA, 597 bp, Homo sapiens
taatttgatactgatctacacgcatcatatcaagttgggacgggcagccatctctagagctgttttcaaatggggcttttcagttgcaaatttcaactgaaatcatcttgatttgctatttgagaattaatttttataatttcaaggggcttccttgcagagggaatgctgcttctctcaccaaacagacttctgtgctcatgagaccaggatggggcctaccccagccttgcctcaccccagacccgaagcctgctttatcagcattggtaggaatccagtaactaatccatctactcacatatccatccacccacatccatccatccatccatccatccatccaaccatccaaccttccaacyatctatcctccctccctccctcccacccttccacatattcacccatccacccaccaacccatccatccatccatccatctttacccatccatctgcacatccactcaccattccgcaatacttattgaatttctctgttgaatgctggttccccaaataacatcaacacaagctgttgataacacaaagctgtttattgctcactgtggtaagaaagaacgcggcctctaca

SEQ ID NO: 800365 - DNA, 559 bp, Homo sapiens
cctcagctgaagttcgctcgatttggctgactttttaccattccttttacatcctacttctcctgtttaccttttggcccaacccatccctttatcagccaaagctgtgccaacgctctcctcctccctcctacccctctaagggttcttcctcgcagccagaggaagcacactyatccctggtttccaggttgaagaaattcagctgcacttccattcctggtcctgagcatggtgagggacaggacaagtcgggaatacttgtcagctcccttctagggcagagaatcagtgatgttattatgagaaaacagaggggtaggagcagacttgaaggatgcaggatggtgagctgagggagggcaggcggagtgtgagccactaggagacaaccagggtgatgacgaagaagaggatggcagtgacagccactaatctttgttgagaactgaccaagggactctccaaagtgctttctattgctctgtttgatccacaaaacaactggctgcggttgtgttttctctcctattttacaggtgaagacactaaggctcag

SEQ ID NO: 800366 - DNA, 614 bp, Homo sapiens
ttaaaaagatttatcagccccatttgaagattggattttgggaaaacaggctgcagctagggcagggaaaccagttagtagactactcaagcactccaagtacaatgttctatgtgggaagagttggggggaaagtgatctaatttttttaaaggggggtggttagagaaggtccctgaggctgaatttgcatagcatgcatagtacatgtacttagtttacatgtgtatttataatagttttgaggggagaactaattctcttctaccaacatccctcccaacctctgktcaccctttgatactacaactgtccaggcaaattatgagaacttaaactaaaacagtagcagtgggagaaaggagagagatttttagacagaattacaagacacggtaagtgatcagaattggaggatctaagagaagaaagagttaatcttcagatttctaaattttgagagtggtcgaaagttgtattagtttcctgttgctgctgcaacaaattaccacaaacttagtggcttaaaacaacacaaatttatagtttagttcttatagttctggagttcaaaagtccaaaatgagtcttatagagctaaatcaaattgttag

SEQ ID NO: 800367 - DNA, 656 bp, Homo sapiens
catggcttgatagttcatttccttttagcatgttttagcaccattgtttggatgcaccactgtttgtttattttagatcttttttattattttaatatatgttaaatctctctgataaatttctgaattgcttttctgcattatcttggagatcactgagtttccttaaaactgctattttgaattcttggccagagagttaacatatcacagtctcattggggtcagtcactggttccttgctttctccatatgaggaggtcatagtttcccatttgctgttgtttcttatggacrtacataaatatgtctttctattgaataatttgttctttatttcagtcctctgtctggcttgtttaggtttttattggatatgtttgcttagagattctttgtaatttatctgttggttttctttcttttcccctaggttactgccttcttggcactagatgttgccttaagcccaggtttgtcttgattgtagtaaacaatcagagtgccactcatctcaaatggtgggtgtctcagaggggatatcccagtagtgtgggaaggctggctagggttcatgcccaagggatgtatggaaaaaagccatctacagtgtggtgctgctgaacagccactctgatttggcttctcctttggct

SEQ ID NO: 800368 - DNA, 593 bp, Homo sapiens
atttatctgttggttttctttcttttcccctaggttactgccttcttggcactagatgttgccttaagcccaggtttgtcttgattgtagtaaacaatcagagtgccactcatctcaaatggtgggtgtctcagaggggatatcccagtagtgtgggaaggctggctagggttcatgcccaagggatgtatggaaaaaagccatctacagtgtggtgctgctgaacagccactctgatttggcttctcctttggctgagttacagagcagagtttccaaggctggggatggtagtcctatcttccccctttgtcttcggcctctgccgcctttgtcctcagggatatttcttggggatattggcctttcccctttgtcctcggggatattgctcctttcaagaactcctgatgcctcctgtgggttgaggcagggacaggtctctttccagaaaacccaagatggtagggaagctggttgttaacctcaatctcactttccagtgtagaaactgtgagttggggaaaatttttcayaatctgtgccagacagattgtggagagcaatgtctcagatacggaagtttgattctc

SEQ ID NO: 800369 - DNA, 664 bp, Homo sapiens
gaagcccagaagtttacctgtttttatgggcagtaagaagaaagatgacttaatggtgccaattacacagctacctgtccactgatcaggcagcttagcataagctctgtgtccacatatccagtataacctggcgggggccgtccagtcccagtggaattctgggtgggcccaaacagtctgcaactttggaaatttactgaatggatttctttctgtgtaattggaactccaccatgtaactgtttttgtggtaccattttacagcttttgcccaagacaactaagccgccctacaggatgagtgaatccttttccttctctagctatgcaatactgtccaatawttgagacttttagaacccaaaaattgtcagggtggttctttggggctaagaattcatcaggaactgggtctgtaggaactaagtgtcggacttcccatggccattgatctcctgttacggttccaacacaaatataacatgaggtgacttgtagagactgggctacatgtttggctaattgcaaaaataaatttttagtttttcctggaatctcaagtactggcacatttagttcatcatagaaagtctgaaatactgtttctggagagcgtttttgaacctctctttttattaggatgcttacactaggatctagt

SEQ ID NO: 800370 - DNA, 664 bp, Homo sapiens
gaagcccagaagtttacctgtttttatgggcagtaagaagaaagatgacttaatggtgccaattacacagctacctgtccactgatcaggcagcttagcataagctctgtgtccacatatccagtataacctggcgggggccgtccagtcccagtggaattctgggtgggcccaaacagtctgcaactttggaaatttactgaatggatttctttctgtgtaattggaactccaccatgtaactgtttttgtggtaccattttacagcttttgcccaagacaactaagccgccctacaggatgagtgaatccttttccttctctagctatgcaatactgtccaataattgagacttttagaacccaaaaattgtcagggtggttctttggggctaagaattcatcaggaactgggtctgtaggaactaagtgtcggacttcccatggccattgatctcctgttacggttccaacacaaayataacatgaggtgacttgtagagactgggctacatgtttggctaattgcaaaaataaatttttagtttttcctggaatctcaagtactggcacatttagttcatcatagaaagtctgaaatactgtttctggagagcgtttttgaacctctctttttattaggatgcttacactaggatctagt

SEQ ID NO: 800371 - DNA, 645 bp, Homo sapiens
agtcaacccttgtctcaggctgaagtgaggtaccccccaaaggcaacttcatcttcagtcatcattcagtcctacacacagttgtccccacagaagacatttgttaaattaacttcttccagattttatagttctgtgttcagaatgtttctgtacttggccaggcgtggtggctcatgcctgtaatcccagcactttgggaggccaaggcaggtggatcacctgagatcaggagttcgagaccagcctggccaacatggcaaaaccctgtctctactaaaaatacaaaacttagccaggcatggtggtggcaggcgcctgtaatcccagctactcaggaggctgaggcagggagattgcttgaactggaagtttcscagaggttgtagtgagctgagattgcgccactgcactccagcctgggtgacagagcgagactctgtctcaaaaaaaaacaaaacaacagcaacaacaacaacaaaacacctttctgcattttcccactcctacaagtactttaactttcaaggctgttcaagtgtgggccagtcctttcttttaagtcctgatttctttcccttctctgacattaagaccaccagtgtttgctcgtgccatttccttcttatcgagagtctttcatcc

SEQ ID NO: 800372 - DNA, 646 bp, Homo sapiens
ggtgaggctgagacatcagcctacaaacgggtgaaagagcccttcacgctcagaataagcaagatacgcccatgaaaggaagaagtgggacaagaatctagaagtttagtcttctaggcacagaccacaatatagctctaaagaagcaagcgggccctaaattatcttagggaatgtggccaagcaaaggagagatgtgtatatgtggggaccttctttcagactcctcaccttggggagcagcatggaagccctggaccaaagcaggcacattatctgtgaagaaccgctggcggaacatgatccgcacttcrgcatggccagcacgagtcagcacatcagtgcagtcagacatgagcagagagaagccatcagctgctgctggacctaattctgggtcactcaggaggcccatgagctggagaaaaaagagcctttgaggtacatcagggaagaagaatcttaagtgccaaagataaggatggggccgggtgtggtggctcatgcctgtaatcctagcactttgggaggccaaggcaggtggactgcttgagtctaggagtctgggcaacatggccaaacccagttcttacaaaaaatacaaacattagttgggtgtggtggggtgcccctgtagtcccagcta

SEQ ID NO: 800373 - DNA, 576 bp, Homo sapiens
aaaatatatagaatccagccaggtacagtgggtctcgcctgtaatcccagcactttggaaggccaaggagggaggatcgcttgaccccaggaattcgagaccagcctcagcatggtgaaacccggtgttactaaaaaatacaaaaattagctgagcaaggtggcatgtatctgtagtcccagctacttaggaagctgaggtgggagaatagattgagcccaggaggtcaagactgcagtgagctataactgtaccactgcayttcagcctgggcaacagaacgagaccctgtctcaaaaaaatacacacacacgtatgtgtgtgtgtgtatatatacataaatacacacacacatatatatatacacatatatacacacacacatatacacacgtgtgtgtgtgtatatatacacatatatataaatatacatagttgtgtgtacatatgtgtgtacatatataagcatatagaatcctgtacatctcaaagaatatacattattagaataaacagaagatttgataaccacatactataaaataatgctccataaatttttttaaaatgtagggg

SEQ ID NO: 800374 - DNA, 438 bp, Homo sapiens
aagtcagtgccagaagagctccagaatggtttctagtggtggtatcctaaacacacacacttccagggggcagttttgatgcagaaccctcatttggactttttctttttttttttttttttttttaagcaaacctctctttgctttataccagattgcatagacagccttttaraaatcactcagaaaatgtgccttcctccagtcactgtagttcaccataataatgtgaaatgtaggacctgtggattgactttatgagtccaggacctatgttagcactgcattcctttgagtctggtcatcttcaagccaaagccagtaacagtgcaggcttgctcacccacctgagcctgcagctggtcctgagctttctcccaacaatcccctcagatctgtgtctgaaaatgcatctgtaacagtgatggcattccctca

SEQ ID NO: 800375 - DNA, 583 bp, Homo sapiens
gaaacatcttcttgcacaaatattgcagtggtgctgactgagtccctccctttcctctctgggccccacattctattcaggtgcgtggagaatcctgggaacctgcacacaggtgctgggcaacacctggcccgagaaacgtttcatttcacattgatatgtaacatggcctggctttaccatgtcaaattccatttagttttgtttaaagataaaatgyaaacatgcccagaagagttctcttttttcccttattggaaacagatgaaaggacttgatggcgtggggggaggcaagggaggcatcttttgtgattcaattatatagatgcagtgacaataggcttttctctagaggagtacattgtgtgcacaggcatttacttagtagtaaatgaatttaattaaattggactgcttgagctcccagagtttcaagagaaaatttgttggctcctttgcttcaaaattcttctgcagcaacattttggaaaaagcattttacttaagtagagtgttatgggataaactgcatctccccacaacaccccaaaattcatatgttgaagtcctaatctccaata

SEQ ID NO: 800376 - DNA, 685 bp, Homo sapiens; identical to SEQ ID NO: 792414

SEQ ID NO: 800377 - DNA, 685 bp, Homo sapiens; identical to SEQ ID NO: 792415

SEQ ID NO: 800378 - DNA, 607 bp, Homo sapiens; identical to SEQ ID NO: 792416

SEQ ID NO: 800379 - DNA, 646 bp, Homo sapiens
gtgcttgagattcctgaccctacccacgaagtcacccccagctttctggtccttccaattgaggcccccaaaatgattgacagagccaccttatcgtgttctttctaaagtgcccacagaatcaatgagtataataaaaataaatttctaagagcctaagttttgttggacttttttacacagatatagagaattgacatgcttatcatctatatggcaatgtccctgactctcccttttgagctcagattcctcagaggtctggggcctaggcccatggggatcaacctcaaggtttctaagttttaataattccaaactttttcttttatttccctagccctaggaatgktagctgcattttgcaaatgcaacatttgtggtacctcagagttcttttattgccatttcagttacctagttaataactttttacttatttgccagttgtttgtattcgattatctctatttaagtagatgttagtttctgtcccctgacttgactttgactgatactaaaaatagataccatttattattctgggtaaagaatatcaatgttattaatttcattaagtaaaaaaatctcagacattaaagaagttgtaaatgcaatgcaaatacactattttattttcctaaac

SEQ ID NO: 800380 - DNA, 574 bp, Homo sapiens
tgattaacacaaaatacacaaacccaataagtactgtgttataaggcacgtttgtaaacgtgttaatagtcttaaaagtaagaaacagtaacattttagatggcaacagcacaatatcctctgaccattgcatctcaaatgttgactattacttttaagttcttagtagcaaaacagagcttgaacggcattcatgtgacagagcattaggcaaacgtgacacgggagcaaatgtcacatgcacagcacattgtgaggcagccctgcccaactacaccaacacggagaatctcaaaaygcacctgttctcagatgcaaccaaaatgtatttactttgaatttacttcaaagtcaacagagcagtcaaatcaacactccaaagccaccatcccatagcaaaaataactcttctttattaacagtgttttccacaaccaaaaacaagtcaggtttttaaaaacttggccaattgcatgttggtgtaatctaatattatgcaatttgtaggaagcagtaaggcttaaatgaaattcctcatttcttactgttacccagtggaaacaagtgtgtgttt

SEQ ID NO: 800381 - DNA, 489 bp, Homo sapiens
aaggatacacaattaatttcatgtatgatgaatggagttaactggcattgtttccactagaaattttactacttcatcagtgatctgaatagctaagaatctcctttgatccaataaaaaaagtagggatacatacacacacacacgctctcacttttacacacacacacatcccccaaattcattaggttgtargtcccaacctccactgatctggtttggctccatgtccccactcaaatctcatcttgaattgtaattctagcgtgttgagggagggacctgtaatccccatgtgttgagggagggagatgattggatcatgatggtggttcccccatgctgttcttgtgatagtgagtgagttctcacgagatctgatggttttataagtattggacagttcctccttcacacactctctctcctgccaccttgtgaagaaagtgtctgcttctctttccaccataattgtaaatttcctgaggc

SEQ ID NO: 800382 - DNA, 489 bp, Homo sapiens
aaggatacacaattaatttcatgtatgatgaatggagttaactggcattgtttccactagaaattttactacttcatcagtgatctgaatagctaagaatctcctttgatccaataaaaaaagtagggatacatacacacacacacgctctcacttttacacacacacacatcccccaaattcattaggttgtaagtcccaacctccactgatctggtttggctccatgtccccactcaaatctcatcttgaattgtaattcyagcgtgttgagggagggacctgtaatccccatgtgttgagggagggagatgattggatcatgatggtggttcccccatgctgttcttgtgatagtgagtgagttctcacgagatctgatggttttataagtattggacagttcctccttcacacactctctctcctgccaccttgtgaagaaagtgtctgcttctctttccaccataattgtaaatttcctgaggc

SEQ ID NO: 800383 - DNA, 551 bp, Homo sapiens
gaagttataattttgaagatttgacttttttcaagttgttagggtgagagcaatgttctctgttctcttgcagctgaatgaattttaagcagaagccaggattaaatcttaagtcctcattgtgctgtaatctttcatgtttctatgatccaggcagaaaatgggaaaaaggcaagagttccagaaatttacgggaataagcagtatyttacccaaacaaagggatatgctcatttattttattaatgatgcattaataactatgtcctatgctttgccacatgttcaaaaatttctccttagctagccttttcatgtggaattaatcacaaacctgaagccaaagccgcttcagtttggtcccaaaacactttactcaacatctcccatatgctctgctccaccttgggcttcagccacatgagttggcaggcctgggaggggagtcagatttcctgcgatggaatccagactgtgccacttattagctctgtgacctggggctacttaacctctctgccgctcagcctcctcatttgtaaagtgaagaa

SEQ ID NO: 800384 - DNA, 637 bp, Homo sapiens
ttggaaaaaaaatttaaaaaaaattttaaagatatttatttacatattaaataaattccctatttttaagggtaatttatttgagaaacattaaaacatgacagaacacttcataagccagtttacataataaaataagcagtaataacttacatatttttgcaaacacgaacactacctaatatacagatatatctgtcacacagatagttatgagcagataaaccctattcataaagaaataggtcaaaaaatgtataaatgcatatcactttggttggtaattgtctgtcccgttttataacacagtcatctgaaacactatgacagacaacctaagtgttttgaggagatggatcaaaaattgcaatggaccaccatcacatcaccaaacacaccaagagccaagatctcaagaaattttactgtgcacaaatgcagatgtacaamaagggcatctcttcatttactgaagaagtttcagtgtttttacatacacgcataacgcttactacacacaaagttaatgctgtgatgataccctttcatggagacgcattagcaaaacaatgcatacaatgaattagaactctccaaaagtctttacacaatttctacctccagtatcgaaaataat

SEQ ID NO: 800385 - DNA, 647 bp, Homo sapiens
tgtttacacttttcatcattaagattctgtgtatatatacactatgtatgtatataaatacatatgtatttcctttttgttattgcagtgatagatatgtttatatattcatgctcttgtatatatacttactatatttatatatttatattatatttctatgtatgtattaattctattgatatattttaaactgtaaattcatatttttcattgctaatatagagaaaacaactatattttgtatatactaaacttacttagcagttctacaaactttatttgatacagttttggggattttctacatagacaatcatgttacattcaaataaagacagttgtatttcttcctttccratcagtgagattttgttttataaagcctttttcttgtagagtttatgtccgtaaagttgtccataatatttccttattatctttttaatgtttctaaaatcagtagtgatgtctcttttacttctgcttcagttaacgagagttttctatttatgtttcatacccctccctggaaaaccaaagggaaaaaaaaacaacatcattgccaaattttttccctgtgttttcaaccaaagattctttagtgctatagcagaagttaaatttgcttatacaataaaatattg

SEQ ID NO: 800386 - DNA, 647 bp, Homo sapiens
tgtttacacttttcatcattaagattctgtgtatatatacactatgtatgtatataaatacatatgtatttcctttttgttattgcagtgatagatatgtttatatattcatgctcttgtatatatacttactatatttatatatttatattatatttctatgtatgtattaattctattgatatattttaaactgtaaattcatatttttcattgctaatatagagaaaacaactatattttgtatatactaaacttacttagcagttctacaaactttatttgatacagttttggggattttctacatagacaatcatgttacattcaaataaagacagttgtatttcttcctttccgatcagtgagattttgttttataaagcctttttcttgtagagtttatgtcygtaaagttgtccataatatttccttattatctttttaatgtttctaaaatcagtagtgatgtctcttttacttctgcttcagttaacgagagttttctatttatgtttcatacccctccctggaaaaccaaagggaaaaaaaaacaacatcattgccaaattttttccctgtgttttcaaccaaagattctttagtgctatagcagaagttaaatttgcttatacaataaaatattg

SEQ ID NO: 800387 - DNA, 589 bp, Homo sapiens
aaggatgatagctgtgggtttgccatgtattgttgcaatattcatgagattcattccttctatgcctaatttgaaggatgctgaatttcatcaaatgctttttccatgtctattgagataatcatatggtttttcttstttattcttttgatgttatgttttatgtttattgatttgcatatgttaaaccattcttgcatccctgggataaatcaaacttgattataacatataatccttttgatgtggtgttggatttagttttctagtactttgttaaggatttttgcatcacgtttactggggatgttagcctgtagcttccttttttttgttcttatttggttttgttttcagggttataatagcctcccagaataagtttggaagcatttcctccccttcacgttttagaatagtttgagaatagtttctaattattatttaaaagttttgtagagaaatgcaaatcaaaaccacagtgagataccgtctcatgccagtcagaatggctaatattaaaaagtcaaaaaataacagatactggctgttgcagagaaaaggaaatacttatacactgctggtggga

SEQ ID NO: 800388 - DNA, 589 bp, Homo sapiens
aaggatgatagctgtgggtttgccatgtattgttgcaatattcatgagattcattccttctatgcctaatttgaaggatgctgaatttcatcaaatgctttttccatgtctattgagataatcatatggtttttcttctttattcttttgatgttatgttttatgtttattgatttgcatatgttaaaccattcttgcatccctgggataaatcaaacttgattataacatataatccttttgatgtggtgttggatttagttttstagtactttgttaaggatttttgcatcacgtttactggggatgttagcctgtagcttccttttttttgttcttatttggttttgttttcagggttataatagcctcccagaataagtttggaagcatttcctccccttcacgttttagaatagtttgagaatagtttctaattattatttaaaagttttgtagagaaatgcaaatcaaaaccacagtgagataccgtctcatgccagtcagaatggctaatattaaaaagtcaaaaaataacagatactggctgttgcagagaaaaggaaatacttatacactgctggtggga

SEQ ID NO: 800389 - DNA, 631 bp, Homo sapiens
ttttttaatctgagcttttaaaactgtgttttcgtaactcctgacttttcctacattcactttaacagattgcaattttacataacaaacttttgtctctatctttactgtaacagaaatgtcacttgcaaaatgcttaagtttaacagatagatagatagatagatagatagatggaatgttatggccatgttggtcagattctgtgttttattttttatccattgaccaaygttactcacctgaaccaatgacacattatatacataggttcacataactgagaggtgacaggtgatatttgctgaatgctagttccacaggattaaactatgtcttaactaattatgtcttaaggagccagttagacctcttctctatatttgatattgcagtatggtttccagaaggtctaaggttgcatcttcacattcaggagatgaaaaagtaacaagaactccactctacacagactcaaactcaaactttgatgttggctcacattggacctgaaacttatggataaggatatgtatccagtaggccagatctgggtctaatatctacgtgtcagctgatagtaaagttagcttcagttgaaatacattggaatcatgtaataggttacctg

SEQ ID NO: 800390 - DNA, 599 bp, Homo sapiens
ttgttggtgtgtgtgtgtgtgtgtgtgacagagagagagagtgtgtgtttatggtagttctaaggggttggagaggcttgtaagtgcattgataggcttgccataataaagaagaagagtgtaacagctttaaaataattccctggtgtagagatgatgcgatttactaaaatcatcaaaatcttagtaatgtattaataatattgctttgtttttcttaaaatttgaatgtagaaatattctctatgcttttgaataaaatccaactttactgaacaatacattgtaatcaaaatattgacacattattattaaaaatgtcatctcgatgtaaaggtgatttcaatgactggttcaataaataatcaataaaatgtgctattgggggaacccacccccaatatttccatgtaggytctttctattttccataagtgtcagccagctgagaaataaagagagacagtataaagagaggaattttacagctgggccaccaagagtgacatcacatattggtaggactgtgatgtctgcctgagtctcagaccagcaagtttttattaagggtttcaaaaggggagggggtgaaagaacag

SEQ ID NO: 800391 - DNA, 606 bp, Homo sapiens
ctccctagaggtggaacttcccaatagggaagaaggagacttgctggtggtatacacaggtctaacatttgccaactatggaaatggaggacaagccacaggtcaagctagcctagctatactgaagatagttgtgctttctgaggatgggactgaatgtatgtgaaatgatagaggtgcctcactaccctctgtatacttttgtatacgagcagatttattgtagcataagcagagggatccatctgcctctctattcacaaaagcatcacaggtctccagcattgagtgccacagttgtgtttcattggcatcaggtacggtgggcgtccatttctacaggtagcaaggaatgacctgtactgacctattgataatgtcagtgcacttggagatttcctcaaagtaattaagatgtgaattttcctcaggcaaacgagtgatattctataagaaaaagagatgtacrttacttttgacaaacttcatctgtacttatttcaggtaacaactgagaaactgaagttacaaataagagaaaaattacattgaagacataataataagtcattagagaaataccgtgtttccaaacttaatggaaac

SEQ ID NO: 800392 - DNA, 615 bp, Homo sapiens
atttttataattggataagatagctttttccccacataataaattcctagtggcaatttgaaaactatatttagcattaaagtctttaatatatcatttgttgaatgttctacaaatgtgataactgaaaatgtggcaaccagtggctgctgtttcatgatggctgtgagagggacttctttgtggacccacataatcacctggaagtgggtcagtagaagccgtcttacatcactcatcaaggcatggtgsgagggccaagatcagaactgctaagagcagtatggcagcaggtgtgatttaggaagtaactgataataggatttgatttatgtaatcctaactttaattaatactggactaatgctgatcacttacagtttacagcaatgcttttcaaacaaacattgttctagaagacctaggcctcaaggtgggtgtttaaggagcactgctggtgaggctatgaggagaccaaggagatagtgttcctagtgccttccccagtctccgcagtgtaggctacaacatttgggtttctatgaagatttttattggaaagggggttgtatttctaggaggttgagggaatgttgtatgggtcatattacagat

SEQ ID NO: 800393 - DNA, 632 bp, Homo sapiens
agtcagttatatctagatttaaagctcatcacgttcactcatgtgctatgtgcttttggacaagttatttaactgttcatttttattttaaattgattcttttagaatcccttcaaacttcacagaagtgatgtgaatgtaagtaacaacttgtctgagatgggtaaaagagagagctccaatgctgatgaagttgtacaaactccatcctccccatttgtaaccactaatttgcaaaggggctgagaagtttgctgcaggggacacatagtccctgttctccattcatcttctgccatattcacatacgtctgatggactggcagggcaataaaggaaaccagattgctrgaaggataatgagaatctccctagaggtggaacttcccaatagggaagaaggagacttgctggtggtatacacaggtctaacatttgccaactatggaaatggaggacaagccacaggtcaagctagcctagctatactgaagatagttgtgctttctgaggatgggactgaatgtatgtgaaatgatagaggtgcctcactaccctctgtatacttttgtatacgagcagatttattgtagcataagcagagggatccatctgcctctctattcacaaaa

SEQ ID NO: 800394 - DNA, 615 bp, Homo sapiens
ggcaaaatttacaactcaaaagtaccaatttgagaacttctaaaggaaaattacaaaagaagaaaaatctatttgtaggaaaattttataccagaatcattatcaaaccaaacactgaaaatgacctcagtattcaaccagagaggaatggtgagacataataaacttaatgtaatattttacagtcattgacaatagatctaaaaattataatgcaacatatatagaaaatacatagaaaagaatattaagcgaagaatagarttgaggggaaaaacagccatctcatcacagaacacagagaatgtggtgcttcgtttggaaaagcttggctgcctttgccgtcttcaggcttgcagacacagacactcaattttgtcagcataccaagacagtatccatttcaaaggggcaagtgaacattaaacaaattaactagcctgtcatataaaactagagtgccaacgtattcacccatacccaaattctgagtactagctcatgctttctttgtagacaatttcataaagaaagtcaagttataatcagaatgatgagcaaagaatttggatgagggaaagtaggcaatttgactcttcattgctgttaaactga

SEQ ID NO: 800395 - DNA, 625 bp, Homo sapiens
ttggattaattaaaaattcaatataccaatcacaaatatgaggatttacccaatcagcagaatatcaagaaagacaaaacttcctacattaaaaatataagcacataaaatcattttaaaattaaagttattacctattgataattatatccataacatctctggcactgaagtcgaagggcctgtaaccctctcatttaaaggcaaactctgtattgcaaccagcttctcctgtatctgagcaattaycgtgttactcttcggttgcttcacactcaataatcctgcccagttgcaactgtaacctacccaccaagcaatttctccttcctaatcaatatctactttgcaaactgaggacactttagaaatctcattcattcaatgcacatttaatgagagcacacactacgttcaacgtttgctttagtgaccagctttagactgctaatgttaggctgttatgatttcctataaattttattttgtgattatcatctgcttatttttaactttactcactaagtttagccaatttgtcaccctatttcctaaatgacttcatttatcccgcattcaccaccacacttgaattcccatctctttacttcttacagagtaaaca

SEQ ID NO: 800396 - DNA, 707 bp, Homo sapiens
aaaactagaaaagcaagagcacaccaaattcagaattagtagaagaaaataaataataaagatcagagcagaaataaatgaaattgaaacaaagaaaacaatacaaaagattaatgaaaggttggttttttgaaaggataaatagaattgacaaacctttagccagactaagaaaaagagaagacccggataaataaaatcagagatgaaaaaagagacattacaaccaataccacagtaattcaaaaaattgttaaaggctactatgaccaactatatatgccaataagttagaaaacttagaataaatgaataaattcctggacacatacaacctaccaagattgaaccatgaagaaatccaaaacctgaacaaaccaataaaaggcartaagatcgaagccataataaaaagtctcccagtaaagaaaagcccagaacctgatggcttcactgctaaattttaccaaacatttaaagaagaactaatactaaaccctactcaaactattccataaagtagaggaggaaatatttccaaacacattccatgaggctggtattaccctgataccaaacccagacaaagacacatcaaaaaaatgaaaactataggccaatattcctgatgaacactatacaaaaatccttaacaaaatactagcaaaccaaattcaacaacacattaaaaagatcattcatcatga

SEQ ID NO: 800397 - DNA, 635 bp, Homo sapiens
tgtgcttgtctttactccttaaatttcttccttgacatgtatatttatagctgttcttttgcataataacatactctgcttgtttgagtttgatgtgtctcctttaaatatatgatgaatgtagcttctctgtgtgctacatgaagaatatgtctcaccagcacaggaataatacacttaagatgcattaatgaaactaggtttaaaagccattcttcatttcatrccatccagcatcttcttttaaaaaagagtaagtttattattcaaagccatatttaaccagaagaatttccaccagttagccattctttcacagagcagaaatgcaaattgtatgctgcttatagtctaagtgcaactgtcttattgaacattttaacagattgtaacaatgctatgattatagagaatctattatgagaagttttctaagttacaggccaagaattgcattgaatttcagtcaaaaatggtacatgttgaattgtaattattaatggagtcttcccaccatttcaaaaagagagaacacaacagctcaatggttctcttttctttgttttgcattcccttagacagtttaagtgaccacgatggaatctcttgttaatttttgtccaaacttattttgc

SEQ ID NO: 800398 - DNA, 617 bp, Homo sapiens
attatatttcataatatcaagtttttatacgtctaaatttaacagtctccccaaaattaaatttcagtttcaaaattgtctctcctgatgcctagcttttggttgtgacagagggcctctggagcatccagaaaagaggtaaacaggattatttaacatgtttagatacaagggattgccacagtgatgtgtaatcttcttcagtttttatttcggtaaataatattaatatatgttccaaaatcatatgggatatctaatgttctaatgtctgaacatatgctgtcaatgataattaggtttattatgttaagctattgtaactacagaaataaccaaatgtcttcaccaatcatrttcttgcctgtaacaaccctggaaattttgtcatttacagacaactgttgtcttgttttaattctcttcaaaagatggtttatgatcaactgtaggactttaacaagtgctctcaaatgcagttttctgataaaagaaaaatgtacacaactcacgaaaagctgaagtggttatgaatatcaagcagaataagagttaaagaaatagactgagctgataggaaactgaagtaattgttctaaattttttgcttaaaacat

SEQ ID NO: 800399 - DNA, 692 bp, Homo sapiens
tgacaaaaaacaagcaatggggaaaggattttttatgtaataaatggtatggggataactggttagccatatgcagaagattaaaactgaaccccttcgttacaccatatataaaaattaacccaagatggattaaagactttaatgtgaaacccaaaagtataaaaagcctggaagacaacctagacaataccattcaggatgtagacaygaacaaaaatttcatgatgaagacattaaaagcaattgcaacaaaagcaaaaattaacaaatgggatctggccgggcatggtggctcacgcctgtaatctcagcactttgggaggctgaggcgggtggatcacaagttcaggagattgagaccatccttgctaacagggtgaaaccccatctctactaaaaaatacaaaaaaaaaaattagccggatgtggtggtgggcgcctctagtcccagctattcgggaggctgaggcaggatagtggtgtgaaccagggaggtggagcttgcagtgagccgagatcgcaccactgcactccagcctgggtgacagagcgagactccatctcaaaaaacaaacaaaaaacaaaacaaaacaaaacaaatggcatctaattaaactaaagaacttctgcacaacaaaataaactaccaacagagtaaatgcgcaacctacaaaatgggagagaatttt

SEQ ID NO: 800400 - DNA, 539 bp, Homo sapiens
atgtgaaacccaaaagtataaaaagcctggaagacaacctagacaataccattcaggatgtagacacgaacaaaaatttcatgatgaagacattaaaagcaattgcaacaaaagcaaaaattaacaaatgggatctggccgggcatggtggctcacgcctgtaatctcagcactttgggaggctgaggcgggtggatcacaagttcaggagattgagaccatccttgctaacagggtgaaaccccatctctactaaaaaatacaaaaaaaaaaattagccggrtgtggtggtgggcgcctctagtcccagctattcgggaggctgaggcaggatagtggtgtgaaccagggaggtggagcttgcagtgagccgagatcgcaccactgcactccagcctgggtgacagagcgagactccatctcaaaaaacaaacaaaaaacaaaacaaaacaaaacaaatggcatctaattaaactaaagaacttctgcacaacaaaataaactaccaacagagtaaatgcgcaacctacaaaatggga

SEQ ID NO: 800401 - DNA, 619 bp, Homo sapiens
tctgaacttaaagttgaaaaaaaagatgagtgtatgatacactgaaattatagtattattctgagattttttaaatgtacttacttttaccagtgagttgtataccttcagatactttctgcttgcttgttaatgtctttttctttcagattgaagaacttcctttagcatttcttgtaagataggtctgatgttgcccaaatcccttagcttttgtttttgaraaaatttttatttctccttcagatttgaagggtaatttttctggatacaatattctaggttgaaacttttttccttcagcacgtttaaaatgtcatcccactgcctctgttcaaagatttccattgaacagtcttcttccagacatatcagagctcctttatatgttatttgctttcttttgctgctcttacaatcctttcttttcttttgagggtttgattagtatatgccttgagatagtcttatttggattgaatatgcttggtgttctttgaccttcttgtccctcaatattcacatctttttctaggtttgaaaagttctccgctgttttttttttgaataacctttcttctctgatctctctcaacatcctctgtaaggccaataactc

SEQ ID NO: 800402 - DNA, 619 bp, Homo sapiens
tctgaacttaaagttgaaaaaaaagatgagtgtatgatacactgaaattatagtattattctgagattttttaaatgtacttacttttaccagtgagttgtataccttcagatactttctgcttgcttgttaatgtctttttctttcagattgaagaacttcctttagcatttcttgtaagataggtctgatgttgcccaaatcccttagcttttgtttttgagaaaatttttatttctccttcagatttgaagggtaatttttctggatacaatattctaggttgaaacttttttccttcagcacgtttaaaatgtcatcccactgcctctgttcaaagatttccattgaacagtcttcttccaracatatcagagctcctttatatgttatttgctttcttttgctgctcttacaatcctttcttttcttttgagggtttgattagtatatgccttgagatagtcttatttggattgaatatgcttggtgttctttgaccttcttgtccctcaatattcacatctttttctaggtttgaaaagttctccgctgttttttttttgaataacctttcttctctgatctctctcaacatcctctgtaaggccaataactc

SEQ ID NO: 800403 - DNA, 406 bp, Homo sapiens
ccaggcccacggttgggatccatgtgtccctccaatctcccattccatggtagtacacaccttgggggcacccacactttttgttcatttcctgcaaaaacaagcataccctggtccccaagttagtaaatctaccaaaacagaagcaaaggtggctstaagccgggaggcatgccattgcagaagcatttgttctacaagctacagctcagcctctccctctttggttaattgccacggggtaaaactttccattgataatgagaagcaggctctttctgattaacagaaggcacagagaaaacaaatcgaagcctctccctctcgtgcaataacatagtaaaaaaacaatccttaagccttcaatttgtactgtacaggtgggtctattagatgctatgggttg

SEQ ID NO: 800404 - DNA, 406 bp, Homo sapiens
ccaggcccacggttgggatccatgtgtccctccaatctcccattccatggtagtacacaccttgggggcacccacactttttgttcatttcctgcaaaaacaagcataccctggtccccaagttagtaaatctaccaaaacagaagcaaaggtggctctaagccgggaggcatgccattgcagaagcatytgttctacaagctacagctcagcctctccctctttggttaattgccacggggtaaaactttccattgataatgagaagcaggctctttctgattaacagaaggcacagagaaaacaaatcgaagcctctccctctcgtgcaataacatagtaaaaaaacaatccttaagccttcaatttgtactgtacaggtgggtctattagatgctatgggttg

SEQ ID NO: 800405 - DNA, 548 bp, Homo sapiens
tgagacccagggtgcctaacaggctggaagtaatggcagccggcagcgcccccgccttgggagaaccgcctctgggtccccagcccgatgcgctggtttctatggtaacttcccaaggtcagcaggcagcgcggctggcaagcggcaccggcctcggctcccaaacaaaaggcagccagggccgctctgctgggctccaggtcaccaacgcaccggcctgggggccgacaccctacccttacttcccagtgtcaggaaccctccttggcaccagggggcttagcatcagggacsgggggagctctgagcactggagctattctttcttttctggaagtctccacgtttcaaatcctcctgccaaacaggacccaaaggagcacggccacagggctgtgcccagaacagccgcacaggccctttaattcaggactaggccggttgtgacggggtgggctgtcccacacacgggggaccccagagcaggatgggcaagacccccatctgctcccaccagggtcccagccagccgtgctctcggcacctaa

SEQ ID NO: 800406 - DNA, 617 bp, Homo sapiens
ccttttagactatcagtcttccaattacctgtttcattgccctaagcagttgttggctagacaacaaagatgtattttggagacccatcttttcaatgggtggtgtttttaacttagcttctgtttcttagctaaaattcctgagtttggcaggagcctatcaagcaatagggcaaagaaaatattctcatcttagatagctctgaagaagaagtaagcctactttacctaaggctttaataaacactttatccaggatagctctcttttagccttttgtgaagagttttttaaaataggcaacaaaatgttgaaatctttttagaagcttctgcacatcagtaagcatccttggatgagactaatgcaagagctctcattttgaaatgtattttcttaaagtgcagcattgtttggaacatttcactgccttaaaagtatgccatttagaagaaaacckctggtgcttaactaccagtcctttgacctgaaactctgttgtgaaacagggttggaaaaacttggacctaaacccccagtactgagacaggtggaagcaaaggcatttctctgcagagctctttacctgaatctcctgtccaaagacagagactgaa

SEQ ID NO: 800407 - DNA, 529 bp, Homo sapiens
taatgtcagccttataataggctctcaataactattaatttccttgtgctctcctttacctattaccccacttcttccatttaccagcccatttccacccgagggaccctaaggctcaaaattaggatgtgaccacagatggcaggtaggtggaactgaggaataaacttggttgggatagttcttcagatcatccctagcatgcagtatgctagtctaamgcagtaatgtccttcaagtgctctaataccttaaccactgaacagtgtctgtagatactcttagggggcttcagaaagccacttctatgacagctatactcctgtccctttaggaccttgaatcttcccaaatacaagtatttttttctaaagattttcttaaaattttcttaagacctttagtaaaagtgtattgtagctttatatttttctttattggagtgctacacatctaaatatattttataagctattccaaattaggttaatacagtgattgattactcctactggaaaaaatttgaaat

SEQ ID NO: 800408 - DNA, 566 bp, Homo sapiens
tcttccacaatggttgaactaatttacactcccaccaacagtgtaaaagcattcctatttctccacaacctctccagcatctgttgtttcctgactctttaatgattgccattctaactggcataagatggtatctcattgtggttttgatttgcatttctctaatgaccagtgatgttgagctttttttcatatgtttgttggctgtataaatgtcttcttttgagaagtgtctgttcatatcttttgcccactttttgatgcagttgtttgtttttttcttgtaaatttgtttaagttccttgtacattctggatattaacccatgtcagatggatagattgcaaaaattttctcccattctrtaggttggctgtttactatgatgataatttcttttgctgtgcagaatctctttagtttaactccatcccatttgtcaatattggcttttttttttgccattgcttttggtgttttaatcatgaagtctttgcccatgcctatatcctgaatggtattccctaggttttcttctagggttttcatggttttaggtcttacac

SEQ ID NO: 800409 - DNA, 616 bp, Homo sapiens
cttctcccttgccagttagcacagtgctgtgggtattggcaagctgaggaactctgggttggattgacatgttctcgtgaaaatcgaggaggcttataaggaaggtgcctgtatgcttaccttccaggtggtccaagggtttttcactagcaggtttataattgtaatcagcaagtagtttagggccagtgttctatgtcgtgaactttaggttggaaaatttttaaaacagtgataaccaaatgcctgcctcacaccgaaaactctctctaaagcacctaatttgagcagtgttactttgtattatgccctctaagacaaactagacacaagtaatgcctacccagataactaaataaggttacttgttataggggattttaaaatataaatcagcaaaaagttagraggttatctaccaaaaattatgacattgacttaagtaatctataatccttctttctggcagaaattagataacagtgccaattgtctattaagatcactccaaagtcaggataatagccattctatttgcacataagtgaatgcttaacttctcattctgtaagatgagagttgagggtgttcagctcacccaaaaacatgaattcct

SEQ ID NO: 800410 - DNA, 629 bp, Homo sapiens
ggcaccaagctgtttatgagggatcctcttccatgacccaagaacctcccactagattccacctccaacattggagatacaatttcaacatgaggtttagagagacatctatccaaactatagcaccctgtaacaatacagtaccattcaccatctcctatattttattgtgatatattttaactatacatccattataaatctcacatacagtgctataaaacttatttaatcatcttttaagctagttaataaaacaatctttttttttttttttttttttttgtgagacagggtctcactctgtcactakgctgtagctcaatggcataatctaggctcactgcaacttccgcctccttggttcaagcagttctcctgcctcagcctcccaagtagctgggattacaggccaccacatccagctaatttttgtatttttagtagagacggagtttcaccattttggctaggatggtctcgatctcctgacctcgtgatctgcccgcctcagccccccaaagtgctgggattacaggcgtgagccaccgcgcccggctgccaaaacaatcttttttatttacctacacacttgctatttcagtacttttcaatttttctttagatct

SEQ ID NO: 800411 - DNA, 629 bp, Homo sapiens
ggcaccaagctgtttatgagggatcctcttccatgacccaagaacctcccactagattccacctccaacattggagatacaatttcaacatgaggtttagagagacatctatccaaactatagcaccctgtaacaatacagtaccattcaccatctcctatattttattgtgatatattttaactatacatccattataaatctcacatacagtgctataaaacttatttaatcatcttttaagctagttaataaaacaatctttttttttttttttttttttttgtgagacagggtctcactctgtcactatgctgtagctcartggcataatctaggctcactgcaacttccgcctccttggttcaagcagttctcctgcctcagcctcccaagtagctgggattacaggccaccacatccagctaatttttgtatttttagtagagacggagtttcaccattttggctaggatggtctcgatctcctgacctcgtgatctgcccgcctcagccccccaaagtgctgggattacaggcgtgagccaccgcgcccggctgccaaaacaatcttttttatttacctacacacttgctatttcagtacttttcaatttttctttagatct

SEQ ID NO: 800412 - DNA, 642 bp, Homo sapiens
tgtagcagcaaaggcctactggatgctgaatatcaaaatttttacttttgccaagtttttatgactgttttcaataactctttgaagcctgcaaggtgacatgggtaaaccttttgttagatctaggattagtaactggtgtggcagaaagtccaaaggagaaaaatatccagggaattaatgagtggaacactgaagtcctggtttcaagaaagacaggtagtcaagagggatcaggagactgggtaaaattggagagatcaaatatgaaacacctggaatgaggaagaagcaattcagtagctggtagaagaaaagktgtgaaaagtgatggataagttggttgtgttcagaggagggatattagaaacttaggcttttctaaaaaataaaagaatttggaaatgaggttatgtgaggaaaatcaggtctctagcaaagcaataaaaatgtcaaggatcaaagtatcacacactgggagcagggttgccaggtaatatgttggatgcccagttaagtttgagcatcagacacgcaatgaataatttgggatctgccttttctccatatcctcgccagcatttgctattgcttttcataacaacatggaatgcttcacaaatttatgtgtcatccttgtgc

SEQ ID NO: 800413 - DNA, 500 bp, Homo sapiens
tgtgaagtgccaacaatttgcagatgattacagggcaatttgctgatatagagggcagaatctgaacatctcatgttacttaagagaaaaaccaaatcattggttacttaaggatttttttctttttacatttttaagtatgatacaaattatctaaaaagaagttgaaggattttttaacttctaagatcaacttcctttgccaagagaagaagaatttttttaatctctcaagaagaaattgggaaggctcttccgtgtaatttggcaacatctaacaaaatttaaaatgcatagaccttttaactcaactattcgacatctaagaatttatccgraagataaactttgacctaggtacaaacacttaagtaaaaagaatacttatttttttcactgattaaaaatttattaatactattatgcaaataattttagtgataaccacaagggttttgtactgttagtacataaatacatacaaaaatgcattttgaaac

SEQ ID NO: 800414 - DNA, 577 bp, Homo sapiens
tgttgtttttttttttggcacccctgcgaaattggtttcacacagaccttattttagacatttcttagataactagcatttacccctctttttaatatttgcctgttttaatggggggggcaaacaaatgttttctaagcccagtagccttaaactaccaagtgaaccaggaaagaccttatttacattgctcttcagcatctgtgaattgagaagaaattctttttccagagraaagtctttgctcactcaatgtttgggaatctctcatgctgcatcctgaagactctggggaggtggaaaacacccagccatcctgacagcgcaaaatcatgtcttgtcttattatgtccttagtctgttaagaagcttttataaatattaaataaacaaagttcagtcccttgggtcttaaagggaaatagttctttcagtgtagaaaaaaactctccctagccaagtctttttagacaaaggattttcccctgatgatccaagaactggcaattagggcaggaaggatggggtctgtgtgacacatttgggagctaaaccaagcaactgtaaagtgagaaaa

SEQ ID NO: 800415 - DNA, 610 bp, Homo sapiens
gtcagatgctggatatttttatattcctataaatacttttgagctttgttctgggatgcagttaggttacttagaaactgttgaatgcttttgagtcttgctttcagccttgccagttgggatcagagcagtgtttggtccaggagaaatttttcccactactgaggcaaacccttctgagtattctacccaatgccccatgaattgtgaggttctgcaattctggcaggtgggaacaggaactattcccagctccattatgagctctgaagcttgttgcttctgatcttttccagtggttctctctcagccctgggtagtttcsttacacccatgtgctcatcagttctcaggtggccactcaaggggaactgtgagcaaacctccagagcgctcccagcacaactttctttttctgggagttctgctctgccaattccagccacattagcctccgctgacttgcagctccatctccccagctcagagagaccacgggcctccacctgggttttcccttcttggaaactctatcctggggcaatcatacagctcaccatctgtttctcctcttgcaaggatcactgtccatgcctaaggcccaatgtct

SEQ ID NO: 800416 - DNA, 587 bp, Homo sapiens
atataacttgaaccctatatcctgtttcttttcctattggaactcatatcacatgtatattggcaccatttagtactgctctataaacctttccctaccatctagtggatgctctattttgtttttattttttactctatttactctttatgttccatttggataagtactagtgctttatcttcaagttggctgattttcccctcatctatcaaatytagtgattctattaaataccttcttaatttatattttccatttttttccaaattattctttccataaggtccagctttactgaaattcctcattgattcatgcttgttatctactttttctactaaatcatttgacactttaatcaaagctactttgtagttactacatgaattaattcattgattttttttttttaattttgagacagagtctcactctgtcacccaggctggagtgcagtggcgtgatcttggctcactgcaacttccacctcctgggttcaagcgattttcctgcctcaatctcccgagtagctggagttacaagcacacactaccacacccagctttttttttttttttttttag

SEQ ID NO: 800417 - DNA, 641 bp, Homo sapiens
tcaagggactacaaaattaggcaagagtaagggcaataagaagagtgaaggtcacagactctgcagccagcattcttgttcttaatctttgtatacctgagcaagtcatacaacctttctgagattgttttcttacctgcaaaatgggattgtagcaggacgagccgcagacawaactcctcagacaccgagttaaagaaggaaggggtttactcggctgggtgcattggcaagactcctgtcttaagagccgagctccacgagtgagtaattcctgttccttttaagggctcacagctctaagggtgtacgtgtgagagggtcgtgatcgattgagcaagcagggggtacgtgactaggggctgcatgctctggtaattagatcggaacaaaacaggatagggattttcacagtgcttttctctacaatgtctgtaatctatagataacataaccgattaggtcaggggtccatctttaactaccaggaccagggtgtggcgccgggctgtctgcttgtggatttcatttgtgcctgttagttttaactttttctttctttggaggcagaaattgggcataagacaatatgaggggtggtttcctcccttaggataataattgaacttacttatggggtt

SEQ ID NO: 800418 - DNA, 641 bp, Homo sapiens
tcaagggactacaaaattaggcaagagtaagggcaataagaagagtgaaggtcacagactctgcagccagcattcttgttcttaatctttgtatacctgagcaagtcatacaacctttctgagattgttttcttacctgcaaaatgggattgtagcaggacgagccgcagacaaaactcctcagacaccgagttaaagaaggaaggggtttactcggctgggtgcattggcaagactcctgtcttaagagccgagctccacgagtgagtaattcctgttccttttaagggctcacagctctaagggkgtacgtgtgagagggtcgtgatcgattgagcaagcagggggtacgtgactaggggctgcatgctctggtaattagatcggaacaaaacaggatagggattttcacagtgcttttctctacaatgtctgtaatctatagataacataaccgattaggtcaggggtccatctttaactaccaggaccagggtgtggcgccgggctgtctgcttgtggatttcatttgtgcctgttagttttaactttttctttctttggaggcagaaattgggcataagacaatatgaggggtggtttcctcccttaggataataattgaacttacttatggggtt

SEQ ID NO: 800419 - DNA, 641 bp, Homo sapiens
tcaagggactacaaaattaggcaagagtaagggcaataagaagagtgaaggtcacagactctgcagccagcattcttgttcttaatctttgtatacctgagcaagtcatacaacctttctgagattgttttcttacctgcaaaatgggattgtagcaggacgagccgcagacaaaactcctcagacaccgagttaaagaaggaaggggtttactcggctgggtgcattggcaagactcctgtcttaagagccgagctccacgagtgagtaattcctgttccttttaagggctcacagctctaagggtgtrcgtgtgagagggtcgtgatcgattgagcaagcagggggtacgtgactaggggctgcatgctctggtaattagatcggaacaaaacaggatagggattttcacagtgcttttctctacaatgtctgtaatctatagataacataaccgattaggtcaggggtccatctttaactaccaggaccagggtgtggcgccgggctgtctgcttgtggatttcatttgtgcctgttagttttaactttttctttctttggaggcagaaattgggcataagacaatatgaggggtggtttcctcccttaggataataattgaacttacttatggggtt

SEQ ID NO: 800420 - DNA, 641 bp, Homo sapiens
tcaagggactacaaaattaggcaagagtaagggcaataagaagagtgaaggtcacagactctgcagccagcattcttgttcttaatctttgtatacctgagcaagtcatacaacctttctgagattgttttcttacctgcaaaatgggattgtagcaggacgagccgcagacaaaactcctcagacaccgagttaaagaaggaaggggtttactcggctgggtgcattggcaagactcctgtcttaagagccgagctccacgagtgagtaattcctgttccttttaagggctcacagctctaagggtgtacgtgtgagagggtcgtgatcgattgagcaagcagggggtacgtgactrggggctgcatgctctggtaattagatcggaacaaaacaggatagggattttcacagtgcttttctctacaatgtctgtaatctatagataacataaccgattaggtcaggggtccatctttaactaccaggaccagggtgtggcgccgggctgtctgcttgtggatttcatttgtgcctgttagttttaactttttctttctttggaggcagaaattgggcataagacaatatgaggggtggtttcctcccttaggataataattgaacttacttatggggtt

SEQ ID NO: 800421 - DNA, 633 bp, Homo sapiens
ccacagtgattggttcaagagtaagcacttggcttaagccttccaaccacagtgaaactcgggacttttgtgggagctcctggaagagaatctgtcatttctaatggtcttaaattttgaagcatgtgggatggtggcggctgacacaaccctgccatgtgaatgaagcacccacatgtaagcagagccaacacatcaggagacagaacagagagttggaaaataacactggcaaaaaaaaaaaaaaaaaaagacattgtttaatcctgcatatccagctatgtctgaaagaaagcttaccatgggactcttcagttacatgagtcaatacattgatctttacttaagtctatttaggactttttttctattgctttcaacagaagaatcctaactgatgctctacgtggttagttgttcctagrggagattgaattatgtaggcataagcaactttcatgcagcaggttttagaataaaagccatgtgagatcctattgaattctgtctttacacatatccactttcattcaataaatattgatatgtgctgtcactctgttagccactgtaatacaaaaggcccactgcccaagaggagcctacaagaagataaaaaagaacaaaaaggga

SEQ ID NO: 800422 - DNA, 625 bp, Homo sapiens
gctcaaactctgttacatcttttaagaaaaggaagttgaaaaagtcttgtcaggaaaatagcaatgagactgcacactgatgctcacaggtaaagtcagaagagttcgagacaggcatgtgtggtttgcaatatagatctgcacacaggaacgctctcatagtgacatcattaagttggttgagcaagagaaagtggttgtagttgtttcggtagttaaaaagaattacctgtttttacaggggtarttctggttgttcagaaagtctgggggcctacctgaggatatttactttttttaagttttctgtttcctcttggacatttgtataattattgatctgggactcaattatgaatgaacagttgtaattaggtgtctagtgattcactaacaataggctatttatcagacacactatgtaattagcttgattttcagtatgctttccagaagtattaaatagcaaggcgttgatgatgtagttaaaattaactaaatatttaatagtctgtattatatttaagctctccctgttcagtgtaataaagaatataacccttgctgatgggcaaatgggaagcctgcgcaagtttcttaagaattggtcgatgcaaatgcaaca

SEQ ID NO: 800423 - DNA, 634 bp, Homo sapiens
aaataacaactacaacaactgttcaagacatatacagtaaggtataaatagaaacaacaaaaggttaacaacaaggagaagaagtcaaggtgcatagttttttatttcttttctttttgcttgtttgtatctttatacaaacagtgttgttatcagcttaagataatgggttatgagacagtatttgcaagtttcatggtaaggtcaaacccagaaacacttacacacaaaaaatacagttagaaattaaatcataccaccagagaacagcagcttcgcttaccggaaggaagacaggaaggaagaaaaatgtaagagaagaccacaaaacaaccagaaaacaaataamaaaatgacagaagtaagtccttacttaaaaataactttgaaagtaaatgagctaaattcctcaatcaaaagatgcagagtagctgaatgataaagagcaagatccagtaatctattgcctataagaaatacacttcacctataaagacaaacaggttgaaaacaaagggatgaaaaaagatattctattccagtgaaaccaaacaggccaggagtgggtatacatatagcagacagagtagatttcaagacaaaaaaccataagagatgaattaggtcactatat

SEQ ID NO: 800424 - DNA, 634 bp, Homo sapiens
aaataacaactacaacaactgttcaagacatatacagtaaggtataaatagaaacaacaaaaggttaacaacaaggagaagaagtcaaggtgcatagttttttatttcttttctttttgcttgtttgtatctttatacaaacagtgttgttatcagcttaagataatgggttatgagacagtatttgcaagtttcatggtaaggtcaaacccagaaacacttacacacaaaaaatacagttagaaattaaatcataccaccagagaacagcagcttcgcttaccggaaggaagacaggaaggaagaaaaatgtaagagaagaccacaaaacaaccagaaaacaaataacaaaatgacagaagtaagtccttacttaaaaataactttgaaagtaaatgagctaaattcctcaatcaaaagatgcagagtagctgaatgataaagagcaagatccartaatctattgcctataagaaatacacttcacctataaagacaaacaggttgaaaacaaagggatgaaaaaagatattctattccagtgaaaccaaacaggccaggagtgggtatacatatagcagacagagtagatttcaagacaaaaaaccataagagatgaattaggtcactatat

SEQ ID NO: 800425 - DNA, 645 bp, Homo sapiens
acatgcttcaagtttgacaaaaatacctaagcttttcatgtggctagtttgaccatgttttgtatatgagcattgaagaaagaaatggagtaactataattttaataaagatacttaacttggccttttcaagaaagaatacacatctatccagaaagacagatctaaaatgacctttaaaaaatgacatttttggattctgggatttacagagatgatagtggcatgacatcctattggtacaaggtttttggagggaatttcagtgcagactytgctgtacatttagttattagataaaggtgagttgaaattaaggaatacaggcacatacaaatgcttaacaggatttctgttgactgtagataaatatttccgctttgtgacagtattattaaagatacagaatcataaacccatgagaacatatttacctgagattgcttttatatgtttttaactaaatatagttatttaaagatatacttctttccatatttttaaacaaaataaccaaatatggttcagtgttgtagatttgactatgaaatgcattcactgtttaaactatcagattttgattaagcagaatctgcacagataaactgctctcaggaattagattgaatatgttcaactataaat

SEQ ID NO: 800426 - DNA, 577 bp, Homo sapiens
attaaatatgaggatataatctgatatttaattatattactttctaaaacataaataaaatatgagttttttagagttaatatttaaatataatgaaaataaaatatttatttagttatttagtaatttttagttaaaagatactttgacatcaaatctaactatttttatatgaggtggaaaaaactgaagactcaacaaggtcatgtgctttgtccaaggtgaacaaataaaaattgatttaatatgatctcattaattttgtaaatkaatctttttttaagcaaatgacatataagaaatactggatgaataatgagtttagagaattgttattctctctagaatgtgtttgtgtatgtatgtgtttctgcatatatacatttttaaattgtattcatacatatggatataatttaaaattgaattggatgttcatccaaagctgcatgtatacaatgattatatggcatcagatatagctcttttaattgaattcattatttttaaactaactccatagcttattgaaacatgaacattatttatttatggtatttatagaaaattctacagg

SEQ ID NO: 800427 - DNA, 577 bp, Homo sapiens
attaaatatgaggatataatctgatatttaattatattactttctaaaacataaataaaatatgagttttttagagttaatatttaaatataatgaaaataaaatatttatttagttatttagtaatttttagttaaaagatactttgacatcaaatctaactatttttatatgaggtggaaaaaactgaagactcaacaaggtcatgtgctttgtccaaggtgaacaaataaaaattgatttaatatgatctcattaattttgtaaatgaatctttttttaagcaaatgacatataagaaatactggatgaataatgagtttagagaattgttattctctctagaatgtgtttgtgtatgtatgtgtttctgcatatatacatttttaaattgtattcatacatatggatataatttaaaattgaattggatgttcatccaaagctgcatgtatrcaatgattatatggcatcagatatagctcttttaattgaattcattatttttaaactaactccatagcttattgaaacatgaacattatttatttatggtatttatagaaaattctacagg

SEQ ID NO: 800428 - DNA, 614 bp, Homo sapiens
agccaggagaaggcagggagtgagagcaggtatttctgagcctgctcggagagggaaggcctttttgggcccctaagagtgtagagatgcttgggtccacagccattgcctggacggctgcagctgcgcccaggaagcgtgaggctcctgcctgttcctggcccccaggagtacagggatgcccaggtccacagcctcaggtgggaggctgcaggtgggatagagctcctgccctgccaactcagaaggggctcggcttccgcctsttcccagctcctgccaactctgtggagcgtgcaggccccgctgtgcctccccggctgcagcagccgctccagacaggtcaccgatgccatcagcaagaacaactctatcaccttttctctaattttcttttgctttcttttggtcagttagaaaaaaagctacagggaaaaattagatgacttttaaaaataaatgtctatctgtgcaaatatttctttacaaactcataaaatattttcttaagcagtttgataaaaatatcatgcaccaaagtagaataaaaacattagttactgctaaccctgaaaagatcaatttaatattttatagttcaggaaaaaagcaat

SEQ ID NO: 800429 - DNA, 614 bp, Homo sapiens
agccaggagaaggcagggagtgagagcaggtatttctgagcctgctcggagagggaaggcctttttgggcccctaagagtgtagagatgcttgggtccacagccattgcctggacggctgcagctgcgcccaggaagcgtgaggctcctgcctgttcctggcccccaggagtacagggatgcccaggtccacagcctcaggtgggaggctgcaggtgggatagagctcctgccctgccaactcagaaggggctcggcttccgcctcttcccagctcctgccaactctgtggagcgtgcaggcccygctgtgcctccccggctgcagcagccgctccagacaggtcaccgatgccatcagcaagaacaactctatcaccttttctctaattttcttttgctttcttttggtcagttagaaaaaaagctacagggaaaaattagatgacttttaaaaataaatgtctatctgtgcaaatatttctttacaaactcataaaatattttcttaagcagtttgataaaaatatcatgcaccaaagtagaataaaaacattagttactgctaaccctgaaaagatcaatttaatattttatagttcaggaaaaaagcaat

SEQ ID NO: 800430 - DNA, 614 bp, Homo sapiens
agccaggagaaggcagggagtgagagcaggtatttctgagcctgctcggagagggaaggcctttttgggcccctaagagtgtagagatgcttgggtccacagccattgcctggacggctgcagctgcgcccaggaagcgtgaggctcctgcctgttcctggcccccaggagtacagggatgcccaggtccacagcctcaggtgggaggctgcaggtgggatagagctcctgccctgccaactcagaaggggctcggcttccgcctcttcccagctcctgccaactctgtggagcgtgcaggccccgctgtgcctccccggctgcagcagccsctccagacaggtcaccgatgccatcagcaagaacaactctatcaccttttctctaattttcttttgctttcttttggtcagttagaaaaaaagctacagggaaaaattagatgacttttaaaaataaatgtctatctgtgcaaatatttctttacaaactcataaaatattttcttaagcagtttgataaaaatatcatgcaccaaagtagaataaaaacattagttactgctaaccctgaaaagatcaatttaatattttatagttcaggaaaaaagcaat

SEQ ID NO: 800431 - DNA, 571 bp, Homo sapiens
ttcaactatatccttactgatttcctacctgttggatctgtcaattactaatagagataccttgaagtctctaaatataatggcagactttttattcctccctgtgattctcttaggtttttgcttcacttattttgatgctytagttttagagacactttatagattggctcatcttggaaaactgacccttttatcactgtgcaatacccttctttatccctgataatttccttgctctgctgtctccttttctgaaatacaggttgagtataacttatcaaaatatttaggactggaagtgtttttgattttaggtgattttggattttggaatatttgcatatacataatgagatatattggaatgacaaccaagtctaaacatgaaactcatttatactttgtatatactttatacacatagcctaaaggtaaattttagataacattttaaattgttttatcaaagaaaaaatattttaattgtggcccatcacatgaggtcaggtgtggaactttttacttctgacatcatgtttgccttcaaaaatttcagatttgggagtat

SEQ ID NO: 800432 - DNA, 571 bp, Homo sapiens
ttcaactatatccttactgatttcctacctgttggatctgtcaattactaatagagataccttgaagtctctaaatataatggcagactttttattcctccctgtgattctcttaggtttttgcttcacttattttgatgctctagttttagagacactttatagattggctcatcttggaaaactgacccttttatcactrtgcaatacccttctttatccctgataatttccttgctctgctgtctccttttctgaaatacaggttgagtataacttatcaaaatatttaggactggaagtgtttttgattttaggtgattttggattttggaatatttgcatatacataatgagatatattggaatgacaaccaagtctaaacatgaaactcatttatactttgtatatactttatacacatagcctaaaggtaaattttagataacattttaaattgttttatcaaagaaaaaatattttaattgtggcccatcacatgaggtcaggtgtggaactttttacttctgacatcatgtttgccttcaaaaatttcagatttgggagtat

SEQ ID NO: 800433 - DNA, 598 bp, Homo sapiens
tgtatgcagaaatgatgaccactttatttgtaactgcccaaaactggaagcaaccaagatgtccttcaatagatgaatagataaacaagctgtggtacttccaaacagtgcaatattatccaacaatgaccagactaaaagtgctaccaagccacaggaaagtggggacatgttaaatgtgtattgctaagtgaaagaaagcagtctgaagagaccatatcctttatgattccaattatatgacatttttaaaagacattatagaaatagtaaacagattagtggtttccaggggagagaggaggtaggggtaggagatgatgtgaaatttcagtaggtaaagtctagagggctttttaaagtggtaaaactattctctgtgatacggtaattgttgatacatgacgctaatgtatttggcaacacaaaagataacctcacaccataaagagtaaatrttgatgtatgtaaattgaagtaatcatttaggaggtgaagagatactaggattgggtaccattatgagtaagcaatctacctgtgtaagaaatgtatgaaacactctctctgaacaagatgagaggtgctttcctaagta

SEQ ID NO: 800434 - DNA, 625 bp, Homo sapiens
aggcgcatgccaccacaaccggctaagtttttgtttcttgtagagacaggtttcgccgtgttgcccaggctggtcttgaactcctgtcctcaagttatcctcccaccttggcctccgaaagtgctgggattacaggcatgagccattgtgcctggcgttgaacagcagtttagattcacaaaatgctttcatgtgtattaactcattattttttgttgcacttgtcaatagttcccctttttttggtagtgaataactattcattggttcagcaaatatttacaaactgaagtgtttactgtgttagyttcttggagcacaatgctcgccagacatggttcccgtcctcgtggagtttcagccttggaggagcacaccttaatcaaatgataaagtaaaccgaaataaaactgcagctttgcaggtgccacagaagagaaataaatggtcctcatagaggagtcagtgaggtcagaaggcttctctgatctgatgagtagaagttaactgagtgaaaaaggagtgagaatagatacaggcaaaggtcctgtgatatgagggtgcctggtgactatgcgggactagaagaaagccagtgtggccgcatcagaaaagcaaggctgtt

SEQ ID NO: 800435 - DNA, 430 bp, Homo sapiens
caggcaaagcatgagatgctaactttatttatttactttttgagatagggtcttgctctgtcatccaggctggaatgcagtcgagcaatcacggctaactgcagcctagacttcccaggttcaagcgatcctcctgcctcagcctctcaagtagctgggactacaggcgtgcaacatcacgcctggctaatttttttattttttgtggagataaggtctcaactatgatggccaggctagtctcaaactcctgtgctcaagcsatcttcctgcctcagcaccccccaaagtgctggaattacaggtgtcagccagcatgcacggcccaagacgctaactttaaatcacttgttgctcaagtccaatatccctgtgattctgcagaaaaatgtaaaacagctacaggtagttttagtatcaaattttatat

SEQ ID NO: 800436 - DNA, 619 bp, Homo sapiens
aataagaaaaacaatggttgagaagcagttttcaggcattctgatctgcctcattgactaaaaactggtaacattcacagaactcatcgttttgtctctaaattcttcccctagctaatctgcaacagtgcatttttacaaaatgctttgcatatttctgtgctgctaattagcacagtgtattatcttattcacatagctaacatttagacatactacctagaactaaacattgtctccaytgctgaattaattacttatgatatacatgtcaaatgtctatgacatatacatacatatacatgtatatatgtgtgtatatatatgtccagtttcactaaagacacagaatttttaaaaattatggccatatcgaccaaataagcagaaaagacacataatgccaaatctatataaatcttccaccttatagaaaaggagtacatttagattatcttacttggaaagagtccaaagagcagcaaagagactctgaagctttttctcttttaaatcctactaggagaactacgataagagcttcctcaaccacagagcactggtaggctcagaaaacagacaatctcatcctctcacttgggtgaaaggtcctctggat

SEQ ID NO: 800437 - DNA, 654 bp, Homo sapiens
attggacccagttagacaaaatgaacatacttgtttaggaagattgcattgcagaacaggcagaggtgctgcacaacgattcctatggaatcattattaattggtcccctaaggggatgtttagcttgaattgcacctctcagtctgtgtgccactgctacactatgtttagatgatctgaacaaaayggtcagatggtagaaatgataaaaagtacggcaagagttcctcttatctgaaaccatggcggtatagtggcacctcaacctcagatgatatggcccgttgtaggagctaaacataagataaggatttgtggcttaataagatcaaaaatttgggaaagaataaaaaagcatctagaaagacactctacaaatttgtctttagatattgcaaaattaaaagaacaaatatttaaagcatcccaggcacacctgaccttaatgccaggaactggagtgcttgaaggagctgcagacagattagcagctagtaacccattaaaatggataaaaacacttggaagctctgtgatttcaatgatgattgtgcttttaatttgtgttgtttgtatagtctgcagatgcggatcctgactcccgcgagaagtagctcaccatgacaaagctgccttggcttttattgctttgc

SEQ ID NO: 800438 - DNA, 576 bp, Homo sapiens
atacaaacgttttaaaatattaaccaagtgcatgtaactgtcaatgttgaattttatctgagcactatgttcctagaaagcagcaacaacaaagaagttccccacccttgtgatcatgtgtttcatggcaaagatctgtcatattctcacatattttgaagtaaaatacttttgcctccttgttcatgacgttcatacacttgtggattactcctttgtttgccagcttctattaaaccccagattcttctttttcttctgggatgtttctcattaattaaaattctccttattacaataaagtaaataagatcatctcctgaattgtccagtgcactttgtcttttaaatagcacaactttctacaggcatgcacattcttttataataatgtattaataaattcttgaggtaakaaaacattttatagtcataggtaaatgtcaaaagtttcttgtttataaactcacagacaagcacataaagagcttgaattatagcttcagctctagctctacaacttcaactacagattacaaataaacacacacaaaaaactcacacatttcttcccat

SEQ ID NO: 800439 - DNA, 638 bp, Homo sapiens
ggaatgtaaaagaatttatgtagatgaattcatttactttcatctccggaaaccaacctttgatcattcgcgtgtgtaggcctgctttctactcaggggggcaacaatgttaattacccataaattgtgtttgctccaggcctttgtgattaaatctgtactgaataaatacaagcagctctaacttatccgggctgcactcttgttggtggtgctaagctgtgcagttccctagctatactctcaggcaaaataccgacgtttgcatacttctttcatttgtctcttggccagtctgctggacagacctggcaggtagtgccccctgtgaggaatgctgcaacagattgcaatggaacccccaaaaataaaggtgaagagactgcacagtcagtaagtcactgatgcctgctcrggatttccaagtttgggggaattttcaggctagggtttcatcatgggacaacagttattagctcaaaagaaacagtatataaaagtattgaaatagctgcttaaagctagtggagccttggtttcacacgctcaattaagagacctaatgcaaactcttgtttcccataacccatggttcctggaagaaggcacgttagacctagagctctgggaacaagtga

SEQ ID NO: 800440 - DNA, 622 bp, Homo sapiens
gtgtaagaaagggatccagttttagcttcctacatatagctagccagttttcccaacaccatttattaaatagagaatcctttccccagtgcttgtttttctcaggtttctcaaagcccagatggttgtaggtgtgtggtgttatttctgagggctctgttctgttccatggttctatatatttgttttggtaccagtaccatgctgttttggttactgtagccttgtagtatagtttaaagtcacatagcatgatgccttcagctttgttcttttggcttaggactgtcttgtctatgtgggctcttttttggttccktatgaactttaaagtagttttttccaattctgtaaagaaagtcagtggtagcttgatagggatagccttgaatctataaattactttgggcagtatggctattttcacaatattgagtcttcctatccatgagcatggaatgttcttccatttgtttgtgtcctcttttatttcatcaaacagtggtttgtagttcttgaagaggtccttcacgtcccttgtaagttggattcctaggtattttattctctttgtagtaactgtgaaagagatttcactcatgatttggctctctgtttgtct

SEQ ID NO: 800441 - DNA, 601 bp, Homo sapiens
cgtagttgtgtggttttcagtgagtttctaatttgattgtgctgtggtctgagaggctgttatgattttagttcttttgcatttgctgagaagtgttttgcttccaattatgtgatcaattttagagtaagtgccatgtggcaatgagaaaacgtatattctgttgaatttgggtggagagttctgtagatatctatcaggtgcacttaatccagaactgaattcaggtcctgaatatctttsttaattttctgtcccaatgatctgtctaatattgtcagtggggtatcaaaggctcccactattattgtgtagaagtctaagtctctttgaaagtctctagggacttgctctgtgagtctgggtgcttatgtgttgggtgcatatatatttaggatagttagctcttcttgatgaattgaacccattaccattatgtagtgctcttctttgtcttttttgaattttgttggtttaaagtctgttttgtcagaaattaggattgcaacccctgcttttttctgttttccatttgcttcctaaattctcctccatccctttattttgagcctttgtgtgtgtttgcacatgaggtgagatg

SEQ ID NO: 800442 - DNA, 620 bp, Homo sapiens
tccctgcccaatccacacttccagataagagaatcacacttttgggttattttgttctttgtgcaaacctgttgttttactctttaatattattggaatgttttgttgacatatccctctctcaatttttgaaggtcagagactacatcttattcaactctctacttcagggtctagcacagtatttggcatatagtagatttgcagctatcaatttattattgttrgtgatgctgttattttataaattgaaagtaatattgggagatatgtggaaaatacaaattgtacaatgagagcaaaaatgtaacaatgtccatgttgctacataacaggaacctcattttcacaatcaagaatttttttttcttgtcaaagtaaatggaatgttccacttattatagcatgctacagtaaagaaagtgagctacccaggatacaggataatcaatcattagagaaaaaaagttgaattcctatacaagtaatgagaagtcattaatgaaagacacaaaaagttagttctgcatactgtaccagcaggaagagtgatgaagggagaggaaccggtgactgtgatgaaatattgagagtgaattgtttgactatctcatcagcag

SEQ ID NO: 800443 - DNA, 641 bp, Homo sapiens
agctaacagtctagtatacatccaaaacatttagtctgttctggattttatgtttaagacatgtatcctagtattccattctcactaaaatgaaagtatttcttgattttctgggaagttcttggcatatatatatatatatatatatatatatatatatatatacacacaggttgttctgcaataattttttaatagtgtcttctttctcttttaaagtaccacagattagatggtcattctaaccrgctttaaaaaagtttcaagtagttcaacacgtgtttggctttcaaaagatttccccaaatataagaatcatttgggaagcttactgaaaatgccagagtctaaactccacttccagagattctgagtcagtgggtttaggataaaacaaaacaaaacaacataaaacaagacaaaaatccacatgctttagaaaaaaaaggtgagcaccttgctgttttttatttgcttttaggagcagtgcattaatatatccaaatgatctgcatactctctcttctctccacggaagtcagaataaattatacataccaagttctcagcaaatactatgtggcttatgcagatgatccccaacttatgatgattcaacctgggtttttctaggatggtga

SEQ ID NO: 800444 - DNA, 641 bp, Homo sapiens
agctaacagtctagtatacatccaaaacatttagtctgttctggattttatgtttaagacatgtatcctagtattccattctcactaaaatgaaagtatttcttgattttctgggaagttcttggcatatatatatatatatatatatatatatatatatatatacacacaggttgttctgcaataattttttaatagtgtcttctttctcttttaaagtaccacagattagatggtcattctaaccagctttraaaaagtttcaagtagttcaacacgtgtttggctttcaaaagatttccccaaatataagaatcatttgggaagcttactgaaaatgccagagtctaaactccacttccagagattctgagtcagtgggtttaggataaaacaaaacaaaacaacataaaacaagacaaaaatccacatgctttagaaaaaaaaggtgagcaccttgctgttttttatttgcttttaggagcagtgcattaatatatccaaatgatctgcatactctctcttctctccacggaagtcagaataaattatacataccaagttctcagcaaatactatgtggcttatgcagatgatccccaacttatgatgattcaacctgggtttttctaggatggtga

SEQ ID NO: 800445 - DNA, 641 bp, Homo sapiens
agctaacagtctagtatacatccaaaacatttagtctgttctggattttatgtttaagacatgtatcctagtattccattctcactaaaatgaaagtatttcttgattttctgggaagttcttggcatatatatatatatatatatatatatatatatatatatacacacaggttgttctgcaataattttttaatagtgtcttctttctcttttaaagtaccacagattagatggtcattctaaccagctttaaaaaagtttcaagtagttcaacacgtgtttggctttcaaaagatttccccaaatataagaatcatttgggaagcttactgaaaatgccagagtctaaactccacttccagagattctgagtcagtgggtttaggataaaacaaaacaaaacaacataaaacaagacaaaaatccacatgctttagaaaaaaaaggtgagcaccttgctgttttttatttgcttttaggagyagtgcattaatatatccaaatgatctgcatactctctcttctctccacggaagtcagaataaattatacataccaagttctcagcaaatactatgtggcttatgcagatgatccccaacttatgatgattcaacctgggtttttctaggatggtga

SEQ ID NO: 800446 - DNA, 658 bp, Homo sapiens
catcagtgccatcctagctagacatgttggaactcagttctatgtcttcttcttattcagtcctcactcatccaatacacttggatcttcagtccagtccattttatctctgtgatgtctcctctttttgtatcattgcttataccagtactggttacagaaatagatcaggaaagrgcctgtagaatactatggaacctgttgtagaaagctaatataagtatgggataaacatgtatacagaagtagtagttcctggggaaggctgagaatcacatctcaagttgattgtggcagcctaatttcagacaaaaattaagatatgggaatgggaagtgtaatgaggaatgtaggtttcttcagcacagtagtaatgagggaagagggttgttttggtgacagttgtggtgaaaaagacaggccaatacaggtcctgaaccaaggcagccaattcaagaagaggcaagagagcttggaaataattctgggggaaaagatagtgggaatgaggcacaaaagcaggccatagcccagctgtcagggtacagagctattcttctctctggtgctacaggcctgggggatgggggcagaactcacgtctcaaaaaggaggtcagcgtagaacagcctctctgtgtgggataagaagagatatg

SEQ ID NO: 800447 - DNA, 395 bp, Homo sapiens
aaattgatcagacaacaaacactttcctttggaagtgatggagttgcacagaggatgagatgtgtttggtctcagtgactcttacatggtgcattctctgggaacagaggcaggagaggggctgatggaacagcacctccgtctgtatgctaggccctgtkctttcagacccacgcctttcttttcacactaagaacagatggcaaccagacattgagtggaggggtctgttccttgtgatccttggggattttgcattcagtttagcaaaaagtcatcaaaacgcaaagagagaaatgagcctacagcctgttcacaattatgcaggacttgtttggcattcactgtactgacagatttaaacacttttgcagatatcgaatgataacagcatt

SEQ ID NO: 800448 - DNA, 627 bp, Homo sapiens
agttctatcagatgtacaaagaagagctggtaccaatactactgaaacttttccaaaaatttgaggagaaggcgctccttggtaactcattctatgaagccagcatcaccctgatacccaaatctggcaaagacacaacaaggaaagaaaactacagaccaatatccctaatgaacatagatgcaaaaatcctcaataaaatactagcaaaccgaattcaacagcacatcaaaaaattaatttgctgtgatcaagtaggtttcattcctgggaggcaaggttggttcaacatatgcaaatcaataaatttgactcactacataaacaaaactaaaaatgaaagcaatatgatcacttcaatagatgcagaaaaagcttttgatgaaatccaacatctcttcttgttaaaactgttgacrgttaatattaagtgtcagcttaattggattgaaggatgcaaagtattatttctgggtgtgtctatgagggtattgccagagaagattagtatttgagtcagaggactgggagaggcagatccaccctcagtctgggtgggcaccatccaatcggctgccagggtggctagaaaaagcacgcagaagaaggtgagatgagctgaattgc

SEQ ID NO: 800449 - DNA, 620 bp, Homo sapiens
tgaagctgagtctgagcagagttttgaagctgatgagtaaagcatagaccattctaagaaaagtgaaataaaataaaagaagtattatgtggcagaaatggctggagctaggacacttataaacaagggcattgagaatgtcaggagaaggaggacagcaactgagattagatggctcctccctttggctctcctcaccatyagccagaaacttttaagtaggcatgagacttattcatggcagaccttagtctcaatattcattggtgatagcactaagggttattgaagacaccttcataaacctacattactttcaaggatcccacagaggattgcagacattttagaaaatgctaaaataacaatagtataaatgcagaattctgaagacaatatacagcatcttcacatttcaagaggcctttgacaacagaagtttttaagatcttggtaaaagacagattttttccccctaggcctgctgtgctgcaaattttttcagtctattgaaatttactgctcttttcacctaaaatcactgtaaatgttgtgacatgtctaaaaatgtgtctgcttctctcctgtttcttttagcctcaaactatttttttttttat

SEQ ID NO: 800450 - DNA, 642 bp, Homo sapiens
gttatcttctagaaactatattgctttacctttcattttctatgatctatatataattgaaggccaggcacggtggctcacacctgtaatcccagcactttgagaggtcaaggtgggcagctcacctgagatcaggagttccagactagcctggccaacatggcaaaaccccatctctactaaaaatacaaaaaattagccaggttgggtggtgcgcatgtgtaatcccagctacttgggaggctgaggcaggagtattgcttgaacttgggaggcagaggttgcagtgagcagagatcgtgcyactgcactccagcctgggtgacagagagagactctgtctaaaaaaaaaaaaaaaaaggagaattgagttgtgtatggcatgaggtgagatcaaagttcttttggttccatatgggtacccacctgactcagcaccattttttcattgaaatggccctttccctacttcaactttgtcatagatcaaataattctacatgcctgggcctgtttctattgaaataatcagatagtttttatcctttatctcattaacatggtggagtacatagaactatctggagtgtagttggttataaggtatgattcctatattaggaattttttaatgaagaatgg

SEQ ID NO: 800451 - DNA, 631 bp, Homo sapiens
ctatagctgatgagaataagtgatttttatgtatgtctttatgcttatctcttttctaaacttgctaaaattaatatgcattcaaccatatgcaaaaatgtaataatcatttttaaatggaagcataagaaagataatgatttcattttgaaatgaacattggcatttctagtcaattctacatgttcagaggcacagcctgcctccaatgctccttcaacattagagctttgtgctagacgctcactaacctaaacacacggcttacatcccttggataaaggtcgaagcacagccctctagcaaactatcctgccagtgtcatataaaccctggaacaccacaaatcctcacgttttgaggacaaatccttccagtaggcagctctcagagaggctatacagaaagccttcctatgattccaaaccagtaaagctgtttttttattttacttctactgartagcagtcatgatttatttcttcaggtttccaggtagaacagatttctatagtttggtctaaagtcttaacactggaaacacttcctccatgtgttctgtggtttctcctcctgagtagaaaggatatcagctgaaaccctaggcaagggcaggctgtgggaaggcaag

SEQ ID NO: 800452 - DNA, 486 bp, Homo sapiens
agcacccttcgccgttctcctgcagaaccccgtggaatggccctgctttctcagagtgctcctagcggtgatgagggagcccagctcattgcggttcgtgcagaaggctgtgtgccatctccgggactgcacggagaggcggaggctcagrcgtgggatctgagctcagtgggccctttaaggaccgctgcctcctttcctccctttggcattcagcatcgacttacgatggctcccagtcacagtccttgtcactgcctggcattacacagggccacagtcccttaactgaaacacttgggaccagttgcattttggaattcggaatgtttcttgatttcagagagagaagaggggatggactgttgggcagccctgattaaccctgcagcgtcttggctctagaggggcctacacggctgggagcgtctcggctctagagaggggcctgcactgccgggagcatctcagctctagagaggggcc

SEQ ID NO: 800453 - DNA, 486 bp, Homo sapiens
agcacccttcgccgttctcctgcagaaccccgtggaatggccctgctttctcagagtgctcctagcggtgatgagggagcccagctcattgcggttcgtgcagaaggctgtgtgccatctccgggactgcacggagaggcggaggctcaggcgtgggatctgagctcagtgggccctttaaggaccgctgcctcctttcctccctttggcaytcagcatcgacttacgatggctcccagtcacagtccttgtcactgcctggcattacacagggccacagtcccttaactgaaacacttgggaccagttgcattttggaattcggaatgtttcttgatttcagagagagaagaggggatggactgttgggcagccctgattaaccctgcagcgtcttggctctagaggggcctacacggctgggagcgtctcggctctagagaggggcctgcactgccgggagcatctcagctctagagaggggcc

SEQ ID NO: 800454 - DNA, 536 bp, Homo sapiens
atcactgttctcttcttcccaaacattagcgttaggctgttccgcttctgttcttgagagggcacccacattactgcttgggagcctggaaatggccccactgaagcagctctgaggccctggacacccttttcctggttgtggccagctgagttgtkcatggtcctccccgtgggatgtgcttggagcatctgctggtagcagagcctcagttcctctcctgcgttctttcgctacaggtgttagacctgctgcccacctgtgacctgtttactgccagggatagacctgtggccagtgtggaaagtgagatgctttgtccatacagcctgcggggctcagccttcccggggttgcccacagctaggctgggccaggacccccaagcctgggaacttacacctttctcacctgctttcctaaaggtggttttcctttgtgatctctctccctgaacggctaaaccacactctgaatagaaaactgtcttgaaaactgctttgcacgtacatctgataaggtcctctggagggcga

SEQ ID NO: 800455 - DNA, 594 bp, Homo sapiens
aaccagggggatcactgttctcttcttcccaaacattagcgttaggctgttccgcttctgttcttgagagggcacccacattactgcttgggagcctggaaatggccccactgaagcagctctgaggccctggacacccttttcctggttgtggccagctgagttgtgcatggtcctccccgtgggatgtgcttggagcatctgctggtagcagagcctcagttcctctcctgcgttctttcgctacaggtgttagacctgctgccyacctgtgacctgtttactgccagggatagacctgtggccagtgtggaaagtgagatgctttgtccatacagcctgcggggctcagccttcccggggttgcccacagctaggctgggccaggacccccaagcctgggaacttacacctttctcacctgctttcctaaaggtggttttcctttgtgatctctctccctgaacggctaaaccacactctgaatagaaaactgtcttgaaaactgctttgcacgtacatctgataaggtcctctggagggcgacctccactgtctagtgggcgaggattgttcagccgccttggctgagtc

SEQ ID NO: 800456 - DNA, 563 bp, Homo sapiens
tgtgaaaatcaaatcagcctacttggaatatctatcgccttaaatatttgtttttgctttatgctagaaccgttccgattcttctcttctagccattttgaaatatacagtaggcaattgccaactatgatctatgtaacactaggtcttattccttctatcaaaccacgtatttgtacccttcaatcaacttctctttctccccctctccccgctacatttccccacctctggtaaccacgcgtctaccctctrtcttcacgagagctacttttttagtaggtgggtgagaacattcaatgtttgtctttctgtgcttggcttatttcacttaacataatgatccctagttccgtcttgtacaaataacaggctgtcattcctctgtatggctgaataatattccactgtgtatacacaccacgttctgtttatccatcatccgctgatgaactcagaggctgattccgtattttggcgattgtgagtagtcccgcagtaaacatgagagtgcagatgtctttacgatatattgattttgtttcttttgactataggcccag

SEQ ID NO: 800457 - DNA, 563 bp, Homo sapiens
tgtgaaaatcaaatcagcctacttggaatatctatcgccttaaatatttgtttttgctttatgctagaaccgttccgattcttctcttctagccattttgaaatatacagtaggcaattgccaactatgatctatgtaacactaggtcttattccttctatcaaaccacgtatttgtacccttcaatcaacttctctttctccccctctccccgctacatttccccacctctggtaaccacgcgtctaccctctatcttcacgagagctacttttttagtaggtgggwgagaacattcaatgtttgtctttctgtgcttggcttatttcacttaacataatgatccctagttccgtcttgtacaaataacaggctgtcattcctctgtatggctgaataatattccactgtgtatacacaccacgttctgtttatccatcatccgctgatgaactcagaggctgattccgtattttggcgattgtgagtagtcccgcagtaaacatgagagtgcagatgtctttacgatatattgattttgtttcttttgactataggcccag

SEQ ID NO: 800458 - DNA, 563 bp, Homo sapiens
tgtgaaaatcaaatcagcctacttggaatatctatcgccttaaatatttgtttttgctttatgctagaaccgttccgattcttctcttctagccattttgaaatatacagtaggcaattgccaactatgatctatgtaacactaggtcttattccttctatcaaaccacgtatttgtacccttcaatcaacttctctttctccccctctccccgctacatttccccacctctggtaaccacgcgtctaccctctatcttcacgagagctacttttttagtaggtgggtgagaacattcaatgtttgtctttctgtgcttggcttatttcacttaacataatgatccctagttccrtcttgtacaaataacaggctgtcattcctctgtatggctgaataatattccactgtgtatacacaccacgttctgtttatccatcatccgctgatgaactcagaggctgattccgtattttggcgattgtgagtagtcccgcagtaaacatgagagtgcagatgtctttacgatatattgattttgtttcttttgactataggcccag

SEQ ID NO: 800459 - DNA, 563 bp, Homo sapiens
tgtgaaaatcaaatcagcctacttggaatatctatcgccttaaatatttgtttttgctttatgctagaaccgttccgattcttctcttctagccattttgaaatatacagtaggcaattgccaactatgatctatgtaacactaggtcttattccttctatcaaaccacgtatttgtacccttcaatcaacttctctttctccccctctccccgctacatttccccacctctggtaaccacgcgtctaccctctatcttcacgagagctacttttttagtaggtgggtgagaacattcaatgtttgtctttctgtgcttggcttatttcacttaacataatgatccctagttccgtcttgtacaaataacaggctgtcrttcctctgtatggctgaataatattccactgtgtatacacaccacgttctgtttatccatcatccgctgatgaactcagaggctgattccgtattttggcgattgtgagtagtcccgcagtaaacatgagagtgcagatgtctttacgatatattgattttgtttcttttgactataggcccag

SEQ ID NO: 800460 - DNA, 565 bp, Homo sapiens
gctcacagagctcccctcggccatgtcctccacctgcccttccttggtccagcacctcacctgcacacacctgtctggagagtccccaaggttggagagctgctgagtcagctgggccgagcacacagcgcaatacttccttgtgcctcctaaccaggatgggygacaccagcccattttatggatgggacaagaagaagctgggctgacaagcccaacatagtggagccagcaacaggcttttactctcctctctgtctctttgtctctctcccccaccgcacctccatccgctccattctcctctctgcacatcagcttcccagacaatattcttggtttctgtggctcccaaactgaagcttccccacagtggctgcaactatccagacctggggccacacttgggcctccaggcaggggatctagtgatcacattctggtcatgtcatcaggccaacttggctgagctctgccctccttatctctcttctcccctcgagccctcaccctggttacctgcacaagtaaacttgcccctaactgacccccttttctccctcca

SEQ ID NO: 800461 - DNA, 527 bp, Homo sapiens
cataactttgtcaaagttaaattataggctaaatcctatatatcttaatggcacatgcagcgcaagtaggtctacaagacgctacttcccctatcatagaagagcttatcatctttcatgatcacgccctcataatcattttccttatctgcttcctagtcctgtacgcccttttcctaacactcacaacaaaactaactaatactaacatctcagacgctcaggaaatagaaaccgtctgaactatcctgcccgccatcatcctagtccttatcgccctcccatccctacgcatcctttacataacagacgaggtcaacgatccctcctttaccatcaaatcaattggccatcaatggtactgaacctacgartacaccgactacggcggactaatcttcaactcctacatacttcccccattattcctagaaccaggcgacctgcgactccttgacgttgacaatcgagtagtactcccggttgaagcccccattcgtataataattacatcacaagacgtctta

SEQ ID NO: 800462 - DNA, 514 bp, Homo sapiens
tcccctaaaaatctttgaaatagggcccgtatttaccctatagcaccccctctaccccctctagagcccactgtaaagctaacttagcattaaccttttaagttaaagattaagagaaccaacacctctttacagtgaaatgccccaactaaatactaccgtatgacccaccataattacccccatactccttacactattcctcatcacccaactaaaaatattaaatacaaattaccacctacctccctcaccaaagcccataaaaataaaaaaytataacaaaccctgagaaccaaaatgaacgaaaatctgttcacttcattcattgcccccacaatcctaggcctacccgccgcagtactgatcattctatttccccctctattgatccccacctccaaatatctcatcaacaaccgactaattaccacccaacaatgactaatccaactaacctcaaaacaaatgatagccatacacaacactaagggacgaacctgatctcttatac

SEQ ID NO: 800463 - DNA, 619 bp, Homo sapiens
agacctggattcaaaacccagctctgtcctttctgacgggtgaccttctacaattcgcttcccttctctgagcctcagtttcaggcagggccagaggccaggagccagccaagagccaggaggatgaggcagcagaagrcagaacccagtggacaggcagctgtccagcatggggacttgcaggagctgtggcagtgagtggaaagggaggtcaccaaaggccccaggctaggagaggccccttatcatgtaagcagtggctctggcgtccaacctagcatcttccccagtggagcccaccctggctcaggccaaggccggtgggcacttctgagtctacctgtctgcatagggatcagagacccatgttctctgacagatacctatttctctggtgcatgtcacagcacccagtgtggcccctgcccagtgtggaagcaagggaggtggccacctctgccaagctgcctgtgtcttcctccatcttccttctcctccagatccaagattcactgaattgcccaggtaccttctccccacatacacaccatagccaccccccgccacacacacacacactcgggcacatatacacccatgcaccatacaccacagtcat

SEQ ID NO: 800464 - DNA, 606 bp, Homo sapiens
cagccactccagccatgactaaaatgggccaaggtacagctcagggtgtggcttcagaggtacaagctccaaactttggcagctcccacgtggtgttgagaattgaggtttgggaacctctgcctaggtttcagaggatgtatggaaatacccagatgtccaggcagaagtttgstgtaggggtggggcactcatggagaacctctgctagggcagtgcagaagagaaatgtgaggttggagcccccacacagagtccccactggggtgctgcctagtggagctgcgagaagagggccaccatcccccagaccccagaattgtagacccatgaacagcttgcactgtgcacctggaaaagctgaaaacactcaatgccagcctgtgaaagcagctaggagtgaggctgtaccctgcaaagccacaggggtggagctgcccaagaccataggaatccactttttgcatcagtgtgacctggatgtgacatggagtcaaaagagattactttggagctttaagatttgattgccccactggattttggactcatatggagcctgtagcccctttgttttggccaatgtctcccctttggaatggctgc

SEQ ID NO: 800465 - DNA, 628 bp, Homo sapiens
ttctctcggttgcctgttcactctgatgatagtttcttctgctgtgcagaagctctttaattagatcctctcacagtgtacattagaatggctataatcaaaatgacagataaaaacatctcttggtaagaacgcagaaaattggaactctcatacattgcttgtgaaggtataaaatggtacaagctttttgaaaaactgttcaacagttattataaagttaaatacacacttaatgtatacctcaaaaattctacttctgtgtatttactcaagatcaatgaatacatattttcataccaagatgtgaacatggccggcatggtggctcacacctgtaatcccaacactttgggagaccaaggcaggtgcattgcttgagctcaggagtttgagaccagcctcagcaacataatgaaactgygtctctacgaaaaatacgaaaaattagcagggcatggtggcacacacctgtggtccaagctactcaggaggctgagacgggaggatcgcttgagcctgggaggcagaggttacaatgaactgagatcatgccactgcactgtagcctgggtgacagagtgagacccggtctcaaataaaaaaaaaaaaaaagatgtgaacatca

SEQ ID NO: 800466 - DNA, 601 bp, Homo sapiens
ccaaaactacagttaatcaaaagtcaacatggaggactagcatccaagatggagctactttagccttcctagtgatttttttttcagttgtttcatttatttctactcttactcctatcgtttcctttcttctgcttcttttggattaaatatacatttattttcctagtttttaaggtggaagttgaggtgattgatttgagttccttattctcttttactgactgctaaaaattcccctgtaagtactgttttaacagcatgccacaaatattggcatgttaggttttcattttcattcacgtaaaaatattttctaatttccttttaatgtctactttgactaatttattattkaaaagtgcagtatttactttttaaatctttgaaaactttccagatatttttctgttttggtgagagaacatgctttgtatgactttaattcttataaatgtatcgagacttgttttatatttcagaattggtttaccatggtcagtgtcccatatggacatgaaaaaagaaatgtaatttcttttacatattctactattatatattctaaatagcatattctactattattgggtagagtgtt

SEQ ID NO: 800467 - DNA, 623 bp, Homo sapiens
gacaaaacagtaaatctgaacaaactagtatctacagaaaaaaataggggaaactgcaaaaaagctctctctcaccaacttcccatttaaaaaagcaatgggctcagatagtttcacagggaaatttggcaaatcttaaaagaatacatattttcaacattatttgaattgttgtagagtatgaaaaaagaagaaaaacttctgaatatttttaatgaagtaatatggacaccaaaatttagcaaagattaaacagaaaagtatagatcaaacttttgtataaatatgaatagaaaaatctttaacaaaatattaacaaataatatccagctataataggataacacatctgatttagtggactttatcctagaaataaaagaattatcaataataaaattaatttattaatgctttaccatatcatattctatgaataaaaattaatataatcatataattataatataatttccatgagtkatactgaaattgtgtttaataaattcaatatatattcttagtcaagattcttaataaaatagaaacagataaatactcctttaatatgattaaataaatctgtctcaatccaaatctaacctcatgcttaagaaacacat

SEQ ID NO: 800468 - DNA, 597 bp, Homo sapiens
attaatataaaatgaggtcataagggtggaaccctgatttgataggactagtgtcttcctaagagacatcagagaagtttctcttcctcttgtgagcacctagcaggaagatggccatctgcaagtcaggaagagagctctcaccagtaactgaactggctgacaccatgatcttggatttctcagactttggaactgtaagaagataaattattttgtttaagtcacccagtccacggtgttttattaaggcagcctgagctaactaagactgtgccattaactcagataaagaataccaaggggacagtatttgtttgttgtcgttttattwtatttattatttatttatttattttctgttttgggcatgtcaagtgtgagatgctgataaggaagacaggaggagctgtccagcaggcacctgggtctattgagtaggaacaatgaaggagcagtcaggtgaggagagagtttagggagttcttagcacagatgaaacagaaggcaaaggagttgggtggttcccaaggcaagaatgtagaacacataaaagaaggcagcccggggaaggacagggggatccagacacctaca

SEQ ID NO: 800469 - DNA, 631 bp, Homo sapiens
agcaccttctggttaacttttctccacattcatgctcttagccttggattcttaactttcaggacccttgaaactaaactcagagttttgtgtgtatgtgtctatgtaaatatgtatccatccatacatacacttacatttccccgatggaargatccccggatggtaccagactcacaacagggtctgctgagcaaaaaaagaagagacgaagctctcagagctacttggtggccatatgggatgtgtatatgttgctttcctcaaacacaagttaatcttctcatcctgtcctgcccccaccgttcaatgtaagcctggtaatttcctagagaggcaggcttgtcatctgagaaatgtttaagcatagccatggtcaggaggtagagcagggagctgtgagtggtctgcagaggctggggaggtaggtttccaggcaggccagaattttatgtaagccatcttgaagcaaaagcagctttaggaagtgcattccgatggactcaccaccaaagggaagcccatgaaagaaacgttgtcagaagcgaccgtgaatctggagggggtggtacccttcacgaaggacagagcgggaaggtgcggaaggtgcagagagcccaccagccagacc

SEQ ID NO: 800470 - DNA, 586 bp, Homo sapiens
aatgacaatgggggatggtgtctgggttgcagtatttcttcctgtcggcaggatgtcctctagtcctcttcactgaggctttcacagagcaaacgctgttaacattttgatgaggtccagttgattaaatttcccttttatggatcaagctttaggtgtcagctttaagaactctttgcctaggcctagattctgaccattttcttcttcttttttttttttcttgagatggagtctggctcttgtcacccaggctggagtacaacagcggcatgctcttggctcactgcaacctccgcctcccgggttcaagcgattctcctgcctcagcctccygagtagttggaattaaacaggtgcccaccaccacagcccggcaatttttgtatttttagtagagatggggtttcaccatgttggacaggctagtctcgaactcctgacctcaggtgatctgcccgtctcggcctccccaaagtgccgggattacaggcgtgagccactgcacccagcctcttctatgttttttctacaagctttgtagttttatattttccatttaagcctgtgatcctttttttttcag

SEQ ID NO: 800471 - DNA, 588 bp, Homo sapiens
caaaaccaaaatgagataccgtctcacaccagtgagaacggtgatcattaaacagccaggaaacaacagatgctggagaggatgtggagaaataggaatgcttttacactgttggtggttagtgtaaattagttcaaccattgtggaagatggtgtggcaattcctcaaggatctagaaccagaaataccatttgacccagcaatcccattactgggtatatacccaaaggattataaatcattctactctaaagatacatgcacacatatgtttatttytatttgcttatttaatgtctttctggactaattctataaagtctgtaatttctataatgtgccattgaatctgcttggttaacttaatagttagccaatgacagggcagaggttttcttaaagaccttgaatcaataaggctttttgtttttaccctttgctaaggggctctgttgtgtatatcgggacatatcctcaattctcaagcaggcagttttaaactctgctatggccttcacctcctgtttttaaagagacatcaagtcaactaaaggtgagcacttagggccttcttagatatttcctgg

SEQ ID NO: 800472 - DNA, 560 bp, Homo sapiens
agtagttaattatttgattatttattataaattaaaagggaagagaagggaaaatgctgttatcttttggaaagtctattttcttttctttctttctttcttttttttttcctgagatagagtctcactctgttgcccaggctggagtgcagtggcacgatctcagctcactgcaagctctgcctcccgggttcaagtgwttcttgtgcctcagcctcctgagtagctgggattataggtgcgtgacaccacacctggctaatttttgtatttttggtagagatacggtttcaccatgttggccgggctggtcttgaactcctgacatcgggtgatccacccgccttggcctcccaaaatgctggaaagtctactttcaaattgaaaatgtcacggagaaaaatctcctccccctcttttgtcttgaccacaccttcctccagtggataactaatggaatttgaggtgacctctacttaccatcaccatgactgcatgagagcctcacagtctgggggctgggtaaaaatagaaattagatagttttagtgcctttttaa

SEQ ID NO: 800473 - DNA, 643 bp, Homo sapiens
cttatagattataattccctatagcatgcagagttatttcacaggctttatcttcttaatttgacaaattttttagagaccctacttgccaagcactgagaatatgaagttgaataaggaatagtctctaatctcaatcaattttcagactaatggaaaagtctatcatagaaacagttgttatgagctctaaaatcatagatgaagaataattaattctcattgctgaccagaggtaaatagaaagaagagtcaaatttgagctgagagccctagagggatgaaagagagtttgtcaaagcccattctgaagtgaataacacggtcataagaatgagccatggggaatatgacaaacagcctggtgtggccaaagggtgrtggtggcagtggcagaagagaagcagcctgagagatggctagggccagaacaagagccataggatctctcctagtacaggtgggcttcaactatccgcgtttttacatgttgctttggcaaacttgagagaattgatgaatgccttctatcccttcaccaagattgtattgaatcctcttccatatacctaccagcagtgttctaggctctggggatacaacatactccctgatttcatagagtttacattctctatgaaac

SEQ ID NO: 800474 - DNA, 643 bp, Homo sapiens
cttatagattataattccctatagcatgcagagttatttcacaggctttatcttcttaatttgacaaattttttagagaccctacttgccaagcactgagaatatgaagttgaataaggaatagtctctaatctcaatcaattttcagactaatggaaaagtctatcatagaaacagttgttatgagctctaaaatcatagatgaagaataattaattctcattgctgaccagaggtaaatagaaagaagagtcaaatttgagctgagagccctagagggatgaaagagagtttgtcaaagcccattctgaagtgaataacacggtcataagaatgagccatggggaatatgacaaacagcctggtgtggccaaagggtggtggtggcagtggcagaagagaagcagcctgagagatggytagggccagaacaagagccataggatctctcctagtacaggtgggcttcaactatccgcgtttttacatgttgctttggcaaacttgagagaattgatgaatgccttctatcccttcaccaagattgtattgaatcctcttccatatacctaccagcagtgttctaggctctggggatacaacatactccctgatttcatagagtttacattctctatgaaac

SEQ ID NO: 800475 - DNA, 593 bp, Homo sapiens
ccttctttacaccttatacaaaaatcaactcaatatgcattaaagacttaaacatgagacctaataccataaaaaccctagaagaaaacctaggcaataccattcaggacataggcatgggcaaagatttcatgactaaaacatgaaaagcaatggcgacaaaagccaaaagtgacaaatgggatctaattaaactgaagagcttctgcacagcaaaagaaaatgtcatcagaatgaacagacaacctacagaatgggagaaaatttttgcaggtggatatctgacaaagggctaatatccagaatctataagaacttaaacaaatttataagaaaaaaacaaacaaccccatcaaaaagtgggcaaaggatatgaacagacacttcgcaraagaagacatttatgcaatcaacaaacatgaagaaaagctcatcatcattggtcattagagaaaatcaaaatcaaaatcaaatgagataccatctcatttgaaatcaaaaccacaatgagataccatctcacaccagttagaatggtaatcattaaaaagtcaggaaacaacagatgctggagaggatatggagaaatagaa

SEQ ID NO: 800476 - DNA, 634 bp, Homo sapiens
cctagaaaccatttgaaggaaaggaatgtcatttccttcagcttatcatgagaactagccttagccgaagcaaggtcacttttttgaaatgcacttgttttgtaaaaaggatggctagactgacccaatgcattgaaatgtccaggactcaatctcctgtccaccagctccttaggatcttttcagcctgcagactggacgtgcacacagtggcaggcaatgtatctctggattttcacgctcctggagtagatgagctgtgtttgctataaaatgtcatgtttgctgtgtatctgggaagacttaatgaagcattgtgcacgcagaggcaggatgatgctgacattaatcattgctgctaacttctggatgtgaaagcagatggygacacccatggcttctcagacagcacaggttgaggatgtgagttgatcctactggttttcctttagaagcctattttctttttctgttgtcatttctatattcctactgaaggaacaactgttacagaaacacttaaggaatacatggaaacatgtgtgagtgtgtaaagctgtgtgaaaccagctttactttattcatccccttttttcaaaggaagttaataaatatgatcagaaacactctcttg

SEQ ID NO: 800477 - DNA, 593 bp, Homo sapiens
cgtggtgtcgctggcttcaggagtgaagctgcagaccttcacggtgagcgttacagttctttaaggcagtgtggacccaaagagtgagcagaagcaagagtcatggtagagggcaaaagaaaaaagcttccacagtgtggaaggggacccgagcaggttgccgctgctggctcgggcagcctgcttttattcccttatctgaccccacccacatcctgctgattagcccattttacagagagctgattggtccattttatggagagctgattagtccgttttacagagagctgattggtccattttgacagggtgctgattggtgcgtttacaatccctgagctagacacagartgctgattggagtatttacaatcctctagctagatgtaaaagttctccaagtccccactagattagctagacacagagcactgattggtgagcttacaaaccttgagctagacacagggtgctgattggtgcgtttacaaaccttgagctagacacagagtgctgattggtgcatttacaatcctttagctagacataaaagttctccaagtccccaccagattagctagatacagagt

SEQ ID NO: 800478 - DNA, 558 bp, Homo sapiens
cacgtgggagcgcctgggaacccaggcaagcatctgttgcagactgcacaaacgtctaaacatccgtgcaaacttggaccaacaggtcctgctgaaatgtgctaaccatctgcttttccttagctgtttttgagcaaattatgtttattatgttaatttattttactgtcaacaacacagaatgacacagttgctgctaaatatcattatatatctcagcctggcatatcaccagcagggctttttttattttktattaatttttttgtatatacaacaagaataaatacatattgaaatgtcgatctatttaaaatggtgtccgggatggtaaagtcatctgtacagaaggccctggttgctcacccttccagcaaaggcttttgctaggagaggcagcacagcggccatctgggtgggggcctaggcctgcagcccgcccaggtccctccagacagttccatgtttggccaggaacatggggcttctcagaagtttgtggggttaggaaagagagagagcgagagagacagagacagagagagagagagagaggct

SEQ ID NO: 800479 - DNA, 629 bp, Homo sapiens
caggcaggagcgctcctgccctcccaggcatcactgtagctaccctgctgtggctgcagatccaggcatctctgcactctcaggggtccaggaaggcccctttccccccacgggctcaagaagcacctgctcctgctgcctggcttctccctgctgtcagcacctgctccaatctcaaagcaaggctggggctgagcctgggctctgctgtaacctggttgggtgtgcacacgcttgaggcagtgctgatatgcccacctcctaccccattggcctgctccagactttgggtgccaataagcatggaagggaggctgaggaaggggtgctcaggacagctcggtgccrgcctgcaggtgccccctcagcatgaacagcctgggtgccataaacagaagcagggagcaaagaagctcctgggcagaaaaggggaggtccccggtgaagccccaccttcaagccagagaagccctgaagcctgggggccaggttgccagtcatgtggactggagtgggaacttgtggtgcttttctgggtctgtccatgactgcccatggaccaactgcacgcatttcctctcctctgaggcacataaaagccccggacttagccagacttgaagagacaa

SEQ ID NO: 800480 - DNA, 566 bp, Homo sapiens
cccaggccacggaccagtgctagtcggtgtcctgttaagaagcaggccacacagcagaaggtaagcgttaccacttgaactctgcctcccgtcagatcagcagcagcattagattctcatggaagcacaaaccctattgtgagctgtgcatgtgggggtctaggttgcacgctccttgagagaatctaatgataaatggaatgcactggaatcttcctraaatcatcatcccccaccaccacccttggtccgtgggaaaactgtcttccgtgaaaccagtccctggtgcctacaggctgggggctgctgctttataatgttgttccggaaggaaaacattccctcgagtctgtgccatttgctgtgctgggaggtgacatgtatacaccttgagtttggatttcagtgaaaaagcctttgttgatgcttcgtctaaagatgcacagtgaaaggagtccttcttatccttttgaattactgcagacagtgtttaacccaaaactttcactgaggcgatgctgtccctccccaccagtcagcaacacttgaacggggagaacaaacca

SEQ ID NO: 800481 - DNA, 566 bp, Homo sapiens
cccaggccacggaccagtgctagtcggtgtcctgttaagaagcaggccacacagcagaaggtaagcgttaccacttgaactctgcctcccgtcagatcagcagcagcattagattctcatggaagcacaaaccctattgtgagctgtgcatgtgggggtctaggttgcacgctccttgagagaatctaatgataaatggaatgcactggaatcttcctgaaatcatcrtcccccaccaccacccttggtccgtgggaaaactgtcttccgtgaaaccagtccctggtgcctacaggctgggggctgctgctttataatgttgttccggaaggaaaacattccctcgagtctgtgccatttgctgtgctgggaggtgacatgtatacaccttgagtttggatttcagtgaaaaagcctttgttgatgcttcgtctaaagatgcacagtgaaaggagtccttcttatccttttgaattactgcagacagtgtttaacccaaaactttcactgaggcgatgctgtccctccccaccagtcagcaacacttgaacggggagaacaaacca

SEQ ID NO: 800482 - DNA, 566 bp, Homo sapiens
cccaggccacggaccagtgctagtcggtgtcctgttaagaagcaggccacacagcagaaggtaagcgttaccacttgaactctgcctcccgtcagatcagcagcagcattagattctcatggaagcacaaaccctattgtgagctgtgcatgtgggggtctaggttgcacgctccttgagagaatctaatgataaatggaatgcactggaatcttcctgaaatcatcatcccccaccaccacccttggtccgtgggaaaactgtcttccgtgaaaccagtccctggtgcctacaggctgggggctgctgctttataatgttgttccrgaaggaaaacattccctcgagtctgtgccatttgctgtgctgggaggtgacatgtatacaccttgagtttggatttcagtgaaaaagcctttgttgatgcttcgtctaaagatgcacagtgaaaggagtccttcttatccttttgaattactgcagacagtgtttaacccaaaactttcactgaggcgatgctgtccctccccaccagtcagcaacacttgaacggggagaacaaacca

SEQ ID NO: 800483 - DNA, 606 bp, Homo sapiens
aatagaatatctatcgaaaatatccttcatacatgaaggaagaatactttctcagataaacaaaggctgagggatttcaacaaagactagaactgtcctacaagaaatgttaaaggaagtatttcaatcagaaagaaaaggatgttaatgagcaataagaaatcatctgaaaatacaaaacttactggtaatagtaagcacacagaaaaacacagaatattaaacattgtaactctggcttgtaaactactctwaccttgagtagaaaagactaaaagatgaactaataaaaaataataactacaactattcaagacatagacaatacaataatacatacatttaaaagttaaaaatatataaatttaatatataaatttaaaaagttaaaaaacacgggatgaaattaaagtgtagttaacctaaccattattaggattttttgcttctttgtttatgcaagcagtcttaaaataatgggtaatagatattatttgtaagcctaatggtaacctcaaatcaaaaaacatacaatggatatgccaaaaataaaaagcaagaaattaaatcctaccaccagagaaaatcactttcactaaaagaaag

SEQ ID NO: 800484 - DNA, 653 bp, Homo sapiens
aatttctgggtaaccagaggtgctgaatgtaaaatatgagctcagccaggcgagggctgacaaggagaagcgggaaagaaggggctgaatgagtgagtcattggtccagaaggaatgctcctgcatcttaacgaaatcccgagcctgcggctcattttctgcagagaggctgaagatcccagtygctggtctggccaaagagatacacacagttctttaaaaacccactgagctccgagctgggggaaaggccacactccattcttttctttgcaatgcgtctaaataaatggacttttttttcccttaaaggaaggaaattaagtttttctgcttcacctcctttgtatcattattcctttagtccggcactccacttcctgcttaatctgctataattaaagtgcttaggagataccacttgtgatcaagaaagtccctcggacttgttgccaggagttcttgcttttgtcactaacacccttaggttcttggcaacatctcctccagccccgcctctccctgctgctctccagagagggtccaggcagctgttaacaggcacggccttctccccagctctcgggctcaaagggacggtcactatttcactcccaagggtagacctgcagggaatgggatccagaaagcta

SEQ ID NO: 800485 - DNA, 576 bp, Homo sapiens
gatctggaataagaaaaggatgctcagtggtgaactataaactgtaattattcagtatagtactagaattcctagccagcacaatagggcaagagaaagaaataaagggcatccaaattagaaaggaagaagtcaaattattcttgtttgtagatgacatgatcttatatttagaaaaatctaaagattccaccaaaaaacttttasaactgataaatgagtttaataaagttgcaggatataaaataaacacgcaaaatgtgtaacatttctatatgctatctgtgatcaatctgaaaggaaatcaagaaagcaatcacaacagctacaaaaacatacctagtaaaaattcaaccaaagaagtgaaagatctctacaagaaaaattataaaacaccaatgaaagatattgaagagcacataaatggaaaaatatcccatgctcaaagaagaattaatattattaaaatgtctatactacccaaagcaatctacagattcactgcaatccctatcaaaatactcatgacattcttcacagaaatagaaaaaagaaatcttaaaattcttatagaat

SEQ ID NO: 800486 - DNA, 540 bp, Homo sapiens
tttcaaatgtgtaaggctgtgagtgccttgaaagcaagcctgtgtgttactcatctccacaagcccagcatcgctcacgtgcctttcacaccactggagctcagctctgcaggaccagtagatctttaagtccgggtagaaaactggagacacgagtattcagcaacgggatcttccctgggaatgctccggatatgaaaggagatacgaaggaagagaaagaaagctctacaaataataatgacaaattagatcgaaggttggaaatgttttaaaagcaatctgcccagactctaaatcctttcttcttctattttcagggggtgrgtagggggtggttacgctggctgggttgcatgtgtctgaattatggccgctgccacctctgagagagagtgggggatggagttgttttgcggggtgcagggagagaggaaggatgctggccactctcatgctccgtgtcactcatgcattggtttaaattcagcacgcatctgcagatggctcacctctgccttgctctgtggcaatcctgac

SEQ ID NO: 800487 - DNA, 540 bp, Homo sapiens
tttcaaatgtgtaaggctgtgagtgccttgaaagcaagcctgtgtgttactcatctccacaagcccagcatcgctcacgtgcctttcacaccactggagctcagctctgcaggaccagtagatctttaagtccgggtagaaaactggagacacgagtattcagcaacgggatcttccctgggaatgctccggatatgaaaggagatacgaaggaagagaaagaaagctctacaaataataatgacaaattagatcgaaggttggaaatgttttaaaagcaatctgcccagactctaaatcctttcttcttctattttcagggggtgagtagggggtggttacgctggctgggttgyatgtgtctgaattatggccgctgccacctctgagagagagtgggggatggagttgttttgcggggtgcagggagagaggaaggatgctggccactctcatgctccgtgtcactcatgcattggtttaaattcagcacgcatctgcagatggctcacctctgccttgctctgtggcaatcctgac

SEQ ID NO: 800488 - DNA, 553 bp, Homo sapiens
ccaaggatcctgtggacggtttacagcctgttgagggatcaggtgagggtacctaccctcatgacctggtggcttcagaagcccctcctgtgaggttggtggcctgcaagaccctggcagcctctctcagggatgtgggataacgcacagattgtcccattgaaagtggaatggcgaggcccttcctccacctccaccccaaacatatttgtggacagtcatgtttgcacacctgccacagggcctgcagtgccccccgccacacacaccatgatgcctgaaatgcgtgattttggagaaagtctttgccatttctttttttcctttttttgagacagtcttactctatcgcccaggctggagtgcaatggcgtgatcttgccaaactgcaacctctgcttcctrtgttcaagtgattctcctgcttcagcctcctgagtagctgggattacaagcgtgcaccaccgtgcctggctaatttttctatctttggtagagacaaggttttaccatgttgaccaggctggtctcgaactcctgacctcaagtgatc

SEQ ID NO: 800489 - DNA, 661 bp, Homo sapiens
aggaaaataggtacctctacagcaggatccagaggctgggctctaaaaagccacagcagccctcccagtggtttgattggcacattctgattctcttacctgtgctttcccaagactttgctatactgtttctttttagatcccaaatacttcacaaatactctgttgtatttacttagcagttatgtgtgtgtatattaattacttttttaaaaaaactgggggtctggggatgcctgacctgccaaaaaatggtttgtgcagccttcgttcctgggatgccgtgctgaccaccctctctcctcaggaatctacagaatctgttgatcctgactgccatcaaggcagaccgcacacgggtcatggagtacatcagcygcctggacaactatgacgcactggacatcgcgagcatcgctgtcagcagcgcgctgtatgaggaggccttcaccgttttccacaagtttgatatgaatgcctcagcaatccaggtgggctgctgagtgtaagcatgtcggacctagcaccttctgccacatcatgagtgcgccctgcaagcccttgtcctctccaagggtgtcagaccctctggttgtccagtgcatctcttcgtgctcttctctgttcctcaccagcaacccatcttcccagcccgctggcc

SEQ ID NO: 800490 - DNA, 617 bp, Homo sapiens
cagaggcctgccctccctgcccagccaaagccaggaagccagctgcagctcccgggttctgcagggcaactcaagacgcctccaggggtagctgcaatgttctcatctggagagtcatggaatcgaaagaataagtttgctccctctaccagatccaccccacccatgccctactccgacctcagtgtgaggtctcctgtgacgccctcactgcttcacaggtacaaaaagatggccacctccacccacctctgggaccccacactccagggtattcaacacacaggagtgtgacaagtgacttacacctggcctctgttccacatcaggcactcctaaaaggaggggcttgttcttgtcacttggattccctagggatgggcagggggcaagcacccacaggcactttctcagttgctgctggccagttggcaggctatgtgaaaaggctggcaaggaaaaaggagtcggggacktcagtcacctctatcacccaggcaggagatgctgggcctggaaccagaggcaccccaaagaagccaggcataatatggcctcacctgagcccggtgacctcatctgcaaaactgggactcaagaatcagaaaacggtgacc

SEQ ID NO: 800491 - DNA, 592 bp, Homo sapiens
tttaatttgcatttccttaatgactagacgttgagcatcttttcatgtgcttgctagccatctgtatatatcttccttggttaagtgaccattaagatcttttgcctattttatttattatttttttttagagttggggaggtcttgctgttgcctaagctggagtgcagcattgcaatcctagttcaccacagcctccaactcctaggcttaggcagtcctcttgcctcagcctcctgagtagctgggactacaggcatgtgtcaccaagcccagctaatttttttgttttttttttgtaatgtagagatgaggtcttgttatgttgcacaggctggttttgaactcctgggctcaagtgttgctcccaccttggcctcctaaagtgttgggattacaggtataagccaytgcacttggcccatgcccatttaaaaaattgggttgttttcttattgaaatttgagcatgctttatatattctggttacaagcaagccctttatcagatacatgatttgcaaatgttttctctctgtgtgtggtttgtctatgcattatcttaacatgtcttttgaaaaacaaaagttctc

SEQ ID NO: 800492 - DNA, 529 bp, Homo sapiens
gcttcctcttctaaccatgaccctgttccctgaatgcgcaatgttttatcacactgtagtttatgacacttggaaatacctgaggatttaacgaaaaggaaaactttccgccattttccttaatgtcagtttgtagctttttcttctgctgctgaggtaagtacttcactttcaaacagaagatacaatttgcaaagattcccatcaccatcctgtaggaaamaaagtttttaaggaccctctcttaagtcaatatgacagtgaatttagaattattatacaagcaaactgtgggaaaattgggcattatcttaagaaagatattgcaatcatgttatcaatagaacattgcaaaaattgaataatatcctagcttgcaatatgtgtgttggtttaagaatcgtttctagcttttatggttgatattacaccaccaaaaatccctttgtacaggctcatgatatacatcttaataaaaacatgacagatttaagttacagatcaagtgtgtgactccagaacatggaac

SEQ ID NO: 800493 - DNA, 573 bp, Homo sapiens
gaatggcagataaatatatttccaactagttacactgtcacgaatttcaaacgcaggaaggcttaaagtaaatttattatctcactctcctgtttccacgaactttcccgaaattttcttctttcccggccttgtgaatcccttccatttctcagttaaaggacagcaccatccacccacctctctcaaagccgagctttgtattaatcctcattgacaaaatccctcctgaaatatgaaactgaaagccctgaaccctccggctgatcttggaagagaaaccccgccagaggccrgggacccgctccccacctggcggacccgattccgggcgcgttccggctatcgtccctgcttgggacgctgcgcccgcctggtgcggggcggggttccggcgcagtggcgcccgcccagccccgggggcagggagagcctagattacggaagtaccgcgagcaaggagcgcggaatcggggagcgtccggagctagctggatcctctaggcaggtgcgtgggcgctgcggggtggggggctgcaaaggtccctgtagtcctagccaggaagtggcccg

SEQ ID NO: 800494 - DNA, 573 bp, Homo sapiens
gaatggcagataaatatatttccaactagttacactgtcacgaatttcaaacgcaggaaggcttaaagtaaatttattatctcactctcctgtttccacgaactttcccgaaattttcttctttcccggccttgtgaatcccttccatttctcagttaaaggacagcaccatccacccacctctctcaaagccgagctttgtattaatcctcattgacaaaatccctcctgaaatatgaaactgaaagccctgaaccctccggctgatcttggaagagaaaccccgccagaggccggggacccgctccccacctggcggacccgattccgggcgcgttccggctatcgtccctgcttgggacgctgcgcccgcctgrtgcggggcggggttccggcgcagtggcgcccgcccagccccgggggcagggagagcctagattacggaagtaccgcgagcaaggagcgcggaatcggggagcgtccggagctagctggatcctctaggcaggtgcgtgggcgctgcggggtggggggctgcaaaggtccctgtagtcctagccaggaagtggcccg

SEQ ID NO: 800495 - DNA, 670 bp, Homo sapiens
cataaaatatttttgcagaaacctagttattaggttttaggtctgatatttgcattttctgtgagggcccactatgctcagaaaatatatatatatatataaataaaatttttttgagatggagtctcactttgtcacccaggttggggtgcagtggtgtgatcttggctcactgtaagctccgcctcccgggttcatgccattctcctccttcagcctcccaagtagctgggactacaggtgcccaccaccacgcctggctaattttttgtattttttcgtagagatggggtttcaccatgttagccaggatggtcttgatctcctgacctcatgatctgcccrcctcggcctcccaaagtgctgggattataggagtgagccactgtgcctggccgaatattttttttttgaaatttgacaagatgtgtctttgaaaactgctctacatcaaatcaggtagaattgagtgaaaaaaaatgacaaatcatctaggtttttaaaacatagcctgcttttagaatttagggttaaatatttgtattttttgtgatgtcctactatgtttagaattgtgtcatctgagatttgactagatgtgtcttggaaaactgctctttgttaatacatgttgaattcaatgaaagaaaacagcacatcatatattatt

SEQ ID NO: 800496 - DNA, 534 bp, Homo sapiens
aaaatcattcagacagccgtccctgtaatatatttcttatggcaacaaaaagataataagtggctgaaggcctagccctaacctttaccccattccattattctcaccatcatttgccatatggaataattttgggtaccagctgggtaagtgaattttaaaacgccattgtcccttcaactttcttaatctagctcttgaaatcattaaggcacctatcgaaaccaaagatatttgaataaggatatagatttttttaagttcttattaatctttatttgtatatagaaaacayaaaatgaatagagagggacattaagaaaccttaatcattactcattaccattaatcataggcattaagaaacctcatcctatcaatagatattctattgatatctattgatatcctattaatacctggcctctagatagcctattgatacctattgataggatgaggttccactatgtaacaatcactggggataaatcagtgagccaaatagggaaagtccattgtaccactctggtc

SEQ ID NO: 800497 - DNA, 622 bp, Homo sapiens
tctcagccaggccaaagtcagctaccactgcagagtaaccattctcatccctctttatcaggcagttctagggttcccaggaaggaagagaaaataatgtggctcagaagcggggatcagccatagagttaccacccattccccccttcctatcacagggcaccttgtcctctgctccttggtgaaccgcactcaagctgaccccactggtcagrtcaggggctctaagacagccaggtgagatgagttagtcctgggtcttgggtggctgtcctaggatacacttcacattccaaacacaattactcatctttgctttctaagtgctaggcataattttaagtgctagaaatagctagatgaaaacaaccaaaacccttgtcctcttggagcttgcaatataggggagaacaacagactatcaggcccctggcctcccttcctccttcctcagaaacacagacccaaagcccaggcctgaccttgccaacttgatataagcacaagacaagtgtctaagccttcactaaccttcactgtccacaagatcacaaccaacctcttctctggcattaaaagtctatgatctggctttatccaactggcctagccgctgtccccc

SEQ ID NO: 800498 - DNA, 622 bp, Homo sapiens
tctcagccaggccaaagtcagctaccactgcagagtaaccattctcatccctctttatcaggcagttctagggttcccaggaaggaagagaaaataatgtggctcagaagcggggatcagccatagagttaccacccattccccccttcctatcacagggcaccttgtcctctgctccttggtgaaccgcactcaagctgaccccactggtcaggtcaggggctctaagacagccaggtgagatgagttagtcctgggtcttgggtggctgtcctaggatacacttcacattccaaacacaattactcatctttgctttctaagtgctaggcatarttttaagtgctagaaatagctagatgaaaacaaccaaaacccttgtcctcttggagcttgcaatataggggagaacaacagactatcaggcccctggcctcccttcctccttcctcagaaacacagacccaaagcccaggcctgaccttgccaacttgatataagcacaagacaagtgtctaagccttcactaaccttcactgtccacaagatcacaaccaacctcttctctggcattaaaagtctatgatctggctttatccaactggcctagccgctgtccccc

SEQ ID NO: 800499 - DNA, 622 bp, Homo sapiens
tctcagccaggccaaagtcagctaccactgcagagtaaccattctcatccctctttatcaggcagttctagggttcccaggaaggaagagaaaataatgtggctcagaagcggggatcagccatagagttaccacccattccccccttcctatcacagggcaccttgtcctctgctccttggtgaaccgcactcaagctgaccccactggtcaggtcaggggctctaagacagccaggtgagatgagttagtcctgggtcttgggtggctgtcctaggatacacttcacattccaaacacaattactcatctttgctttctaagtgctaggcataattttaagtgctagaaatagctagatgaaaacaaccaaaacccttgtcctcttggagcttgcaatataggggagaacaacagactatcaggcccctggcctcccttcctccttcctcrgaaacacagacccaaagcccaggcctgaccttgccaacttgatataagcacaagacaagtgtctaagccttcactaaccttcactgtccacaagatcacaaccaacctcttctctggcattaaaagtctatgatctggctttatccaactggcctagccgctgtccccc

SEQ ID NO: 800500 - DNA, 575 bp, Homo sapiens
cctacatggaggtctgagaaaggccacagcgcaaaattgggcactggagcaaagaggagtggtgtggaggcctggctaagtattgaccaatgagcaggagtaggggccagagcttggagccctcaggtgataggtgaccaggctgttgttccactttgaaatgcaggccccagactaaggacggcagcgaagcagagctccctcgttggtgcagaggttccctaagctcctgggcattcctaagaactgaggtttgcctttattcttctcatggctcatgttacagccattcactccagaaagcctggcacgtcatggaccgttcaaggctgtgctccatagagtaatgatgcctccagctatgcgaggctttgggcccacccttcccactgcccctgagggctaaggggagcccttccctctgttcctgcctgctcacmagtgtgcctttattagttcggtggagaaacctcggtaagcaggaggcataagtccagccacagaaaccctgtgcagatgaggctggggatgtagtgagtgctgcagaagtgagtgactcagacacagaagagctt

SEQ ID NO: 800501 - DNA, 487 bp, Homo sapiens
gctttcaggacactggaaagataggcatgaccagatcataagggcaacgtatgccttgctaagaagttttaaatttttcctaaagatcgtgcaaatgctaaagaagtttaagcagcagaataatgccacttgatttgtattttagaaaacaaccctgactacagtgtgtggaataggctgggaggacaattctagaggcagagtctggttaagaattaargcaataattgagtcaaggaatgaagggtgctggtagaggaaacacagaggaagggaatgtgtttaagagcgattaaaaaggcagaagggaggaggcttagagaccaaatggatatgagagaggaaagagggaggaataagagataactttatttctagtttgagtgattgagtggatgatgatttcattcaccaagatggggaacaaaggaggagggacagtttggagaaaagtaaatgtcatcattggctgggctggctggagact

SEQ ID NO: 800502 - DNA, 630 bp, Homo sapiens
acataaatgacctgatggagctgaaaaacacagcacgagaacttcgtgaagcatacacaagtatcagtagccaaattgatcaagtggaagaaaggatatcagagattgaagatcaacttactgaaataaggcatgaagaaaatattagagaaaaaagaatgaaaaggaatgaacaaagcctccaagaaatatgggactgtgtgaacagaccaaacctataattgattggtgtacctgaaagtgacggggagaatggaaccaagttggaaaacacactttaggatattattctggagaacttccccaacctagmaagacaggccaacattcaacttcaggacatacagagaacaccactaagataatcctcaagaagagcaaccccaagacacgtaatcttcagattctccaaggtcaaaatgaaggaaaaaattttaagggcagccaatgagaaaggtcaggttatctataaagggaagcccctcagactaacagcagatctctcttcagaaaccctacaagctagaagagagtgggggccaatattcaacattcttaaaaaaagaactttcaacccagaatttcatatccagccaaactaaacttcataaatggagaaataaaatcctt

SEQ ID NO: 800503 - DNA, 575 bp, Homo sapiens
cctcttcctttgacactaactgctttcctcattaatattacggttgtatctgagttggcttatgagccttctgaaagtgatgtgtcagaaattactactgagatggtgaaaaggtatttagagttccattttttaggttagaggttgtaatgtctaaaaggttttctgtagaatgcattattaacttgttttagaagagtcatgcttcagtgaccttcataactgtattcattaatstcccaaatatacattacagattttctcaaataatacaaaatatatttttggtataatcattattgaaatataatattaaaaaaagttccagcctgacaaacatgatgaaattccatctctattaaataaaaattaaaaaattagtcaggcatgctggtgtgtgcctgtagtcccatctactctggaggctgaggcatgagaatcacttgaacctggaacatagaggttacaatgagccaagcttgcgccactgtactccagcctgggcgacagagcaaaactctgcctcaaaaaaaagaaagaaaaaattaagacatcatttgaaaagttagtaggaa

SEQ ID NO: 800504 - DNA, 566 bp, Homo sapiens
ccatgcatttaatacatgtacttctaagaaggggcagcacctggctgatactaatatctttaagggggcctgatgaggtcggggttgagtatactgaaagaagccagaacctggagcaaattgccagtgctgggatacagctgatggtagaatgaagaaaaatcccttctcctcccttctagctttttctagtatcccctattgacaggacctaaaaggatgccagctgggaataatttatatcaccgattatagaaagtggacttagtgctgagagacagtgaataaataaccagcacattctcctatctaaattcctctctaccyctgcactacctattcctcttcattttatgtatttacttatactgtttcatgcctgtttgccttcatagaatgtgggatacacaaagtcagtgttctggttttatcgtttgacaaactaaatcttagttgcttaaagcaacaaccattttattagattgctagaatctatgggtcacgaattttgactgggtgcttacgaattttgaccgggtgctccaaggatggcttgtctctgctcc

SEQ ID NO: 800505 - DNA, 633 bp, Homo sapiens
ccagaagcagaaaagaaaggtgattatcctcacatgtggattttaaaaaaggatatatgtcaaggaattggaccaatatgctttgtttccattaactgatttgtacacttactcaacaaatcctggctgggtttgtgacagtttactgtgtgcatagctccatacaacaccttrtaggagggtgtacaagaagagaattttacatgagtctgaagacagtgattaaacatgggtgaaagaaattctggtggaaggtggtgagacaaggaccctaggaaagagataggtacaattttatgggaactcctgtgacattttggcatgttctttattgatttattgatgaaccctccctacttttagaacctcagcttcctgaatgtaaaatgagggagtttgccagattctatgtgggtattttcacatgtgaatttctatattccaaaaatgatgaagctttaagcaaatatatttccagaccagtaaactgagatgttcacttcagggagtagtcctagcattttacttgatggataatggctaggtaaagaagattgaattattgagggtcatgtatcttataaggggtagaattagatttggaactcaagtcgagggcaagggctcatggga

SEQ ID NO: 800506 - DNA, 604 bp, Homo sapiens
gaagaggagagagaaaagaggcaaaaagcttatataaagaaataatggctgaaaacttccaaaatcttgagagggaaatcaacatccagattcataaagctcaaaagttcccaaataggataaaccaaaagaggacctcattttaagatatacaattataagtgcatcatataatgaaacacattacaatcaaattatcaaagccaaggacaaggagagaattttgcaagcagcaacagaaaagtggcttatctcatgtaagagaacctcaataaggctaccagtagattcctaaccagaaacttttcaagccaggtgagagtgggatgatatagttaaacttctgaaagaaaaaaaaaaaaactgtcagccaagaattctacacctggtaaaattatcttctgtgaatgaaggaaagataaattcttcctgtgatggttaatacygagtgtcaacttgattggattgaagaatacaaagtattgatcctgggtgtgtctgtgtggatgttgccaaaagagattaacatttagtcagtgggcttggcaaggcagatccaccttaatctggtgggcacaatcagcttccagcgaatataaagcag

SEQ ID NO: 800507 - DNA, 561 bp, Homo sapiens
gccactgtgcctagcccaaaacatatttcaaggctatagtaaccaaaactgcatagtactcacataaaacagacacacagacaaatggaacagaatagacaacccagaaataaatctacatatttacagtcaattgattttcaacaaaggtgccaagaacgtactttggggaaaggacacctttttcaataagtggtgctgggaaaattgggtatctatatgcagaagaatgaaactagacctgtatttctcactatatacaaaaatcatctcaagatgggttaaaaatgtaaacgtaaaacytgaaacgataaaactattagaagaaaacagggtaaacacactaggacattggtctaggcaaagatttcatgctaagacctcaaaagcacaggcaacaaaactaaaaataggcaaattaaactacataaaactaaaaagcttttgtacagcaaaggaaacaataagcagaatgaagaaacaaaaatgggagaaaatatttgcatatttctccctattcatctgcactattcatctgacaagggactaatgtcgagaata

SEQ ID NO: 800508 - DNA, 644 bp, Homo sapiens
ctttgttcaatagctatggaaagtatgttgtgaaactttactggatggtaagtccattttcgtgtgcataaaaactcatgagtctttcatattgaaatatacttgtcctggcatggtggctcatgcctgtaatcgcagcactttgggaggcaaaggccaaggcagtggatcacctgagatcaggagttcgcaaccagcctgggcaacatggtgaaatgctgttgctactaaaaagacaaaaaattagctgggtacggtggtgggtgcctgtaatcccacctactccggaggctgatgtgggagaattgcttgaacccgggaggcagaggttgagtgagttaaggtctcaccattgcactccagcctgggcaacaagagcaaaactccaaaaaaaaaaaagaaagaaagaaagagagagaaggaaggaaggaagaaaggaaggttgccttgcacaccattacttaggctagtacaagataatgcagtttttatasgatatcaattgtgtagctacagagagaaactgtcctgcatatgtaatttgtgattaatgagaaacacagtagcttctcctgtgatgtcagtcccatgggcactttaaacaggttctgcctagaccactgaggtatggccactcattgtag

SEQ ID NO: 800509 - DNA, 603 bp, Homo sapiens
gcactttgggaggccgaggcaggaggatcccttgagcctaggagttcgagactagtctgggcaacatggtgaaaccctgtctctttttataaaaaaagaaattactactcaacataaaaatatcaataacccaattaaaaatgggtaaaggctgggtgcagtgggtcaagcctgtaatcccagcactttgggaggccgaggtgggtggatcatgaggtcaggagatggagaccatcctggccaatatggtgaaaccccatctccactaaaaatacaaaattagccgggcatggtggcacatgcctgtaatcccagctacttgggaggctgaggcgggagaatcacttgcacccgggaggcagaggttgtggtgagccgagatcatgccattgcactccagcctgggcaacaagagtgaaactccrtctcaaaaaataaaataaaataaaataaaataaaaatataaaaattagctgggtgtggtggcgtgtgcctgtagtcagctactcaggaggctgaggcaggaggatcacttgagcttgggaggtggaggttgcagtgagccgagatcatgccactgcactccagcctgggtgacagagc

SEQ ID NO: 800510 - DNA, 631 bp, Homo sapiens
ttccatcacttctttgaaccctcagctttttaataatttaattcaaaacaatcctttaaccctaggcaaaaatttacattttcatgccttcttataaccttttactaaaaaacatacttcactgttcttacactccttgcatgcaaatctatttccagtagtctcaattacatgttataatggtaactcctagtaatttttaacaataatttaaaacctggtaaattgttttaattgtgtgctaactgtagccaaggtttgccttcttagttaaggaggtgattagttccrtatgtccccaggccctaccagccgtgaagcagaggagacagacagttttcaaaacccaaaaagcagtttgtaaccttgaaacacttagcaaaccttgcatcttacctacattttaccaataatctttaggggctgttttgatttctcaaagattaaagtcatgcgaactgaaaggtaccacagcttttaacttcccttaaaaaatacttgatccaagtgcttgtcttctttaggacaaattaattagagatctttttaaagacagcacacacagtatacacacacacacacaggcattagaaaatccagttgctgggtgaggccctttaagagacagggc

SEQ ID NO: 800511 - DNA, 469 bp, Homo sapiens
gtagctctcagcagatggaggaagccagaatagaatggttttcccccggagtgtgctgctcagtggcctgacacttccctaactgcttggccaaactctgcatccttctgctggtcagtgcatccctctcaacatccagctgccctgtgtttcttcactgatgtgcttccctcaacatctagctgcttctgtcttcttcccctgatctgctcctcttgacatccagcagcttgtgtgtgtctgctagaatcttgggcctttttaacaggcacagaattaaacatgtgtattawacaaggaaagaatttagtgccaaagattacagagacaagaagtaaaatatactaacaacattgtacgagctgtttcaccctggactggttaaactttagaagagacataactgttcttggcatatctttagcagttaacagatgcaccccaggaattctggggtttgtgggcttgc

SEQ ID NO: 800512 - DNA, 626 bp, Homo sapiens
caggagataaaaatcagcacacagaaacacaacacagggagagttccctttcaggacctttggtagagctaaatttagatgaaaccaggtacaaagctaatgcagtcaatcaagagcagtatatactgctgtttttaaaaatcacatcctttctatgcaggcagcaaccactcatacaaagatcttagcaaaaatcaagtcttgatttcccatgaaaaagccagtcatcatgtaaacatttttaaaacagttgttttacgcaagtccccatggaaaattccaagccgactcaggcaaagatcccatctttaaaagttcacattcaaacagtagtagtaaaagcagaaaaatacatactttggaaaaatgaaagagctcgtcttgctatgggcaactgctttatggarggagtgcatcttgcaaggatgaggtggtaaaaatataggtagagttgagagaagggaatccatttccaaatggctaattgtgcatcattttatttcatatacatcaatgtcctactttgcaacagggtcaggaaatatgtacttaggtgattttataattttatatttaaccaagtttggaaacccaaaccttaacctaaaagtgagattgcataattt

SEQ ID NO: 800513 - DNA, 670 bp, Homo sapiens
actaatacattttttaatattaaaaataatattaatttaatattaaaggatattaaatttaatatgctttagctatgtgtatatattctgccatctgaataccagtccccttttttggaaaaggaataatatctctttgttttcaagccctaggatcattgagagaggtgagagaagaagaatgaaaacaggctaaaggtaaagtccctaaacagtgaaagggaggattctgccatgatctgggattgtgtttttggaaatggggcaggagtgctgttgtggtctgttgggaaatccaccatgtcaggctcccagataaatggaaatgggtcccaaacaccagttaggtaaaggtctctaacctgcattattatttggattttctttcctawaagatatgcccttgaaagttatactgtcataaaattacctaggattagttttcatgaatatccattaagatatttctagttttactcagataaaataaccttctcatagtatcacaccttggcttgaactgtaagccaatagccaggagaggttgtgaggacatcataatggttgagcaaagaggaagaggctaaatgaagggtaaaaagcaccaaaagcatggcatatgtttaatctttatcacccaagacaaaagtcttttgataaatagtcatct

SEQ ID NO: 800514 - DNA, 670 bp, Homo sapiens
actaatacattttttaatattaaaaataatattaatttaatattaaaggatattaaatttaatatgctttagctatgtgtatatattctgccatctgaataccagtccccttttttggaaaaggaataatatctctttgttttcaagccctaggatcattgagagaggtgagagaagaagaatgaaaacaggctaaaggtaaagtccctaaacagtgaaagggaggattctgccatgatctgggattgtgtttttggaaatggggcaggagtgctgttgtggtctgttgggaaatccaccatgtcaggctcccagataaatggaaatgggtcccaaacaccagttaggtaaaggtctctaacctgcattattatttggattttctttcctaaaagatatgcccttgaaagttatactgtcataaaattacctaggattagttttcatgaatatccattaagatatttctarttttactcagataaaataaccttctcatagtatcacaccttggcttgaactgtaagccaatagccaggagaggttgtgaggacatcataatggttgagcaaagaggaagaggctaaatgaagggtaaaaagcaccaaaagcatggcatatgtttaatctttatcacccaagacaaaagtcttttgataaatagtcatct

SEQ ID NO: 800515 - DNA, 659 bp, Homo sapiens
aacatggcacatgtatacatatgtaacaaacctgcacgttgtgcacatgtaccctagaacttgaagtataataaataataataataataataaaataaataaattttaaaaaaaagaaacaacagatgtcagcgaggctgtggtgaaatatgaacacttttacactgttggtgggaatgttagttcaaccatcgtggaagrcagtgtggcaattcctgaaggatctagaaccagaaataccatttgacccagtaagcccattactggatatatacccaaaggattataaatcattctgctataaagatacatgcacatgtatgtttattgctgcactatttacaatagcaaagacatgcaatcaaccttaatgtccatcaatgatagactggataaagaaaatgtggtacatacacaccacagaatactatgcagccattaaaaggaatgagatcatgtcctttgcagggacatggatgaagctgaaagccatcatcctcagcaaactaaaacaggaacagaacaccaaacactgcatgttttccctcataagtgggagttcaacaatgaaaacacatggacacagggaggtgaacatcacacaccggggcctgtgttggggagccggcagagtggggagagcatcaggacaaatagct

SEQ ID NO: 800516 - DNA, 631 bp, Homo sapiens
tcctaattctcccacttctctatccatacctgtctcttcctttccaaacgtaccatcactcacttcttgcagaaccttgttgatggcggcttaggtggtcttctatccatatgcccctctccaactcttaactgagctgctagagaattttgttaatatttattatgatattaatagcactctgttgcttcaagaatattcctcattgctggcctttacctactgagctagaaacagattttatgtcatgaaaggtacatgacaatatggcttccccctgcctccccaccgcctcatgtgtcagtcaggactcctgtagttcttttaatatgtagtaagctctcccctctgtatatatttgctcaataattttccttagcctggaatgttctctccaacccccagctaccccccactaccctttctctaaatgtctgctgcattcctctctacctattcaccaattctgcctsttcctgaagcatttcctgattctttctccagctaaatccctttctcctttgagtccccagagctctgcctattctcctcttcttctgatgtccacctccattctgggcctgggtgtccctgcataatcacagtgcctctcctccaccacccactcagg

SEQ ID NO: 800517 - DNA, 548 bp, Homo sapiens
ataggtaatagtttattgtttaaagagaacaaaaaaaaatagcacagacagccagttaaacaattcagttcactagacatttactgaatgcctattatatgctaggtatgagataggggtgtgtgtttgtgtgtgcatgtgtctgtatgtgtgtgatgccattcttgatattaagaagctataaggtagagtcataattgattatcatggaggatcaaacagtataccgtaagatattgtatgtggcaaaagaaaggagagaaaagcattggtatgctttaagagtttgcaaattaataagagaccacataaatgtgtatatgtacatttaaacatgatttatagaaacagacagacatacatgcatatamctaatcaaactgtcctgaaacatgacttctaaaagttcagggctgtggaccccaggaaaatcacattgtcacttaaattaaaaactacatttatctggaaagcaagatttggggcttaagcttggtattctgagttagtcccatgaagggactttttctcgctctgagctaccagaa

SEQ ID NO: 800518 - DNA, 619 bp, Homo sapiens
gaggatgaatttgtaaatacacttttgttttcaaatcttccacaacccaaggcaccaacagggccgaggggtttggtgaattgtgggaaaatagaggtgcttggatatgtgtaagtgagtagctcatttagcaggtgttccaccacctgctcacagaccacagggaatttcatagctggtgcacatgtggcagcaagggccacgcgactggaaatgaaagtgagttgtcaatttttcttctctctctctttttttttttctttttctttttttttttttttttgagatggagtcttgttctgtcaccaggctggagtgccgtggtgcaatcttggctcactgcaacctctgcctcccgggttcaagtgattctcctgcctcagcctcctgagtagctggcactacaggtacatgtcaccacacctggctaatttttgtattttcagtaragatggggtttcagcatgttggccaggctggtcttgatctcctggccttgtgatctgctcgcctcagcctcccaaagttctgggattacaggtgtgagccatcgcgcccagccgagttgtggattgttctatattttcattcaacatttcttcaaatgtcctttcccttt

SEQ ID NO: 800519 - DNA, 632 bp, Homo sapiens
agcaagtgcctctccttggagaaatgagaattaaattctgttgacaagccagttgacaactgtctatagcaagtttggtcaccaattgcttgggactgtcattgcttagctgctagggcccattaagcttcattgctgttcaggggccacctcaccaagacagtggcacagtgcttagtcattcaggtgccatgggacttttggggttggtactcagtcctggctctgttcactagctgtgtggtcatcagtggaatagttatcttctacagcttcagtttactcatctgtaaatgtaatttttagctatctatcatttgtgtatcaagaaagagcttaagaaggttggtgtattgctaagtactgaccaatatttaacacagaaatcttcaagtttgttrgaatctgtaaatcagattaaaacaaggatataattggagtcttcaaagcaagtaaatatttgcatcttaccttggcattaaaacatccattgctaaggcagtagtatagttaccttccaggtggcattcaacagatgactcagtggctataaaacaaatagcaaacaaacaaaaaaatgtattgagaaagcactcactgatcatctaaaataaagaggaacaagaaactac

SEQ ID NO: 800520 - DNA, 504 bp, Homo sapiens
caatgcagcctccgcctcctgggctcaagcgattctcccgccttagcctccagtgtaactgggaccacaggtgtgcgctaccatgcccggattattttattttattttcatagagacagagcaccactctgttaccaggctggtctggaactcctgggcgcaagccatcatccctgcccccaaaagcgctgggattaattacacgtcaggtcattaggttttaacctgcacgttgctgagactcatcttaccggttagagtctgaagccaggataggcggcaaaaaaactyctcccgtcatgctgttttattttctaggtaaactgattattacctgaaacttccttctttgctcatttcttgtctgtctcacccacctggaatatgagcttcatgagacagccgtctcttcggtgctatatcctaggtcctggagagagtgcccagcatgtaataagcacttgtgaaatggttacagaaggaatgcttcaagatttggggtca

SEQ ID NO: 800521 - DNA, 654 bp, Homo sapiens
aaataaaaaggggaataacctctgcttttataaagctcccactttagcaggagaggctaagaacatgaaaagcaagaatgcttgttaaggatggaagtccaccatattttgggttgtccttttaatcatcaatctaattccatcttcctatttttcagaactatctaaaacttcatggcaatgattccagtttgctagcatggatatttgaaatctgtttgtgtgtgtgtgtaagttacaggactgggaggagacgaggtccacgaacttagtttctcttcttaatccaatacctacattcactttttaattcaagacacttcaaaaggtcacaagtctatttggcgtaaggattggttattatagtawggtgactcttttttcactaataaaaacttaacataaaggacagaaatctaaaactgttcttaaatgtacagtttataatcaattcaaaagaaaaaaaaacacaacacaatttagaagcccactgtgcctggatgaaaaatcataggaattaatttgtattccctaagtgccattgacgcacatccaatatctattacaatgaagtcagacataatttttcttctgcattctctgtattttattaataagccatttttgtattaataagccattatcctttaaaaa

SEQ ID NO: 800522 - DNA, 502 bp, Homo sapiens
aaaggttctgcctcaaataagctgaggaactcccttgccacaggaagtatatggggagataagatatgtgcatgaagaaatattcaagagaggaaatgaaaaataccttaaaatctctcccttctctccctatactttacctggtgagcaaaagataaagttagaggagaaagagcaatcagaatttctccccacctctgcaaaccctggtgggacctcatatgcagcccctttggcccagagacacacatggatacagtgtttgccctmtaccttcccggtagccactctccctcctcctgatagcagctgttcctccctcatcttgctccagagctctaggtgggtctctgtcccagctctgaggatgtagcagatgacacaggtccagccaatcacagcatggcctagccctggccagagatcaattcaggaatgtgcacctgtgctaagctagtccagtcagagcgactctctctcaaaagtctcaggacttttgtgg

SEQ ID NO: 800523 - DNA, 517 bp, Homo sapiens
caggcttaatggagatgaatttctgttacgtgcagacagagtggcagctgattcatatcaacatagggaccataaagcatgcattactatgtagttgagacatacattaagttgttttcacatctgttattccatgcgaccttcacaatgccttaagagggaatatggcagcttggggagcagaaaagccctgctaaagatcagaaaataatgtgttctgcgccctttctattcaaagtgttctccgaggaccaccagcagcagcatctcctgggacctcgttagaaatacgcaataacagcactaccctagatatgctgaatcaaagtgagttttcacaacatcaccaagtgatctgtatgcacactgaagcttgwgaagctctgttagaatactatctctgcggcttcttggctgggtgactataagcaaattacctgatttctcaggtttttttcacatagacaacagagatcatgataacacactataacaatgcagctttagtgcaaaacca

SEQ ID NO: 800524 - DNA, 517 bp, Homo sapiens
caggcttaatggagatgaatttctgttacgtgcagacagagtggcagctgattcatatcaacatagggaccataaagcatgcattactatgtagttgagacatacattaagttgttttcacatctgttattccatgcgaccttcacaatgccttaagagggaatatggcagcttggggagcagaaaagccctgctaaagatcagaaaataatgtgttctgcgccctttctattcaaagtgttctccgaggaccaccagcagcagcatctcctgggacctcgttagaaatacgcaataacagcactaccctagatatgctgaatcaaagtgagttttcacaacatcaccaagtgatctgtatgcacactgaagcttgagaarctctgttagaatactatctctgcggcttcttggctgggtgactataagcaaattacctgatttctcaggtttttttcacatagacaacagagatcatgataacacactataacaatgcagctttagtgcaaaacca

SEQ ID NO: 800525 - DNA, 593 bp, Homo sapiens
cactaataacaaactatccacaaaagaaattaagagaacagtctcatttacaatcacatcaaaaagaataaaatacttaggaataaactaaggaagtgaaggacttgaacactgacaatcacaaaacattactgaaagaaattaaagatgacacaaataaatggtaaaaccttccatgttcatggagtggaagagtaatgttgttaaaatgtccatgttacccaatgtgatctatagatacaatgcgttgcctatcaaactcccagtaactgattattatagaaatggaaaaaacagttctaaaattcatatgaaacaaaaaasaatctggaatgttcagaacaatattgagagagaacaaagctgaaggcatcacagttcctgatttcaaaacattttataagctacagaaattaaaatagtatggtactggtgtaaagatatgccagtgtaaagacaccttggtgtaaagacagacatatacaccaatagaacacctagaaaaacactcacacatacacagtcaactgatctttgacaaaggttccaagaatacacaatggggaaaggtgctgggaaaactggatatccac

SEQ ID NO: 800526 - DNA, 635 bp, Homo sapiens
acttttgaatgtacagtccttttaactttacagcagcaattttctaaagtgtaaactttgaattgcatctagcaggggaaatagaggcagaagaaaaataaagagtagataatgggtcgcctaaaagtaacgctgattgcttctgaaatcaaaaatctaagctcttctatacaggccagccaatgtttttcaatgattttcgtcagataaatgtaatattttaattcaatgtctcaaaaggaaggttatggatgctattgaacayagtgatcaaaagattatccctgaccccactgctggaaatttcagcagcaatgtcatgtgagatgatggtctttagctgttaatatcaatgacaaggaactaaagaacaactattaagttctttatgtaaggcaatgtttcactagtagtagatgtatcataaaaagtctagagtgcatctcatattgaacttgagggaaaaggccattataaaaccctttcttattacagcaactattttactttacaggcattggatgagtgagaatggacaattggcagctgttttgatctagcatttgagaaatccactgagagaagaagcgcctgagttttggctctataattttatgaaagttgactaggcccct

SEQ ID NO: 800527 - DNA, 592 bp, Homo sapiens
aaagagaataaggacattggttagctttccataaggctaaatgtgtttagttattttttttcttctgaaatcatgtacctgggacttttggctttttcaaatgacctttaatttcttgtactggtaaaagaaaaccggagagttgagacatgaatgaactctgcctcrgttcgaatctgtactcttcccctaccgactgagtgatcttaggcatgttacataacctctctgtgcctcagtttccttgtcaagatggaaaattgtcatggctccatccatagggttcttatgagaattagataatttaatgcagtatatgtaaagtgcttcttacattgaagcaagtactctcttgagtattaactaatgttatttcattgatgaaactatggtgagagaaatttattttattagcgtccttagttaacaatacaaaaaattagaaacttgtctctactttccgtaactcctacctacctgccaaccagccttattttttttctgaaattttaatagtctatgaaatccaaaagtctgagaatcactgctttaaatcatctagaactctcaaatgggcaaaacccactgatcg

SEQ ID NO: 800528 - DNA, 592 bp, Homo sapiens
aaagagaataaggacattggttagctttccataaggctaaatgtgtttagttattttttttcttctgaaatcatgtacctgggacttttggctttttcaaatgacctttaatttcttgtactggtaaaagaaaaccggagagttgagacatgaatgaactctgcctcggttcgaatctgtacycttcccctaccgactgagtgatcttaggcatgttacataacctctctgtgcctcagtttccttgtcaagatggaaaattgtcatggctccatccatagggttcttatgagaattagataatttaatgcagtatatgtaaagtgcttcttacattgaagcaagtactctcttgagtattaactaatgttatttcattgatgaaactatggtgagagaaatttattttattagcgtccttagttaacaatacaaaaaattagaaacttgtctctactttccgtaactcctacctacctgccaaccagccttattttttttctgaaattttaatagtctatgaaatccaaaagtctgagaatcactgctttaaatcatctagaactctcaaatgggcaaaacccactgatcg

SEQ ID NO: 800529 - DNA, 680 bp, Homo sapiens
ctctaaaaggctattacgatgtatgagtggcaggcgcagtggctcatgcctgtaatcccggcactttgggaggccgaggcaggcagatcacctgaggtcaggagttaagaccagcctggtcaacatggtgaaacaccgtctctactaaaaatataaaaattatcttgatgttgtggtgggcacctgtaatcccagctactcgggaggctgaagcacgagaatcgcgtgaaaccaggaggtggaggtcgcagtgagctgagatcgtgtcattgcactccagactgggcaacaagagcaaaactccatctcaaaraaaaaaaaaaaaaatttatgggtgggaggagtgtggagagtaatttaaaggatctatttttcactttctcaatcccatggataatgaggacttaaagcagcgttatgtagcagaaagaacatgggccctcttgaatcctgagctgccacttaccagttatgtgctttcaaacgcgtgtattaacctctctcagtctcaatcttcttgcatataaaaatatcgttctaatatatgtacaaacagaaaatgttaatacattgttgatggtaattctaaaattggaaacaaatggaggatggctggttaaataaggtgtgatatgctcatagcatggaatgctatacagtcattaagaagattaacgtgg

SEQ ID NO: 800530 - DNA, 642 bp, Homo sapiens
aatatgttgatctttatattttaataaataaatacttccatttttacccattcctctgatataagatgatatagtaggtttataaaatatggctagcaaacccaggtgtttgggtagaaacagtgagccgtgagtgtggatcacagagataaaaatagcactggctggagatgatgaaaggtaagaaggagagagagagggataaaggggcctgcatagtttctgaagaaattactgaaaggttaggggatacatgagagaagtcaaattttgttatttaaaaaataggaaacaaagcatttaagatggatatctatttccaggagggaaggtcattggagtactaacttatttattttacatgactaaattttctgtatttatttgtgtaaataagttttttatattcatttgtgtgagaaaattttcatgatgtgtgtgtktgtgtgtgtgtgtgtgtgtgtgtgcctgtgtgtgtattaaccttcagtaacaatgtataagaaaagggatgctgccttttgggcatgctcaaaatcccacagttcttcacacaagaatgaaatgaacagcctttaaccttttctgtttttttgagtgaaccatcccatttttttctaccttctgacagatgataagaaa

SEQ ID NO: 800531 - DNA, 529 bp, Homo sapiens
ggaaactttttctactaaatcaatttgatgccacattaaaggctttaaaaagaacatttgaggtaaagagcaactactcaaatttttaaaatctaaagaaacaaaaatataaactcttagcctgtacctatggttgtttcaaaagaaaaagaataaatttcttattcttggaactatacatctcatttacgttatttttctttcttcctgttgattccaacccccacatcatctttaaagcctactgcttttcaaatccagagtattgtcaatttcctattggtttccttcagcattattctccttcacttgtgtttcttttctttctratttctcaaaaccttaaactaactctctcagttttctctatctccttttgaaaactctgggaatacatttcctaatagagtttccttctgtatactcagctccagaataggacaataagtgcccttcctggtgaaatacatatactctattttaggattcttttggttacaagcaatagaaatttagtctgctcaaccta

SEQ ID NO: 800532 - DNA, 587 bp, Homo sapiens
aaatgtgtggttcacagaataagaaatgctaatcacaagtaaatatacaaatacatattcaacatgacttgtaattaaataaatgcaaaataaaacaacatgatctcacttttccacccattaagttgtcaaagactgtgaaaatataaatatcttgaaagctatatatgggtatatgtatgtgtacaaatattatatatgcatagaaagtttctggaaaaatatataagaaacttaacagtgactactgactactactgagtaaggataggtgggaaaggaggagaatttttacttttcacctttctctttaaaattcagatttaaacaataataggaattacttttggaatgaaaacagaaatgataataaaaataataacaacaataataaatgccaaaaggaatggggctgcactgcatacatacatggaagcaaagagraaatgaagcgggaaggctgagatctaagcaagcactgaactactgtgttttctggctgcttctagagataccgcccaaatagagatgagaggcaaagtggctatgaagctacaggctcttcaatgggaaaagtaatgcctaat

SEQ ID NO: 800533 - DNA, 559 bp, Homo sapiens
ttgattccttatcttggctctcgtgaatagtgctgcagtaaacatgggcatgcaggtttcttttcaatatgttgatttcctttcctttggataaatacccagtagaggaatttcagtatcatactgtggctctatttgtagttttttgaggaacctccatactgttctccctactggctgtactagtttatattcccaccaagtgtatgagagttcccttctctctgcatccttgccagcacttttttttttttttttgtatttttgataatagccagcctgacttggatgagatgttatatcattgyggttgtgatttacatttccctgataattagtgatattgagcattttttcatataccttttggtcatttgcatttgaaaaatgtctgttcagatcacttgcccatttttaatcatattgtttgtttgctgttgagatatttgcgttcttgtgtattctggatatcaatccctggtcagatgagtagtttgcagatattttctcccattctgtaagttgtcttttcactgtgttgattgttttctttgctgtg

SEQ ID NO: 800534 - DNA, 615 bp, Homo sapiens
aagaattatcaaaattgtaaggccaaagcatttttcacaaggaaggtttgtattattcctggaaaatcccacacacttgaataagatcacagacactagagggcagtcctagacaccctgtggttctcctaaaggcaaactaagcacagcaacttagcctggggttttaaacacactgttatcaatgcatcagttgctccggccttcacccgcttctgcaactgaaggacttccccacttatttgtaggaggcattgggtgtgtcatctgagtcctgtagcctcccccaggagctgagtaaagtggtgtctggctgctttagaagcctatacctccctgattgtccagaaccacatctaytgctgctgttacctggggtccatgaaggtgcctgcagccctgtgttcacagacgcctacactttcaagtcctggggcgtgcacgggtgggaagaatgcaccacttctcatcttgccctttttgccgaggaccagggtggtgctgctctgaaccctagcactttatggtgactcagtttttttgtcataaaataaaaaccttgaacattcctgcaggccctctccccaccccccaccctttgcactggactccaac

SEQ ID NO: 800535 - DNA, 615 bp, Homo sapiens
aagaattatcaaaattgtaaggccaaagcatttttcacaaggaaggtttgtattattcctggaaaatcccacacacttgaataagatcacagacactagagggcagtcctagacaccctgtggttctcctaaaggcaaactaagcacagcaacttagcctggggttttaaacacactgttatcaatgcatcagttgctccggccttcacccgcttctgcaactgaaggacttccccacttatttgtaggaggcattgggtgtgtcatctgagtcctgtagcctcccccaggagctgagtaaagtggtgtctggctgctttagaagcctatacctccctgattgtccagaaccacatctattgctgctgttacctggggtccatgaaggtgcctgcagccctgtgttcacagaygcctacactttcaagtcctggggcgtgcacgggtgggaagaatgcaccacttctcatcttgccctttttgccgaggaccagggtggtgctgctctgaaccctagcactttatggtgactcagtttttttgtcataaaataaaaaccttgaacattcctgcaggccctctccccaccccccaccctttgcactggactccaac

SEQ ID NO: 800536 - DNA, 561 bp, Homo sapiens
aggaggaggaactatcctttattattttttaaggatccaccttggttccaggcatcatgctggccacttgacatgttatctttaattcctaaaacatcctgcaaggtatgaattattattccagttttgcagatgaggaaaaccagtattggaaaggatacttgccttgttcttgccacacagctgtaagtggtaggagcagagaactcacaccaaggtctggcttcaaaagctttgtctttcatcaggcagggctgccctaactcttgatcgatcagcatgtgatcaaggacattttacataatctaaactcctttttatttcattcatttctcataagtctcaagactatttattaaattcctaaccttctttgttagaaagattgtagctagaccgaagaatcagaaaaaaatttagattatatcaaagatgtatctaattttcactacattctgagtagctaaaagtgtagatgttgaattaatattttataatatattaccaagtatataatgcrtaataaaacacatacatattccaagcagagaatagatgggt

SEQ ID NO: 800537 - DNA, 493 bp, Homo sapiens
cattcacatccatatcttttataccccttcacttttcatctatgtgtgtccttaaatgtgaagtgagtctcttataggcactatatagttgtgtcttgtcttttatacatgtacacattctatgtcttttgattagacaattcaattcgtttaagttcaaggtaggcattgatatataaaaacctactgctactgttttatgtttgttttgcagatcttttgttttgtctttactcttttattgtctttctttgtgattaggtgattttgtctagtggtatgctttgatttcttgattttatcttttgcatacctattataggtttttttctttgtggttaccatgaggattatttyttaaatcttattgttattacaggctattttaagttgataacaacttaactttgattgcgtaaaaaaaaagctctacacttttctccacctccctcatgcattttaaatttttggaggggtggagccaagatggcca

SEQ ID NO: 800538 - DNA, 560 bp, Homo sapiens
aggcaaaacaatcccttcacggtgctttgtgtgtcatctggaacctcatccgtgataatcatgtggtgtatggaggaggggctgctgagatatcctgtgctctgccagttagccaagaggtggataagtgccccaccttagaacagtatgccatgagagcgcttgccaacacgttggaggtcatccccaaggccctttctgaaaacggtggcatgaatcctatccagagtatgaccaaagtctgagccagccaagtgaaggagatgaaccttgctcttggcatcgactgtttgcacaaggggacaaattatatgaagcaataacgtgtcacagaaacctcgattggcaaaaaagcaayagatatctcttgcaacacaaatggttagaatgattttgaagaatgacaacattcataagactggagaatctgaagaatgaagacaatgagaatactatgtagtaagatccactactgtgattaaataaatggatgtcttgtgatgcgtctacggttatttattacatcctttttcagaccctgtagatgctataataaaaat

SEQ ID NO: 800539 - DNA, 635 bp, Homo sapiens
gtatttgctttatcatttaggggcaatgcagacatcaaatctgagacaagaagtcaaaaaggaagtctttagaagccattgtcagctcggagctgtgtttggtgccgctcagtgagaatgctttgctttgctgccatagttgtttctatctatggcaaaagcagtcacaaattacaacgatgtcccaygctgaacagggcagagtaacgctgtattaggcacaaacgcaggtcagaaagaagagacagcctcttccctggtgggagccactgtctggccaaggagacaatgggcacagggaaagtggctcagagcccccaacggcaggcaggccccttgccactggggcctggagaccttgtcatcagtcacgtcaaatgctccaatagcagaggctcttgggaagcatcatttccagaaattctccaaacagcctaaaagctacatgcaaaatagccgtgtccttatagactttttattttggtgaggcaaggatctaacctttatcagattctcaaaaaggttaacggccaccataaatgggggcgggatggccccagagcattcaaagtccccagcagcgtctggtaaggtttacaggaaaagctgtgagtcaccccaacagattttttttt

SEQ ID NO: 800540 - DNA, 635 bp, Homo sapiens
gtatttgctttatcatttaggggcaatgcagacatcaaatctgagacaagaagtcaaaaaggaagtctttagaagccattgtcagctcggagctgtgtttggtgccgctcagtgagaatgctttgctttgctgccatagttgtttctatctatggcaaaagcagtcacaaattacaacgatgtcccacgctgaacagggcagagtaacgctgtattaggcacaaacgcaggtcagaaagaagagacagcctcttccctggtgggagccactgtctggccaaggagacaatgggcacagggaaagtggctcagagcccccaacggcaggcaggccccttgccactggggcctggagaccttgtcatcagtcacgtcaaatgctccaatagcagaggctcttgggaagcatcatttccagraattctccaaacagcctaaaagctacatgcaaaatagccgtgtccttatagactttttattttggtgaggcaaggatctaacctttatcagattctcaaaaaggttaacggccaccataaatgggggcgggatggccccagagcattcaaagtccccagcagcgtctggtaaggtttacaggaaaagctgtgagtcaccccaacagattttttttt

SEQ ID NO: 800541 - DNA, 638 bp, Homo sapiens
tgtatattaagtattaataagtatgggttatatattaaaaattatatattaagtgttagatgtagactatatttgataagctatttcataaatataaataacatttatttatttatttaatttatttatttgagacagagtctcactctgtcacccaggctggggtgcagtggcatgatcttggctcactgcagcctctgcctcccaggttcaagtgattctcctgcctcagcctcctcagtagctgggactactggcaagcgccaccacgcctggctaatttttgtattttcagtagagacatggtttcactatgttggccaggctggtctcgaactcctgacctcaggtgatccacccatctcagcctcccaaagtgctgggattacaggcatgagccagcayacccggcctccaatttttagttttttgaagagttttatatctgattagaagagataatatatgtggagtgatcgattatgtttagaagaaaacctgatagagatgcagtcagcatcaagaagccacagccacccaggaaagccctgagctcaaaacaatggaattccaaagcctggacagttcaacaaagactgagccacgggggtggcatgaactacagggcccctcctgcc

SEQ ID NO: 800542 - DNA, 622 bp, Homo sapiens
ctgaaattggtccagtctattgataaacgcttcaattgaattctgaaattccttaagtgactctttcaattccagaagctttgattgatttctttttaagatgtttacttctcgctccatttcctggactgctttagtagtttgtttgcattaattttcaaccctgccttggatcactgagcttacttgcagtccatattttgaatagtttrtctgtcatttctgagttgccagtttggttagggttcattgctggggagttcatgtgatcctttggaggttttacgacattcagacatttcatggtgccagaagtcttatgctggtttcttcttatttggagaggctgccgcttctgatttttgaaattatttttgtgcagatagaattgtttttctctccctatttttgttctttcctttttctcttccccttcctatgggatgtgactataaagtatgttgggtagggcctttgacttggattctatagctgtgttcacttctgtgggtagttttatattggcctgtgcagtttgacatacatgtcagtagatggcacttatgagcaaaagccagctgtgactaggacaacttgatatagcacagcttgatccttgttt

SEQ ID NO: 800543 - DNA, 624 bp, Homo sapiens
tataggctagtttggaaagaactgaatcttgacacgttgaggctttccattcctgaatataattatgcttccaatttgtttggggtttcttttatttaaccaggaatgttgtgaatttgttgtcatggctttcgagtctttggttttccctagataattaatatttttgttgtagaacataaatagtttttatcattctgatgatgttaatctgtcaactttgctaaatttactagtcactattcgtaatttatttctggattcattgtaatttctgtgtatattatactgtatctgagttaatattgttttatttcttattttccatttctcrtgggcttaatgtctctttatcacattcattattgcattagctagaatttctaggagagcattgaatagaattggtgacagtggggatccttgtttctcatttctaatctgcaggaagcagtggaagttttccatttcaatattgagaatgatgcttgaagtagattttggtagatattttttatcagattagagaagtttgctgtcatatatatatatgtcataattgtgtgtaaaatcttgtcaaatcaacactctgcatctatttatataattgtgtgttagtccatt

SEQ ID NO: 800544 - DNA, 549 bp, Homo sapiens
gaaaacattttcactggtccattttcaaggcctgataaatctaagcactggcagccagtctgtaaatgtaacaaaccacatggctcatgcacccagaaggtcacaataagcaaacagaatgtagagaaggggtcagtccrtaaaagggaagaaagtttcgttatagggaaatcaaaacttaagtgggagctgggcgcagtggctcacacctgtaatcccagcatctcggaaggctgaggcaggtggatcacctgaggtcaggagttcgagactagcctggccaacatggtgaaaccccatctctactaaaaatacaaaaattagccaggtgtagtggcaagcgcctgcaatcccagctactcaggaggctgaggcaggagaattgcttgaacccaggaggcagaggttacagtttgccaagattgtgccattgcactccagccggggtgacagagtgagattctgtctcaaaagaaaaagaaaagaaaagaaaaagaaagaagaaacttaagcagggaaggagactggggtataaccttacaaggagga

SEQ ID NO: 800545 - DNA, 626 bp, Homo sapiens
atgcagatgcatctacacagaaacagcagttgtggttataaaatcttttaacgagtttggggcagaggctttttaattatttttgagacagagtctcattctgtcacctagcttgtgcagtggcatgatataggcttactgcaagttctgcctcccagactcaagcaatcctcccacatcagcctcgagagtagctgggaccgcaaacgtcaacaccacacccagctaattttttgcatttttggtacagacggggttttgccatgtggcccaggctggtgtcactgagctaggcaatccacccaccttggtttcccaaagtgctaggattacaggtgtgagccactgcacccagcccagagttttcctgatgtgaaaattacgtgagtgacaaggagcaccaggagccttgcctgacttactgtctgttggtaggatgtgacatatgaataatacaaaatacccgtctggtttgacttgcagattaartcactgctagactacagccttgatgccctctcttgctgaccctagccaacataaccagtcttccaggaacaataccatgttttaaattgcttgaggtttcactacctgctgtcactctcagtccggaatcccagcag

SEQ ID NO: 800546 - DNA, 612 bp, Homo sapiens
atctgttaagttaggctgtctgaaacagttaagcatgaaaatatacttgtttggaaactattttgaaagacgtaatgaaaaccagttgaattcttaacttgaattttttttataaaataaaattgtgaaaaacttaagaaagttaaagtgaagtaattttaaagctcccccccaaattagtcattctttaaataagatatataacatagtcaactcctgtaataccctccactggatatcaacagcatacatgctacaggttaaatatttgtaaaaggatagctaattttatgactacccataaatatttttagcctaggacaatgatatgggtaatattcargcatttgattttctttaatttttttttttggtgaatgatatagtggggttactttttgtagaataaagacacttgtagagagcacaagtggtaaattacagaatataggaaatatccctcacacttataattatatttaaacagcagtaaatgaactaaattagttgtaaaagtcactcttgtcagcatggtgaattgaacatttccatatgactcttacttttctatgtcattaatatcactccatctcatagttatttgtaacacct

SEQ ID NO: 800547 - DNA, 628 bp, Homo sapiens
aatataggaaatatccctcacacttataattatatttaaacagcagtaaatgaactaaattagttgtaaaagtcactcttgtcagcatggtgaattgaacatttccatatgactcttacttttctatgtcattaatatcactccatctcatagttatttgtaacacctttgccttataccatttaaactagataagagggacaggaaaaaatataagttggcctggttttctaaaaaaaaaaaaaaaatgtattcatcccttctataacttgtgaagggaaaataaatctagggkcccccaaatcactaagctaaagagaaaagtcaagctgggaactgcttagggcaaacctgcctcccattctattcaaagtcacccctctgctcactgagataaatgcatatctcattgcctccttaggtcaggctaattcagaaattcgaaagaatgcaaccatttgtctcttatctacctatgacctggaagcccctttcccacttcaagttgtcccacccttgctttgagtcatccctccttttccaaactgaaacaatgcttgtcttacatgtgttgattgaggtctcatgtatccttaaaatgtttaaaaccaaactgtgctctgaccac

SEQ ID NO: 800548 - DNA, 628 bp, Homo sapiens
aatataggaaatatccctcacacttataattatatttaaacagcagtaaatgaactaaattagttgtaaaagtcactcttgtcagcatggtgaattgaacatttccatatgactcttacttttctatgtcattaatatcactccatctcatagttatttgtaacacctttgccttataccatttaaactagataagagggacaggaaaaaatataagttggcctggttttctaaaaaaaaaaaaaaaatgtattcatcccttctataacttgtgaagggaaaataaatctaggggcccccaaatcactaagctaaagagaaaagtcaagctgggractgcttagggcaaacctgcctcccattctattcaaagtcacccctctgctcactgagataaatgcatatctcattgcctccttaggtcaggctaattcagaaattcgaaagaatgcaaccatttgtctcttatctacctatgacctggaagcccctttcccacttcaagttgtcccacccttgctttgagtcatccctccttttccaaactgaaacaatgcttgtcttacatgtgttgattgaggtctcatgtatccttaaaatgtttaaaaccaaactgtgctctgaccac

SEQ ID NO: 800549 - DNA, 563 bp, Homo sapiens
tcagaaattcgaaagaatgcaaccatttgtctcttatctacctatgacctggaagcccctttcccacttcaagttgtcccacccttgctttgagtcatccctccttttccaaactgaaacaatgcttgtcttacatgtgttgattgaggtctcatgtatccttaaaatgtttaaaaccaaactgtgctctgaccaccttgagcatatgtaagggttcacaatcttaaatgatatgtaagtgtgaaagagaayagtgaccagaatataactctcaacgaagtgtttttaatcaaattaaactcatgggaaaaccttgaaaggacaaattaaaaaaaaaaaaaaaactagcatgttagttacctgtttctcttccagatgtattctcttgtcttattcacctgctctctgtctctgagcagtatgaacagtattatcctgtattatcaatggcttctctgattacatttggccaataggaaaagggaacaccaaagcagattaaagggagagaaaatagtaagatcaatttactctagcttttttataagaggctaatacaattc

SEQ ID NO: 800550 - DNA, 568 bp, Homo sapiens
actccagcctgggcgacagagtgagactctgttttattaaaaaaataaataaataaattttaaaaaagtaaaggaataaaagaatggctacttcataatcagaacagtagccaagaaagaatggctacttcgtaatcagagcagtagcctaggctgctagactaaagatatttacagttatttcttgattgtatgctaagcaagggatgcattattcacgagttttctgggaaaggtgtggacaattcctggaactgaggttttctccccctttttgaccatataaggtattcctgacattgccttggtatttgtkaactgtcatggcactggtgggagtgtcttttagcatgctaatgcattataattagcttgtaatgagcaatgaggatgaccggaggtcacttttgttgccatattggttttcgtgagatttggctggcttctttaccgcatgatgttttatcagcaaggtctttatgactggcatcctgtgtcgtcctcctatctcagcttgtgattaagagtgccttaacctcctgggaatgcagtgcagtaggtctcagac

SEQ ID NO: 800551 - DNA, 525 bp, Homo sapiens
atggcttgtaaagttttttttttcttcatggttggtttttatttattgttcgtttttgtgattttgtttttcttcaacttttattttaagttccagggtacatgtacaagatgtgcaggtttgttacatgggtaaatgtgtgccatggtggtttgctgcacagatcaacccatcacccaggtattaagcccagcatccattagctattcttcctgatgctcttcctcccccagccctccaccccamaacagcccccagtgtgtgttattcccctccatgtgtccatgtgttctcgtgtttcttattatagttagaaagttttctattgttctctacctctccactcctcttcttcatgattcaattttaatcaacagtatgcatttccttaaatatactttttctcttaaatatgctaatactcttattccttgatttatttatcaatttgctaaaactcttattacttgtttatttttaatgatattttgttgcctctagttcttgaaatgcaaactgcaaact

SEQ ID NO: 800552 - DNA, 489 bp, Homo sapiens
atggcttcttgagatataacctacaataagtaatgtgatgatactaaaactgatttgcctaatattgaagaaaasagaaggctcaaatagattctaaaaaattaggctcattattacatgagatcagaagcattcatcttctatgttttctagattggcctataggacgacttcttaactaatgcaataaactaatgcaataaatgatataacacaccatataaccctccatgatgagtgattacactcaaccaactactgatacatagtgttgtgttgcaagtagctagaattcatgggtccagaaccaaggggaagaaatggcattgggacttctcaccatcacttcctgtgactcatcttgctcaatttatttttctgtccttgcaaacttttattctacctgactttgtcctggttctcagattttagatcaactggatccctgcctagattaacaggcaaagaaaggactatttaactgatgac

SEQ ID NO: 800553 - DNA, 489 bp, Homo sapiens
atggcttcttgagatataacctacaataagtaatgtgatgatactaaaactgatttgcctaatattgaagaaaacagaaggctcaaatagattctaaaaaattaggctcattattacatgagatcagaagcattcatcwtctatgttttctagattggcctataggacgacttcttaactaatgcaataaactaatgcaataaatgatataacacaccatataaccctccatgatgagtgattacactcaaccaactactgatacatagtgttgtgttgcaagtagctagaattcatgggtccagaaccaaggggaagaaatggcattgggacttctcaccatcacttcctgtgactcatcttgctcaatttatttttctgtccttgcaaacttttattctacctgactttgtcctggttctcagattttagatcaactggatccctgcctagattaacaggcaaagaaaggactatttaactgatgac

SEQ ID NO: 800554 - DNA, 489 bp, Homo sapiens
atggcttcttgagatataacctacaataagtaatgtgatgatactaaaactgatttgcctaatattgaagaaaacagaaggctcaaatagattctaaaaaattaggctcattattacatgagatcagaagcattcatcttctatgttttctagattggcctataggacgacttcttaactaatgcaataaactaatgcaataaatgatataacrcaccatataaccctccatgatgagtgattacactcaaccaactactgatacatagtgttgtgttgcaagtagctagaattcatgggtccagaaccaaggggaagaaatggcattgggacttctcaccatcacttcctgtgactcatcttgctcaatttatttttctgtccttgcaaacttttattctacctgactttgtcctggttctcagattttagatcaactggatccctgcctagattaacaggcaaagaaaggactatttaactgatgac

SEQ ID NO: 800555 - DNA, 501 bp, Homo sapiens
tcaaatacaagggcattgagaattatgtaatagctggtaaaataccaatccataaggggaaaacagtgtagggaaaatggctgtgctttagtcaggagtaagctgaggtggtgttgcaaaactgaatggccttagacatactaactgctgcccaaggaggcacctgtatccttttaggaacacgatgttgtacctttatccctgacaattggcagaacataacagcagttctgcaaggggtctcatgggaaattaagttggttgagagccttattgatggccccctgcagagacggtgggcatccctggtcwctggcctatgctgggccctaaaagtcataactagtatagctgggatcctagtagtgagctgtcgctctctgtattgttgtgggttatggatccagggctctgccctatgggcatgtatccctacctgaaagacttcccttggcctagggggtagagtgtaaggtaaatcgttgtgctttagtcaggagt

SEQ ID NO: 800556 - DNA, 485 bp, Homo sapiens
tagagtgctacatggtttctcttaactgcttatagtaaagtatgaggagagataaagaaattaaagatgaagcttataattaaatggtaacagaacggaaatatttgaacaattttctgcttggttaagttatgaagaataaaatgtgatgtttgggagagaaaatcaaggctgtggccttttattaaagagattaatgaccaggtgcggtggctcacgcctgtaatctctgcactttgggaggctgagatgggtggattacgaggtcaggagttcaagaccaacctgatcaacatggtgaarccccgtctctactaaaaatacaaaaattaactgggcgtggaggcgcatgcctgtaatcccagctactcaggaggatgaggcaagagaatcacttgaacctggaaggcggaggttaaagtgagccgagattgcaccactgctctctagcctggacgacagagcaagactctgtctcaaaaaaa

SEQ ID NO: 800557 - DNA, 698 bp, Homo sapiens
gggatccctggagaatctccaactggcctgagtacttaaaagatggagtggggcatcagaaagtttacaccatttgcaggggggaggagcctggcccctcttgatctcgtgtggtcacgtgggattcaatctgtgagatgggggcctgttaacaagaacctctctcactttgctgtattgtttttcctttttcgtttttgtccaataaattccataagcccctcacccttcaaaatgtctgagagcctaatctttcctgttcatgtcacaagaacctagtttttagctgaactaagaagaaagtcctgcaacacttttggcacccaacgtggggcttgagaaagggtgagtaagagacaaaacaaaaaattgttttttctttcactcctaagcacttttttcctcaaacttctgaaggtagatgaaactgtgcccccactccctgttgctcctggggattggaaatgtttgcctcagtccaacccagccttttcctggscttttccttctttttttcagcatggtagagcaagcaagctgtggtttcctgccaccttccccgcaccccaagcagggctaggatgcatggcccaagggccccacatggctggctagttatctctacctcctatccatggagtctcttcctccctagccagggagtccagctccatcccacagcaaattaatgtctcttg

SEQ ID NO: 800558 - DNA, 644 bp, Homo sapiens
ggccttttccttctttttttcagcatggtagagcaagcaagctgtggtttcctgccaccttccccgcaccccaagcagggctaggatgcatggcccaagggccccacatggctggctagttatctctacctcctatccatggagtctcttcctccctagccagggagtccagctccatcccacagcaaattaatgtctcttgctagtggaggaactatttgcataagaataagaggttcttccccctgaccccggcatccttttatcttctccaccttgtcagcagttaactttgaaaggaggttttttccttttagaagatgtttagctgggccaggaatgttggggagcattgtttatatcatctgtagagttttaattgtgagaaaggattygtgaggctgatcttaaactgtagccaatctgacgtgctttgtgtgtctttctgtatggtccatagcaaattttgctgcaggcctccatcttgttttacgtccttgggagtaagacctataaccatgtggcaatattttgttctagcttctggcagtttacaataatggcctgggattcaatcctagcttagggaatgagttctttctggtttttcttttcttggatcctgttttgctggaaaaaggttt

SEQ ID NO: 800559 - DNA, 577 bp, Homo sapiens
ctgagtaaacttttttcttttaagttcattttcacacttttcctattcgtctcttatgatgtagaagctctatgtaaggaacttgtttatttgctagctaattggatgcatcagttggtacaaggatattgtcatttatcttttaaggaatcaatatgtggcttatagtgcttttattattttattttatttttttttagacagagtctcagtctgttaccctggctggagtgcagtggcacaatctcggctcactkccagctctgcctcccgggttcatgccagtctccctcctcagcctcccaagtagctgggtctacaggcacctgccaccacgcccggctaattatttttttgtatttttttttagtagagacggggtttcaccgtgttagccaggatggtcttgatctcctgacctcatgatccacctgcctcagcctcccaaagtgctggcattacaggtgtgagccacactgcccggcttatagtgcttttaataagaaaatacactgaatactttttgttgttacaggtttgtggtattttcaatatttcgtgctagaaaatttcattg

SEQ ID NO: 800560 - DNA, 641 bp, Homo sapiens
aagtgggggagaagagacaaatcctccatacagaaaaaaatctcaaatactatacgtatgtatacatgacttccctctcaatgtgatggaatttaaacccttcatgaatgtgagcagaacttagtgaataatgtccaaataataaaatatcacaaaggtgaaaacagtaactttgtagtgatgaaggctttcagatactaaaccaaatgataaaagttaattctaccagtcatgttgtgtggatataccatagcccctgataggatataacgcaaaaaggactttgcttgkgtgataatcttctccaaaacccatcaccaagtctaatcattagaaaaatttcagaccaacctaaatggaggaatgttctacaaaatattaaccaatagtcctcaaaattttcaagtacatgaaaaacaatgactgggaaattgtcacaaaatagaagagaatgacagaagagacatgacaacttaatcaatattgtatcctgacatagaaaaaatcatgagtaaaaaaactagtgaagtatgagtacattatggaatttagttaatagtattacaccagtgttactttcttaattttgacaaatatgttaagataatgtaaaattataacaagagaaacttaaactgaat

SEQ ID NO: 800561 - DNA, 636 bp, Homo sapiens
tttatgtgtgtccatatacttcaagccaaactgatttttggtgaatttgtctctttataaaatacacagaaatagaaagaaaagcactgaaaattgtggactcctagtaataatcaattaagcaattagcattacattacattttcctgtcagtttggcgagcgtatttttcaccaccgaagataataaaaaaaaatcttaatttataatkagaaattataaaatctgtcagatgatctagaatatatttacgtaagatatgaagattttctttcaacaataatgacataggagaaaaaatcagttatacatttccatatttattaaatatcttcctattacaaaaatttcaatttctgctttaaaaatattaaatttctcataatagcataacccagaggcaaacattgtcattattttaattaatatttctaagaacgtggactttggaatctaagagagttaaatcctggctttggccctttaaagctatgataaatgtttcaggtgatggatatcccaattactctgatttgatcattacacgtgatacacacatatcaaaatatcacatgtatgccttaaatatgtgcaactactatgtattctcaaagaataaacattaagaaaagttat

SEQ ID NO: 800562 - DNA, 593 bp, Homo sapiens
tcaaagttaacatacttggaaatgggacaaatcaatatcttcttccaggtgataggatgcaatgaaaacaccagatcactttcttccttccgtggtattctatccaaacatgcataatctaaatctaattgtaaaacaacactaacaaaaacaaatggagggatgttttcagggtccaggaagtcgtgtaaacaagtgtaaggcaattgagagcaagagggaagcaacaaactgggcagtgaataacttgcctaaaggaattcaaattcaattaaagaaatttgacgggtgaaattaatcctctgatgaaaacaagactagcaatagccaatgtttatcrtgaacttactctgtgtcaggcaacacagtggagaggttctagtgtggactctggaaatagatttctgggcctgagtcctggctttactccctgttaggggtgagactgatcacaacattacacctctctgagcctcagttgcctcacttgaaaaatggaaataataataacatctgccttataggatttttctgaggattcaaaggctgagtacatggaaaatacataaaatagtgcctggcacatggaatat

SEQ ID NO: 800563 - DNA, 602 bp, Homo sapiens
tatgtatgcgtgtgtgtgtgcatgcatgtgtttgccagtggtaaggacagaaaataagtggctagtgacctccttggacacctacacctaactccgcagccttcggtgacctaaagagtcagtctgtgcctggtggtggtctgagagccgctaacacagtcacgttgctgcaggcctgagctcatgttctcgttccatctctgcgccctgggaggagagtggccacagcactccaagtctgtttctgyagctgcagaatgagctcaatagtgcctaccttgcagggcattttttgaaaatggataattacatgaataggtcacacacatagtaggtcttggtaaatatcccttttcatctcacataagaactctccaagggcagcctgatgacaaggtggtctcagcgccatcgtgttccatttcgtggcgtctggaaccaacacttaagcagaacagcacatcccacttgtttacatctctgataccaccacctccttttgctaatgggcttcggtttttccttttcttattctctttgcctaaaggcaacaacgcttgtctttaatcagcataaggcaatttagtacccctcacatcagc

SEQ ID NO: 800564 - DNA, 601 bp, Homo sapiens
ggaaaggagagactcctccttactgttgggcaggggtaggagttaaaatcctctgctagggctgcactgattaaaccttggctgaaaggcccagggatgcctcatcactcatccccacattgcttccattgaccctggggtgaccttgcgactgctgacctttatgtcttgattccacttcagtagggatggggaggggtcactcattagcgatgagtgataatggaaatcsaggctctccacgtggtctcccctgactctgtggggtgtagtgtcccctggcatggatgaaagtccttactcctcattcagccttctttgacgctaccccagtggaggggctgatgtgccttcttacaaccccacagggctagagagctacgctccccctgcagttttaaagggcaagggtggagttagggctgcagctgtttgtgtggtatttgacaggtgtggagaggttcttgtctaaaaattttctatattactagcttgcccatttactcatcctttaccaagagagaacaggcttttgttggggctgttttggtctgcacacattggcatttccatgttcccagattatttaacaccaagtctg

SEQ ID NO: 800565 - DNA, 577 bp, Homo sapiens
cccaactcattttatgaggctaacataaccttgattcgaaatactgattaggccaatataagaaaaaaatagatctacttcatttataaaaatagatgcaaaattccaaataagctactagctaattaaccctactgtgtagtttaaaaataatctagttggatttattctaggagggtaagaacaatttgacattagaaattctatgaatttatctaccatattatcggactaacagagcaaagtaactcttgacagatgccgaaaaggatttgatgaagttcaacgtctctttctgattttttaaatttctcagaaaactctgaatggaactgaatatccttaatgcaataaagctttgcatattaaaaactttgtagaaaacmtactactctgcagatgaactttaattcattctctttaatgttggaaacaggacaagcggaagcaccgcagctattcaacctaacacgagaggctctggctagtgccataagatgagaaaatgaaaagataggaagagaagagggagggaagagacgcagctgtcatcacacgcagattatatatcatctac

SEQ ID NO: 800566 - DNA, 516 bp, Homo sapiens
aggagacattatgttgtccactttacagagaatactgaggctcagaaacattaggaaacttccctgccaaggtctcatagcttctaaatgttatgaggataatgtaatctgtacttttctaacagagatctgtaatgcccctgggggtacttggtagtgtgccagagggtaaatatggcacatcttcttggggcattaattttactcaagggtaatacttttcaattcatagttttaaaaaatattcatattgtataaattaaaataaaatataagagtttaaatgaatttaatgtgacacggacactacttccccaggtgccccaagagtctgcactcttcttgtgtccacacacctctgccttcagggsccgccccgcctacattagaagattaaaaagtcctgccttgagtcatcaagacatcattatatggtcttcagaattttccaatccagaagtaaggaaaacaaagagtttcatccaacagaaaaagaaaaatatctaatatacacat

SEQ ID NO: 800567 - DNA, 592 bp, Homo sapiens
aattaaatatcccttttttcatgctttggttatatgcctttaagaggaaagtgtttaggggcctaaattttctacttaattgacttataagcataaggggtggaaatgaagaacaaagagaaaaataaactactgtcaaaattgtattaaatgacatgagtaacttatcctcaagtcagtgagtgatggttttgataatkctgtgtgttagaaggcaaacaaaaactaaaaaatttgcatttttgcacaaattttgctttattgaaggattggaaaatgtctcacatctacatttttatagcaaagaacacataaaattattcttatttttaatgacagttgtttaaagagtacaaagctaaatgttacaaagtatttcctttggttctaatgtgaccataccctggattttaagttttctaaatagaatgcattaatcctagccacaatgctgaagatgatctttttaaaatgttaagagttgcaaagtagttgtttgctcaacagagcatcctcttccctaaaagtttaaaataagaacattcctatacattcccttcattatttaagaagttcgggtgtgcttctctag

SEQ ID NO: 800568 - DNA, 592 bp, Homo sapiens
aattaaatatcccttttttcatgctttggttatatgcctttaagaggaaagtgtttaggggcctaaattttctacttaattgacttataagcataaggggtggaaatgaagaacaaagagaaaaataaactactgtcaaaattgtattaaatgacatgagtaacttatcctcaagtcagtgagtgatggttttgataatgctgtgtgttagaaggcaaacaaaaactaaaaaatttgcatttttgcacaaattttgctttattgaaggattggaaaatgtctcacatctacatttttatagcaaagaacacataaaattattcttatttttaatgacagttgtttaaagagtacaaagctaaatgttacaaagtatttcctttggttctaatgtgaccataccctggattttaagttttctaaatagaatgcattaatcctagccayaatgctgaagatgatctttttaaaatgttaagagttgcaaagtagttgtttgctcaacagagcatcctcttccctaaaagtttaaaataagaacattcctatacattcccttcattatttaagaagttcgggtgtgcttctctag

SEQ ID NO: 800569 - DNA, 521 bp, Homo sapiens
tgctttagctgcattccacaaattttgatatgctgttttaacttttatttagctttacgtattttttatttcctttgagacctcctttttgacccattgatttttttttttttttttttactgagtcttactttattgcccaggctggcaccaacaccacacctggctaattttggtatttttagtagagatggggtttcatcatgttggccaggctggcctcgaactcctgacctcaagtgatccacccacctcggcctcccaaagtgctgggatwacaggcatgagccaccatttagaagtgtattgtttaatttacatatatttaaagattttctcatttttatattattgatttctggtttccttctgttatagtcagagaacacactgtttataatttcaatacttttacatttgttgaactttgttctatggattgggatatgctgtatctttgtgaatgttacatgagcacttgaaaaaaaatgtattttgccattgtgttctgtatgtgtcat

SEQ ID NO: 800570 - DNA, 616 bp, Homo sapiens
tacggaatcagagcctgcaatttctatcccctctactatgttgcatatctgctgtgcactgggcactgacgtgtgtgtgtgtgtgtgtattgagacctgaaagatagcaagtatttaacacatatacattgaatacgcactatccatttgatcttcatagtcctttgcagtgagcatcattatgccacagtgtagatcaggatcagaggctatgtcttgcccagagccccacagtgtctgtgctggagtccaartcttccgcagtatgtacaaacaaatcatattattctctgaatatctcaatccacttctcaacatttgtaatatatctatgtttatactcacttttaataaaatcaaatggatattaaatttgaggagcaaaagtttaagaaaataaagtacacacctctccattgcacaaaataaaactaaattaaacagcaactaaagtcccagacaattactaacttagatgcaaatcaatcaaatgtgactgaaggatttctgtttccagctagcaccagctcataaagcccggccaatagtttttgagcctggtacctggaggctccccgctgtttgtgtagccaagcggagtgctcacggcaaatcc

SEQ ID NO: 800571 - DNA, 603 bp, Homo sapiens
tggaaactgaagcgttgagtgactaaacaatttgttcaaggctacacaaatagtaagtggcatcccctggatgcaagccaaggtccccttgcactagagctcacaatatttaccattctgttctatcactccatgccctgaactgtttattgttacccagtgtcatcttgttacactgactgagcaaaccaagacttttagtcattcacattctctatggttggtctataattctggacytgtagtagggaatttagaatgattatgttctgtctcttaaagagcctatattttgtggttcatggcattcactttctttttttttttttcgttttttaaaatttttgtttttcatttcaataggtttttggggaataggtggtgtctagttacatgaataagttttttagaggtgatttctgagatttttggtgcacctatcaccagagcagtgtacactgcacccaatgtatagtcttttatccctcactgccccccaccctttctcctgagtccctgaagtccaatatatcatttttatgcctttgcatcctcatggcttagtaccaatgtacaagtgagaacacacgatgtttggttttt

SEQ ID NO: 800572 - DNA, 603 bp, Homo sapiens
tggaaactgaagcgttgagtgactaaacaatttgttcaaggctacacaaatagtaagtggcatcccctggatgcaagccaaggtccccttgcactagagctcacaatatttaccattctgttctatcactccatgccctgaactgtttattgttacccagtgtcatcttgttacactgactgagcaaaccaagacttttagtcattcacattctctatggttggtctataattctggacttgtagtagggaatttagaatgattatkttctgtctcttaaagagcctatattttgtggttcatggcattcactttctttttttttttttcgttttttaaaatttttgtttttcatttcaataggtttttggggaataggtggtgtctagttacatgaataagttttttagaggtgatttctgagatttttggtgcacctatcaccagagcagtgtacactgcacccaatgtatagtcttttatccctcactgccccccaccctttctcctgagtccctgaagtccaatatatcatttttatgcctttgcatcctcatggcttagtaccaatgtacaagtgagaacacacgatgtttggttttt

SEQ ID NO: 800573 - DNA, 603 bp, Homo sapiens
tggaaactgaagcgttgagtgactaaacaatttgttcaaggctacacaaatagtaagtggcatcccctggatgcaagccaaggtccccttgcactagagctcacaatatttaccattctgttctatcactccatgccctgaactgtttattgttacccagtgtcatcttgttacactgactgagcaaaccaagacttttagtcattcacattctctatggttggtctataattctggacttgtagtagggaatttagaatgattatgttctgtctcttraagagcctatattttgtggttcatggcattcactttctttttttttttttcgttttttaaaatttttgtttttcatttcaataggtttttggggaataggtggtgtctagttacatgaataagttttttagaggtgatttctgagatttttggtgcacctatcaccagagcagtgtacactgcacccaatgtatagtcttttatccctcactgccccccaccctttctcctgagtccctgaagtccaatatatcatttttatgcctttgcatcctcatggcttagtaccaatgtacaagtgagaacacacgatgtttggttttt

SEQ ID NO: 800574 - DNA, 679 bp, Homo sapiens
tcacacttaaaattcccttaaaaatttttttacactagaactgtttatacttgatcttagacaaaaataacgacttcacataatagcgggaaaggcatgttaaaagcacgtttcacacctgaacgactgcagcaagataccgaagccattcaatgggagaggttgtctggagtcaccgcagcatacttataaagaaaaaagttgctatcgtaagcattttcaatgccttttcccaaaacatggaggattggtttttgtgtttttccygctttccctggacgataacgccgcagcccactgcagagacagcgagcaacctttgagatcacagctgttcttttcttgcccctctgctgagaaacaaagtgtgggagtggaaaaaaatgcagaaaacgttagggacttagcctcaagcctgagacgcctctgacatggagccagggagcccctgcatgcggaactgtggaatccaaccccaggcatagtcacatctgcacgtgagagggctgcgcagaaaggccccatgtttcccttggaaatgtgcgtggcttctgtgaacagactgaacgcccctttcctttcctgtttttcccccatttccttccttttaaggaggataaaggcctggccaattctcagctgtgtgggtcctctggatccttggatctgacactggccc

SEQ ID NO: 800575 - DNA, 695 bp, Homo sapiens
taatgaattctgttggacacaactccaactagaaaacctctaaaattccttccaattctacggttctatgattccagaaggaggcctggaggtctgggtagaaatggagggagagaaaatatggtctctggaggtctagggcaggttcctgggataaggtgcagtgttggtagaaacaggatcattgcctaagccttcccttggaggtgggcccttgaggctacagatggaagggtttctgtagaagcttctgagagagaagttagaaaaagcctacatccaaatccccagatctgtacacgtgtgactgcggatggaggctccagttttctcccaattttgtgctaggcagagaaaagtagaaacaaccagatgatgtccaccctgctagttctaaatcctcttttgggtgcttggtaaggagaggtggagggaagggaatrtgaggaagggtcgtttagggaaataaatactggttgagcaatggggcggtggctctagctgtggtcagcactgcacagagtaggggtctggaaaggagaaagaggcagaagaatctggcttgaagtagatgcaaatacttacaacgaggaaactttctctgccagattcaaaggggcacatggcctttgtaacctggagaatgaggtgaggttagagctgtgtttcccttaccactggcttatcagtgcctg

SEQ ID NO: 800576 - DNA, 615 bp, Homo sapiens
aaatagttgataaagcagcagcatgacttgagagaattgcctacaattttgaaaaaaaaaatactgtgggtaaaatcctatcaaacagcaatgaatgctacagagaactcttttgtgaaaataaaagtccattgtgcagcaaacttcactggtgttgtattttaagaaattaccacagccacctcatccttcagcaaccaccaccatgatcagtcggcagccagcagcatgaaaacaagaccctccaccagcaaaaagattatgattgctgaaggctcagatgattgttagcattgtttagtaagaaataattttttaattaaggtacgtacattgtttttttagrcctaatgctattgtatacctaatagactacagtatagtataaacataactttcacatgcacagggaaacaaacagtttgtcactaaccttattgcactatttgctttatggtggtagtctggaactgaacttgcaatatctccaaggtattcctgtacaagtatggtgggttttatttctgtaagagagatttcctgaaatggaattgtcatgttaaaggatatgcaaatttttaattttaataggtattacaaaattgtttccagaaa

SEQ ID NO: 800577 - DNA, 540 bp, Homo sapiens
caattttccatgataggagctgttactacgatgaggggactgtgcttagtttggacttctttctgcaagggtccaaaggcatctgtctttgattcaccactgtactcagtacctagttcagtgactagcacagttgaatgaatgaattctacccccgccccattcctttttttctgaacaatgtcagaccgagatgactgagtcatggcctgagactggaatgtgagcgtgagaagatgagccaagagagatgcacagcgggtaactgctttgctaaactccagcctcaaagtacacgggatggagggtggaaagagtctctgaagcagaagagacctgaccagactggcatctgaggaacctgatcagatttgcacagtgacagagactrtagacagatgtcccatgttccctgcaacatactggagacaatcttgggaggggactcatggcccacaaatcctcataagcattggcactgcctgcaccctgggcagggtgtgcctcttcggcctgagacagccctgctactgactctgc

SEQ ID NO: 800578 - DNA, 581 bp, Homo sapiens
tttttatattttgtggcacttctaatcctattttatatgccttctattgaccttttatgtggtgagttgctttgaaaaatccctgagtaacaatgcagcctgaccctttctccctaatatttccctctattccctattgatctgtcatactttcattctatcatacacagaaacagtgtttttaacagcattttaatacaaatgttttattatttaaagtaacactataaagtcatgtaatgcaaagtgtatgtttgtcttatttagaaaaagtttatttttattatactaatttttcaaagtcaacatatttaatcaactaataattgttgtttttgcctaagtattaattccttggcttatcagcaccataagagtataggatggaagtacttgattgttaactggtcattaaaaatggctaaatatrttttatctgccttaggttatctagtgatttttccactttttagtattgtatagaatcaaagattttcttcttcttagtggacacaatctccttttcccttttctttcagaggcaaagatatagggtactgatatgatttgttttaatttta

SEQ ID NO: 800579 - DNA, 576 bp, Homo sapiens
ttaaatacttactctaatttttgtaatcagcaaatatattggtaggaagtaaattaataaactattaatcttcaaaattatttgttacacttcagcttttacagatgcatatttggcttcattccagaattgaaccattgaaaccctcacccccacacctgtagggtagaaagactacagggatgagtttttaaaccatgagtaaaattcagtgttttgggccagacacggtggctcatgcctgtaatccctgcactttgggaggccaaggcgggtggatcacctgaggtcaggagtttgaaaccagcctgcccaacatgatgagacctcgtctctactggaaaaaaaataaaaataaaaaaataaaarttagccaggcggcgtggcacattcctgtagtcccagctactcaggaggctgaggcaggagaattgcttgaccccgggaggccaaggttgcagtgagccaagatcgtgccactgcactctagcctgggcaacagagcgaggctttgtctcaaaaaaaccaaaaaacaaataaacaaaattcagtgttttgtcccatttaaactagttt

SEQ ID NO: 800580 - DNA, 453 bp, Homo sapiens
tttttcaatttgcttaggagaaaaattcatctatttatttacttatttatttagagatggagtttcactcttgttgcccaggctggaatgcaatggtgtgatcttggctcactgcaacctccgcctcctaggttcaagcaattmtcctgcttcagcctcctgagtagctgggattacaggcacccgccaccaggcccgactaatttttatatttttaatagagacaggatttcaccatgttggtcaggctggtcttgaactcctgacctcaggtgatccacccacctcggcctcccaaagtgctgggattataggtatgagccactgcgcccagctaattcatctttttaatagcaatgctcctttagtttgctatggtttacactgatgctatggaaaaaatatactgtactgctattattagaggaagaataatttgtaccatcatataaa

SEQ ID NO: 800581 - DNA, 393 bp, Homo sapiens
agattttgttttgtgctccttttcattattcataagcataaggagcttacccatattgtgttgttgtcaatactgctcctctcttctccttttcaagttttaacttcttcttcctttcaatattggccagagttggatagtttctagaaaataataaaagttaattataatagggcttttagagtacaattttaaataagcaatcaarcaattgctgaatttagcaattttgtttaacacctaacacagcaaattataaacctttaactgcttctacaattttttaagagggaaaaaagtacttataacaatgttactcaaagtgtggaccacctgctaatccacaaactttgctagcagtctgcaactagacaagtgtacactggaatttaa

SEQ ID NO: 800582 - DNA, 631 bp, Homo sapiens
aagtggtcgaatttcaatattctgcatatgctagccagttatcccagcaccatttcttgaatagaggaagtcctttcctcattgcttatttttgttgactttgtcagagatcagatggtggcagatgtgcagcattacttctgggctctctattctgttccattggtctatatgtcagtttttataccagtaccatgctcttttggttactatagccttgtagtatattttcaagtggataaaattatgtctccagctttgttcttcttgcttaggatcaccttagctatttgggctcttttttggttccatacaaattttaaaatagttttttctaattctataatgcwtcattagtagtttgataggaatagcattgaatctgtaaattgctttggacagtatgatgaatttaacaatattgattctttcaattcatgagatggaatgtttttccatttgtttgtgtcatctctgatttctttgagcagtgttttgtaagtctcattgcacacatctttcacctccctggttagctgaattcctaggtattttactctttttgcagctgttgtgaatgggattgcattcttgacttggctttcagcttggatgttgttggtgtacagga

SEQ ID NO: 800583 - DNA, 625 bp, Homo sapiens
tgtacaaatcagaccactagtttttctatttttaccacagttaaagagtaacaaatatgtcttaaaagaccctggaaaagtaccacaaagctggaagaactgaaagaaaagtaatgcttctaagcacaagttatttttagattctaggtttcatttttccatacratctcagaatataatacaaaataccaagctacaaaaacaataaataatttccaccatcagtattacttaagccttggttgtcttgtgtgagaactaggtcacacagattcaagcataaccaagacttttttaatctgttccctaagaatgcctcaagattttaagtcccaattctgccactaaagagctatgtgacattaggaacacaattagcttttctgggtctcagttttcttatttgtaaagcagagataattcttcttacagggctgttgtgaggatcaaatgatagaatatatatgaaatatctaattcagtgcctagattccagtgaatttccttcaaacccctttcccacactccccatcgctaaatttccatgcttaatattacgtgccaacagggatgtgagtattccttccattcctcaacagcaatgagttgaacattgatttgtgtt

SEQ ID NO: 800584 - DNA, 627 bp, Homo sapiens
tcaagactttgagctatacctttgccctcagcgcttgctggatttggaggtagacagttgacttcaataacaagagtttggagtactcctttcagtgtacccccattcagatggtcaaaatttcatcaccgtagaggccatggcgttcttttccaagtttctactaatctggccagacagtatgtctatcccaagttgagatgggcaaagtcctctcccttgtattcttcgttcttaagaagtatatgtgggaaataattttctggatcttagcaaactaaagttaatagtaaatgaggcccgggcacagtgccacaggctataatcccagcactctgggaggcaaaggcaggagtatcacctgarctcaagagttcaagaccagcctgggcaacaatggtgacacctcatctctacaagaaaatagaaaaatgagccgggcatggtggcacagaactgacactctgggaggcaaagacaggagtatcacttgagcttaagagttcaagagcagcctgggcaacatggcgaaaccccatctctacaaaaaaatagaaaaagtagccaggcatggtggtgcaggcctgtagtcctagctacttgggaggctaaggttagaggattact

SEQ ID NO: 800585 - DNA, 471 bp, Homo sapiens
aacagtgattcttttagcacactgaagagttctcactggatagagtgaggagtggctggatctgagagaggggttcctggaagctgaagagctggcaggaaatgttgctctctagaagggaattcatattttaaaaggtgaaagacctatgaccttaaaatctagatagaagccrtaatctgtaatttttgctatgtgtttaaaacccaaccttcctctgccaggaatgttttccatcttgaattctcaggttaactctatgaaccactctacattctttgaagaacaatcaaagatagaattcacagggatttaaaagccttgttagtttggaaatattaaaatttaacaactaccaggtatcatttatttccacaaaagctgctgtctttacaaaatgaaataaaacatagtctactaatttgacgaggaacataagttagatcaatctgtggtgtacccagaaagaaa

SEQ ID NO: 800586 - DNA, 354 bp, Homo sapiens
ttcttatcttttgaaagaagtttctttgagttgaggaggaggctccttccctcacccagtccaccaccacgggccgatggagaggctctctgctttctttctgtctctttactctcggctagttgggtctgcccagaatggaataaagaggctgaggtcaaaagagcacatgaaaagccckggcttgctgccactcatgccacggctgtctctgcagggacatgttactcagattattttggcatgaactgtcaccatgaggagagtggtgggaacgcatgggcaggtgctatatcattactaaagggcataaaataatggggattattctctgtggccttattcaatttaagg

SEQ ID NO: 800587 - DNA, 613 bp, Homo sapiens
aagctgctgcctttctatacaaacctattatttcaaatggttgcagtgtagctgccatgagttgagagaggtaaaagctaggtcacatttgaccttttgcaattagttaaatttttatgctgaattcttacccacttatattccacccagtgtctgtttctctggtgctttggctcacgtgaaccagaggtcatgtcctggctctccttggagggcccatctgtccttataattcaggttacttgtcctatgattgcaactctctaatagttcaagaaaagctctgatttgtagtctatccggctttattgttgcgaacgttggacagatatatwtttagctttttacatcccatgtggaaatagaactcccaagagagtgatttagaaagatattattcatcttgtaagataacttcctgtattattcctttgaatcgcaatatccattaccattcccttcaatctgtttctttatgggatcttactcacctgcctccaaactgctagactacatctactggaatgtgcaattaggcatgtatttctattctaagtaacatgcacagatcctggaaaaactaaaagaccctgtttgttgattaattgatgaa

SEQ ID NO: 800588 - DNA, 594 bp, Homo sapiens
tccaccagcttcctcaggacctggtcctcagcctgccgatcagcagctgtctttaggttttctaaaaggaggagacaaagcttagagaacagggaactgggcagggaagcaggagggccacaacctaatcccagcctatgtgatttctataacccgggctttgtttcctaagctgccaaattaggagggttgccaacaccagtggttttctagcactactgagcagcacgattttttttgaaggagatcttatacaaaagccaactgtgcagctctgattgaactgaagtgagaaggggctttggasccccctcctctggcttcctcctgaattgtctcagaggtacacagactagagcatcatgttgcttggtcagtatctgagatcatgaggcttgcatgacacatccctgggatgtgtctgcttctccccacatttcacctaccttcccggttcatgtagcctcgtagctcctggtccagctgccactgtttctcctccagattcaattcctgcaccctgtggaggtcagggattgtagaagcagagctgtctaaggtgcccaaggggctggagcctggcccatgggccac

SEQ ID NO: 800589 - DNA, 531 bp, Homo sapiens
cattctccaataaaagggactagagatccttggagaaacaatttattccagggccagagaaagaaaaatataagacaagcctggaacatcttgtggtgctggaaagtaattaaataaaaaaattaaaaaaaaaaaaaaaacagcagggccatactggaaagacacaaaagccaacttgaaagagttctcagtggccaaatcaaggatgatttaagcaacaaaacgaatgatattattagattttaacacctaaaataaatatctaagaatccatactgatgcaaataaatgattgaataaatacattaaaaaataaatgagggcaattcttccayatagaagaattccaattaatatgtagaagaaataatgaaaatagaaaatcaccttttggtaaacacaatagtaagttactacagaaaagaaccatcaatggatgctaaaatttgtgggtgaaactatgaatattaagacacagtatatttgcatagtctcaaactatctcctccacaagacggtaattaattacaa

SEQ ID NO: 800590 - DNA, 538 bp, Homo sapiens
gtgtcctgaccccaggacctctgagttcaggtaagcattttacaggggacatgagctgtgcccagtgccttctgaatacccacggcagggcagcatcgctctgcattcacttctgtgtctcctgcatcaggcgcccattccacaagaaatgcggtcacgtctctgtctctctatccactgtacctagcatggtgcttggttctgtacaagtattcaataaagtgttttttgaattaatgaattttgaacaaactcaaagctagttgttggaatttcgctgtaaactttattatttggaacacagctttgatttcagaaatataaatggcacctgtgggttgatggggctagtggccctctgagaagtttgccgtatgctggcaaagtgtcagtgygtggatacaatctcacgtcagcgtccactgagttttgtgtgtaaaactgagctaatctgacctgttttttcggacaaacttgtgccttgtttatgggaaactgtccactacaagccactgagggctcaaagcagagtcggcaa

SEQ ID NO: 800591 - DNA, 606 bp, Homo sapiens
catttttaaaaaaattattttctctatttttatctgactggtttagtttgaaagactggtcttcaagctctgaaattatttcttctgcttggcccagtctattgataaagctttcaattgcattttgaaaatttttaagtgagtttttgtattctaaaagctctgactgatttctttttaaggtgtgtatcccttctccatttcgtagattgcttgaaaagtttctttatgtagattttcaaccttgtcttggatctcattgagcttccttacaatccttgctttgaaattttaatctgtcatttgaattttcattttggttagggaccattgctggagagctcatgtgatcctttgstggcatcactacattcagatttttcatggtgccagaattcttgaacttgtttcttctcatctagagatgctgacacttagcttttgtaattttctcatgtggtagcacttttttttctagataatattattgcttgtttcttctttccctttcattccttccctggggtgtgtggctgtagagaatgctgggtaaggttttttggcttggcttctgtagccctatgtacttctgtcagcaggttttat

SEQ ID NO: 800592 - DNA, 561 bp, Homo sapiens
ataaatatcaatcaatcccaaaagtaatcccactctatatatgctgtcagatgaagcaccatattgttggactgtatgtattctaagaattttcctggtgttcttcacccctgatatgatctacatctgaggttttgtgatgctacttgtttctcaccagagagtstagaagaggagcatttttagaatctctaggaaaagattgaaacctcggacaattttctcagtcctaggatgctgatataatttaaattacaattaatattaaacatactcttttgctataggttctcatactctgggtatcctttactactagtccagtacaatagttaagtacagagaattccaacttgccctgttgataacatgagctggatagccttactgatgtcattattatttttttctttttggaactttacagacaaatccatgatagtaaaatttttgcaagctttctctctctaccaatagccagagaagaatttggtggtataatctaagctgcacttaatatgttatatagccaagggaaaaataaaatgctataaaaatcta

SEQ ID NO: 800593 - DNA, 644 bp, Homo sapiens
ttctccatgcacactcttattctattctggcaggaaatttaattggtgcattttgattaaacttccaaattgatggctctcttatgctctgacttgtaataattgaaatgattaaagatgtagtttcttctttccaaagcttttcacttatcagttgctcctgttttattgagaaaggtgcttgtagtgatgttatattaagccaaactactttctgatttggttcaaacagactaacacacaaatgctaattaatatttagcatttagatatctgtatccaaattaaattggcacccagaggatgaaagattgaattattcagctgctgttgaaagctatatgtcataccgtgtttacaattgtagttatcagaagtcggctttcattattctaccaaatgtgtttaytttctcatagagcattcaaatcttcatggttggctatctatatagaagataatattaaaggttttaaacttgaacaatttatataaaataaaaaaattaaaatctctagtcagataatgtcatttaagggccatttttggatgccttcccatatgcaaagatactaccaatgtagtatcttttgcatgtgttcccatatgcaaagatcaaccatttctgaagcagaatgcttatt

SEQ ID NO: 800594 - DNA, 372 bp, Homo sapiens
ttctgtttatgtgatgaattacatttattgatttattgatttgtggatgttgaaccaaccatgcatccatcccagggataaagcctacttgatcgtggtggataagcttttggatgtgctactggattcattttggaagtattttgctcaagatttttgcatcaatgtttatcaagaatatttgcctgaagtttttttgytgttgtttttgtatctctgccaggttttggtatcaagatgattctggcctcatagaatgagttgggtaggagtcatccctccctatttttttttttcaaaagttttagtaggaatagtaccagctctttgttgtacatctggtagaatttgactgtgaatctgtcttttcct

SEQ ID NO: 800595 - DNA, 616 bp, Homo sapiens
gagtaatagactgatttcatcttgttagtctgggtcaatcaccccagccaacactgtaactcctttgttagtctgttgacttaaaagtaagaggaccccaaagtgtccaggttgcaatcttaacttccattttaatgggattgttgtgtctcctggtggtagcattcctccctctggaactaagacctctaggccagcagaacacaatgtcacgggaacaggaagcaaaaattttgctactggatcactaggggtgatggtgagtggtgctacttccacctcttgattcctggacccrtaaatcctggttataggagaaacagtactatatattggttgctgattcagagcatacacgaccttctggagaactctgctccagccctgcatcgtattgtcacctagttggcattgtaactgtgacttcaaaaggccattccaccattctataaatccagctactttaggataatggggacatggtaaaaccagtgaatttcataagcataagcccactgctgcacttctttagccataaagtgagtgccttggtcaaaggcaatgctgtatggaacaccatgatggtggataaagcatttcatgagtccatagatgg

SEQ ID NO: 800596 - DNA, 616 bp, Homo sapiens
gagtaatagactgatttcatcttgttagtctgggtcaatcaccccagccaacactgtaactcctttgttagtctgttgacttaaaagtaagaggaccccaaagtgtccaggttgcaatcttaacttccattttaatgggattgttgtgtctcctggtggtagcattcctccctctggaactaagacctctaggccagcagaacacaatgtcacgggaacaggaagcaaaaattttgctactggatcactaggggtgatggtgagtggtgctacttccacctcttgattcctggacccataaatcctggttataggagaaacagtactatatattggttgctgattcagagcatacacgaccttctggagaactctgctccagccctgcatmgtattgtcacctagttggcattgtaactgtgacttcaaaaggccattccaccattctataaatccagctactttaggataatggggacatggtaaaaccagtgaatttcataagcataagcccactgctgcacttctttagccataaagtgagtgccttggtcaaaggcaatgctgtatggaacaccatgatggtggataaagcatttcatgagtccatagatgg

SEQ ID NO: 800597 - DNA, 632 bp, Homo sapiens
tcagttcactatctttggggattagtccagaagtttttggtgacatttatgaatattattttcccaagaagcgtggtgacctacatgaaatacttttaaaacttgttttttaagatatgcatggaaatagtagaaagactcagattcactgtccaagctaaaatgcatggtcagtgcctctgcttccacctcagcaaacacacctggacagaattattcactgtgactgtcccagggccctggtctgagttttcatgactgtgtagaaagtaagaaaaagggatgcatagggcatcaaaagtctgctgaaatcagcatgagttctgggcaaatctcagagcaagacttaccactctaggtttctgctggtccagggtatgcaggaargctgagttggggtccagggtgcgctcagggtcactggagatgtcctcctctgagtcttcgtaggatgaggagaagcccgtggaggaggccgaggaagaggacagtttcctcaggggcaggttgccccgagggcttccctgcgtctcctccaaggccccatcctcctgggtgcccatgtctgtaatgatgacagcaggtatgttgctggggctgcaggccttcctcaggaaaggcttgtcctgatc

SEQ ID NO: 800598 - DNA, 617 bp, Homo sapiens
aacagaacagctcttcagaaaaatgacccaggctgggaattgatctgctaggggataatttgaaaagtagaatttaaagctctggcaggccctagaaaattactgtcttgctcaatggaattagttgtccaagatgaagaatattttcttcttgtaccatctcatcttytgatggctctcttttcaccacttattcttaattccctgttctgtgccgacggctggagcccatggccggcagcattcctgatcctcaatgctgtcaccggaacataaacagtcagaggttaactatgcttacttgaaaacagaggaagtgcatgggaatgttcttttaaagggaaaggaataagcgcagaaagaatacagaattaaattcatgaggaaattgtgcagctctcacattgtaacttccatgaaactctcatcatttatttatcagtgcaggagtcatttttctgatggattcagggctggatcttcagttatcccttgaattgtgtgtccttctctgagagagaacagctttatggcaaagagtgggggatacgaccatctgagggttctgtacctatcattcagctttcagcacgccttgtttgttagcagagggtgac

SEQ ID NO: 800599 - DNA, 580 bp, Homo sapiens
ctaggcaggatgggagagtcagagatgaatgataggtaagattcaaaagcctgagttattatagaaaattatgagtggaaaaaaattcatgtttattttttcccgctgaaaatatgagcagaatgagaaatattccaataaacaggcaaaaacagtgcttttgtctyagttatctctgtaattcagcatgttgttatgacatattgaagcattatggacttgataactgtgattatgctactgcttctagtgttctaaacggatggtttagttgcatatgaacaaagttttttttttttccatttgaatattagaagcgtaatgaatgttcctgttgcttagatctgtagtccactcagtctgggcttggggtttgttatgttagagctgaaggggccatagaggttgccttaattaccgatgaggaaatgaaggcccagaaagtagagtgaggtgctggtttcacaactggttagtggcagagctgggacagggaccccaatatgttctctcagatggggcttctctataacatcatttgctttcctccagacaactgggaatcatcacaacaggatcc

SEQ ID NO: 800600 - DNA, 533 bp, Homo sapiens
cctttttcgatacctctctctatgtttatctttatccgtatcctttataatatcctttagaataaactggtaggctgggtgtggtggctcacgcctgtaatcccagcactttgggaggccaaggtgggcagatcacgaggtcaggagatcaaaaccatcctggctaacacggtgaaaccccatctctactaaaaatacaaaaaaattagccaggcatggtggcaggcacctgtagtcccagctactttagaggctgaggcaggagaatcgcttgaacccgggaggcggaggttgcagtgagccgagatggcgccactgcactccagcctgggcgacagagcgagacccatctcaaaaataaataaataaataaactggtacttttttaaaaaaagaaraaaagtaattatcttctttaatgcataggatctttaataataataacacccagaatttattatatattataaaaatcagtggctatcatgggccagagacccatactgaagtcatttataaaatatctttaaaat

SEQ ID NO: 800601 - DNA, 706 bp, Homo sapiens
tttgtatatgttttataccaaacatattttccatatactacctgtgcataatgtagaaacatataaatatctactgattggggtctgtgttcatgctttgtgagttgtggttgcgtgatcatgaaagctcagaggccaccgctctagagaatgggagaaacgagagccaagcagggraacaaaaagagggaaggagaggaagacacaggggagcagccagtggaggggaggggaggggaggggagcgcagggaggggcaaatgtagggataagccccctccattcagaggtcccacgctgaccaaggccccactcaggagcgctggtgtcccaggagaacagacatcgtgacagaaataagtctgcctgtgtcagtcctgtctcaggacctgcaagccggcccagcctgcccctgtcgccccacagccacgtcagtgggtctgaagtatgggagtctctgctgctttgtgagaagccagagtctggggtgagctgtggcccaatgagcactctactgccatagccagagccaccttcaacctgctgacggatagcacgccgacctggagctcaggggggcctgttctgagcacaaggacttgagtgtagtcagcagagccccactcacctgatgttctctgccagcttgattggtggcatttcccccagtgtaaggcactagagggatccttccagaactctctct

SEQ ID NO: 800602 - DNA, 706 bp, Homo sapiens
tttgtatatgttttataccaaacatattttccatatactacctgtgcataatgtagaaacatataaatatctactgattggggtctgtgttcatgctttgtgagttgtggttgcgtgatcatgaaagctcagaggccaccgctctagagaatgggagaaacgagagccaagcagggaaacaaaaagagggaaggagaggaagacacaggggagcagccagtrgaggggaggggaggggaggggagcgcagggaggggcaaatgtagggataagccccctccattcagaggtcccacgctgaccaaggccccactcaggagcgctggtgtcccaggagaacagacatcgtgacagaaataagtctgcctgtgtcagtcctgtctcaggacctgcaagccggcccagcctgcccctgtcgccccacagccacgtcagtgggtctgaagtatgggagtctctgctgctttgtgagaagccagagtctggggtgagctgtggcccaatgagcactctactgccatagccagagccaccttcaacctgctgacggatagcacgccgacctggagctcaggggggcctgttctgagcacaaggacttgagtgtagtcagcagagccccactcacctgatgttctctgccagcttgattggtggcatttcccccagtgtaaggcactagagggatccttccagaactctctct

SEQ ID NO: 800603 - DNA, 644 bp, Homo sapiens
atttgaactggtaggctgggtgaagatctgccctcaccaatatcatctaatccaccatcactgaattaaactaaggccctggtagaagagaaaggcggaggcaggacaccttctctgtctccttttgaggtggagcagctgacttctgcccctggacctcagtgttgctccttctctggcttcagactcagacggagtcacatcactggccttccagctcacagacaccagcttatgggtcttcagacctcttggcctctataatcttgtgagtcaatttcygtaataaatttcatatatatatatatatacacacacacacacacactcacctgttgcttaatggggatgagtttggagaaatgtgtggttaggcgattttgtcctcttgcttcagacgtcacttacaaacctggagagtaccacctgccacatgcctgggccacagggtgcagcctatgtctcctaggctactaacctgtacagggtggcttgtacaaacacggcaggcagctgtgacacaatggaaagtaatgccatatctcaatatagagaaggtacagtaaaaacatggcatagccaagattaaaagtggcacactggtgcagggctcttaccatgaatggagcttgcaggacaggaag

SEQ ID NO: 800604 - DNA, 642 bp, Homo sapiens
gtgttataatctaatactgttttcttttattctcaaattgttgcaatatttaccactggaagctctttaaatgggcttctgtgtccctttgacataccgcatcattgggtgtgtgtgtgcatgtgtgtgttttactttgctttgttttagcacttccttactttctggcactttaggatgccccaggcttatcttgtgtattgcctgtcccagacctaraattagctatttctccaaagaatcctggttccctttattgaaatggaaaaattttaatgtcacttttccctttactttaaggacacagaatgaagctgctaagaattcattatggagttttaaacaacattaacagtatagacaatttgatgtctcacagtaagcaaatatttcttttaatgcctcctgtctgccagatgtagtgcaggtttccagagatattaagatgacatgggacacattttgagagcttcctgtgcataaaggtactatatgcactattctaagcatttcacattaactcatttaacccttgcaacaatccggtgaagaccctgttattctcatttatggacagctacgataagacccccctgcaacccagggcttcactgttttcactgactaaatacataagtagag

SEQ ID NO: 800605 - DNA, 635 bp, Homo sapiens
tctgtaccctgtaggtggcacagtgcctgtcagtaagggatcctctctattcatctttattttgagatctggtctagagttcttttctggcaggcggtctttattttcctatagcccggaagagacaactctcccttgaacacttaaactcagtgccttctatctacagctcttctgtcagatagcgtgargcctgatctcatcactctgaccatctaacaattatcagtcttcctgtttgataaatcaattgagcggggaccacatcaggcattaaggtgtcccacaaccatcatcccaggtgggcaggcacaaccgaagtgccctgatcctgcagtcctttaattgggcaaatttatagttgtgccttttaccccttcctattttgtatcagtttctgaagcttcattctccattaagatcaagtttacacaagaggctcgaagcaaagcaaactcaagtcagatgtttttggatggtacccaaaggccctgaaaattcacaggtgaagaggattaatttcattgccatgcttctgacacacccctttcaaagtggtttagcactgctgtttagtaaatgctattcgcctcctgcttctggtaccagccacatttgcatattcatcagaagtg

SEQ ID NO: 800606 - DNA, 568 bp, Homo sapiens
atgaatagaaaacaagtgattgtaataagaacaggtataataatgaaattttatacccaccatgagattttaattttaatatatctgtctgagttttgctagaaaatgaatcaactgtctaaagaccagtctccaggatggtttagagacatccttaagacatcctgcacaaagaatgaaagttctctgtatcaaaattaaacttcattttcacaagtcccttctccctctactgtttaacaccttaatgttaagcataccctctgggcaatttatgtttttaatattgctcttgtaaatagagttgatcagaactcactgctgctgggaattctacacaatattgcaaagttctgggttgaatctagagagagggtgcctggtgagactgacagaatgcctagcccagcagggctgtygctggccaattagccaagcttggcccctctccctgaacttgccacgagccaagatcagagcacaacaagagacacacacactttccatgttgtatctgaaccctgagaaaacagggctgtccaaaaactgggatggggccctatacaga

SEQ ID NO: 800607 - DNA, 612 bp, Homo sapiens
tataattttgataatggcccaggatattggaataaaatataaatgtgagttagcattaatatctcagtttagagaataacaataaaagcaggaatgtgacctgcagccacatttcttcagtatcgggggaaattcagcccccaatatttgacgtgggtccttttctattttccctaagtattggcyggtctgagaaataaagggaaatagtacaaaagagagaaattttagagctgggtgtctgggggagacatcacatgttggcaggttccgtgatgcccctcaagccgcaaaaccagcaagtttttattagtgattttcaaaaggggagggagtgtacgaatagtgtgtgggtcacagagatcacatgcttcacaaggtaataaaatatcacatggcaaatggaggcagggtgagatcacaggaccggggtgaaattaaaatcgctaatgaagttttgggcatgcattgtcattgataacatcttatcaggagacagggtttgagagcagacaactagtctgaccaaaatttattaggcgggaatttcctcgtcttaataagcctgggagcgctacgggagactggggcttatttcaccgcttatccaca

SEQ ID NO: 800608 - DNA, 558 bp, Homo sapiens
ggaatctatgtttaacaaatctatgtttaacaaattctctttgtggttattatgcagccacctgtttcgggtttgcataccaatgtgcagagttcacgtcctcaactcttatctaggattctgggccattcggtaacatcagctcttcctrcctcttacatcagcttccgtgtactgtttcctggccggtggtctgtagaccctagtctgatcacagttggtaattaccagtggcctagggctactctgtttgaggttgaccagttggttcttaggtggctcttcatagattggcctcattgaaatggtacctgacatcttctacacatgtatatatctacttcacagactttagccagtactccttaattttgttcacactcttatttaatatctgtattaacataaagtcacgttctaactcctttccacaatgtgaagtataattccaacttgtctgttaattcagagctgttctatttgcagctctttatctatgaccatacccattataataataatgacaattttctttttttttctgttacaattagtact

SEQ ID NO: 800609 - DNA, 612 bp, Homo sapiens
gcatctcactggatccatggatcaaattgcagataattgacatcttaacagtccatgaacatgatgcatctcttcatttatttaggtcttctttgatttcagcaaagtcttacagcttttagtgtagagatcttgcacatcttttgttaaatttatctaagtsttttatgtatcttaacgctgtttaaataccagtgtccttgccttttccagtatgtttattgctagtattagacatttttgtatgtttgtatattgacagtgtgccctgcgtatttgctaaattcacttaatttagtaggttttaaaatagatttcttaagatatctcttaggaatatcaaatagaatcatctacaagtagagatggctttacttactattttccaaacttacaccttgtgtttctttttctttccttaatgcacttactagaacctccaataccatgtggaatagaagtgatgggaagatagcttcgtcttattcctaatcttaggcaagaaacattcaacctgggaatttatttttataataagagaagaatccagtttttgtcccaaatggctagccagtgatccccagaactctttattgaataattcaacctttt

SEQ ID NO: 800610 - DNA, 633 bp, Homo sapiens
gttattcttccttggagctcaggaggccactccaaatattaactcattttagcctcagggactcagaatttcagtggaaccatttgaacttggctcagtttataataatgatcccgtatgtttgtaaagtgattcagcttacaaagcattgcaccatcttatcccaactgctgtttgagcttcaaaataatcctacaaagtatccagtgaagatgattattcccattttcttaacaaggaaactgaggcccagggaagttaaatgggtttctagacacacaggcaataccagacttagaaaggaagaaaaggacaccaytatttgctgattgtcaactctatgccacccactgtgttgaaagaagactctaaatcccagagagaggttttatttggcctgaagtcattccatgcaggacccgccaatgactgcggggctagaatcagaaactgagcctgcttgccactaaactagtgctgccttccacaaactctctgtgaatcacagccatggcgcaagctttgaagggagaaagacctcggcactgattaccccaaaccactgacaaatcaaacattatggaaatcaggactcaccactgaataataactcacatgtgtaaggcatttgca

SEQ ID NO: 800611 - DNA, 613 bp, Homo sapiens
ccttttgcattcatcattatattttggtcacttatctctgttgatatattttgatatcgcttgttaattttaaagaatttaggccgggcggggtggctcatgcctgtaatcctagcactttgggaggccaaggcaggcagattgcttgaggtcaagagttcaagaccagcctggtcaacctggtgaaacacgatctctactaaaaacacaaaaattagctgggtgtgatggtggacgcctgtaatttctgcctcccgtgttcaagcaattctcgagcctctgcctcccactgaggttgcggtgagctgagacatgccactgcactccagcctgggcaacagagcgagactctggcaaaaaaaaaaaaaaaaaaaaaawttttttttgatactttaagttctggggtacatgtgcagaacatgcagttttgttacataggtatacacgtgccatggtggtttgctgcacccatcaacctgtcacctatattaggtatttctcctaatgttatccttttcctagccccccacccccagacagaccccagtgtgtgatgtttccctccctatgtccatgtgttttccttgttcatctcccacttatgagtaagaac

SEQ ID NO: 800612 - DNA, 563 bp, Homo sapiens
gtaatttctgcctcccgtgttcaagcaattctcgagcctctgcctcccactgaggttgcggtgagctgagacatgccactgcactccagcctgggcaacagagcgagactctggcaaaaaaaaaaaaaaaaaaaaaaawtttttttgatactttaagttctggggtacatgtgcagaacatgcagttttgttacataggtatacacgtgccatggtggtttgctgcacccatcaacctgtcacctatattaggtatttctcctaatgttatccttttcctagccccccacccccagacagaccccagtgtgtgatgtttccctccctatgtccatgtgttttccttgttcatctcccacttatgagtaagaacatgcggtatttggttttctgttcttgtgatagtttgctgagaatgatgaaaacccccaaattttaaagaatgtgataggttaggaactgaatgaactctgtcatcagattctgggttcaaactctgagtctactgttaagtaagtgtgatgtgctcaacatcaatttgcataggatctttgggtcttgat

SEQ ID NO: 800613 - DNA, 549 bp, Homo sapiens
cagtttggcaatttctcaaataacttaaaatagaactaccatttgacccagcagtcccattattgggtatatacccaaagcaatgtaaattttctaccataaattcacatgcatgcatatgttcatcacagcactattcacaatagcagaaacatggaatcaaatgctcttcaacagtagactggatgaagaaaatatggtacatatacaccatggaatactacacaggtttaaaaagaacaagaccatgtcctttgcagggacatggatggagctggaggtcgttaccctaagcaaactaatgcaggaacagaawactaaatactgcatgttctcacttacaagtgagagctaaacattgggtacacatgaacacagagaaggaaacaacagactttgggacctactggaaggtagagggcgggaccagggtgaggattgaaaaactacctattgagtactatgtttaacacctgggtgatgaaataatctgtataacaaacccccatgatatgcaatttacttatataataaacctgcacatgttca

SEQ ID NO: 800614 - DNA, 657 bp, Homo sapiens
tcacctgactttggagttacactatcgttgggcttttagagcattgcctttaagtggatgttaagaagctgactgagccgggcgcagtggctcaggcctgtaatcccagcactttgggaggccaaggcgggcggatcatgaggtcaggagatcgagatcatcctggctaagacggtgaaaccccgtctctcctaaaaatacaaaaaattagccgagtgccgcggcgggcgcctatagtcccagctacttgggaggctgaagcaggagaatggcctgaacctgggaggcggagcttgcaatgagccaagatagagccactgcactcaagcctgggcgacagagtgagactctgcctcaaaaacaaacaaacaaacaaaaagctgaccgaaagagaatgggagtagaaatccttcacgtktcgttgggacagtaatgtgggttgttattagtgtctaccattattgagggtagaagatgaggtaggttgactatcatggcctgactctaatctcatttcaaacctctgctcaatctttgtgcagttacatgggagtcaccttctttatgaagtagtccctggctagctcttcccatatgtgtcctaacatcaggaggattttgtatcctgatttcggaatttcaaataacataactctc

SEQ ID NO: 800615 - DNA, 629 bp, Homo sapiens
gattttaagactccctataaatatatattaatcaaaatagtagtattttcacaaagaggcaaatagatcagtggaatgtgtacatgtgtgaacatgattttcaacaacaatgcaaaggctattcaggcaagaacattagtcttttcaacaaatggtgctggaaaaattaaatatgtatctgcaaaaaaaaaaaaaaaaaagaacttcaatccatactttgcactatttaaaagaattagctcaaaatggattatgtacctaaatgtaaaatttttagaagagaacacaggagaaatccttcataatcttgggtcagggaagaagctgttagatccaacaccacaggcaggatctatagaagaacaargtggactgccggctgtatgagtcgctctgctgttgaagtaattaccaggtggtcacttgggtctggagaaaaagcaaagactaatgaaaattgctctgtaaaatctttacagctctctgaagtaaactagattcattggggttttctgttatttcacagtcttaaaggccatatctggaaaaaaaaaaaaacagtccctttttagttccttctttttaggagcaaattcagaacttttttttttttttttatcatttaccaa

SEQ ID NO: 800616 - DNA, 598 bp, Homo sapiens
aaattctactaaatgtttaaggaagaaataataccaattctatacaaactcttccataaaattgaaaaggaaagaatatttcccaacttattctatgaggccaacattatcacgaaaccaaaaccagacaaagacatgacaagaaaagaaaactgtggattaatgtccttcatagattttcataggagaaaaagtttaaacaaaatttcagcaaatttagtccagcaatttataagaagggtaacacatcatgacctaatagggtttattccagtaatgcacagttggtttcaaaattttaatattcaaaattcaatgtcaytttcaatcaaaaagtggacaaaggattcaagtagtcatttctctaaagaaaatttacaaatggccaaaaaacacagaaaagatgcttaacatcattagtctttagggaaatacaaatcaaacgagctaccagttcacatgcagcaggatagctattttaaaaaatggaaaataacatgtgttggtgaagatgtgaagacagtggaaccctcatacctttaaggtgggaatatgaaatagttcagtcactatggaaaacaatttggcagttcctcaa

SEQ ID NO: 800617 - DNA, 473 bp, Homo sapiens
atactgattttcagcaaaacatacatcctgctgggtcttgctgtacttactctccacatactttgaatagactatcttacaaaagcaaagtgttgtttctttgtagaaaagcacacgccccttgaaagggctatgctctgactgtgtttgtgttggtgtatacgtggtgcttggggtcatctctccttgcccaggctctcctggagctaaaaaggacactgagggacaaaagaagcccgtaatttaaactacttgatcaacgacatagacaaggagttctacatttgcaaacaggctgtgctgtacartattctcctatagaagtaatgttattagactgttcaggtttttagattagtccgcatcttcctccggcccccaagaaaaccccagcacccataatgtacattttaattggaattatgttggaatatttttagcagaaaatttttagtgggaatattattagcata

SEQ ID NO: 800618 - DNA, 552 bp, Homo sapiens
  misc_feature 195: n = A,T,C or G
agagacccactttccccatttacaaatggaaacaaaattagtaccttcctcaaaagattattgggaagattaaataaaatagtccaagtaaaatgctttgcatcatatctggcacgtagtcagggcttgataagtggttgttggtctaggaaawatcgctatgcgccagaaacaatgcctggtgaccaagtgacngtaaatgaatggaagctattataacgccatagctttggcagctgtctaaagccagacacaatctctactccctctctctttcagctgaaattttccaaatatataaagacagttgtgtaagcttcctgaaatagagtacctgatcaataaaagatgtttcctttattcccctagtgttctcttgttcaagtaaaaattccgcattgcaggtcatcttcttccagatgccctctaccaggtgtataaatgcctctgcaaacaaactccccacactgaagagagtttcacagatgtgacgaaatgtgcaataaatacacaagaaccataatccagcttgacctagaaacagtagtttcc

SEQ ID NO: 800619 - DNA, 569 bp, Homo sapiens
tgaataggagtggtgagagagggcatccctgtctttcataggtatgttaaaggttatttgatgcttggctgtggatgatgtcccctagaaagccattgtagactgaagaaaatggtcttaacagcaatatttacagtgcagctacaataaagtaagtgaaagacactaagaaggacaggctttagaagcagaaggaaacatgaagaggttttaacatggaaattgaggagaaaacgtgtctctaaaggatgatgcaataaacagcaacaaatgytgctgactatgtggtgatgactgaaaattccccataggatgtaacaaactggagattgtgtttgtaaaataaagtgagtgaaaagctagatggagtgaatggggaagccattgggaaataaataaagagatctctttcaagaagttttggctatgataggggagcaagaaatagctcatagctggaaaagatagtgggggagaaacttcagcatgattcagtagagaggatgtggtttgccatgggacagagttggctaaaagggtcaggaaaataagcccaggtaaacagaact

SEQ ID NO: 800620 - DNA, 601 bp, Homo sapiens
agtttagtgctgaagccagtcaaacatgaacaccagccctacattaaagctctctcccccatcccaagttcctctcgaatcctttcctcttctatgattgctataaatgtaaactgaggttacaaaagcaagagtgagtgattttgcaagcaaggtcacccaactggtcactgcaggcccccgagatgcaggaatgatgggaaggtgctgcatttggctgtgtcccaggctccgggatgtgccaytgtgaactccttagaatggggacacaattgcatctgacaaccaatctctctggtacttaaagggtcttctccccaaaatgcaatcttatctgacctaccctcccttgtccactgttccccaggtttttcacacggttcagctgtccctgagatctagagccccagtcattttccccaaggcctccagaaacaaatggaggaatatcctgagagctcccaattcaggcaagaagagatcaatccagcccgtcctccacatgagcacaaggcagagctcgttcatgcagcctcccccacagaatctgcagcctacagtgcccaggacagagggagtcttggccaaggtgctgaattaa

SEQ ID NO: 800621 - DNA, 619 bp, Homo sapiens
gtcaaaaagtggcccaagtgaaggcctgaaacagaggagagacctctgcctgctgtgtagtgttttttgaggaggtagcagaatgactgtaaggctagcttagtacatctacacagccttaaacttccaccatagtatttattcaaaacacagacatgcacacacaccattaggcttggcctagacaaattgagtyactactgatgtgagttactgcagaaccaggcttaaagtgtcagaatgctacaacaaactttctttctttgtaaagcagatgtatagatgtttcctgcccacctagaaggaaagaactgggatttgggtttacacctgatatacagtatcaggtaaactaaaaggataagtcttgcctaattatcacagtggaaaatataaattaggaattttatattaaaagctatagagtaggtgacaactcgcagccgactccctgatttcctagttatagtcttgatgtacctgggacatagcaattaggcttgcaagcatgttctcttcccattagcccaaaggtagctttggagaatactgtcccaccatgaaaggtaactggctaagcagagtcatatgggtttggagtcagacatatttgtgccca

SEQ ID NO: 800622 - DNA, 619 bp, Homo sapiens
gtcaaaaagtggcccaagtgaaggcctgaaacagaggagagacctctgcctgctgtgtagtgttttttgaggaggtagcagaatgactgtaaggctagcttagtacatctacacagccttaaacttccaccatagtatttattcaaaacacagacatgcacacacaccattaggcttggcctagacaaattgagttactactgatgtgagttactgcagaaccaggcttaaagtgtcagaatgctacaacaaactttctttctttgtaaagcagatgtatagatgtttcctgcccacctagaaggaaagaactgggatttgggtttacacctgatatacagtatcaggtaaactaaaaggataagtcttgcctaattatyacagtggaaaatataaattaggaattttatattaaaagctatagagtaggtgacaactcgcagccgactccctgatttcctagttatagtcttgatgtacctgggacatagcaattaggcttgcaagcatgttctcttcccattagcccaaaggtagctttggagaatactgtcccaccatgaaaggtaactggctaagcagagtcatatgggtttggagtcagacatatttgtgccca

SEQ ID NO: 800623 - DNA, 600 bp, Homo sapiens
gaaacagcattcctgctagccctggttttttgtgacttttcttgctgtcaataccttatgatgataatctgattagtggagctgcctgcgttactatttaaaggcccctttttcttacatttctgtgttccagagtagatagggcagccagatgtgctaacagcataagaaatcatcataagcttgttatttattgaagatggatattgcactgttatcagtgtttagggtcttttctayacttgctttgattctggtcaaattaattcaataagaaaatgtacttttcttactcctttcttgaactgataatagaatgttagctacctagtgtcactagtattttttttatctacacatcaaggtatcatttttttctagctcagtcttatgttttacatggctttacatctgcaagttggactttgaaatgaatattttatgtttgaacataaggatatatatatttttatatttcattcatacatttaacccatccccaaaattttcttaaaaaacttaataattacaggagatgtaaattaataaaatcatctaggatgctaaatgcataaactttcaattgagtgaaaaaaagcc

SEQ ID NO: 800624 - DNA, 550 bp, Homo sapiens
  misc_feature 515: n = A,T,C or G
aaaatctttcaagaccttaaccttgaaaaacaacttttccttttaagcaatctctccttcttaacaaagacataataaacacctgacaggtttgccattgatagctgttttctgtccatctgaagtgagagaagaacaatcagtaaaaaacaaaaacaaaattaacacacactttcatcccaaacaactagcacgggatcaggatatttacagaaaacattcccatcccccagatgggtcatgatattaaatcccaacamgcctgtctcggcatgtgaacgcgcgcgtgcgcgcacacacacacacacacactctctctcacacacttcaccaactgcactgccttccatgaggtcatggaagttttcccctatgaacagaaatcagaaaataccatttagttgaagaattatgaataagatgatcagatatcaagaatgcagaggctcaccattacatttccagcatggccaatcattcaaaaggcactaagagtttatggaagagcccccagnacaatgggtcataacacggactgcccaaagcctac

SEQ ID NO: 800625 - DNA, 643 bp, Homo sapiens
aaataaattaattggcccacattaaactaaaaaactgctgcacagcaaagaaatagttatcagaacaaatagacgatctccagaataagagaaaatatttgcaaactgtgcatcagacaaaatattaatatctagaatctacaaataactcaaacaaatcagcaagaaaaaaaaaccaycaaaagtgtgcaaatgacatgaacagacatttctcaaaaaaagaaatacaaatggctaacaaacatatgagttatcaggaaaatgcaaattaagacaacaatgagataccatctcactcctgcagaaatgcaatcattaaaaagtcaacaaacaatagccgtttctgtgaatatggtgaaaaggcaatgcttaaacattgctggtgggaatgtacattagtacaatctcgatgggaaacagtgtagagatttagtcaagaaataaaaggggatctactattcaatccatcaatcccactactgggtgtctacccaaataaaaagaagtcattatattaaaaagacatctacaggtgtatgtttattgcagcacaattcacaattgcaaatatggaaccgttctaagtccccatccaccagtgagtagataaagaaaatgtggtataggctgggcgcggtggctt

SEQ ID NO: 800626 - DNA, 624 bp, Homo sapiens
cagccatttcaattcatttcctacgttattaaccttctgactataccattaactttatgcctagggagaccatatgtcacaatttgcctggggcagctctggtttatgtgtgctatttcaagattagaattcacagcatctmctttgatactagcttgaacattaaatcagaggtcacttaattgtattccatgccctgtcccattgtgtccagttttctagtttctagaaattcattgtctatttcatgactctttgccttttttaacagcatttatgccttccacctttcagcctatccttctctttgatgtctttctgggcattttctaatttctcagacacagtttacctcctctatgaagccatctttatacccatttctgataattttccatttttttctttgtcctgtccctgtacttttatatgccagtctcatagcaactaaaacttttctttttttattcctgtcttctcttattaggctataagttctcaagtccaggaaaggtaccttatccttcttgatatttacacaccccaaatggatcagagataacctggtcctttccatgatttggtctgaaaaggaaacaggtgaacaggcaacagcctgaggct

SEQ ID NO: 800627 - DNA, 643 bp, Homo sapiens
aaataaattaattggcccacattaaactaaaaaactgctgcacagcaaagaaatagttatcagaacaaatagacgatctccagaataagagaaaatatttgcaaactgtgcatcagacaaaatattaatatctagaatctacaaataactcaaacaaatcagcaagaaaaaaaaaccatcaaaagtgtgcaaatgacatgaacagacatttctcaaaaaaagaaatacaaatggctaacaaacatatgagttatcaggaaaatgcaaattaagacaacaatgagataccatctcactcctgcagaaatgcaatcattaaaaagtcaacaaacaatagccgtttctgtgaatatggtgaaaaggcaatgcttaaacattgctggtgggaatgtacattagtacaatctcgatgggaaacagtgtagagatttagtcaagaaataaaaggggatctactattcaatccatcaatcccactactgggtgtctacccaaatwaaaagaagtcattatattaaaaagacatctacaggtgtatgtttattgcagcacaattcacaattgcaaatatggaaccgttctaagtccccatccaccagtgagtagataaagaaaatgtggtataggctgggcgcggtggctt

SEQ ID NO: 800628 - DNA, 633 bp, Homo sapiens
gtacttttacaaactaggacaatagcagcttttcttaggggcttatataaaattccaaagagaaagggcactgtgttcttttctgttcaagaatagacttgattacacattttggggcatagggtttaaaggaatataggaaaagggagtctccagttgcctacatttagactagaaccttctctgcaccttccatggaagggtagtgtgaaagatattttaaaccaattgatttatcttgctttatttctgagcatcttgactccaactgtattgcaattaaaaataattttattttaatggcggagactctgatttgtcccatgccccttcttctaaattccaagagtctatgttccytgacagtaggactttgttttgctatttcattatgccaaacaccaatacccatgcctggcaaatagcagatgcctgcctacttggctgaaaaaatgggtgatcttcaatttttagccaaactaacccactcttgtctactcatttgtgttgctttttgtctcacagattgattatctcatcaattcatttatttgttgattcatccattcattcaacaactattcactgggcactaacatatacttaggttttgttcagagttctcagaattca

SEQ ID NO: 800629 - DNA, 372 bp, Homo sapiens
attaaatgttagtacatatttgaaatcactggacagcttttatataaagttgaataacaaataatgctttgttttgacttacatgcaattttaaaagctttcatttagaagagctactgttactaagggacagtctcaataattattaaaatgtgctaaagtatatcttcaaatattttaataagcattgcagctaataacctctattatcacctgycatgtgtcccaaccaaaatttactgatgaaggaatgagcacagagtatgtttagctaacgaggtggtggcagtgacttagtagctgaacaaatgctcaacttctcaacagatcctcatccagaaatgtatctcacctccgggggtccatcagaag

SEQ ID NO: 800630 - DNA, 634 bp, Homo sapiens
aacataatgcctctgtaattcatctacattgttgccggtattaatagtttggatttttttatattgctaagtactatttcattatatgaatgtggcacaggttatttattattattattattattattattattattattattattattattattcattcttggttgacgggcattttggctatttctggttttggcctaaagtttctatgaatattcttttttttctttatttcttcttaaaaaaaaaaaagggacgcatgtgccgaacatgcrggtttgttccataggtatacatgtgccatggtggtttgctgcacctattgacctgtcctctaagttccctcccctctactcctatcccccaacagcccctggtgtgtgttgttgccctttctgtgtgttttggttactgtagccttgtagtatagtttgaagtctggtagcgcgatgcctccagctttgttctttttgcttaggattgtcttggctatacagggtcttctttgattccatattaaatttaaaatagttttttctaattctatgaagaatgtcaatagtactttgatgggaatagcactgaatctataaattactttgggcagtatggccattttcatgatactgattct

SEQ ID NO: 800631 - DNA, 635 bp, Homo sapiens
ggggagaagaaacgcaaacacatgatgggttaaaaactggtgaaatcgaataggtttaatcaggactgaggaaggtcagtaactgaaattcttaacttactgttgagaaaaacgtgatcactccccacagcactttaagatccttcaccacaaaaacaaggttcgaggtgcctgagctcagagctgaaggcactgcctgtagctcagactctgacaagagtgaggtagattgtggccagcrtgccaggtaacggtctgcagttgcaataacagaattagaaggtgggggtgtcatggaatcttaggagccctgcattccaattgcccaggctttgctgaaacacaggcaccctggtctcacttgagggtcaccaccaatggggatcattccttcagcattcactctcagtattcgtgtacccttgtgacaatgccacagacccatctctttcccaatacatctaagcatattcctcactgtttatctcttgtctgtacaacatcatcaaccagaaacagtttcccaacaggttatattttcttaatggtagtcatgaagtcaccccacctgctctaagttaaaacagagcttaagccttttccacaggtataagatatcaaacttttagcctgcc

SEQ ID NO: 800632 - DNA, 605 bp, Homo sapiens
tgaattttctttgtgtataaattttaccctataacaaatactataaaacatttttaagcaataagatattagggactgaaatgcaaattttacatttatataataaaagcaaaacttcaaagaaatagctgagtattaaatttgtcatatataatgtgttttaatatataaatgtaagtggataatagggttgaaggaagattacattttaatagacagaatgttcctgataattgtttaatgctacatatattaattgtaaatgctacatgtataagtagcatttctctagcacctgccgataaaaatgacatggccatattaatggtaataattcagattttattaatgttgactcttccaatgagggcattcaagctcctgtaaaagtcacaataaattatttttcrctgttaaacatcctctcttgttcttggctaatatcttgtaccatataggttgatgctctggaagtcattaattgctggtaatgttgagcatctgatcatgtgtatttgacatttgaataaagtgattattcagatcttttgcccattttgcaaatgggctgttcaaataagagactatgtggtcatccccatact

SEQ ID NO: 800633 - DNA, 564 bp, Homo sapiens
atcacatgtcccttttaagccagtatgtaggagaaatcagaattttccaggaatattcacttacgtctttgaagtagaagacaaaaaaatgggtctgaactattaacgagtaggtatgggctccatatatgattttttcaaaatccccctttttataggctcttccctctgctaatgtgtctagatactgacataactttagtttcctcagcccacatttcagcctacacaggaccaggattatagtcttcrgtctgaaatggtcaagattcagatgactgaagtttctttcactggccttagattcttggatctatctgtgttgtatgctgatctgagaccacttaatgtcattttctggtagataactcttcctggtgatgaggggggcatgactcagagtaaaatcagccaaactgaggagtatttataagtaaacctgtctcatcaaatgagtacacatacaggtaatagttatctgctcttcaggctctagtacaccaacctctccatctttttgttcagcaaactgatctttgctgcgaggatcctctcaaagctaca

SEQ ID NO: 800634 - DNA, 634 bp, Homo sapiens
caaaattatcccaataaacaaaattaaaaccaaggaccctcatggagttcacttcactgccctgccacctccacaggagcaggtactgatatccatggatgagacctgaagacgaaccacatcacaggactctttgcagacactacccagtaccagcctggagcctggagcacagtagctctgctgggtgttgacaatcactgtagttcagctctcaggaagccccatcctttggagaagggggagagcaccacatcaagggagcaccctgtgggacaaaaaawatcctaacagcagcccttgagtcccagatgtttcctctgatatagtgtacccaaatgagaaggaagaagaaaaacaatcctggtaatatgtcaaaacaaggttctttaacagccccaaaagatcacactaccttaccagcagtggatccaacccaagaagaaatctctgaattgccagaaaagaattcagaaggtggattattaaactacccaaggaggcaccagagaaggatgaataccaacttaaagaaatttaaaaaatgttacaggatatggatggaaaaatctccaaaaaaatagagagcataaaaaaaaatcacaacttctggaaatgaagaacacacttggag

SEQ ID NO: 800635 - DNA, 640 bp, Homo sapiens
tccttcctttgttctcctatgcctttgcctcttttaaaaagttctaagtgctagccagtcgggacaaatacagaaggtgaggtcccgtcccagccaatggaaaccgaacgcagcaggagggtggccgcgtcagattataaatgagcctgtctcctttgttccgtatactcttgtggcaaaacygctggcgagtgtaccctttctacaaaaagtataaaaatggccttgctgaaaaaattaaattgatattcaaatgctatttatttatggcaccagggaacaagcattgcacatacaaataatcccatcaaaaagtgggctaagggccgggcacggtggctcacgcctgtaatcccagcactttgggaggccgaggcgggcggatcacgaggtcaggaaatcgagaccaacctggctaacacggtgaaaccccgtctctactaaaaatacaaaaaatttagccgggggcggtggcgggcgcctgtagtcccagctactctggaggctgaggcaggagaatggcgtgaacccgggaggcggagcttgcagtaagccgagatagcgccactgcactcccgcctgggcaaaagagcaagactctgtctcaaaaaaaaaaaaaaaaaaaaaaaaaaaaaaaaaa

SEQ ID NO: 800636 - DNA, 454 bp, Homo sapiens
tggagttcatgtgatgataatgtaatgataataatagctaacattttttgaagccttactatgggcctaaaagtgttctaagtactctacattcattatccatatcttacaacccttaatattttataaattttataagtagrttttataaatatatcgtagattttataagtttattgtagttgtaaattttataaatacggtagttttacagatgaggaaatgggcacagagaggttgatttgactaagggaacatagctaggaatggaaagagccaggatttgaacccttgtagtctattttcagaactctgtggctcttaatcactacactgttctgtttactgtgttacgaattaatagaggataatatttcaagtaagggcatgatagaatatgaagatttgattttgaatgtagttggggaaacagttaaacagcaattttaacttg

SEQ ID NO: 800637 - DNA, 656 bp, Homo sapiens
ggattaagattagacatggagcattctaggctgagagcatagtcaaagacttagaaatgaggaagcacaatgcaagttagaggaatagagacccagcttggctgttccccacactatcctccaggatattaaaactgttcgttgttgtatccccagcacttggaggagtggttggctaataattggtgcttaataaatatttgttgaatgaatgaatgaatggtcatatttgaraaataccgatcatcattttcttggacattaacaaagcattttaggatattgaacactttaagtcatttagagaaaaaaagtgtttatctcaatcttctttaattatggaatgtgcattaacaactcttgaaatcctctggaaaatattacactggtctgtatggtagaggtgaggtggaaggctagaaagtgttttcttctccaagctaaacacacccagtttcttcagtcattatacacttgacatttggtttctgatccctcactagtttgatatccctccttccaaggattctgtcctgtaagtgttcttaaaatgtggtgttcagaacagaacatgtttccctccataggtgatattttttaattctatattaaaacaaaacgaaaaaccctcagaatacaatactccagttgtgaac

SEQ ID NO: 800638 - DNA, 656 bp, Homo sapiens
ggattaagattagacatggagcattctaggctgagagcatagtcaaagacttagaaatgaggaagcacaatgcaagttagaggaatagagacccagcttggctgttccccacactatcctccaggatattaaaactgttcgttgttgtatccccagcacttggaggagtggttggctaataattggtgcttaataaatatttgttgaatgaatgaatgaatggtcatatttgagaaataccgatcatcattttcttggacattaacaaagcattttaggatattgaacactttaagtcatttagagaaaaaaagtgtttatctcaatcttctttaattatggaatgtgcattaacaactcttgaaatcctctggaaaatattacactggtctgtatggtagaggtgaggtggaaggctaraaagtgttttcttctccaagctaaacacacccagtttcttcagtcattatacacttgacatttggtttctgatccctcactagtttgatatccctccttccaaggattctgtcctgtaagtgttcttaaaatgtggtgttcagaacagaacatgtttccctccataggtgatattttttaattctatattaaaacaaaacgaaaaaccctcagaatacaatactccagttgtgaac

SEQ ID NO: 800639 - DNA, 519 bp, Homo sapiens
agacctcagcagacaaagtaaggcaccaaggacaagtactggaagaacagagatatgtgacctttcagatagtaaactcaaaatagctgttttgatgaaattcaaagaaattcaagataatagagaaggaattcagaattttatgagataaatttaacaaggagattgaaataattaaaagaatcaagaaaaaattctggagttgaaaaatgccattgacatactytagaatgcatcagtctcttaatagcggaattgatcaagcagaagaattaatgagcttgaaaataggctatttgaaaacacacagtaagaggagacaaaaaaaggaataacaaacagtgaaatacacctacaagacctagagaatagtctcaaaagggcaaatttaagaattattttccttaaagagaaggaagataaataggggtagaaagtttattaaaagggatactagcagagaactttagaaacctagagaaaggtattaatatctaagcacaagaacattataaacca

SEQ ID NO: 800640 - DNA, 657 bp, Homo sapiens
tggaaaaaaaaatctagagataacaccaataagatgacttgggtgttagaaccgtttgacaaaaatcattaaagcagctctaataaaaatgctttagcaagcaatcaatgacaatcttgaaggaaatggaaactagaaatcctcagcaaagaaacagaagatatatagaaaaaccaaatagaaattttataattgaaaagtacaataactgaaataaattcactgaatgggatgaataacaaaggaggtgcgagaggagtcagaacttgaaaacagatcaacaaaaatatgacatctgaacaacggagagaaaactggttgaaaaaataagaagcagaactagacatctgtsggataataacaacgatcttattttttcaagccatcacagccccagaaggaaaagagaaagacagtggggctgaagaagtatctgaataaagacacggctgaaaactttccaaatctgataaagggtataaacctacagattcaagaagtttcagggaaatctaaaaggatacatccaaagaaatttatgcccagacaaagggcaaccaaactgctaaaaacaagcttgatgaaaaaacaatcttgaaaacagagaaaaatgacattgccaaagaaaaacctgactactatggagttctcacgaga

SEQ ID NO: 800641 - DNA, 690 bp, Homo sapiens
tttggaattatccaaagacgtataacagaggacaggagaaaacaaatgtcacccactcatttaaacacacaaatacacatttataatggccaccacacactgaaaatttactagatgagtgacactccactgtgcccatttaataatgggatcaatgaacaactgaataaaccgattgctgtattttgattgctagctcctcttttttcctcactccttgttcccattgtccttttagcttctttatgctctgttttagcaagctcatcaaagatttaaacatctgctttttgtcaaaacatctcaaatttatattattttctgtgacctttctcctgtgcctataagatatctttacctatctgatatgggttggctgtgtccccatgcaaatctcatcttaaattgtagctcccataattcccatgtgtcgtgggaaggacccagtgggaggtaattgaatcatgggggtaggtctttccrtgctattcttgtgacagtgaataagtctcatgagatctgatggttttataaatgggagttcccctacacaagctctctcttgcctgctgccatgtaagatgtgactgctcctcctttgctttctgccatggttgtgaggcctcctcagctgggtggaactgagtccattacccctttttcctttataaattacccagtctcggatat

SEQ ID NO: 800642 - DNA, 596 bp, Homo sapiens
gaaaccagttaaaaagatatattcataccaaagagtgattattggccaggcacggtggctcacacctgtaatcccagcactttgggaggctgaggcaggtggatcacctgaggttaggagtttgagaccagcctggccaacgtggcaaaaccccgtctctactaaaaatacaaaaattagccaggtgtggtggcgcatgcctgtaatctcagctgcttgggaggccgaggcaaaaaaattgcctgaacccgggaagcagaggttgcagtgagccgagatcatcccactgcactccagcctgggcaacagattgcaagactccacatctcaaaaacaamaaaaaagagcaattattaaaaccacagactatgtcatcattgaaaccctatcgacgagtccttatcttttaaagaaatgtgctgaaatattcacagataaaatgataggatatctagggatgtgcttcaaaaccatttagcaagaagggaacagggaaggctacataggatacactaagcaaggctggccgtgagacgatcgttattaaagagggtggtaggtgcgtcacacacactcttctcattctataaatgttt

SEQ ID NO: 800643 - DNA, 525 bp, Homo sapiens
ttcctgtctctttaaggacagagaattcttgcctggtttcctcgggcttcgttcctgccagagagcagagagtgggagacagggaaacatgcactggggtgcctgttgtctccagccatctgtgtacgaagtgagaggaccagaggcttgtactcaatgtgaatacaatgcttcacaagggcatgagaaaaattctgtttagttagaatgacaaacatcattttcacaggtgtgagaagaaattgtcagcatacaggccgggcgccatggctcacacstgtaatcccagcactttgggaggccgaggcaggccaaccgcctgaggtcaagagtttgagaccagcatggccaacatggcaaaactccgtctctactaaaaatacaaaaattaactgggtgtggtggcaggtgcctgtaatcccagctactcgggaggctgaggcaggagaaccgcttgaactcaggaggcggaggttgcagtgagacgagatcgcaccattgcactccagtctgggcaacagagca

SEQ ID NO: 800644 - DNA, 556 bp, Homo sapiens
aggaaaatgtcaaaacaaatcaaagatttaaatgtcaaaaatggaatcaaaagtattagaagtaaacaccagataattttttgtaattttagagtggtgtctttgttttgtgctgttataacagaatgcctgagactgagtaatttataatagacagaaatgtatttggctyatgcttctgaaagctgagaagtctgggatcagggagctgcatctggctagggctttcttactgtgtcatcccatggtggaaggacagaagggcccaagagcacacatgagacagcaagaggagaaggaggctgaactcatctatttatcaagaattcaatccccaaaacagcattaattcattcatgagggcagagtcatcatggcctaatcacatcttaaaggtcccacctctcaacaccattgcattggggattaagtttccaacacataaacttggagggatacattcaaactatagcaagcagtaaaagcctttctaattacagttgttcttctgtatacttgggggatttattccaagacctccctcagatatcaaagc

SEQ ID NO: 800645 - DNA, 619 bp, Homo sapiens
tggcccctccaaaactcacgttgtagttcaattgccaatgtaatagtgttgggagatgctacttttaagaggtaattaggttgctaagatggattaacatctttctcttgacactgagactgggttttcctgggaatggttagttcccaagagagtgagttgttataaaacartgctgcctcttctattttgcgctttttgtttgcacaaactcggtccccttctgtttctctacgatgttttgatgcagcatgaggcagtcatgagaacccaccagatacagctgcctgatcctgaatttcccagccaacagaaccaagtgctaaataaaactctttttaataagttacccactctcaggtattctattatcgcaacagaaaacagtttaagacacctgctaggctcctaaccttgaggggctagaaaacaaagccagaggtccagtaccagcctcctcagagttagaatacacagctcatgagtgctgagctcagccttggcccctacaatcttccagaaatgaggccacttggctgagcccattatatgcaacattcagacccccaagggcatcaaagaagacaaaagcagaaaaacctatccaagaaacagcaac

SEQ ID NO: 800646 - DNA, 619 bp, Homo sapiens
tggcccctccaaaactcacgttgtagttcaattgccaatgtaatagtgttgggagatgctacttttaagaggtaattaggttgctaagatggattaacatctttctcttgacactgagactgggttttcctgggaatggttagttcccaagagagtgagttgttataaaacagtgctgcctcttctattttgcrctttttgtttgcacaaactcggtccccttctgtttctctacgatgttttgatgcagcatgaggcagtcatgagaacccaccagatacagctgcctgatcctgaatttcccagccaacagaaccaagtgctaaataaaactctttttaataagttacccactctcaggtattctattatcgcaacagaaaacagtttaagacacctgctaggctcctaaccttgaggggctagaaaacaaagccagaggtccagtaccagcctcctcagagttagaatacacagctcatgagtgctgagctcagccttggcccctacaatcttccagaaatgaggccacttggctgagcccattatatgcaacattcagacccccaagggcatcaaagaagacaaaagcagaaaaacctatccaagaaacagcaac

SEQ ID NO: 800647 - DNA, 619 bp, Homo sapiens
tggcccctccaaaactcacgttgtagttcaattgccaatgtaatagtgttgggagatgctacttttaagaggtaattaggttgctaagatggattaacatctttctcttgacactgagactgggttttcctgggaatggttagttcccaagagagtgagttgttataaaacagtgctgcctcttctattttgcgctttttgtttgcacaaactcggtccccttctgtttctctacgatgttttgatgcagcatgaggcagtcatgagaacccaccagatacagctgcctgatcctgaatttcccagccaacagaaccaagtgctaaataaaactctttttaataagttacccactctcaggtrttctattatcgcaacagaaaacagtttaagacacctgctaggctcctaaccttgaggggctagaaaacaaagccagaggtccagtaccagcctcctcagagttagaatacacagctcatgagtgctgagctcagccttggcccctacaatcttccagaaatgaggccacttggctgagcccattatatgcaacattcagacccccaagggcatcaaagaagacaaaagcagaaaaacctatccaagaaacagcaac

SEQ ID NO: 800648 - DNA, 604 bp, Homo sapiens
tcaacgactcaatttgctggactagcaaaccaagcccagcagcatgtcaaaaacgaatccaccacaatcaagcaagctttatccctgggatgcaagtttggttcaacatatgcaaatcaataaatgtgattcatcacataaacaactaaaaacaaaaaccacatggtcatctcaatagatgcagaaagggctttcaataaaattcaacatcccttcatgttaaaaaccctcagcaaactaggcattagaggaacatacttcaaaataagagccatctatgataagcccacagccaacatcatacygaatgggccaaatgctagaaatactccctgtgagaaccagaataagacaaagatgcccactctcaccaatcctattcaacatagtactgagagtcctagtcagagataacaggttagagaaagaaatataagacatccaaggaaaagaggaagtcaaactatctctgcagacaatatgattctgtagaaaaccccatagtctttgcctaaaagctctttgatctgataaacaattagcaaagtttcaggatacaaaattaatgtacaaaaattagtggcatttctatacaccaatagca

SEQ ID NO: 800649 - DNA, 604 bp, Homo sapiens
tcaacgactcaatttgctggactagcaaaccaagcccagcagcatgtcaaaaacgaatccaccacaatcaagcaagctttatccctgggatgcaagtttggttcaacatatgcaaatcaataaatgtgattcatcacataaacaactaaaaacaaaaaccacatggtcatctcaatagatgcagaaagggctttcaataaaattcaacatcccttcatgttaaaaaccctcagcaaactaggcattagaggaacatacttcaaaataagagccatctatgataagcccacagccaacatcataccgaatgggccaaatgctagaaatactccctgtgagaaccagaataagacaaagatgcccactctcaccaatcctattcaacatagtactgagagtcctagtcagagataacmggttagagaaagaaatataagacatccaaggaaaagaggaagtcaaactatctctgcagacaatatgattctgtagaaaaccccatagtctttgcctaaaagctctttgatctgataaacaattagcaaagtttcaggatacaaaattaatgtacaaaaattagtggcatttctatacaccaatagca

SEQ ID NO: 800650 - DNA, 604 bp, Homo sapiens
tcaacgactcaatttgctggactagcaaaccaagcccagcagcatgtcaaaaacgaatccaccacaatcaagcaagctttatccctgggatgcaagtttggttcaacatatgcaaatcaataaatgtgattcatcacataaacaactaaaaacaaaaaccacatggtcatctcaatagatgcagaaagggctttcaataaaattcaacatcccttcatgttaaaaaccctcagcaaactaggcattagaggaacatacttcaaaataagagccatctatgataagcccacagccaacatcataccgaatgggccaaatgctagaaatactccctgtgagaaccagaataagacaaagatgcccactctcaccaatcctattcaacatagtactgagagtcctagtcagagataacakgttagagaaagaaatataagacatccaaggaaaagaggaagtcaaactatctctgcagacaatatgattctgtagaaaaccccatagtctttgcctaaaagctctttgatctgataaacaattagcaaagtttcaggatacaaaattaatgtacaaaaattagtggcatttctatacaccaatagca

SEQ ID NO: 800651 - DNA, 603 bp, Homo sapiens
cttattatatgttttttagcccataaatatggagatgttttaaaatttcttccagtgccccagtggatgatcttacacctcccgtgcttctgggatacacacayctaattttgcagaccactggtccagaatgtaaattgaagagtttaatgtctaagatatttgttcttttgtttgtagcttatcttttactccccacgtttcaaatatccgtttgcaaaataatttttgagttaaaattttcaattaaaaaactgtatccttgaggtagaaaagataaagatagaagatatatgtgaattaggttgtatctctccttaagagggaatactgttttttatctaaggagaactaacaaccctccctttcattgtctgggttggtataagtaaaaatccttgtttgaagttattaagccttcccacccatatgatgattagtttggttcataagctagagttagggcttggtaaaggctccttttttttttttttttttttttaaagtctttccaccttaactagcaagtaagctagaaatgacagagcagtagaagggggaatctaccagagtgtcctacaggaccttgttgaatgctactgc

SEQ ID NO: 800652 - DNA, 608 bp, Homo sapiens
ctgtttggcaagatctcccaagcagtggtttacaaattgtgtggcttcactactattaggctgttcaattaattcaatgggctatgaacagatttataattgaaatggaagagaataaaatacatcagattgaactttataatttttatgttacactgcaaatgaaaaacttgcaaaattttcagtgtttgtatgaatgtgtatgtatatgcttgtggtaaatatattacttttattacttactctggtttttatttgaaaagttttaaagcctagagcaggatttctcatgcaagagttaccaaataatccatttaaaacataggtaataataataataataataataataataataataaaagtatgcatagtatttgcttatatcgatttatgtaataaaatatacacgtacaaagatatgcaacaatmatttataaagattaggaataaatttattattcattttactttacgtagtaaaaatgccagaaagttccagttaaataatacaatttaaataacattaacatggcacatgcacctgctttcctgaatttaaactgaccaggttgtgtttaataatatgaagctgtattagcaccttt

SEQ ID NO: 800653 - DNA, 669 bp, Homo sapiens
cttgtagtgaatgtgaaagaatctatcagttggccaggtgtggtggctcacgcttgcaatcccagcactttgggaggccgaggcgggcggatctcgaggtcagtagatcgagaccatcgtgaaaccccgtctctactaaataatgcaaaacattagccgggcgyggtggcgggcgcctgtagtcccagctgctcgggaggctgaggcaggagaatggcgtgaacccgggaggcggagcttgccgtgagccgaggtcacgccactgcactccagcctgggcgacagagcaagactccgtctcaagggggaaaaaaaaaagcaaaagaatctatcagtcatctgtttattgatctatcgatctattagctatctatccagctacacatcaatctatctatattggtttaggacaaagcaaattttcgtgaagtataaaaatggctgtctttgaaatagcagtaatgtgaaggtaaatcataaactttataaattaaatgtatttcttctcaccctaaggatctcatataatgagaatatcattaaaagttgatgacaagaaaagagcatagataagagttcattatttctcaaaaggatgttttttcatactgacattttgttaggaaattgatctttagcaactcaatccatgtagttaagtgtaaattt

SEQ ID NO: 800654 - DNA, 675 bp, Homo sapiens
gcaaagcttgatatttgaggaggcaattgtctgttagccagactttccttagaggacagtagtcttgttatattgcgtggagctaaacagttaagttattccccattgttaacccattggctgtagagctggacctccagtcttagtcaaaactcccagggctattttcttcctttccaatatacataaagattaaataccttccctatgggaaggctgagaactggtgctttaagcaaggcttgctttagctggtttaaggcttttgtgttttaggttcccaagttagggagctgcttgagtttcttttaagagttggtataaaggatgagctatttcaccataccctggtgcccacattttgcaaaattcagtaatgcccacattttgcaaaattcagtaatrcccaataattttcttaactcttaaaggaaacggggttaatcctttcctcacctggtactctggttccttctgtgctgtgtctgtcccacagaccttggccgatgggtgaaatgagtactcagacacaggtatgcagtgtaagagcagctaggtgactgcctggctccagtggccagacagcagtcccgagaagctggagctgtttgcttttattcagtgcaggcacaatgccgaaaacctggagccaacacaacctgcaggtaattaaca

SEQ ID NO: 800655 - DNA, 627 bp, Homo sapiens
tccattcatggtaagagccctgcaccagtgtgccacttttaatcttggctatgccatgtttttactgtaccttctctatattgagatatggcattactttccattgtgtcacagctgcctgccgtgtttgtacaagccaccctgtacaggttagtagcctaggagacataggctgcaccctgtggcccaggcatgtggcaggtggtactctccaggtttgtaagtgacgtctgaagcaagaggacaaaatcgcctaaccacacatttctccaaactcatccccattaagcaacaggtgagtgtgtgtgtgtgtgtgtatatatatatatatatgaaatttattacrgaaattgactcacaagattatagaggccaagaggtctgaagacccataagctggtgtctgtgagctggaaggccagtgatgtgactccgtctgagtctgaagccagagaaggagcaacactgaggtccaggggcagaagtcagctgctccacctcaaaaggagacagagaaggtgtcctgcctccgcctttctcttctaccagggccttagtttaattcagtgatggtggattagatgatattggtgagggcagatcttcacccagcctaccagttcaaat

SEQ ID NO: 800656 - DNA, 646 bp, Homo sapiens
acaaagccttcaagaaatatgggactatgtgaaaagaccaaatctatgtctgattgatgtacctgaaagtgatggggagaatggaaccaagctggaaaacactctgcaggatattatccaggagaacttccccagtctagcaaggcaggccaacattcaaattcgggaaatacagagaatgccacaaagatactcctcgagaagagcaactccaggacacataattgtcagattcaccgaagttgaaatgaaggaaaaaatgttaagggcagmcagagagaaaggttgggttacccacaaatggaagcccatcagactaacagtggacctctcagcagaaactctacaagccagaagagagtgaggactaatattcaacattcttaaagaaaagaattttcaacccagaatttcatatccagccaaaataagcttcagaagtggagaaataaaataatttacagacaagcaaatgctgagagattttgtcaccaccagccctgccctaaaagagctccagaaggaagcactaaacatggaaaggaataaccagtaccaggcacggcaaaaacatgccaaattgtaaaggccatcaaggctagaaagaaactgcattaactaatgagcaaaataaccagctaacatc

SEQ ID NO: 800657 - DNA, 605 bp, Homo sapiens
tctgtgagttctttacacacgctggatgatgaacactggtctgttatgtgtaagcagaccaactactggatagtactttgtacacatatgccatggatgtatagcctgtgttcactcgccagccctcattgttctgatgggtcactgtcataaggggggcagccgacacattcctggggagaccttcttgtgcaaatatgcaaaaaggtctccagtctaggagagagggacttgccaggtggaggaacatgcctggttccagcttcaytaggagtagctaaatggctctccaaagggtggagccaacaaaccttccctttagcatgggcctagcgctcccttgcccactgccagctttgttactcttagatccttaatctctgttaatctgatgactataaagcaaaaggttactttaatttgcattttcctggcaactggggagaggctgcatcttttcaggtcattgtgtgtcttgtttcctcttctgataattgcgagtttgtatcatttgcctggttttcactaagttcgttatacagtaaacatgcatatgtaaacgtatatatctttactaaaacaacaggatactttgtggtaaacat

SEQ ID NO: 800658 - DNA, 515 bp, Homo sapiens
gcagctggttccccatcctcacccctggtgtgaccaggcaggctggccatgtgctctgctgaccactggctcttgttgatgatccccacccccacatatacacatagctcaatggacaaaaatttctaggaagagagtggagccgttatctaggtatctattaccaaagagcctcccacagaggggtagttccatcaaaaggagtaactgacccagggaataggtgtatgtatttctctccagagcaaaaaggttgatgtatacayatctgttccaccaaataggcaatctggtgactgttgggctaagcgtccagggatctgagggcctctctgggttctccaagtgcactcctcccccagtgccaggattcagggcctgcctcctgagtggctctcatccactctgtctctaggacaatgcacccacagcaccatcggcccagcacagcaccccctgcattccttgctgccctccaatcgcttgggtgtcccatatgatgagtgcagcctagc

SEQ ID NO: 800659 - DNA, 546 bp, Homo sapiens
taggagctgaggggacagtgagaagtcaccagaagacaagagtgcgagccttctgttatgcccagacagggccaccagaagggctacttggtctagcagtgacgccagcgtctgggaagatgcccattgccaggcagaccgtggtctagcggtagcraaaagtgtcaaggaacaacaccagctgcttagcagaccgggaaagggaggctccctttccctgggggagtttagagaacactctgctcctccacctcttgtggagggcctgacattagtcaggcttgcctgcagttatccggaggcctaaccatctccctgtgatgctgtgcttcagtggtcatgctcctagtccgccttcatgttccatcctgtacacctggatctgccttctagatagcagtagtcaattagtgaaagtactaaaagtctctgatatgcagaaataatggcataagctgtctttctctctgtctcctctccctctctgcctcagctgccaggcagggaagggccccctgtccagtggacacatgacccacgtgacct

SEQ ID NO: 800660 - DNA, 543 bp, Homo sapiens
ctattaattactgcctcaatttcagaactgttattagtctatttggggatccgacttcttcctggtttagtcttgggaggctgtaggtgtccaggaatttatccatttcttctagattttctagtttatttgtgtagrggggtttatagtattctctgatggtagtttgtatttctgtgggatcaatggtgatatcccctttattttttattgcatctatttgattcttccctcttttcttctttattagtctggctagtggtctatctattttgttaatcttttcaaaaaaacagctcctggattcattgatttttttgaagcattttttgtgtctctatctccttcagttctgctctgatcttagttatttcttgtcttctgctagtttttgaattagtttgctcttgcttctctagttcttttaattgtgatgttagggtgtcaattttagatctttctcactttctcccgtgggcatttagttctataaatttccctctaaacactgctttagctgtgtcccagagattcttgtatgtt

SEQ ID NO: 800661 - DNA, 543 bp, Homo sapiens
ctattaattactgcctcaatttcagaactgttattagtctatttggggatccgacttcttcctggtttagtcttgggaggctgtaggtgtccaggaatttatccatttcttctagattttctagtttatttgtgtaggggkgtttatagtattctctgatggtagtttgtatttctgtgggatcaatggtgatatcccctttattttttattgcatctatttgattcttccctcttttcttctttattagtctggctagtggtctatctattttgttaatcttttcaaaaaaacagctcctggattcattgatttttttgaagcattttttgtgtctctatctccttcagttctgctctgatcttagttatttcttgtcttctgctagtttttgaattagtttgctcttgcttctctagttcttttaattgtgatgttagggtgtcaattttagatctttctcactttctcccgtgggcatttagttctataaatttccctctaaacactgctttagctgtgtcccagagattcttgtatgtt

SEQ ID NO: 800662 - DNA, 640 bp, Homo sapiens
acgctacacattgggaaaaaatatttgctaaccacatatacaaaaaaggactaggcatcaggaaggaggaaactattcaattgtacactttaaataggtaccagaagaaatagatgctaactcagaattctataaccataaaaaatattggccaggtgtggtagctcatgcctgtaattgcagcactttgggaggcagagacaggcagatctcttgagcccaggagttcaagaccagcctgggcaacagaatgaaacctcatctttacaaaaagcaaagaaaaaagaaaagaaaagaaaaattagccaagcgtggtggcatgcgcctgtagtcccagctacttgggagggtgagrtggggggatcacttgagcccaggaggtcaagcctgcagtgaaccatgattgcacccctccactccagcctgggtaacagagcaagactctgtcaaaaaaaaaacctcaaaattgaaggtaaaataaacacattttcagataaacaaatgctgaaaaaattcatcaccaagagacttacaagaaatgctaaagaatgttcttgagactgaaaagaaatgatagaagattaaaaagttaaatctacaggaaataaaggaaagtgccagtcatagtcaatagattgat

SEQ ID NO: 800663 - DNA, 615 bp, Homo sapiens
ttgaatcaaataatacaaataagttagaaggtataagaatggaaaaaaatataccatgcagaaaataagaaagctggaatgaattcaagacaaagaatattacaggagataaatgggatgtttgataataagcaaaggagaaattcatcaagcagacatacaactctaatgcacataataatatagtttaaacacttatgaggaaaaaaattgagaaaaactaaaggaagaaataaattcataatcaaagttggaaactaaaatcttgaacaaataaagtagacaagaatagatgaaagtatttgtaaggctataaaaggtccgaatactgttattaaccaacttgacctgactaacatttccagaacactacayccgattacagtagaatacactttttaaagtttttttttcttttaacttttacttaaggttcaggggtacatgtgccttaggtatggtatataggtaaacttgcattatgggggtttgatatatagattatttcctcatccacgtactaagcatagtacctgataggcatttcatctgatcctgtttctcctcacaccctccaccctcaaatagaccctagcatctgttgttcccctctgt

SEQ ID NO: 800664 - DNA, 528 bp, Homo sapiens
caggaagttgaggctgcagtgagccaagattgcacccctacactccagcctaggtgacagagtgagaccctgtctcaaaagaaaaaaaacaacaaaaagactgggttaagaattacaggacaagggttagaaagataaagggagcaggcaggaagatgggaaggaaaggaaagatgtcctgaaagtgagtcttgttcatcatctcaagtgctgagattcttcagcagaaattcatttgaaacaaccttaggggattttgaattagcagttatagggagatgcagaatagggtgacccaaatccaaagctaaggaatgtatttaaaatagagccaacctctactatgcagggagtcggaacaggcatttgktctattttttcttctacctcgtgtaataaataacaggatcataagaggaactctcattaactaaaacatctcatctgtaagtattactctatcaggtacattttaaaaaatgggatatttaccccctaatattcttgggaaatcagtcacattaacac

SEQ ID NO: 800665 - DNA, 553 bp, Homo sapiens
actctatcaggtacattttaaaaaatgggatatttaccccctaatattcttgggaaatcagtcacattaacaccaactcctctgtcgtagtttgaagtagttgctttatatagaatttaaaagcgtaatttaaaaagttctagaaacattrtgatgaaagatgaaatttatatttttctaatttcttaagcgtgaatggtcactattaaaaggctgttcaaactttaaaaactgaactatagagaacctataggatctactttttagctcatgcaatactgtttctgccagtgtttttcagagggcgatgcgatgatgcttgtgtagcttgctttaaaacaaagcatgctttccgttggcacattctgtttggttttttttagaaaaagatttttattggaaaataaaatcaattagactgcatagctatgcctggaccccgacaaccaaactggcaactgatctgtagttgtgaaacagtttatccactatgatgctgaatgttttgccttagcaggcattctcagtctaaataggctgtcatttgagggtc

SEQ ID NO: 800666 - DNA, 601 bp, Homo sapiens
acttttgtgggcacctagacaagcatcattagtgtaagaacatcccctatgcaacttttcaaactggggccattcaacttccctcagacaccttcaccgatgtgcagttcactcttcaactaaggccactttgaactgccctaattgttagaaagtacttccttctgttgaactgaaatctgtctgccttaaacttttatctattaaatttaaatttgtcctgtggggcttggctgttatgtttgattcttttcccacagaagagtcttttaatgttttaagaaaatgattgcaaatcacccaagtcttctctttcagggacaaaatgtcttttatttcttccagtcatcagagtgactttgagcacctttgccatccttattgctttccttcagcttcatyaagacactctttcagtgaatacctactttgctcctgctgtgtgcctggcactgatctaggcactgagtgtacaagaaaggtgcaataagtagtggaaacaggacaaaatctctatgctcctggatcttacatcaccgaggtggggtcagagcatacatgaaggatttataaccttggcatgtgccatccaggatgttct

SEQ ID NO: 800667 - DNA, 610 bp, Homo sapiens
ttatgtacaaaatgaattatatcatgaatctctaagtattttaggaaagcaaagttataaaataactaaatgtactaaacagaattactatattcaacaagcacataaccaattttttaaaaattaagtaattatggtgagtatctacaatgaaatttgataaaacttggcatcctgagaaacactgccatttagaaaggaataatcaaagtaattaaaatgagaaaaaytattgcttgatttttaaaacaaaatcatagataggtgaatagtagaatgcacttagctaaaattgaattagaaagctaactagtaatagtgccaaaggagttcccccagaaggcagtcaaaaaggaaaaagagtgaaatagcatgagaagctttctcatggaagctagactcattttggacatccatataatagtagttccagagaaagagaacaaagagaatcgagaaaagaaaacaaataaagtgtcacaaagctgaagaaagatcatttaaactagactcacacttgcttcaaacatcttgccagaatattggctgttggaaatgaaaaacaaagagcatacaaaataaatttatcctcttaaatataaaaaacaca

SEQ ID NO: 800668 - DNA, 646 bp, Homo sapiens
tagctaaaatatttttgcaggtaaaataaagctgatagtacatgtgttgttcaaaccttgttaaacctaatattgaactatttttatatctgctgtctttcagaaggcaaataggaaactatatatttgcttaaaaattggcatttagtaaccttaattctttttatagaaggaatgacttaaagtattgtcccctctttttgcactaattgtggatttttttagatgcttctcaaaattttcagtgtgtaagctaaacaaaaactaaaactaagaattctcaaaaaaacttgttcaaaacagggaaagactgatgaaaagtaaaatggactacttttgtaacttacctgtttgttaggaaatggaatggtctctttgatttaaaatraataaaaatagattattacgtcttttgtattgagactgtattgttatgagcctaggaaatttgggaacatgattgtattgtattaaaattcgaagtgattattatcagcttaattggattaaaaaagtacttcaagaaattattttatcatatctgcttctgtttttccaaaaggttaaaacttgtaaaaaaaatatatataaacaattgagtttactaatggtaaacatttttattctgggattcggtcattggaat

SEQ ID NO: 800669 - DNA, 649 bp, Homo sapiens
  misc_feature 513: n = A,T,C or G
gcatttgctgagcaaggaggctgaatggcatctacactaaggatcacctctatcaatattaagagactgttctgcagtagatgccctctggtaggcttttatatatgatatgaatattctaatattcctgatacggtttggctgtgtgtcctcacccaaatctcctctcgaattktattccctataatccccacatgttgagggaggaacctggtgggaggtgattggatgagggcaatttaccctatgctgttcttgtaatagtgagtgagttctcacaagatctgatggttttataagtgtttgacagttcctccttcccacgatctctctctggctgccatgtaagatgtgcctacttccccttcagccatgattgtaagtttccctgaggcttccccagcccatgatgaactgtgagtcaattaatctctttcctttataaattacccatcttgggtattctttataaaagtgtgaaaacagaactaatgcaattccataaccatttgnagaaatctgtccacatgtcttgtccacagaacaccttgccaccaattcttgcttttccaagtcactaatgaaatggacatcccattagcttttccctggagtcattgtggatccatatagtagaccatctatccct

SEQ ID NO: 800670 - DNA, 649 bp, Homo sapiens
  misc_feature 513: n = A,T,C or G
gcatttgctgagcaaggaggctgaatggcatctacactaaggatcacctctatcaatattaagagactgttctgcagtagatgccctctggtaggcttttatatatgatatgaatattctaatattcctgatacggtttggctgtgtgtcctcacccaaatctcctctcgaattgtattccctataatccccacatgttgagggaggaacctggtgggaggtgattggatgagggcaatttmccctatgctgttcttgtaatagtgagtgagttctcacaagatctgatggttttataagtgtttgacagttcctccttcccacgatctctctctggctgccatgtaagatgtgcctacttccccttcagccatgattgtaagtttccctgaggcttccccagcccatgatgaactgtgagtcaattaatctctttcctttataaattacccatcttgggtattctttataaaagtgtgaaaacagaactaatgcaattccataaccatttgnagaaatctgtccacatgtcttgtccacagaacaccttgccaccaattcttgcttttccaagtcactaatgaaatggacatcccattagcttttccctggagtcattgtggatccatatagtagaccatctatccct

SEQ ID NO: 800671 - DNA, 463 bp, Homo sapiens
gttgagttggttgataatgttatttatcattttacaatttgtctatttgttttatcagttacttagatacattaaaatctctagttataatttgacattttcaatttcactctttagttctgtccattcttgctttatgcatttttaagctgtattggactcatacacattaagggttcctatgtcttcctgatgaattaatctgttattgtaaaatgttyttctctatttctggtaacatttcttatcttgaagtctactctgtctgatatacttaaatagccactctcatcttaatatgtttaatgtgacatggcatatcttttcttatcctttgactaaacttatttatgcttctagatgtaaagtatgtctcttgtatagaacatattattaggttttgttttttgtccattctgataatctctgacttttaatccaaatatttaatcaatttatattt

SEQ ID NO: 800672 - DNA, 718 bp, Homo sapiens
tgtgcagaggaaaaccttatctagaaatttgtgcctgctgggtgctgctctcccactcatgtacccaaacgcggcatttctctctcgcccctttcctcttcttcctagttggtgttacctctctcatgaaagctaagactcagagcagaaattttccttgtttgttgctggagaaaccttccacgatgtggtaatttcagtactaatttgaaactgaaaaaaaaaataatatggtggttgggaggaggtaaggaagagggcagaaagagattaaagattaaaaaagagattaaaaaagagagaagccacatgaaatcaggagaaattcctgaaagcagcaaccctttgaggaatttacagctctactgatgcctatttagccacccatctgaaagatcctggcaggttaatawgctttgacaactggtggctctatctcatttttttttcacagctttatgaaatactctacagaccccagcttattgataattgatattaatgttgtaacagctgccctggctcacctggtgtgttatcaaatgctgtgtgctcagccctgccatgtgccatgccctggagctgcttcctattctgcacacaggcctgactagcaggagccatcccacaccttttgcaggtgtctagggcaaagctgtcagcacaggtaccctcatgtcacttccaaattgggatcctggtgattcgttcagatttg

SEQ ID NO: 800673 - DNA, 644 bp, Homo sapiens
gctcctgccaaaattagacatagaacttttagacttgaggacaagatcaccataaaaattgctgcatgacttgtcatatacttgatataaattatgcaattttatataagttatattaagtttgccaagtcattatcaaaacattagtctaaacatcttttgtatgtactaaataaggtttygtttctcagatctaacactggctcagagctataatgttcaataaaggagcctctagctcagggggctcttgaatgcttcaaatgtggctagtataattttgatcttatttaattttaattttaattgagatttaaattaaaaactggtattgctttcagttttggggaaattttaagtaattttggaacaactcaggtatgtaaatctactttttctgctgtatgttttatgaaatctaaatgcagaaaaatatttgtgatattagtattaagatgtgctgtaagggtaaaatacacattgcgttttgaagactcagtacaaaaaaaaagaatgtaaaatatctcactaatagtttatgttgttcacatcctgaaataatattttgtgtacattgggcaaaaattatatagtacaaaagtcagttttatctgtttattttcaccttttttaatgtgactatt

SEQ ID NO: 800674 - DNA, 610 bp, Homo sapiens
aatttatttcaataatctgcctccaattccctaaacataccattctctttccagcctctatacctttgttcatgcagcttcctctgactgggtttgttcttcacttggctaacccctcttttacttaagcacaccttgaacattccctccttccccatttccccgcagtgcccctaatggacatacttctgaataacacaggtggtattccttccttgttggaacctcctggaggaagagacagatgattaacaaatccttccatcaacccctttgaccatgacatcaacagtgctccaaattatggggtaccgtattagcctatgtctatcttgatcagaatccttacctcggtgtattgaaattatytatttcgtgcctgcctctttaaagtcagggtttgccttatctattgtctaacaccatgcagtaggtaacatgcagtaggaaacatggcattaaattatttgggttcaaatcccagttatggtgtgtaaatgcctaccaggcgtgaggcacctgctaagcaggttgcacgcatcatttgaattcacaccaccctttgcaatagaacagataggcaacagaggctcatttgggctaaaggatt

SEQ ID NO: 800675 - DNA, 542 bp, Homo sapiens
cctctcacagcattgcaaaatgaacacctgaatattgtcctatttagtttaatctgcacctttaagaagtctccacaaagccctttggagaattcttgttaataattggcacttaactccctttagctcaggaatttctaaagctttttatttatcttttaaggtcttatgacctacaccatttgaccagagcgagtgaaaccctttgcacacgtgtagctactcatgaggcctctttgttctctcatgtgactttggctttgggattaccatggtatatgattccaaaaagaaaggaaatattggttattatatcttctatgsaaaggtcaaaacttactttaaccaaaaagagtacaagagcatcttcaacatcctgaggaaaaataactgtcaaccttttcctgtaccagaaaatatatatgccatttaagaaagagggcagaaaattttggttgaatgaaacctaataggtttcctagcaccagactctctctaaagaaactttcaaaagaaaaataatcccagaaaaaaaggaagtg

SEQ ID NO: 800676 - DNA, 524 bp, Homo sapiens
caaagatcctactggtgccttaatacaactagtaactagactgggctaaaagagagaggtgtttcttcctctacctcttagtacatacatcacagtaaaataccagagaacaccatactgatacattctacttttccaaatatgcttggctctcaagagtaatgcttgcttctctgctttgcaacaaacccatttacttttcctgacacccaatcagtcatgaagaaaatcttcatctgataattttcatttaacaattacttgtgatacactaagcactgagttacaaaataaaagaatgaaacatgaagtgttcaygatctctggcctagaggagcttgccgtgaggggtgaaggagaagcgccaaaaaaattacagtaccatatggttagtgctcaaacagctcaaacttttactaaagggacaaaaacaattaactttgattgaaggaatttgaggagttttctgtgaaagcgatcacgaatgaaattagaagttttccaagtgcaaaaggtggaggtct

SEQ ID NO: 800677 - DNA, 557 bp, Homo sapiens
tcttatatcttattaaataatggaccattttacaattaagatttttaattcatagtgggtaggagccatgtacctaaccatcatctttgtattgtttataaatggtctgagtatagaaggtattcaatgacttgcctaagatcacagaatcgtttagtaccacagtctgttaataattcagattactctaatttcaaacagaaatggaaagcagaaaaaagcaggggttgcaatcctagtttctgacagaatagacaaagatcaaaaaatgcaatcttttgatctttgatcaaaaagaagggcattgcataatggtaaagggttcaattcaataagaagagctaactatcctaaatatatrtgcactcaatacaggagcattcagattcataaaacaaattattaatgacctacaaaaatacttagaccttcatataataatagtggaagtctttaatacgctgctgtctgtattagacataccatcaagacagaaaattgtcaaagatatttaggacttaaattcagctctggaccatgtggacctaatagatatc

SEQ ID NO: 800678 - DNA, 617 bp, Homo sapiens
attagacttaagcattatatcacaatattttttcacctttagaattagaaatccaaagaaaagtcctccctcccaccttattttctgtcagtctcagctggaggtatgcttggggtttggacagtttcaagaatttttaataactgcagaaccacctgtctcttgcactaaaaggactagctcccttaatatcagaagctaaatttataacaggtagcctctttttagagagttcaaatggtaaacaggaaacaagattattaccacactggtctcatatatatccaacttagaaaagtcaccagctgcctgaagttgatacttgaggctaaagtgtgtttccataatacccagtacaccgtcccatcccaactcatggtacacattcaacagagaaagagaaaaccatcttttggaccttayaggttgctagtacatctgcgcctgtacctggaatcaaaccaaataggagaatccttcttcacaaggaggttctgcagcatcactttggcattactcacgtatcttatatcaggggtggggaggttggaggtggagtaagcagaacactccacatacaatctcctcctttagaaagtggcttttcaaatattgtt

SEQ ID NO: 800679 - DNA, 639 bp, Homo sapiens
aaaaggccttgccctactggatcctctggatctaatcttgaatattttctcatatgatccctgagcctctgcagaaacgcagagggagtctcctctttttcttgttggatcttgaatgctttcaagacattttgtgttctatgagtgggctttttaatccctctaattattcattcccttaggtcctgcatttgggcccaatctctggggttattgctatcctctctaggatttgcttttgggaatttctgctcagctagcaggactccttgcccgggaggatgctgtctctcccaaatggtcacggctgcccttctaatcattcccctctcttccccagtaaacaaaatatattcatgattgacatcatctcagccgaagtataaaaattgggtcctaaaaattgatctagctgctctgctaaactgaggggatcttccaagagtggcctcatttcctttttaaaattcgtaacctcagtacttgttagargcacactcacaaatccaacttctccctgtcccacaaggaattctttaagacggtacgtattagacatctactgtttagaagaaatggggaaattctcaatgtccttcttacattgttctaattctttccttaagtttggataaggat

SEQ ID NO: 800680 - DNA, 630 bp, Homo sapiens
aagggcggagaaagggggcattggaatagaatgaacaagggagaggagcctcttacagctttttccttcctgtccccacccagccacgcggaacgctgctgactggtggctctcccactggatctctcagctgaaggctgagaatagctcccaggaggcgcaaccctccaccagcccagcttctatggggctcttctctccgcagctgctcctcttttcccctggaaacctctagtgagtggctggggctgggggtaggcctggtgctctcagagtggtcgccaggcagggagtgagggttgtggccggtattccagatgctgtgacttctggagggtgggagagatggcatgggggaggagaaaggacccccgagtggccctagttttggttaccgacagccccctcctcaccacccagcaycccagtgttcccactgcccaaagctgcccccaatggctcctcagacatccgtttctacctcaccgtgtatgcgaccattgctggtgtaaattccctctgcacccttctccgggcagtgctctttgcagcaggcacccttcaagcagctgccactctgcatcgccgcctgctgcatcgagtccttatggtgaggggctgggacctcgg

SEQ ID NO: 800681 - DNA, 630 bp, Homo sapiens
aagggcggagaaagggggcattggaatagaatgaacaagggagaggagcctcttacagctttttccttcctgtccccacccagccacgcggaacgctgctgactggtggctctcccactggatctctcagctgaaggctgagaatagctcccaggaggcgcaaccctccaccagcccagcttctatggggctcttctctccgcagctgctcctcttttcccctggaaacctctagtgagtggctggggctgggggtaggcctggtgctctcagagtggtcgccaggcagggagtgagggttgtggccggtattccagatgctgtgacttctggagggtgggagagatggcatgggggaggagaaaggacccccgagtggccctagttttggttaccgacagccccctcctcaccacccagcatcccagtgttcccactgcccaaagctgcccccaatggctcctcagacatccgtttctacctcaccgtgtaygcgaccattgctggtgtaaattccctctgcacccttctccgggcagtgctctttgcagcaggcacccttcaagcagctgccactctgcatcgccgcctgctgcatcgagtccttatggtgaggggctgggacctcgg

SEQ ID NO: 800682 - DNA, 540 bp, Homo sapiens
gaccttatctggaaataagggaggtcttcacacataacattcattaagaggaggtcatactggattaggggaggctctaaatctgatgactggtatccacctaagaagaaaaatgggccaggcatcatggctcatgtctgtaaccccagcactttaggaggctgaggtgggaggatcacttgagcccaagagtttgaggctacagtgagctatgattgyaccactgcactccagcctaggcaagagagtatgactctgtcaaaaaaaaaaaaaatgagagagagaaaaggtggaggaggaagaggaggaggaggaagagagaggagaaggagaagaagaagagatacaaagacacagtgatacacagggagggaacacacaatggagacagagattgctatgatatgtatacaggctcagcatccttcattcaaaatgcttgcaaccaaagtgtttcagatttaaaatgctccaatgagcactttatttgagcatcatgttggtgttcaaaaagtttcagactttggagcatttcagatc

SEQ ID NO: 800683 - DNA, 547 bp, Homo sapiens
aagcgaatagacattttagccacaggataaatgcaaagtacccagacttcaatggctcccggaaaacacaggcaggaaaacaaaagcaccttcctaatgaggcccttgttatcatttccccgtaccttctgtagtctaaaatcctggacccgaatacaaacgggagttttccttcgttaaacctttctctgactgggtatcttccactaactcattgctcatgtctacttcttgacaaaaagtgagtatattatacatgtaaaggaaaatgtaacaatctcaagcayccccaaactccttatgcaaaagggaaagttaagcctggagactgagtcatacaaacaaatagtgttgctagcattatgcatgcaaaaagcattttagagatgcttgtgactgccagaaagagtgatagaaacaaaagttaacacaaattagcctctactaggtatgcgtctctcacttcgtgatgcatccttttatttaaatcttcatcacagcttcatgagatagttttcattatcctcttatgtcgtggtggtgtttt

SEQ ID NO: 800684 - DNA, 547 bp, Homo sapiens
aagcgaatagacattttagccacaggataaatgcaaagtacccagacttcaatggctcccggaaaacacaggcaggaaaacaaaagcaccttcctaatgaggcccttgttatcatttccccgtaccttctgtagtctaaaatcctggacccgaatacaaacgggagttttccttcgttaaacctttctctgactgggtatcttccactaactcattgctcatgtctacttcttgacaaaaagtgagtatattatacatgtaaaggaaaatgtaacaatctcaagcatccccaaactccttatgcaaaagggaaagttaagcctggagactgagtcatacaaacaaatagtgttgctagcattatgcatrcaaaaagcattttagagatgcttgtgactgccagaaagagtgatagaaacaaaagttaacacaaattagcctctactaggtatgcgtctctcacttcgtgatgcatccttttatttaaatcttcatcacagcttcatgagatagttttcattatcctcttatgtcgtggtggtgtttt

SEQ ID NO: 800685 - DNA, 578 bp, Homo sapiens
tctgatgagataaggtaaaagttaaatgcaaaaatcaatgattatcaaattaatgatttcacttaactttgtagaattaagcgctttatattttcttacagtttgcatttcaaactgataaggtaatgtaaatcattgtttctcttgtaaaattggtcaaaatagtcaaatagcttcaaagttcaaaagtgtataaatccgacartgaatattttatggagactgctatggtttaatattagaacataagtaaatgaatattttttcaacactctctaatttaaactgtgtgcactcatcagtaagaaaattatgaaactccaatatttgtttcacaagtggtatacatgtattactacatacatataaaacatttttgaagataaaatataaatggatgaaattgaagcataaaatagaaattataatatgttcttcccacactccagtaaactgttttgtgtgcacctgttttggaaacaattgctccaatttttgaccccggttcccgtcttcattagattgagagcagttggcagtttacagtctcttttggccatgacacacaggctctggga

SEQ ID NO: 800686 - DNA, 795 bp, Homo sapiens
taaaaactaggtaaatattccctctttaccttgctgagctaatagggagtaagctgggtctctctatagtcgtgaggctggagataaatgctcttctaaagggaagacatttcccagccagccctttctgcctccctcaattcagcatccaccactctgtatctaggagaaattctgcaaagattcttaccaatacacagcattcttctttagcacttagagtttgcaatctttgatcatgtccctgggacctggagggtaagaggtrtctttgcttgcaccagcatctttaacttaatgttaacttttaactattatggacaccaattgcacttgtcagtgatagagtgattctctgaaactattttgcaatacacagggctatctgtggcgtactaaatggctccaagttattattactgagttcttaaatctatgctttaagatttgtctcatctctgatacacaagtttcatgttatcagtgtttcccgttgtcaatttgctgccttcaatatctccaacttctaacttactgcttctaacttgctatagacagggaaagcacataaacaaagcaggtaaaactgtgtctaaagtaaaatactggccaggtgtggtgggtcaggtttgtcatcccagcactctgggaggctgaggcaagaggattgcttgagctcaggaggtcgaccctgcggtaggctataattgcaccactgcactccagcctgggcaacagagaaagaccctgtctcaagaaaaagtacccaaggtaaaacctaaagatgtttttaat

SEQ ID NO: 800687 - DNA, 586 bp, Homo sapiens
gcataagacccccatttttatggaaagctactcaggagacaagatacgggtgatactgattaatgacaatttcaatctggccctacatccccatctcccaaaacactaattgagcaatgaattggaaaccaaattgcctgctctcmttttttttcttctccctgagcttgaaagttctttcatggaagggactacaagaaaggaagaaaaaacaaaagaggcaaggatcacaccaattctcagagtcaaccttgaataatcaagagttgactccggccgggcgcagtggctgatgcctgtaatcccagcactttgggaggctgagggggatccactttgggaagatcacaaggtcaggagtttgagatcagctggccagtatggtgaaactccatctctactaaaaatacaaaaattatatgtattgtatttttctactaaaaatacaacaattagacgggagtggtggtgggtacctgtaatcctagctactcgggaggctgaggcaggagaaagggttgaacctgggaggcagagtttgcagtgagccgagatcacgccactgcactccagcctgggcaacacg

SEQ ID NO: 800688 - DNA, 586 bp, Homo sapiens
atccttttaagagggatatgggaggataaagatgaaagaagacaatgtgactgtggaagcaaaagttagagtgatgcccccaagtattagtccgttttcatgctgctaataaatacatacctgagacttgggtaatttataaagaaaaaagatttaatggactcacagttccacatggctggggaggcctcacaatcatggcaggagacaaaagtcacgtcttacatggcagcagacaagagagaatgagaaccaarcgaaaggggcttggtgaatcttattcactaccacaagaacagtatgggggaaactgccccccccaccccccgccccacttcaattacctccttgatgggaattatctaccttgatgggaattacctcccacctggtccctcccacaacatgtgggaattaggggagctacaattcaagattagattggggtggggacacagccaaaccatagcaccccatgagctgaggaatatcagcagcctctacaagctggaaaaggcaaggaatgttttctccattggagcctccagaaggaacacaggccagacaatagtgtgaacttagcccc

SEQ ID NO: 800689 - DNA, 586 bp, Homo sapiens
atccttttaagagggatatgggaggataaagatgaaagaagacaatgtgactgtggaagcaaaagttagagtgatgcccccaagtattagtccgttttcatgctgctaataaatacatacctgagacttgggtaatttataaagaaaaaagatttaatggactcacagttccacatggctggggaggcctcacaatcatggcaggagacaaaagtcacgtcttacatggcagcagacaagagagaatgagaaccaaacgaaaggggcttrgtgaatcttattcactaccacaagaacagtatgggggaaactgccccccccaccccccgccccacttcaattacctccttgatgggaattatctaccttgatgggaattacctcccacctggtccctcccacaacatgtgggaattaggggagctacaattcaagattagattggggtggggacacagccaaaccatagcaccccatgagctgaggaatatcagcagcctctacaagctggaaaaggcaaggaatgttttctccattggagcctccagaaggaacacaggccagacaatagtgtgaacttagcccc

SEQ ID NO: 800690 - DNA, 588 bp, Homo sapiens
acatgccgtaaccttcaggaagagcagcctgtatccacaactgtatccacaacagtgggtggggtagggagatgagtagtccccctctccattcctgtgcctcagcactgaggctgcctgactgctggggtggaccatactcttccccatagggctgaacacaacacccacatctcctctagaagcagtgcagttactctcagtccataagcgggaagctcttgagcaccagaaagcacacactctgggttcctttgtgcaaaggggtgctcccttggtgcactgcactcttttcctttaggagcagcactccctgagggctggaacaagaggaatactgcagctctcttggagtcacccagccctatgtggctrctgcaattttagcagatgctggggaatgcctgtgaggaattggcaatgtggaaacacaagggctgagatttcctgggcagaactcagtcattcaatggatgcagcccaagaatcgtgcctgccactgcagtttgggtagagaaggaggacaagcaaccctgtacatgctggtatactagtgcaatgccctcaagaagtcaccaaatcactgcc

SEQ ID NO: 800691 - DNA, 633 bp, Homo sapiens
aaggctgtttttatttcttaaagagtaaagtcacatgcactgcaaggtactacagcttttaacttcccttaaaaaaattagatccaagtgcttgtctttctttaggccaaattaattacagctctttgacagacgttacacacagtacacacacagagaggcagaagaaaacctagtcactgaatggggctatttaagagacagatttagaaaaacatgcagrtattgaaccagaaagggctcattccataaggcaaagtcttgccactggagttacaagccatgccctcaggatgtataacaaaatggaggcttgatttaacaaccaaaactttgcagagaacacagtgatagttgttgggggtgggggtctggcctgctaaaggggaaaaagaactttaaaggttaactgcagacagggtggagaagagaaaagaaaaaaaaacatttaaaaatgcctggggaagaacctcttactcttatgcaagttcctccaccagggagaaaagtttaattactgtccgatggagctgaaccctttgtccagggaagcagaaggctgctgtggtgatgcatagctgggaacaagccagccagctgtgtgggacccttggaccatacgtcccagcccca

SEQ ID NO: 800692 - DNA, 634 bp, Homo sapiens
agaaacagactcagagcaagaggacagctttaactccctataatttcatctcctacccaaccaatcagcccaccaaattatccttaagaactctgatccccaaacgcttggggagactgatttgagtaataataaaactccagtctcctrcacagccggctctgcgtgaataactctgtcactatttttttttttttttttgagacggagtctcactctttcgcccaagctggactgcagtggcgctatcccggctcactgcaagctccgcctcttgggttcatgccattctcctgcctcagcctcccgagtagctgggattacaggcgcccaccaccacgcccggctaattttttgtatttttagtagagacggggtttcaccgtgttagccaggatggtctcgatctcctgacctcgtgatccgcccgcctcggcctcccaaagtgctgggattacaggcgtgagccaccgcgcccggccaactctgtcactattgcaattcttatgccttgataaatcagctctgtccagacagtgggcaaggtgaacacgttgggcggttacatataagcccaagttctaaccattccttagagttacccgtcactgagtctctcctgcatgtatgtgca

SEQ ID NO: 800693 - DNA, 593 bp, Homo sapiens
tgtacatagtttcaggttttcttttaaaagccttttggctcttgagtcaggctagaatcctagatatgaatcccacctctgctcattactagctgggtgatttggggcaaggggctgaacctctctgtgcctcagttttctcatctgtaaaatgtgattaacagcagcacctacctcataaggttgttgtaggattaaatgagttaatacagtaaagtgcctggcacatagtgagcactcaraaaaatgctggctgttatgaggaaagcaggatatctgggcaggattgacaaaggagtgtggccgcacaaccacacagatttctgtcaattgtctacgtaataactgttgcttccaagcagctctctggccaagccttcccctggggacccgggcactaaggacacgaggaagcccagtggaaaggccaggccaagggagcgctgaggtctgggcctggctgagcatctccatgaggggccctccgacagcaggtgggagggcgagatcagggcaaagggggcctgtgaggaagaggggatcattacagagagaaccaagaggagtacagggtcagctcagcccacttagca

SEQ ID NO: 800694 - DNA, 600 bp, Homo sapiens
tttattgttcgtttattgtctgacttgcctcccactagactgtaagtttcatgaaaacagaaatccatctactttttccccactgcccttgagcaatgcctgaaaacatcaggcactgggtattcagtaaacaaataccctaggatgagaaaagatgctgactttgcttagttatggagattctccctttcgcyctcaagtcatctgaagccctgttttcgctgggcatgctgccattcagccaaaagaccacattcctcaatctctgtctcttccagggagatgtggccacaggactcagttctgaccaaggagctgagatgtgatggctggagactcaacaccattctggacggtgagtggggagccacaccaaggaattggctgggtggaaggtctgattgaggctgggtccctgatgactgtggggccaacacaccagccctggaccgccagcctccaggtcttctaggtgatctaccttatggaagcctgtgatttgtgggtgttcccgtcactggcagctgaactaaatcctaacccatattgtgacctgacccccattgagtcaccctgacaggcagtctgcaggcttagcct

SEQ ID NO: 800695 - DNA, 612 bp, Homo sapiens
ataatcccagctacttgggaagctgagggaggagaattgcttgaaccgaggaagtggaggttgcaatgagccaagatcatgccactgcactccagccagggcaacacagtgagactctgtctcaaaacaacaacaacaacaacaacaaaaaaaaaaacggagtttccctgcacaagctctcttctcttgtctgctgccatgtgagatgtgcctttcaccttccaccatgattgtgaggcctccccagccatatggaactgtaagttcaataaacctttttcttttgtaaattgcccagtctcgggtatgtctttatcagcagcacgaaaacagactaacacaatgtgtgtttctgcrtatatcaacagtccactcctaggctggaagcagtggctcacacatgtaatcccagcactttgggaggccaaggcaggaggaaggccagagttcgagaccagcccaagcacacagggagaccccatctctacaaaaaataaacaagttagctgggtgtggtagtgagtgcctggagtcctagctactcagtgaggtgggaggatcacccgagaccagaagtttgaggttacagtgagctatgattgcaccactgaa

SEQ ID NO: 800696 - DNA, 550 bp, Homo sapiens
aataaggaaaatataagctttttaataaaaggtgttgagacaattgaacatgtcaaaaaattaagttaaacccatgctttgtaccatagactggaatcaatattaggtaggtaaagcacttaaatactgaaggcaaaccatcaaacyttaagataataatttaaaatatctttatgaaattgagtcttgggggattcttaatatatgaaagcattaaccctaaataagcagaaggcatctgtagcatactcatctgtaacagaaagcaggttggaactatggttaagatcacagactatgaagtcagtcaacttaggatagaatataatctacaccacttactagctgtgtgacctacattaagttatttaacctttctggaactcagtttcccaatctgtaaaatgaaacgaataatgatacctattcccgacataaaacaagataatctgtataatgtgcttagaaccttcccttgtacataagacctatgtaaacatatattatgtggctatgtaacagccacatgcataaaaaaattgttaaaatg

SEQ ID NO: 800697 - DNA, 550 bp, Homo sapiens
aataaggaaaatataagctttttaataaaaggtgttgagacaattgaacatgtcaaaaaattaagttaaacccatgctttgtaccatagactggaatcaatattaggtaggtaaagcacttaaatactgaaggcaaaccatcaaaccttaagataataatttaaaatatctttatgaaattgagtcttgggggattcttaatatatgaaagcattaaccctaaataagcagaaggcatctgtagcatactcatctgtaacagaaagcaggttggaactatggttaagatcacagactatgaagtcagtcaacttaggatagaatataayctacaccacttactagctgtgtgacctacattaagttatttaacctttctggaactcagtttcccaatctgtaaaatgaaacgaataatgatacctattcccgacataaaacaagataatctgtataatgtgcttagaaccttcccttgtacataagacctatgtaaacatatattatgtggctatgtaacagccacatgcataaaaaaattgttaaaatg

SEQ ID NO: 800698 - DNA, 482 bp, Homo sapiens
agccattttttttcctcctaagtttgcacttctccagttattcagaaggtcaacatttggctgaacattcattaattatgaagtgttggttttctgagaaagtgtcaaaatgtaagttttaatgaaaccatacagagtcatttttgaattgtaggctttacttagtttgttttaaaattcaaraaaatatttaaccattgagagcaatgcattttagaattatctgattttagctaatgagtagaattcatgtactaatttgtatgacctttggagtaatgatggggagagtatctcccagcattctaacgggaatatggtatattgtccgtcacgtggactaagacaagtacactcataccaacatttaggcttcaatatatacctatcaagttattttactcatgattcatctgcttcagaacctgaaaaagttggtaaatcaacttcacactctttccactacatgaaactcttgtgaa

SEQ ID NO: 800699 - DNA, 500 bp, Homo sapiens
  misc_feature 290: n = A,T,C or G
tcatcatgttgatcaggcaggtctcaaactcctgacctcaggtgatccacccgcctcagcgtcccaaagtgttgggattacaggcgtgagtcactgcacccagccccaacaatttttattccccaccttgctgagaaaaacccttaaatcttcaatgatgagatatatgaaatctgttaccaaagttcatgtggctaccacactattaaatgttgtttggctcgcatttgtcctcattttcatcagtagttgaaggaaagtgccatcttctkggcaaaatattataaganctgtggatttttattcatgtataagcttgtttcttgacataatcaaattttgctcaaatgtatcaactaattagaaagcaatttttaatggctcttcattatactcacaagtatactgtggataacactggaaaacggatcaactaaggaaaagatgagcaaatacaacaggcacaaatgatggctttatatttacagtaaaagtttctc

SEQ ID NO: 800700 - DNA, 590 bp, Homo sapiens; identical to SEQ ID NO: 784933

SEQ ID NO: 800701 - DNA, 610 bp, Homo sapiens
caaaactgtaaactacatacagcatggctctaatgaatcaggttgacagggattgctaatgcattggaacatttctgaatgttcagagaaatttgaatttagtaagtgccatatctgaaaccagtacagaacctgggggtggatagttggtattggtgggtggtcagaatttgacacccatccccaaacttcaaaagggatttagagaagtatttctaataagactgaagttaaaaggatatgacaatgggaataccaattggtttaatccttttgaatggcaaattattattaagaattagctagcattaatttagtactttctatatgccaggaactrtattaatttatttatatataatttaataactgaattacttactatgtgtaaggattcttaaaagtattaatggggccaggcacggcggctcacacctgtaatcccagcactttgggaggctgagatgggtggatcacaaggtcaggggatcgagaccatcctggctaacacagtgaaaccctgtctctactaaaaatacaaaaaattagccaggcgaggtggcaggtgcctgtagtcccagctactcgggaggctgaggcaggagaatgg

SEQ ID NO: 800702 - DNA, 610 bp, Homo sapiens
caaaactgtaaactacatacagcatggctctaatgaatcaggttgacagggattgctaatgcattggaacatttctgaatgttcagagaaatttgaatttagtaagtgccatatctgaaaccagtacagaacctgggggtggatagttggtattggtgggtggtcagaatttgacacccatccccaaacttcaaaagggatttagagaagtatttctaataagactgaagttaaaaggatatgacaatgggaataccaattggtttaatccttttgaatggcaaattattattaagaattagctagcattaatttagtactttctatatgccaggaactgtattaatttatttatatataatttaataactgaattacttactatgtgtaaggattcttaaaagtattaatggggccaggcayggcggctcacacctgtaatcccagcactttgggaggctgagatgggtggatcacaaggtcaggggatcgagaccatcctggctaacacagtgaaaccctgtctctactaaaaatacaaaaaattagccaggcgaggtggcaggtgcctgtagtcccagctactcgggaggctgaggcaggagaatgg

SEQ ID NO: 800703 - DNA, 551 bp, Homo sapiens
cacagaaagaagacactacaggatccagaaatacttaaataagataatttgtggaaatcttatcccttaaatatcttcagggagaagtatccttagcaacttcttctttctataggcaaatcatggctgggtaggtggtggtcttctgcttccaagaaaccggcaatcaacaactcaagttgcctcacttctcatatacaagtcccagcaagagcctagatgaattcactaatgcacttcatcctcctgccctcttcctggttcaggcaataataatcatagatcgccattgtcaattcttttttgttagacatgatgctttttaacattatttcatctaatgctcacagaatctctatgtggttagaaatactatyactttacaaatgaaagaacgcaaaataattgagggatgtagataactctctcgagataatgcagtaaacaaagggtgatatcattttgctgtgtccccacccaaatctcatcttgaattgtagctcccataattccacgtgttgtaggagggacctggtaggagataattagat

SEQ ID NO: 800704 - DNA, 569 bp, Homo sapiens
  misc_feature 467: n = A,T,C or G
ctcttgatctggtctcagctgacctcatgggacaagggcaggctctgagaaatgaggcctgggtcacctctaggtactttcttggttcaagaacctttggctcaagccaggcgtggtggctcacacctgtaatcccagycctttgggaggccgaggcacgtgtatcacttgagctcaggagttcgagaccagcctgagcaacatggtgaaaccccgtctctaccaaaaatacaaaaattagccaggtgtggtggcgggcgcctctaattccagctacccaggaggctgaggcaggaggattgattgaacctgggaggtggaggttgcagtgagccaagattgcgccactggactccagcctagctgacagagcaagaccctgtctcaatagataaataagtaaataaataaatagtaacctttggctctgattcccttttgggcctcagttcccacccccccacccncggcaccagtcaaaggggcagatcagacgggtctccagcaccaccacactagagtgttgccaccctcactcctgggtccaggtgagtggtcagggttccagt

SEQ ID NO: 800705 - DNA, 602 bp, Homo sapiens
gcccgtggcaccctcctcacccctccttgccttcaggttcttcgaggacctggagcagcggcacaaggcccaggtgctggtcgaggacatcagtgacatcctggaggagcacgctgagaagcacttccacccctacatcgcctactgctccaacgaggtctaccaacagcgcacgctgcagaagctgatgtgagtgggcggccccgaggcccgcaggggtggctcaggagcatcctgcaccctggtctcccaaagcacattcctgctcccagcccagcttytgcaggtcctgcctgattttggtacaggctggccatgcagagcctggaaggacagccttgtcctcttgcagaagcagcaacgccgccttccgagaggccctgagagagattgagaggcggccggcgtgcgggggcctgcccatgctctccttcctgatcctccccatgcagcgggtgacccggctgcccctcctgatggatgtaagtccacggcctgagggtggggccgggcataccatcctggggtcccacggccagagccctgccccggatggagcattacgtgcttgtgaccttctcgtccaggcttggcctatgata

SEQ ID NO: 800706 - DNA, 572 bp, Homo sapiens
ataggggaaaccacccccaggatctaattatctcctaccaggtccctcctacaacacgtggaattatgggagctacaattcaagatgagatttgggtggggacacagcaaaatgatatcaccctttgtttactgcattatctcgagagagttatctacatccctcaattattttgcgttctttcatttgtaaagtratagtatttctaaccacatagagattctgtgagcattagatgaaataatgttaaaaagcatcatgtctaacaaaaaagaattgacaatggcgatctatgattattattgcctgaaccaggaagagggcaggaggatgaagtgcattagtgaattcatctaggctcttgctgggacttgtatatgagaagtgaggcaacttgagttgttgattgccggtttcttggaagcagaagaccaccacctacccagccatgatttgcctatagaaagaagaagttgctaaggatacttctccctgaagatatttaagggataagatttccacaaattatcttatttaagtatttctggatcctgtagtgtcttctttctgtg

SEQ ID NO: 800707 - DNA, 565 bp, Homo sapiens
tcagtaaagaaatgcatgcacctattttaaaatatctacattggaaaatagtaatttccagacatatctctgcacactctcccattctgctactttttggcccctctttttaacttcttaggccaacagaacactgtcattttattgtttctctccaccactgtgtgcattttttattgcctcatttgcataaggttgattctccagtttttgataragggaatggggactctgagttctcatatatctgaaaatgttgctgttttaccctcacacttgattgaaaggtgatctgcgtatgattcagtgatgaacagcagttgccccgagaattttgaaggcattactccactatctctagcatctaatgttactactgataatttaaatgatatttcaatggtattcatttatatggtcaattttgaagttgatttttgtataaaaattttccaacgtacacaaaagttgcacaaacagcagaaagaatttttcctgaactatctgagaataaattatcaacctaaagcctcaacaccctgactactttagtgtgtatttccta

SEQ ID NO: 800708 - DNA, 599 bp, Homo sapiens
gataatactctttacattgaagtctatttttttctggtattaatataggcactccatattgcctatgtttattgaatgcatggtataattttttccattattttgcttcaatcaatctgtattttcttaacaaaaagtttttctcttatggacaggatataatggggccatacatttttatccaggctaaaaatctatatattttaataggacttaagcccaacttaattgacaattatatttgttataaatagattacttctccccattaaaagatggaaattcttagcccagattttgaaaatcaagacccaactataacttgctatgtcttttctgtttgtctcacctgtwtttttgttcctgtcttccttattttctgtcttctttaaggttaactgatgttgttataaaatattcctttgaattcctctattggctttttaaatatacatttttacattatttttagtgtatgctgtagggtttacaacattcattattaagtaccacaatctacttacaattaattttataatacttctaataaagtgcaagaattttgaaaaatatgacttctgtttatttacccttgtcct

SEQ ID NO: 800709 - DNA, 620 bp, Homo sapiens
aggacacgtttacaagtaagaagcaaggaaccaacaagtctgtgcacattccagaggctacgaggggttttatgccctgagccctgggttccatccaagccacaaggggttctatgccccgggcttagattgtggtgcggcagggcagccttccaccctttggcacagagcttggtgttccaaaggccacgaggggttttagaccctggaccctggacatcttcctagactcttttacattatgacagataagccagtcctgcctcagctcttctaccaacagcrcacgcctgttgatcccagacagagtggctcacgtctataatcctagcactttgggaggcagaggcaggtggatcacctgaggtcaagagttcgggaccaacctggccaacatggtgaaaccccatctctactaaaaatacaaaaaaattagccaggtgtggtggcatgcgcctgtaatcccagctacttaggaggctgaggcaggaaaatcgcttgaacctggagggtggaggttgcagtgagttgagatcctgccactgcactccagggtgggcgaaagagcgaaatccatctcaaaaaaaaaaaaaatcaaaaggtgtgaaggcaagttaatg

SEQ ID NO: 800710 - DNA, 621 bp, Homo sapiens
tcatgcctggtgaatttttgtatttttagtagagacgaggttttgccatgttggtcaggttggtctttaactcctgacctcaggtgatctgcccagctcggcctcccaaagtgctggaattacaggcgtgagccactgcgcctggcccagttccttttttcatacaaackttttgctcattatttcacttgcagggcttcctgactgctctttattgctctttttgtagagaatatcaagaggtatctttccctgggtctctgacttctaacgtcttacaaaatatggcagaatagagaagagatatacacagtgctgattttacaagggaatgtgctagaatgttgtcctggaactatgttcttatgccaccctagaacaatgtttcaaaatctaatgtttaacactgatatttaatattcacatcaaataataaaagctgtttatttgcatttatatacattttaaatactttcctatataccttattttatcgaatttaagatagcaccaatataagtggtactttttacttttgtattccatcaagagaaacaaagcttcattggttgtaagatacaccctgatttcagagatattaaagtgggaaaaatgcacacc

SEQ ID NO: 800711 - DNA, 667 bp, Homo sapiens
aattcagccaagcgcagtagctcacgtctgtaatcctagcactttgggaggctgaggcaggaggactggggtcaggagttcgaaaccagcctggcctacatggtgaaaccctgtctctactaaaaatacaaaaaaatggccaggtacagtggctcatgtctgtaatcccagcactttgggaggccgaggcaggctgatcacaaggtcaggggttcaaatacaaaacaaattggccaagcgtggtggtgggcccctgtaatcccagctactcaggagactgagaaggagaattgcttgaacccaggaggcagaggttgcagggagccgagatggcgccactgcactccagcctgggcaacaaagcaagactccatctcaaaaaataataataataataaaataaaataaataaaaatacaaaaaaattagccaggcgtggtggtgtgtgcctgtaatcccagctacttgggaggctgaggtaggagaacsacttcaacccaggaggcagcggttactgtgagccaagatggtgccattgcactccagcctgggcgacagagcaatactctgtctcaaaaacagaaaaagaactgaaactcaccagatcaccacatccagacaacggacaatgagatgctggatccctcattcatcatgattgcttcct

SEQ ID NO: 800712 - DNA, 537 bp, Homo sapiens
aaagttaggtcaactcactgcatacatgcacaatttactgaactaaacaaattagttattccttaaaacagacctaattaatgttaatggacttttctgctgcatatatacaaatatatattacctgctgaatgacactgaacrtgtacaaattgaaggcctattaagatactactgtaaaataatggctgtaaaataatgtctgaaatgctaaatcatgatgaggaatgtaacacagaaatttatacagtttacattctgtaaccgactgcttaccctaaaatagacttacaagaaacccaagcctagccaatgttttactattgactactagcaacatacatgtgcacacacacatatattataagtattcaaaatttaaaaataatatcaaaacaaattcatgtcatcaaggtgcttggaattttacctctgcttatattaataaaatataaattttacatattgcaaagcatattcatttttagtattctatcaaatttcaaacatattaatatttatattaatgttttagaa

SEQ ID NO: 800713 - DNA, 584 bp, Homo sapiens
tataacaaacccagtctcacaataactaacccactcctgtgataacagcgttagtccattcataagggcagagcccccacgacctaatcatttcttaatggtcttgcctctccacacggttgcactggggattgtttccagcacatgaattaggcgaggaggggtgcacattcttyttcttttgtttgtttgtttgagccagggtctcactctgttgcccaggctggcatgcagtggcacgataacagctcactgcagcctcaaccttctgggttcaaacaatcgttccacctcagcctcctgagtagctgagaccacaggcgtgtgccaccataccgggctaatttttttatttttgtagagatgaggtctcattatgtatcccaggttggtctcgaactcctatgctcaagcaatctgcccccctcagcctcccaaagtgttgggattacaggcatgagccaccatgcgtggctgtttgtatttctttaatgactagagacattgaacattttttcattcccttatttgacactgtgtgggttaatactgagcgtcagcctgattggatggaaggatagaag

SEQ ID NO: 800714 - DNA, 414 bp, Homo sapiens
gagccacttatgagtccctaggctttctgcacgagttgtaggtgtgggtaacagtgcaatagaattaggcgtacacatcagccaactgttcatgctacttacatgattttagggactgctggtgccctcctacaaaagacttcaattgagaccactgggcatgcccggtgatggcgaggtgtgtcaactcataccctgatcacataggcagtattcactttctgtaggsaccaaatagcaagcaccacacttcaagagcagctacaggtggaaggcagcttggctctaccctcaaaccctggaggcctccaccaagattcccctgctgctgggggcttgctggaagttccaaacagtggcctcgttcgctagaggcttggatgccagcatcctgctgggacacaggaaccaagt

SEQ ID NO: 800715 - DNA, 593 bp, Homo sapiens
ccccatagggaataaaaaccacatgatgttcacatagaagcttgtaagccaggttttgctgctaagagttaggatttcagaagctagaatgttctacttttgtatgtgtttgaagtttccatatggggaagttcaggctattagtttgaccctgaggttaagaaatccttcaacactaaagtcatgagacaagggaataaaaagatagaacaagggtttaggtctgctcccttctggtcatatcagaatttgattggaagataagtcagataacacggaaggcaggcagtatctrgaagatgtagggaatacctacaaagtgagattaaaatgccagtaatattaagtatattaacaggtagctcagaaaagagagacaagtgacttacaagtgaaatatgttgttctactaatcagaactacaggtttgtggtcatgatttaacctatcaagttaggaagtctaggttctagtggagttgtggaagaaatacgaacaccttcagcttggagttgtgcttagtgaccttgagtatgcctgtgccccagtgatcccatggagaggtagatacctctgcctgataagtacataag

SEQ ID NO: 800716 - DNA, 597 bp, Homo sapiens
ttggcttcaactttctgctgaatcttgatcatcttcatttttttttcatattctgaattccatttctgtaatttctgccatttcagcctggctaagaagcatttctggagaactaactagtgcaggcattcattgttaagacactctggctttttgatttgccagagttctggcttattctttctcatctgtgtgtgccaatattccttaagtctttaaagktgttgtcttttttgcttttatcttgtttttatgctcttcggggtttcattgtggtataaggtggcttcagtcagctggcttcatttctggaagattttagggagccaaggctcagctcagcactcttgggatttatgccataactctggaaggttggtatcaggcccctggctttgtcaactggccacttgagtttaggaacctgctgtgctagatgggtcacagcagctggtcacaatacttcaacagatggtgccagccaaagtgcttcactgcagcagtggcaatgggaactgtgctcatgtgcatgtaccaatagcaggcagtatggcagggtgcactctcgccagctcgagtggggcaccggtggttgcc

SEQ ID NO: 800717 - DNA, 650 bp, Homo sapiens
tttattaatattcagtggaacttctggtcctctgaacataatttgtgaaatactagtaaattgaattcaggtgcttcaatctaatacttatgaaaataaaagttgtacgtttcagcaactctatgtatacagaaagtatgtccacaattaaaaataaactgaaaaatcaccactcrtccatagaaacaaaaataaacacattacctcccaccacaaaaccttttccttagagggtaatatatttcaaacagtcttttaaatggattcttcttttcaaaaggaggaagatggcttgtctaggacatttcaactacccagtgttcttgaagacagtaagaagaaacatgttttggtagtaaattccacattatttttcttttcgtttgtgataataagacttgttttccatgaatttttggagaaaataaatgtcaaaggctttctactgtcttttatttctaatcatcgtaataaagaatagagagaaaaagaggaagagaaaaggagaaagaaaaagagcagaggaggaaatagcaagagaaaagggctagcagattccaggtgtattacctacgatgaataaatggtatatttatttagacctttttactattgcatatcaattactgaaattctcccataagttttct

SEQ ID NO: 800718 - DNA, 627 bp, Homo sapiens
gaaggctaatctataatcagaaaaacgaaggttacagctgcctaccttacagctgcctgtcacatggctcagaccccataatcacattcctttaaggctcaaaataacttaaagttccaacagctcggatttcaaattacttattttcacagagcccagattaaggcagtggcagtaggttggatayaagaaacattttagaggaagaatcaatagaatttggctgggaataaagtggatagagaagaaggattcaaaggcaactgagattttgcaactgagtaggaagttgagggttcccttatcaaagacaatgtaggaggagcagacctatcacctgcacatggacactaacccagagaatggggatgatcttggcaaggaaacccagagagatgctgtggcctctctcaagctacccagcaagacagtatcacagcccggatcataatcctggggtcctaactcctggtgtctctttttcatcttgtcctcatactttttccatgctcgcttcacaaaatattggttattttctctttctcaatggaagtgaaaaactgactctaataacactttcaggagagtctaacaatagctgtaaattctatctgctttacactttaa

SEQ ID NO: 800719 - DNA, 512 bp, Homo sapiens
gtgcgtgtgtctattttcccctctgtgatagtgacttgctccattttttgccctttcgtcatacctggtacagtgtccagcacagagcacaaacccaacatgagctgaatagaacaggagtctggatatagatgcatagaattgcatgttgaaatgaccttaaaagtctcccaggcctccctcctgcagctgactcttgaagacccataaaccttcttccacattggccaatcagcaccctccaagcacctccaggggaagagaactcaaagctgtgctggccgttagtcaagtatctggtattgctctggcttctgggttcctrcaacttccactcactggtcttgtctttactcactggggccatggagaatcggtccagcctgtcttccccatgacaatccttccagtatctgaacacagctctctggtgtctctgagctttctcatatccaagctaagcctcctgagctgcttcaaccattcctcaaggacatgatttagtgtccctc

SEQ ID NO: 800720 - DNA, 512 bp, Homo sapiens
ctacttagaaaagttgtcctcagttatccatagacatttgttaatactggcatgattgaagtatgctcacagtttctgcttttcaaagcttataagggatactgaccattattaaccagatctctggggaagtctctacyctgaggatgggcaccaaaacttttactttttttttttttgagacggagtctcgctctctcacccaggctggagtgcagtggcgcaatctcagctcactgcaagctccaccttctgggttcatgccattctcctgcctcagcctcccgagtagctgggactataggcgcccaccaccgtgcctggctactttttgttttttttgtatttttagtagagatggggtttcatcgtggtctcgatctcctgacctcgtgatccgcccgcctcggcctcccaaagtgctgggattacaggcatgagccaccgcacctggactacatttttttaacatttaaaaaattcaggtggcaacatgtacctgcactgggcat

SEQ ID NO: 800721 - DNA, 475 bp, Homo sapiens
ctcggcaggctgttttactccaggaaattgataragagaaaggaacttggccaagctatcaagtgcagatctagaatcccaaccaggatctgtctgccccagaggtggtctcttccgtaagaagatggtgccttctatgggtgtttcctgaacgaggctggtgccaagcacagagagatgaatcagagctggtttctgtgctcaagggaccgtcttgatctgggggctcagaggtccacctcggtacagtagccatggggaagaggagcccctaatggaagggtcagaaaggctctctggaggaggtaatccctgggcccagtaagagtgtaacacctagtaatccctcaaattttgaaataaactgaacaggtgaatgaagaaggaagaggattccaggctgagagcactggacgtggcaactgttcagaggagaggcagtcttcaagttctacattcattcagaaaaatgttt

SEQ ID NO: 800722 - DNA, 629 bp, Homo sapiens
tgcccagccggattaagttttataagaccaaaaagcctggatgatcacctccttcacatagtctgttaagaacaagccctatggaatactattcagccataaaaaagaatgaaatcctgtcattcccagcaacatggatggagctacaggacattacgttaagtcaagtaagccaggaccagaaagttgaacaccacatgtttattcatatgtggaagcttaataaataaataaagctatctcaaagaagtaaaaagtagaacagcatatactagaggctggaaaaggtagggggaaaagagggatggggagacatttgttaaaaggtacaaaattatagctagctaggaggaataagttttggtgttcaataccactgtaggatgacctagctaacaatacacattatatagcttcaaatagctagaaggaggatattgaatggtcccaacacaaagaaatgataamtgtttgagatatggacatgctgattaccctgatctgtcaccatttattatatgtatagaagcatcactacatactctgtgaatatgtacagttgttatttgttaattaaaaaataaataaaataaaagttaaaccaacgaaacgaaaccaaaccaaaagag

SEQ ID NO: 800723 - DNA, 588 bp, Homo sapiens
cttggagtttggtggattgccttctcgtgctcaccaatagtttacaggaagaaaagcaatacaccttacatggctgctgtatagatttggtaccactagcaaagtcactacttaaaagcaaatttgaagaaaatatgtaataattggtttaaactggattcaatcagtcattaaaatgtggtggtcaggattataatcaaacaaattataataatggaaatattcagattttaaaacaatgaagtgtattgtgggaacagggaagccatctgggaaatactgctattatagccaaggatataaacactcatttgtaacagtggcattgagagattacagctactaaagagtgtttkgttattcaaagcatctcttgactatatgacttccaagaaaatgtctcgtcagaattgtgaactatcggagaaatcaaaaccacttttgtctttaaaaagccacataatgaacccactaatgaaattctaacaatatacttcatactgaagtagaaaaatacccaaaaggaacagcttcaacttcaattaggtggaaggatactacaaagatacttgaactttggtgcatttg

SEQ ID NO: 800724 - DNA, 592 bp, Homo sapiens
gttactacaattacttgttactacgataatctctttatcaatataaacttaaattgtatgtttcaatatttgtagcaagtatgtgggagacatagactaagattagcccactctttaatctatactttttggtaagtcctccgaagttctatttaaacatagaaacctacagtatatcacccagtcatatctcttgacttgcggagaaattctactaagaaagtgattctgacatctgagaggtgtaaaaacaaggtgcaaaagwtaagtgttacaatgttcaagtccgtcactgcagttgtcactatagtcaaccctactctggtggttcagtggctcaatgacctaagccatttaatttcccccttccctttgttttcttaaagtgtgtttgatttaaccttcttatcctgagcagcacaaagtcagagataaccaggtccaggcaggcttgtgtctttgcacaatgtcagacttttattgatgcaatttcaatcctaaaagcaagcctcatggggttgccaaggatgcaattgtccttagtacttcctgttcacagtagtcagagctgtgagcgcacaggctcaaacaa

SEQ ID NO: 800725 - DNA, 645 bp, Homo sapiens
tgaaattttttttataatcatttgaacatttgaaaagcagacaaagcaaaaatacagactaaggaaatatctgtattattctttgagtattttggtaaactgtttctgtgaacacttttataaataaactctttacccttcctgggagccttgcaattgtgactgacagttttcttagtgtgtccggaattggtgggttcttggtctcagtcacttcaagaatgaagccacagaccctcacggtgagtgttacagttcttaaaggcagcgtgtctggagtttgttctttctgacgttcggatgtgttcggagtttcttccttctgctgggttcgcggtctcactggctaaggagtaaagctgcagaccttcacggtgagtgttacagctcttaaagcggcgcgtctggagttgttcgttcctcctgstgggttcgtggtctcgctggcttcaggagtgaagctgcagaccttcgcagtgagtgttacacctcataaaggcagtgtggacccaaagagtgagccacagcaagatttactgcaaagagtgaaagaacaaagcttccacagtgtggaaggggaccccagcaggttgccactgttggctctggcaggctgcttttattctcttatctggccccaccaac

SEQ ID NO: 800726 - DNA, 549 bp, Homo sapiens
gttttgaaatggccctgcaaaaccatctcttgtggggaaaatttgcatctgtagagaatctccattaatgcagcagaccttcactttgtaggcctatgtctttcccagatctagaacagattaaaagagtctaacctttaaggtctgaaaagacacatttataattgattctctctgaaggctgctacctggaggcatcatctgcctcatgagaaccttggcctscatgactcccccttaccttaactcaagcttttacttcaagtctttaggcaaagcttaactctttcaaccaactgccaatcaatcagaaactctgaatccacctatgacttgtgaatcaccctacttcaaggtattctgcctccttaggctaaaccaacttacaacttccatgtattgacttatgatttacctaaaatgtattgacttaatggttttacctaaaaggtataaagccaaaccataccctggatacctcggatacactttctcaggactgcttgagactgtttcctgagccatagtcactcatattagttcagaata

SEQ ID NO: 800727 - DNA, 623 bp, Homo sapiens
ctggggtataacattcatggggtattgatagaagagcaaagaagaaagacagtagtagtcacatgataaagaacttcaaacccatactacagagagtgtaccctaaagataatgaagaacatttatgtgactttaagtaaagcaatggtatgatttaatgtgtaattcagaaatctcaccctgctcacagaggggagaaatggattataaaggggcaagactggctggaagactgattgggaatctacagtaggaatacaaagataggtgttggtaggctgggccaggtggaagctgtgctgatgaagagaaattgacagatttaagaaatctgtgggcggcaagatgacatttcctggtgatggattcagtgtgagaggtaatggagccaaagatgatcctgattatttctggcttaggcaatggggtgaayggcagtgtcctcaactaatacaaggaacactggaagagaagcaagtcagagtgtaaaaaaaagacaatgaatttaatttttggacttttgaggttaagatatctgtgaggaattcaagtggagatatccaggaagcagctagatacgtggacctagaattcaggagagtggtctgagctagagacatagc

SEQ ID NO: 800728 - DNA, 610 bp, Homo sapiens
gaagccggctaaatcccaccaaaaccaagatagccatgagtgacctctgattgtcctcatggctacactcccaccggctccatgacagtttacaaatgccatggcaacatcaggaagttaccctatatggtctgaaaaggggaggcatggataactcaccccttatttagtatataatcaagaaataaccataaaaattggcaaccagcagcccttgagtctgctctgtctatggagtagccattctttcattcctttactttcttaataaacttgctttcactttactctacggactcaccctgaattcyttcttgcatgagatccaagaaccctttcctggggtctggatctggaccactttcctgtaacacctccctgccccttggcatcatctgagtttgggcttgctggctcttcctgctaccacttcagctgaaatattggttggggtggtggggggtggggggtaagtcacaggactggagacaggatgggttgggagggtagaggctagggatgtttattctctggtgaaaggaaaggcaagctagtggtatagaacagtggtctccaaactttgattgcacaccccatcagtaaaataatg

SEQ ID NO: 800729 - DNA, 426 bp, Homo sapiens
tattattccttttcttatattaattttatctttggtttgcttttaattttctagttctttaaggtgcatcatttggttatttatgtaaagttttcttattttttgaactaggcacttatagctatagatttcccttttagtacttcttyctctgtgtcccatagtttttgataagttgtgtttccaatatcatttgtttcaacaaatgtttaaatttccttcttaatttcttcattgatgcattggtcattcagaaaaatatgtttatttttcattttttttacagtttctaaaattcctcttgttattgatttacagtttaattccattgtggtaagagaagctgcttgatattatttcaattttttgaatgttttaggacttgttttgtgacttaacatatgatctatccttgagaatgattca

SEQ ID NO: 800730 - DNA, 627 bp, Homo sapiens
tagaagagactctaaccatcctaagtagggcctctaaccccgctttataaacttttaattgactcccatcttaacagttgcaatccatggaggaatgcttgataacctcggtgataagataaaaaaccaagcatactagaagtgttctctaaaattaaaaatacagtagttrctagagaaaaattttagtccaaaaatccaactatagaaacatagaatgtgagaggtagcacataagaaataagtcatggggattttatttcatggaccagcaatatgatgataaaagccatctaacctgttggaattataggtcacatcaagagaattctagtgtctagaaccaaagaaatgttagcctcactctaatagacaatacacttcaggaacgaaataagcaaattagattgtgttcagagatgaataaccaagatggcagagggaattaaaataattgctcatgattaccctgggaaatagaaggcttagaaaggacaacacagtttcttcatatgcttaaagcaatgtgaatagggaattggactcaaccaacatagcccgacttattaaagccaatgggtagaggttacagagaaagctattccagtacaaccaaacaaaaaaaat

SEQ ID NO: 800731 - DNA, 583 bp, Homo sapiens
acaggcccataagagacagatttaatcagattacagaagacttccctcccctcacaacttaccaccacaccaaaagggcttaaatataagaataataaattataaagaattgaaagacacaaagtaagtgagacaaaaaatgacagtattaaaagcagaaatacacaaattctcaatattgttggagacttcaacatctctatttcagtaattactaaaatgccaattatccctaacttgatttataggttcaatgaattcacattcaaaattccagaaaactattttgtaaatattagcaaattgactctaaagtttatatggaaaggcaaaattcctagaatagatgacactattaaagagaagcaaagttggaagactaaacttatctaatttcaagacttaccataagttaagacaawaatcaagacagtgtgttattggcaaaataataaacaacttgatcagtggaatagcatagagagcctagaaatcaacgcacacacctacagttacttgatctttgacaatgaagggaagtcaatgaagaaaagatactccttttaataatggtgctaggaag

SEQ ID NO: 800732 - DNA, 653 bp, Homo sapiens
tttccatctttgctcaacatttccaaaatattctataggagggagaaatgtacgcttagttgttgagaaagatttttacataatgaaagttttcaggaattttgttcaagaagatttcactgagctcagatccaccccagcatgatgtttamggtcagagaaacgttcagcaatgttaatgctgccaatctttctggtcaattcttcacaaattatattttaacctcctttcagtttgcctaaattttctataaaattaaaaaattaaacagatacattattcttacttagataatacattattctgctttacagaccatcacaattttttcttcaataaaatataacaaaaagttatatgtgggaaagggagtatttctacattttaatccattttaaacaatacaaatattcagaaatactactagattttaattatagctcagtgataagaacaaagacctatacactgaatctctctagcaggtccttgtgtaaatacttgcataaagtagatgagaatactatgtttatcttagtgaaaacactttccaccctgaggaaacatgtcatctgtttatgtgatgccgccagcaggtaaaccactacagaatcagacttggtgagatggtgatcatgtatttagtaatatc

SEQ ID NO: 800733 - DNA, 581 bp, Homo sapiens
ttgcagattggctttgtttgggaaagccctttaccagtcagccaacccagagatctgggaagcctgtctgggcatggttcacaggtgggcttgctacttgggattttgggcaggctggcatggtgccttggttagcaggtaggcaggcctaatgcctgagtctatgggattcagcctggagcctggattcactwgggtagacttttttatttggtccatgggagtgggctttgcacttcagtctgcagtggctggccagttgctggggtagatctggagcctgtgttcatgagaactagcatagcactgagggttggcatagagactgtttatgagagtgggcctgggtcctggttccaaaggggtggcctgaagcctgagtctacaggggtggtcctagagactcagtttatgagagccagcctgggactggggtctactggagtaggcttgaaccctgggtctgccagaacttgtctggacctgtgtccattggtgtctggatctcttggaacttaactggagcctgacgctactctggcactggggtaggtgttggacctgtgtctgtaagagccagt

SEQ ID NO: 800734 - DNA, 702 bp, Homo sapiens
gactggaaatgtggatcctgtcagtaccactgaactcacttggaaaacgcggctgcaatgtgtcacgcacaggcacactggccagaggccgggacccaggccctgcggcggtgggagctgcgaatgcactgactggacgtgggccctgtcagaaacacttcatccatcagtgcgcagcccactggggcccggagggctccatgaaagtcaccgggccctgagacaccaggaatatgcttcctgtgctccaagatcacccagtacccctctggtcccttcaaaggctgtgattccayctctgaaaatgggttagagaaacctggcattaaacaaagatgatgagagtccaccgcttcagactgaactcctgccctaggccccaacagaccaggccaaatcaaaatggaatcactcatgccaaatgtcacatcatcaaactgaaacttgaaggaagcaaatagggcccaaaacagaccagtttttcctgaaaacaggagattccagtctactgagtcagcataataaggaagttacgttctccaaaccttccaaaacaagtatcctcatgctaaccagtcagcttttttcttgtttccctgttcccaccttaccaaacccactgttctgctcttgcccagtgagatctctcattctgtttaatagaagggaggctgccctggttcatgaatcatgcataaaagc

SEQ ID NO: 800735 - DNA, 511 bp, Homo sapiens
ctttatgttttagattttccatccatacatctatctgtctgtcttatctatctacacatgtgtatgcatatatgcatatattttttctgcacttatatttttcatgaggttgaaatttctcagtctttgttgctgcatgtggttcatgatgctattttattttattttgttgcatatatctgtattgkgggttgatcttggacagttaacattattatgatgcttcccttgttggtatatgctaatctatctatgctcttgttagcccactctcaatgcaaacagtgtttgctcaagagtaggaactgttttcatttgcttgagtctctgatagaaactattcagaggatgacattgccttgctcttgacagctcaaactttatctgattgggtgtattttgggaactgggagaagtaattggacttcaaagccccaattgttatcagtggattctcagctagaataaaaaaaaatggaaaattcctgatcaaatgtttaacagcagtgga

SEQ ID NO: 800736 - DNA, 611 bp, Homo sapiens
ttgtcttgggggccattgggaaagaaagttatacccgtgaaagggaatgactttcattttccctctgctccagaactcttaatgactcgcccaggactagctgtcttgcttttgaattgtggcagcttaatcacgtcaatcactgtaggcaacagcagtagtatatgacatctaaaacccaccyttcaggccaggcctggtggctcacacctgtaatcccagcactttggaagatagaagctggaggatcgatagaggccaggaggttgagaacagtctggcaacatagtaagacctcatctctacaaaaaaacagaaacgcccaaacaaacaaaaactagctgggcttggtggcatgtgcctgtagtcccaggtactcaggaggctgaggtgggaagatcacttgagcccacttgagcccaggagttcaagactgcagtgagctatgattgtaccactgaccccacctaggtgacagagtgagataatatatctaaaaaaacaaataaacaaaacattcatcccccgaatgcttggcaattatcaagaaattatttcagtcactctttcttcatgtgtcctgagaaattcttgaagaagtgactgcttcc

SEQ ID NO: 800737 - DNA, 611 bp, Homo sapiens
ttgtcttgggggccattgggaaagaaagttatacccgtgaaagggaatgactttcattttccctctgctccagaactcttaatgactcgcccaggactagctgtcttgcttttgaattgtggcagcttaatcacgtcaatcactgtaggcaacagcagtagtatatgacatctaaaacccacctttcaggccaggcctggtggctcacacctgtaatcccagcactttggaagatagaagctggaggatcgmtagaggccaggaggttgagaacagtctggcaacatagtaagacctcatctctacaaaaaaacagaaacgcccaaacaaacaaaaactagctgggcttggtggcatgtgcctgtagtcccaggtactcaggaggctgaggtgggaagatcacttgagcccacttgagcccaggagttcaagactgcagtgagctatgattgtaccactgaccccacctaggtgacagagtgagataatatatctaaaaaaacaaataaacaaaacattcatcccccgaatgcttggcaattatcaagaaattatttcagtcactctttcttcatgtgtcctgagaaattcttgaagaagtgactgcttcc

SEQ ID NO: 800738 - DNA, 566 bp, Homo sapiens
gtaaagttgctctatttttccccattcaatactgtacgctttggaaggaagtccctatgcacagcccatgcttaaggagagaagagctgcgccctctctctccttgagggcagtgtctacatgaactatttggaattcctttgcatagatttgcctcttccctctcaattatttacttattcaatcatttatctatatcacttggactcatgaatacttattttacactttgggctctaacccagtactatttcatttattttgttgctcaaattgttccagctttgggcactggagttctttcagttggtttctgaatccttttgacatattcctatcattggggrttttatttctgcacacttctctactttctggcactatagttgccccaggatcatcttgtgtatttcctaccttagtcctagaatcagccatttctccaaggtgccctgtttccttttgttggagatagaatcagccatttctccaaggtgccctgtttccttttgttggagaacggtgttagacaccaagatctgggtgctaggggtgctccttgttcc

SEQ ID NO: 800739 - DNA, 572 bp, Homo sapiens
actgagcagacactctcttggccaggggaaccctagagaaactgtaaaaactgagttcatggccatgatggatagaaggtcagacacgccttgctatacccgctcccttgctaaccgccactaggttttcttcctyaatggttaaacagaaaccagctgttttgaaagactagctccattgctgattttgaagaatctcctgacttctgcccctcccttttgtggtttcaacacaactgcgttccttcctgataagaaaccaccaaccacagagtggttctgctgagtctatggagattgcatactaagggttttcctgtcctccacttcaccttctgatctcagagggccaaacactccactctcaggttatgctagcactgtcatttttttgtacatgccacccatgaagaggcatgaagctcaattgcacatgtgcacgtttctccattcgtgcctccttctgtagcttactgaatatgtgcatttggtcacctggttcagcataaatcccttttacattcttcccaccttctaagtgtctgtttctagcttctggccagaggctacgc

SEQ ID NO: 800740 - DNA, 648 bp, Homo sapiens
gttttgcaatttgtggaccaatccctggcttcattttatttggctttgctttcacttccccattttctgttattttttttttttttgtgctgttatgtacatctcttaaagctggtcaaatcatattttgggatggaatggcctgataagttaataaattatattaaactgccaaaaaaggaatgtgttttcgattcttctggcttcttcctggttacaccaaaagcatgggggagaaaaggaagggaagtcatcgagacacaggttgtcagggagattggggccaaggtctcaagccccttgtgctgggcaggtgtcttcttttcattgttccctgtggtccttcagacatgggtggctcttcaggcatgtccacaaccccaggagccatggcctcagtggccggygcaactggccggagccacagtggctccgggtgtcggggctgtccttttgtccctttgatcttacgcagggtgagggagccaatcacgagaggctcacccctgacgtcacccagtccccagggccagtgagggccctgcgttccatggggccccctggagggaggagtggcatctcagtctgctggtccctatgcatctactttgatatgtccctcaggatccctgtgctaggaaaccagag

SEQ ID NO: 800741 - DNA, 634 bp, Homo sapiens
gaatttagacgtgaaggaaatgtgcttttgaatggggccagtctccttggtgtaacactatcgctcttctgagcctgtagggtcatttctgtggaaaaatttgaaagtcaatgacgaagagtaagcaaagcaatggagctgcaagcagtgaccatcttactatcttgatattgagactttatgtaaatatcagctgcagattttatggragagaaagaagtcgacagggagcaaaagttgtgtgtgagggatagtggtcctggagctactgtgtgggaagacaatggatctgtcctggacaattgctgtcactagcctgcagccatcaacatcaagaagtcaacacttgttcacagcctcagtattcgtaagggtctgtgttgccaaaggaggtcacaatgatccctctatcccaactgcccttttggtggcatcactttgccagttggtctgtgacttgctttggccaataagttacagcagaaattctcccttaagttatagcttctattctctctctgtcttgggagccagctgccttgtttagaagctcagaccaagctgcttgttggtgaggtcgctcagacaaaggtcagagtgcaggaggcttaaggcactgggcgagagccagcat

SEQ ID NO: 800742 - DNA, 590 bp, Homo sapiens
agccattttaactgagatgagatgatatctcactgtggttttggctttcatttctctggtggttaaattaatgatgttgagcattttacacatacctattggccatttgcatggcctcttttgagaaaagtctattcagatctttcacctggtttgaaattggattgtttactgattttgctattgagttgtttgagttccttatatattcttgttattactccctggtcacatggctagtttgcaaatattttctcccattctgtggtttgtctctttgttacagtaggtagctagtcatacatgagcagggcaggagaaggccccccgcaaccaggaatgtcaggtgatcaacaggtgatggtcaggcggttgttaactgtctgtctaaaatacttggtcacagccagctccagggaaaggcagtctctsaatagatagaaaaaacctcaaattagtgatagcagcttcctgataatgagagacaggactagctggatttcctaggccgactaagaattcctaagcctagctgggaaggtcaccacatccacctttaaacaccgggcttgcaacttagctcacacctg

SEQ ID NO: 800743 - DNA, 599 bp, Homo sapiens
ttgaggccaggtctcgtggctcacacctgtaatcctagcactttgggaggtcaaggcaagaggatagcttgagtccaggagttcgagaccagcctgggcaacatagcaagacatcatctctacaaaaaattttaatagttagctgaccayggtggcctgcacccatagtcctagcacctcaggaggctgagatgggaaagatcaactgagtccgggatgtcaaggctgcagtgagccatgatcgcaccactgcaccccagactgggtgacacagtgagactctgtttcaaaaaaataaaaataaaaaatcccagccgggcacagtggctcactcctgtaattctggcatctttgggaggctgaggtgggcagattgcttgagcccagcagttctagaccagcctgggcaacgtggtgaaaccttatctcttattcatttatttttaaaaactagaaaggtgtcttcctatgttgaccaggctggagttcagtggctattaacaggcatgatcagggtgcactgtggcctcaaacacctggccttaagtgatcctcccatttcagcctcccaagtagctgggactataggcaagtaccac

SEQ ID NO: 800744 - DNA, 599 bp, Homo sapiens
ttgaggccaggtctcgtggctcacacctgtaatcctagcactttgggaggtcaaggcaagaggatagcttgagtccaggagttcgagaccagcctgggcaacatagcaagacatcatctctacaaaaaattttaatagttagctgaccatggtggcctgcacccatagtcctagcacctcaggaggctgagatgggaaagatcaactgagtccgggatgtcaaggctgcagtgagccrtgatcgcaccactgcaccccagactgggtgacacagtgagactctgtttcaaaaaaataaaaataaaaaatcccagccgggcacagtggctcactcctgtaattctggcatctttgggaggctgaggtgggcagattgcttgagcccagcagttctagaccagcctgggcaacgtggtgaaaccttatctcttattcatttatttttaaaaactagaaaggtgtcttcctatgttgaccaggctggagttcagtggctattaacaggcatgatcagggtgcactgtggcctcaaacacctggccttaagtgatcctcccatttcagcctcccaagtagctgggactataggcaagtaccac

SEQ ID NO: 800745 - DNA, 614 bp, Homo sapiens
gttttgaagcattcttgtctcataaggatagtggtggcatttgaaagttgaagaatgctaagaacagtatccccagttctaatacaacaggctttattctgttctacaattttaattccataaaattgataaaggcagtcactctattcattttacagaacatgaagtatttattttatggactcaagttggagtaaccaaagaggtttgcacacagtgacaggatgcagtgtttggggcccagttctattaggcattataaatgcccaagatgagagttgtaaccatgcagagtagtgttttctgaatatttggaaagattcttctggtctagtacaagatggtagragagagggttagccatcctggagtatgaactcggcctaaaacatttccagtttagttgatttgttggaaggacttaacgtggcaggtggagaggtcatcagcagcatcccagcaactccaagtacagggaagaaagaaacgtaccaaacacacaaggtggatggggtatggtgcttgttctcataacagtaatagccagccttctagagcagtggctcctcaggcagccattcatactttatgtgtagcatgctttgcaacagtga

SEQ ID NO: 800746 - DNA, 623 bp, Homo sapiens
ttttgttgttttgagatggaatgtgggagggctgaagctagctatatgtggaagagactatctgtggctgaaactggaaggtttagggaggtggagcagaaaaaagaaaggaaggagtctcgccggagcctgctggggaccgcggcccgcgggtggccgccccggatgcctgaaaccgaggagttaaatacagtctccgaagacccgcgcatcgatgtgcataagtggtgcttaaaagatgccaaggaaatgtaccagaatagtgagagtattaacgctgggattgcacatggtttttgtttttcaaatatttktatttcccaatatttctaaagtggcttttatcattagagttattacattttaaaaacgacatttgctttatgaaatagagtcctgaaatttgtaaatagcttttgaaacgcaatggggaaagtaaaggattacaaagctgctgaaaagaaaacctctggtgaatccttttgtaaatcaaggcatctttgtaactgctacctagttgacttgttttaaagtttggattttttgatactgcgttttcttacagttagaaacattcttaggtgcaatatcattaagttgaatcatgcgccattcctctctac

SEQ ID NO: 800747 - DNA, 603 bp, Homo sapiens
actgcatgagagtctgtcaagatgtgtggcgcgctctgccaggtggtaggatgagacagccatggaacacaaatacagaatcctgcaaataattcaatgttattaaggaccttaatccaggttttataaccattagacaaagcatttattgagggcttaccgtggcccagcayagtcatggcaggcagaataaccatccccccaaatctgtccacgtcttagcccttgggatgtgaagatgttgccttacatggcaaatggactctgcagatgcgattaacggtacagatcttgtgatgggaagagtacactggattgaccccatgggcccatgtaatcacaagagttctaatatgggaaagagaggcaagagggtcacggtcagagaaggagatgtgaggatagacgcagaggccagagatagagacttgaagatgctacactgtcggctttgaagacggaggaaggggccaggcaccaaggaatgcaggtggcctctgggagctggcaaaggtgaacacaggttctcccctggaggctccacagggaatgtacactctgctgttagtacatttcaaaattctgatctccagaactacacaa

SEQ ID NO: 800748 - DNA, 603 bp, Homo sapiens
actgcatgagagtctgtcaagatgtgtggcgcgctctgccaggtggtaggatgagacagccatggaacacaaatacagaatcctgcaaataattcaatgttattaaggaccttaatccaggttttataaccattagacaaagcatttattgagggcttaccgtggcccagcacagtcatggcaggcagaataaccatccccccaaatctgtccacgtcttagcccttgggatgtgaagatgttgccttacatggcaaatggactctgcagatgcgattaacggtacagatcttgtgatgggaagagtacactggattgaccccatgggcccatgtaatcacaagagttctaatatgggaaagagaggcaagagggtcacggtcagagaaggagatgtgaggatagacgcagaggccagagatagagacttgaagatgctacactgtcggctttgaagayggaggaaggggccaggcaccaaggaatgcaggtggcctctgggagctggcaaaggtgaacacaggttctcccctggaggctccacagggaatgtacactctgctgttagtacatttcaaaattctgatctccagaactacacaa

SEQ ID NO: 800749 - DNA, 484 bp, Homo sapiens
cctatctttataacaagattaagtaatttgcctgtattttcttctaatatttctgtggtttcattttttttacatatagatttatggtctatttggaatttacttatgtataaaatgtcaggtatagatcaacttttatatttttttccagaaggccatccagttatttcaccaccatttagtctgtctttttgctactgctttgaattgctacctttatcattgaagtttttttgtgcttagatctgtttctagctgttctgttccattggtcttttttttttttatgtacaaataacrtgattttttaaatagaggtttttgtttgtgtgtgtgtgtgtgtgagacagagtcttgctctgtcacccaagctagagtgcagtggtgtgatcttgggttgctgcaacctctgcttttcaggttcatgcagttctcctacgtcagcttcccaagtagctgggattacaggcctgtgccatcatga

SEQ ID NO: 800750 - DNA, 626 bp, Homo sapiens
aagatagctttcaaaagaaagatttacttagcaagtagctcttcctgggtcaaaacacatttcatcttgtactggaagaaacagatatgcatagatttaagtgcaatacagaatagagaggaccatcattctctayagggtgctacagaagcctgcatattatgtgtaaaagccgtaggttgtcaaagaatgaaaactattttttcaaactacaatgaaaatgatttttctctgtaatattttttagagaaaacagaatgaaaactgttttttcaaactggaatgaaaacgattttctctgtaatatttttctcttttctaaaaataggtcagaaaatagcttatgttgatggaaaaaataatcagggtttttgtatctttagttcataagtgaggtttctccttcttgactggcatttggaagactgggaactgtacactggcatgttgagtcctgtctctgctaggagaatggtgagtccaaaggccagatttcacacggcaaagaatggcaggcatatttattgagtgtttactatatgtttggctctctgatcaatacttcaaatatattgttacattcagtcctcacagcaacctatagtatagacacccaaatttccttt

SEQ ID NO: 800751 - DNA, 626 bp, Homo sapiens
aagatagctttcaaaagaaagatttacttagcaagtagctcttcctgggtcaaaacacatttcatcttgtactggaagaaacagatatgcatagatttaagtgcaatacagaatagagaggaccatcattctctatagggtgctacagaagcctgmatattatgtgtaaaagccgtaggttgtcaaagaatgaaaactattttttcaaactacaatgaaaatgatttttctctgtaatattttttagagaaaacagaatgaaaactgttttttcaaactggaatgaaaacgattttctctgtaatatttttctcttttctaaaaataggtcagaaaatagcttatgttgatggaaaaaataatcagggtttttgtatctttagttcataagtgaggtttctccttcttgactggcatttggaagactgggaactgtacactggcatgttgagtcctgtctctgctaggagaatggtgagtccaaaggccagatttcacacggcaaagaatggcaggcatatttattgagtgtttactatatgtttggctctctgatcaatacttcaaatatattgttacattcagtcctcacagcaacctatagtatagacacccaaatttccttt

SEQ ID NO: 800752 - DNA, 626 bp, Homo sapiens
aagatagctttcaaaagaaagatttacttagcaagtagctcttcctgggtcaaaacacatttcatcttgtactggaagaaacagatatgcatagatttaagtgcaatacagaatagagaggaccatcattctctatagggtgctacagaagcctgcatattatgtgtaaaagccgtaggttgtcaaagaatgaaaactattttttcaaactacaatgaaaatgatttttctctgtaatattttttagagaaaacagaatgaaaactgttttttcaaactggaatgaaaacgattttctctgtaatatttttctcttttctaaaaataggtcagaaaatagcttatgttgatggaaaaaataatcagggtttttgtatctttagttcataagtgagstttctccttcttgactggcatttggaagactgggaactgtacactggcatgttgagtcctgtctctgctaggagaatggtgagtccaaaggccagatttcacacggcaaagaatggcaggcatatttattgagtgtttactatatgtttggctctctgatcaatacttcaaatatattgttacattcagtcctcacagcaacctatagtatagacacccaaatttccttt

SEQ ID NO: 800753 - DNA, 472 bp, Homo sapiens
ttcctcaggtagtaaatgttatagcaggaatctgtatttcaatctattggctcttttattacatctgatgtgtggatgggaagggaaagtagtagatataggtttttacctttgagggattagcaaaggcagaaagaaaagccgatacatgataacttgagggaagatgatggccaagtgaaatttacagaaattaggaccacttaaatgtgtctaaaatgaaagccttgattctgaaaacatgtaaagatgagaagagggagatgtgaagaaagatagaaagacttgggattggataaacagagatgtgaaagttagtaatytttgtgtctaaagcatctaaaatttaaggtgctataagtctgattcccatgtgttttccctctttagtgaaaatactctgcaaaacttgctatgcaagagattcatattatatatgctaaaagaactatgtaggctgggcatggtggct

SEQ ID NO: 800754 - DNA, 605 bp, Homo sapiens
aattatttaattgttttatagaattcatcagtaaagccacctggtcctgggcttttctttgtcagaagatttttgattactgagtcaatctccttactattgttcaagattttccctccctcccttcctctctttctkcctttccccctctgcccccaccccccgaatctttttgttttgttttgttttgttttgttttgtttttttgagacagtgtcttgctctgttgcctagcctagagtggtgcagtggcatactcatagctcactgcagcctcaaacccctgggctcaagagatcctcctacctcagtctcctaagtagctgtgactacaggcatatgccaccaaatcctgctaatttttaaattattattattttttgaagagacagcatctcactatgttgcccaggctgtcttgaactcctagcctcaagcactcctcccaccttggccacggaagtgctgggattataggtataagccaccacacccagcctctgttcaagactttctattttttttttttaatcattcagtcttgttaggttgcatgtttcttagaatttatccgtttcttctagattatctactatattgcatat

SEQ ID NO: 800755 - DNA, 610 bp, Homo sapiens
cacatccagctgatgtttccacaaagactgctcagattgtaaagtccaattttgtataatttactaacttctgaaaagtgacaaatggctgggaatgtgtttagggtctaagtgtgatgtgacttggactgtccctaactgccaggggacgggagtgctcaagcagggtacrggggaccagaccctcacacccatctggaggagcaaaagggctgtgtgcttttcagtaggaaactaacaggagttggtcacaaatgaaaggctaagcccagattttcaaatgatagaaaacagctgcaatcttaaaagcatgctctataaaacgtaaccaccagtatctgccagtcctttatcccaaacctctgccatgagcagaggtggaaaaaccttgacccaaaatcctggccctgaggcagaggcagaaagaaggcagttgtctgcggaactcttcaccccagtctcttgtccaaagacagcaaagccctcactcttaaaggaaagagggagtttgaaaaacagtccaagtaaaatctagatgttcagccaaagaatgggagttccaatttcaggagacctcacacaaaacaccacatgagacctctgaagatgg

SEQ ID NO: 800756 - DNA, 778 bp, Homo sapiens
aacttattgttaaaacagttcctttaaaaacaaacaaacaaacaaaactcaagaccattcattctaattctctggcttctggacccatggtttccaatacgttctgcatcactgatatctcgctccttatgctcctgacacagggcacttagttcctgagggccttccagtccacaccctcaatgtcactaaagtgacagagatacgcatagagccctccttgtttggaggaagagagaaaggaaaggaaaaaagcaagtaattctccttaattagagctaactggaagatataacagaaaaagaatattatagcttaggactaaaataaaatcatacaaaagggaagttagaatcttcaatttgctacttgagaaactcttcactctgtaagaatcggactttttaaaatacatcacacatggccgggcgcagtggctcatgcctataaccccagcactttgggaggccaagggggggcggatcaaaaggtcaggagatcaagaccatcctggctracatggtgaaaccccgtctctactaaaaatacaaaaaaattatccgggcgtagtggcgggcgcctgtagtcccagctactcaagaggctgaggcaggagaatggcgtgaacccgggaggcggagcttgcagtgagccaagatccggccactgcactccagcctgggcgacagagagagactctgtctcaaagaaaaagaaaatacatcacacttgaagagccatgaatgcagacctggatctgaggctgtaaatcatgggc

SEQ ID NO: 800757 - DNA, 483 bp, Homo sapiens
ccctaaatcttattacgaactaaccgcaaatacaagagccaggggaccaccaagggattccacacagtggaaagtttcggaactggcttcttcaacacaaaaggagacgtaagacacacgctggtcagtcagactatggctttacttggataaaggaaacaaaccaactactaaaaaagaaaaacgataatcagagaaacaacagtaaaaggacaactgataatactaaaaaatgattctagtttctcagatgtgataacgatgtggttatgtttaataaaaaggaaaccctatcttttasagatgtatattgaaatatttacagggaaaataatacaatgtgtgaaatcttcctcaaagtactatgtggggcagagaccctgaggttcatcgttattcttccacctgagagaaggaagttcactatactattctgtctacctttgtacatttgaaattttctataataaaaggttaaaaaag

SEQ ID NO: 800758 - DNA, 589 bp, Homo sapiens
ttattgaatgcagtgcctaaaacttggaaaataataatgctcagaacaataaataaaagcaaatgccaggtgtggtggctcaagcaaaggccgggtgcggtggctcacacctgtaatcccagcactttgggaggccaaggcagccaaccacctgaggtcaggagtttgagaccagcctggccaacatgaygaaaccccatctctactaaaaatacaaaaattagccaggcgtggcgatgcgggcctgtaatcccaactactcaggagactaaggcaatagaatcacttgaacccaggaggcagaggttgcaatgagcagagatcatgccactgcactccagcctggttgacagagcgagactctgtctcaaagaaaaaaaaaaaaaaaagcaaagtaaaaaataaaataacataaattggagtaacgtggtggttaaaagaaaaagcagcttatatagtaaataatttgtaccagaataataaagtttattttataagcatttttctcttttccagaaacccaagaggcagtgctaaagtcattctttaatgttatttggaataaatcattggtagcataatacagtgg

SEQ ID NO: 800759 - DNA, 668 bp, Homo sapiens
tatttgttgagccctattaaggcaagattctacaaccttcctctccttttaatcttcacagcaaccctgtgaggcatgttttattctcctaatttacagataagaaaatgagggttcacaggactgtgtaactttaccgaggtcacacagtaatccaggagtttagctaggtctgtgagactcaaaggctttcactgtctttaatatgcttcccttcacacacaagaagtgagaacaattggcagggcaacgagggaaacaattatttgggatctttgctttgtttgaatgcmtagagcatttctcctgctccatagtccctgaaactttccatgatctcatcgctcaacaccagctccctttgcaatgagccaatcagctaactaaaaggtattcatgaaaaaggcccagcagcctcaggaacatacagttgacccttggcaacacaggagttagggtactttttggaccctaacaggtacccaaagtcacatgggccaccagctttgacctgagcttatcacaatgaaccaactccttctctcaggggaacaattaggttggtgcaaaagtagttgctttttttttttcattacttttaaatggcaaattttaaaaggcaattacttttgcacaaacctatagtttaggaaaccactgaggattca

SEQ ID NO: 800760 - DNA, 595 bp, Homo sapiens
acaaatacgtacagtagtatgacccccagcacaatcaagaaacagaacactttcattggcccccaaagtataataacatccatactctcttgaagtcaatttcctaccattgccagccccgggcaatcattgatccaattttagctgtgatagctttgccttttccagaagttcatataattagaatcattttgtatctggttgctttcacttaacataatgtttctgtgactcatcaatgttgttacaagtatcagcaattccttcctttttattgcattacaatrgttatccagttgttccagcaccatttaattaaaagaccatctttcccactgtatggatgtactgcaatttatttaaccattcacgaggtaatggacatttggattgtttccactttttggctgttgagaataaggctgccatgagcactcatgtacaggttttgttttatttttatacgctttcatttttctctgagtaaatactcaggactaggatttctatgttatatggtaagtgtatctttaattttaagagaaactgacaaatagcttccaaagttctgtagcattctccattagcactggca

SEQ ID NO: 800761 - DNA, 578 bp, Homo sapiens
agtatatatcgaataaacgagtgtcacaaaggcggtgggatttgagctgggtactagtggaaaagaactttccaagtaagggttgggcaaacaccatgaacaaagacagcagtgaaaatggacgcagtgtgcacagaccacctagagggtgcaggttgggtacaagtgaaaagaagactgaataaagaggataaacaaacaagaaaaatgtcatttaattgtagtgggccctggaaaccrttgacttacggacgtgggagatccatgatgcaaaatttctctggcagtagtggccagatggattagatggaagagggagcactagggagataaggagaggctctgcagtgaacgggaagggagcggcgatgacacaatactcagaaaggacgacgttcgtaatctgctggaaaatgcctttagaagactttagaggattgtaactgaaaaggtgaattaaattaatgtctttatctttcaaataattgcactgccttacacaaatgattgacatgttgagaggtgcctggaaagataggggaaaagctctctgaatggtggctggaagacattttttc

SEQ ID NO: 800762 - DNA, 622 bp, Homo sapiens
aaatcttacatacttgaacatatttttttctgctctcatactcaattgatagtatggctgggtatagaattccagattgcaagttacatttctcagaattttaaaggcactgcttcattgtgctttggcttctagtgttgctgatgcgaagtccaaatccattttgcttcctaaactttgtatatagccaattttttcatctctagaggcaatgaaatcttctcttcctccctaaaatgatgctggctacttattggctcttaaatatcacagttcattctattgttgaattatgacattgattgctttgtcccttcttttctcttttttctttctggaaacaccggtattcagatataagatcccctgaactagtactcttaacttcctaaccttttgtctactattttatatccctttatctttttgctatatttcctgggaaatttccctaatsttgtatttcagctattatgtataattatttttttctgcttaagcagatcatttttccttatatccttatcattttttcctttctatggaagtattgtatgcacattgtttaaaaattatacagcactcatttcaatagcacatttgataaaactggaatgagaca

SEQ ID NO: 800763 - DNA, 623 bp, Homo sapiens; identical to SEQ ID NO: 800746

SEQ ID NO: 800764 - DNA, 611 bp, Homo sapiens
attaattattctgatccatgagcatgaaatgcttttccatttgtttgtgtcaccttctgtaaatgtctgttaggtacttttggtcaaagtccaatttaaatccagtgctttcttgctgattttctgccagcattatctgtttaatgctgatagaagggtgttgaagtccaccactgttattgtattgaagtctctttcttcagttctagtaatacttgcttaatgaatctggatgctccagtgytgggtacatttacatttagaattgttagtatttttgctaatatattctcccttcttaattacataatgaccttctttgtctcttttccctgtttttgacttaaaggctgttttatctaagtgtagctattcctgcatgcttttagttttcttttccctggaatatttttcccagcccttttatttcagtttatatgtgtgtcgatggtaaggtcagtttcttgtaagtagtatatagctgggctttgttctttttatccattcagtcaatctatatactttaagagggtaatttaatctaattaatttcgaggccattgttatgtgaggcattgtttctgtcatattgttaattgttttctgattga

SEQ ID NO: 800765 - DNA, 638 bp, Homo sapiens
agatcaatcagcagcttgccccttgcccttggaaaagccacagtcattcaacaacctgtgagagcagccttggcggctgaattctgtaaagccagaggggtggggctgcccaaggccttgtgagcccaccccttacaccagtatgccttggatgtgggacatggattcactggagattattttggagctttaagattgaatgactaccctgctcaatttcaaacttgcatgtggacagtagccctgtatgtttggctgatttatctttttggaacagatatttttacccaaagactatggacttttgagttaatgcttgaatgagttaaggctttaggaacctatttggatggcatgattgttttttgcaatgtaagaaagacatgagatttgggaggggccaggggtggaacgatatkctttgaatatttgtccccttccaaatctcatgttgaattgtaatcctcaatgctagaggaggggcctggtgagaggtgttttgatcacggaggtgggtccctcgtgacttggtgctgtttttgtgataatgagttcttgtgagatctggtcatttaaaagtgtgtggcacctcagccctacgctctctcacttgcttgctcctgttttcaccatgtgac

SEQ ID NO: 800766 - DNA, 638 bp, Homo sapiens
agatcaatcagcagcttgccccttgcccttggaaaagccacagtcattcaacaacctgtgagagcagccttggcggctgaattctgtaaagccagaggggtggggctgcccaaggccttgtgagcccaccccttacaccagtatgccttggatgtgggacatggattcactggagattattttggagctttaagattgaatgactaccctgctcaatttcaaacttgcatgtggacagtagccctgtatgtttggctgatttatctttttggaacagatatttttacccaaagactatggacttttgagttaatgcttgaatgagttaaggctttaggaacctatttggatggcatgattgttttttgcaatgtaagaaagacatgagatttgggaggggccaggggtggaacgatatgctttgaatatttgtccccttccaaatctcrtgttgaattgtaatcctcaatgctagaggaggggcctggtgagaggtgttttgatcacggaggtgggtccctcgtgacttggtgctgtttttgtgataatgagttcttgtgagatctggtcatttaaaagtgtgtggcacctcagccctacgctctctcacttgcttgctcctgttttcaccatgtgac

SEQ ID NO: 800767 - DNA, 646 bp, Homo sapiens
ggttatctttttaaaattttctccttttctgccatattttgggttaatcaaatatattaaatattcgattttaattactctattgcatgtttaactagaactcatttatttcaagtgttttgtttttctacagattacggtaggtatacttatatcacagtctacttagagctcatattgttaaaattcatataartggaagaacgttagaacagaaaaaatcaatttccccgattttgggggctattattttaatatattttacatttgcgcatgcagtgaactccataatataaggttattatttttgctttgaataattggttgtctttcaaaggggaaaaattaaggaatgcctttcctgtttgcttacatatttacctttcctagtgattgattgtcattgcttcctgtataacctagttagttactatctggtttcattttaaagaaagacacaccatgaatcatctaaaacacttcatagggcctttttctgagcagtcctctttatccagtaccctaataatttttgtaaatatccatcttcaacattagtttctagaactatgagcatttgtaatatattttaaagaatgttctatagagatgatgctgggatcagggagacttcggtttgaagact

SEQ ID NO: 800768 - DNA, 481 bp, Homo sapiens
tcactgtccacatgccacaacacagaccttataactagagacttagctaggaagaaatgtcaaacattacagagaaaaaatgcagagtctgagatcataagtaaaactctgaaatctcaacatgccttttaattcatgaaaataaaaaatatagcagcatatgcaatatgayaattctctgaaaacatacatcatgtgaactaccctggaacacatctcgccaagtgccatcttcattttaaccagaggtctaggatgcctttcctttattttgcctattatatcatttataaaaccccatttttattttgatattttatttactttctatttcctgctcctaatatctcctttctaaacttttctcaatgacagtgactcaaaaacaatgaatgtcagaacaaatatttaaaggatctgtacatgtagatatatatatttaaaatggattcttccactctgggaagaattcaggcatact

SEQ ID NO: 800769 - DNA, 615 bp, Homo sapiens
aaaattttctttcttgatttttcatcatccttcttatgcctctcagtttccttggcctttggaggcacgtttgcttagaactactaatggaggaacatgttttcagtataatatacctgtttaatttttgtcagttatggccaggcacggtggcttatgcctgtaatcccagaactttgggagaccgaggtgggcagatcatctaaggtaaggagtttgagaccagcctggccaacatgatgaaacccggtctctactaaaaatacaaaaacaattagctgggtgtggtggtgcacgcctataattccagctactagggaggctgaggcagaagaattgcttgaacctaggaggaagaggttacmgtgaacaaagattgtgccactgtactccagcctgggtgacagaccaagactccatgttcaaaaaaaaaaaattatgtcagttacaatataagtgtagtggatgacaatttagactattgcaatatattcatgaaatttactatagagtagatactatgtgctagatactgttctaagcacttgacaaatactcagtccttataataacccttatactcttaaaaccatttttcagaaaacaaaatcatgc

SEQ ID NO: 800770 - DNA, 630 bp, Homo sapiens
agttcacagtgtatgataactttaagaatttaggtgaatattattaaattgagtaaattaattctcaatctttggatacctggacaatttctaaattggagggtacaaaatacaaatcacaagaaacagtgtagttttatgcaaataacatttttacacagtttagaataaccattgataaacagataagagaacatatgattgccttagaatagatactgtwgctttcgccactttagatttgtaaatcatgtactgtatacgtgtgggcgtagaggaccatgcaggttttggatgactgcctctgttttcgtcatgcctatgcgggaacacaattgcctgctttgtttaagggctatggttaatccaaacagctctgactctatcaagtactatagctacagagaaacacaagtaagcattcgagataatgactaccttgagcctttacttatttaaaaagttgttactgtttgttaatgtggtacattcaatttactatggattgtcactctaaaataagacttcaatctttttcttatttttatatagccatgacgcatattcatatcttaatgtaataaccaatcttctctgacacattataacaatgctggaacctccattttc

SEQ ID NO: 800771 - DNA, 621 bp, Homo sapiens
gaagttttgttcctctccgtgaatttgattgaaaatcgagggctttctcgaatagttttggcatccagggtcatttttcattaaaaagagaaaagtcatgtcaaatatgaatttccgcagattattcagcactagaccctgggagattctgtaaagaggggttttgttatactcaacttttccgggtaaaacaaacacaaatactcctcctccaaggggcgggggcggtgcctaggtgatgcaccaatcacagcgcgccctaccctatataaggccccgaggccgcccgggtgtttcatgcttttcgctggttattacatcttgcgtttctctgttgttatgtctgaaaccgtgcctgcagcttctgccagtgctggtstagccgctatggagaaacttccaaccaagaagcgagggaggaagccggctggcttgataagtgcaagtcgcaaagtgccgaacctctctgtgtccaagttgatcaccgaggccctttcagtgtcacaggaacgagtaggtatgtctttggttgcgctcaagaaggcattggccgctgctggctacgacgtagagaagaataacagccgcatcaaactgtccctcaagagcttagtgaacaag

SEQ ID NO: 800772 - DNA, 648 bp, Homo sapiens
tcatgaaaaactcattgctgttggttgtaatagatgtagtttatccaatctacatttttattaactgtcacccaccaaaatattgactcaaatcctgcagctatttgattttgggatttaaattgatctgctattccctgtgggactccaattgcatctaaatagatgtgagagttgaaagacacataagggtcttctcttgctttacgatgtcttatttttcctccctctggttgatgaaatgctagggtgaaagggatagccaattggactaaagtacaagtgcygctccagttatttggcagagtgcccagtaaaggtccaccacaataccaccacacatccgcttggggatgaacaaaggctgactgattgagaagctcctgaaaattcttaagctcactgcatcccttcaggtctccaaggaatgctaagtttcctccctgtcatgagagacaagaagtgaacttagttttgggagatggaagctggatggccctcaggggttgacctgcagggtgctggactttgggatatagcagagagagcttggcacgacttattactccaggctgtagaatcctggaaaacagttaccatgcagcccatgcctggtcaacaggaggaccaccttagtggaaaggggat

SEQ ID NO: 800773 - DNA, 508 bp, Homo sapiens
tactctaggggcgtgtgtgtgtgtgtgtgtgtgtgtctgaattaaaaaattccatcagttgggttacattattgtcagatactcatcaaattcagtggtttcattttctgttttcctgtgtgggaaaagaagagtaacaaatttctctgcccctttcatgacccttgtttccatggcctgatttacagactaccttatcttcggaagtataccattttatatatatacaatttttagtgggggcaactacaaaataaaaacaaagaaaaaaaatttcacctttgccttgcaaaytccaaaatgttacatatcaatatttactgttggcaggtcgagtcgggtgagtatggagaaataataaaatgggatttctgaattgtcttgagttttagctattatctttataatatgaagaagctattggttattcagagattacatacttgttttattttaattataagtacttgcaggcaactatgtaactgtgaaatggatatatactata

SEQ ID NO: 800774 - DNA, 605 bp, Homo sapiens
aatttttttatttttagtaaagacggggcttcacaccatgttggtcaggctgtcctggaactcctgaccctgtgatccgcccaccttggccttccaaagtcctgggattacaggcgtaaggaaccgcgccccgccaatttgcttatgtatttttatggcatctttaaaatggacggttagtttcacgattcrgtgttaagaacacccacttataaatggaaaaattattaaagaaaactgcaaaatagctatttacacagaaaatgtgagcccttttaaggaatacatgggtggctctgaaaagagcctttgttaagactgcttccttaaaaagccaatataagagttctcgttttacttgcccttggccttgtggtgactctcagtcttcttggggagcagtacagcctggatgttgggcagaacaccgccctgagcaattgtgactttacccagcaacttgtttagctcctcgtcgttgcggatggccagctgcaggtgtcgggggatgatgcgggtcttcttgttgtcgcgggcggcgttgcccgccagctccaggatctcggcggtcaggtactccaacaccgccgccagatacactggcg

SEQ ID NO: 800775 - DNA, 555 bp, Homo sapiens
gatccttctaatttctgtggtatcagttgcaatgtctcttttttcatctctgattttatttgtttgagtcatctcttttcgtcttggtctggctaactgtttgtcagttatcctttcaaaaaaccaacttttcatttaatcgatcttttgtattgttttataaatttcatttatttctgctctgatctttattatttctttgcataatttgggtttggtttgcccttgtttttctagttctttcagatgcatcattatgttgtttgtttgatgtttttctacctttttgctgtaggagtttattgctataaaattccctcttagtactgcttttgcttgattccatccactttggtatgttgtgtttctattttcatttgactcataatatttcttaacttctttcttattcaytgatccactgatcattcaggaacgtattgtttaatttccatgtgtgtgtatagtttccaacattcctcttattgattattagttttattccattgtggtcagagaatatacttgatatgactattttttgaatttaagact

SEQ ID NO: 800776 - DNA, 506 bp, Homo sapiens
caataggaactcacatttatttctggtgggaatgcaaaatggtacagccactttggaagacaatttgaccatatcttaaaaaactaagcatgcttttctcatatggtccagcaatcatgctccttaatacttacctaaatgaattgaaaggttatgtccacacaaacacctgtacatggatgtttatagcagctttatttataattgccaaaatttggaagcaaacgagatttcctccagtaggttaatggataaacggtggtatatccagatgatgcaatattatttagccacaaaataaatgaactagcaagccatgaaaagraagggaggaaacttaattgtattactaagttaaagaggccaatctgaaaaaaattacatactttctctttcagtcatatgacattctggaaaaacccaaactatggagacagtgaaaaatgagttacaccaagagggttaggagggggagaaagataaataagtagagcacagaagatttt

SEQ ID NO: 800777 - DNA, 506 bp, Homo sapiens
caataggaactcacatttatttctggtgggaatgcaaaatggtacagccactttggaagacaatttgaccatatcttaaaaaactaagcatgcttttctcatatggtccagcaatcatgctccttaatacttacctaaatgaattgaaaggttatgtccacacaaacacctgtacatggatgtttatagcagctttatttataattgccaaaatttggaagcaaacgagatttcctccagtaggttaatggataaacggtggtatatccagatgatgcaatattatttagccacaaaataaatgaactagcaagccatgaaaagaaagggaggaaacttaattgtattactaagttaaagargccaatctgaaaaaaattacatactttctctttcagtcatatgacattctggaaaaacccaaactatggagacagtgaaaaatgagttacaccaagagggttaggagggggagaaagataaataagtagagcacagaagatttt

SEQ ID NO: 800778 - DNA, 654 bp, Homo sapiens
tggcaggaataattttggtgcattgaatttaaaaggataatgcagttattttgagaatctaaaatagataatagataaggtcaaaaagcaaaaatcagaggtaataaatggtatagataaccaaacaatgcaaactttgtatttttgacaaaaaaagattttttaattgtttatccatctaaaatgcttttgtaataaaaataattggaatttttcctgttgaaatttattttacagaccacattttcaatataatctttttatgatgtccggattttaaaaataataacaatttagaacaaaggataatgtttgctcacagaaaacaaccaaaagttgatagtgtgcttgcacaacctagcaatatactccagtacctatgaaactaatgcaattaaagatatatcaaaataagatacacatcacattactgaygtttttttaaaaaaatagtatgtcaatattaatggcatgaatcatagaaaatcatctaatagcagatattaaattagtgaaaatgagcaaaacacatatcaatttttacctaaatcatgcagatattagtaaataaattaacaatttcccttaataaatgggatttgttcatctttttaagttggtaggtaaaatattaaattgaaaaagtttgtttag

SEQ ID NO: 800779 - DNA, 599 bp, Homo sapiens
tattcacagatgacataattaattttatacaaaacccaaaggaatctataaagccaactacctgaactaattaagactgacaaattctaaatatgcaagttcaatataaaataatcaattgtatttctgaaaaatttaaaactgcattaactgtagcatcaataactataaaatacttacttatatggtgggccttcaccatataraggctcaggccttcagttctggaaaactaccttgtctttctgtaatgtttccttcattttgtgtgttctttatggaattgcaattagttaagatacttgacctcctaaattaataacatgaattttcttttccctttttgttcaattctcaacattttctttatatttttcatcattcttcacttttagaatgaggcacagagaacctgggtaattcttcaggatcactcagtctttgtttgaactgctctttggaaacagagcacatgactttagcgactacacaatactgctttttttagaaaatgcttttgtaatgaataacctgatgtttaattaataagtgtatcctatagggcagagaagccacaaaaagatataaaaatgcattca

SEQ ID NO: 800780 - DNA, 632 bp, Homo sapiens
gcccctcatatcctggtagcttagaaattctctaatatcttacagatttttgtgggttttttttccttgactttcataagtcatagtaaaagtgttagtctgctacaaactgtcccaccattgccagaagaggtccctacaataaatatctccagaaatttgccaaattaytttataacaaaatatttatgattatgttatattccactgaactggtgttctataactttcttaatgtcttcctatttattgcatttacaataatcttatttttaaaattttttgcagtgggcatagtaattaatgtgtttttttttcccctgaggaatttatttttttccaaatgaattcccaggagcaagaaatcctttaatgtttaaaaaaatatgaacaatgtattgctcattaaaggctttttttggataacctttcaaaaggattgtaccaatctataacgccacataaaatgtataattgctgcatttttattacaggctctccagcagcgaacaattttatatttaattttggatgatttaataattataaataatatatgtcatttcaatttaaattctctttgatcacttacaaagttaagaagtgtgttatatgggcaggccaggagtaat

SEQ ID NO: 800781 - DNA, 632 bp, Homo sapiens
gcccctcatatcctggtagcttagaaattctctaatatcttacagatttttgtgggttttttttccttgactttcataagtcatagtaaaagtgttagtctgctacaaactgtcccaccattgccagaagaggtccctacaataaatatctccagaaatttgccaaattattttataacaaaatatttatgattatgttatattccactgaactggtgttctataactttcttaatgtcttcctatttattgcatttacaataatcttatttttaaaattttttgcagtgggcatagtaattwatgtgtttttttttcccctgaggaatttatttttttccaaatgaattcccaggagcaagaaatcctttaatgtttaaaaaaatatgaacaatgtattgctcattaaaggctttttttggataacctttcaaaaggattgtaccaatctataacgccacataaaatgtataattgctgcatttttattacaggctctccagcagcgaacaattttatatttaattttggatgatttaataattataaataatatatgtcatttcaatttaaattctctttgatcacttacaaagttaagaagtgtgttatatgggcaggccaggagtaat

SEQ ID NO: 800782 - DNA, 629 bp, Homo sapiens
gggaactgatggcttgctgaggatccttttcatatacaggcctggggagaatcccttagtctgggtgcctatttccctccacatgtcagggcttaccccgtgcactgacagccacgggggcagtgagtaggctgcagccagacccatggagtgaggcagtgagaggctgaaaggagaggctctacagacagtacaggaaggctcttggtattcccattgccactgcrcagcacagcacggcagagtagcaaacgcatatgccatgtcttgttgggagacctgggccctgctccagactgctaccaagtagtttgggaccttggatgagctgcctcaatttctccatttgtgaaattgggaggtgacagcgtgctggcagccctcgcagccctcgctctcggccttggtgcctgcctactctggccgcccttgaggagcccttcggcccacggctgcactgtgggagcccctttctgggctggccaaggctggagccagctccctcagcttgccgggaggtgtggagggagaagcgcgggcaggaaccagggctgctcatggggcttgccggccagcgcgagttctgggtgggcatgggctcagtgcctgcgcactctgagcggccggca

SEQ ID NO: 800783 - DNA, 532 bp, Homo sapiens
cagccccgccacccatgcctgtctgctgcagccatccttgcactctccagcgacactctcgcacctccctaggggaagcttccctccccctgggctgctgctctgagcccrtctgttctccccctgcaagaaggggcaatgctcttgtgttgtccctctgtctggacgcgcctggccactccgaaggcttttcaccccattatggccaaatagtatagggccactggggagggggaagggaatcattttgtgttcatttttgttttctgtttcacctaaaccagcataggattgataggggagacggttggcgggcatttccgtttctatgtgaccaaggcagcaggggcttttacctgctaagcggcaatcctttggccctgagaatttgggagagaacagtgcatcaggccaggctcagcaatatgtttgctcacattctttcagccttctgtcacccccctcaacaccaaactttcttccttgtgagcagaaggttggctgctgttagcaggatcccacagtgataacc

SEQ ID NO: 800784 - DNA, 532 bp, Homo sapiens
cagccccgccacccatgcctgtctgctgcagccatccttgcactctccagcgacactctcgcacctccctaggggaagcttccctccccctgggctgctgctctgagcccatctgttctccccctgcaagaaggggcaatgctcttgtgttgtccctctgtctggacgcgcctggccactccgaaggcttttcaccccattatggccaaatagtatagggccactggggagggggaagggaatcattttgtgttcatttttgttttctgtttcacctaaaccagcataggattgataggggagacggttggcgggcatttccgtttctatgtgaccaaggcagcaggggcttttacctgctargcggcaatcctttggccctgagaatttgggagagaacagtgcatcaggccaggctcagcaatatgtttgctcacattctttcagccttctgtcacccccctcaacaccaaactttcttccttgtgagcagaaggttggctgctgttagcaggatcccacagtgataacc

SEQ ID NO: 800785 - DNA, 532 bp, Homo sapiens
cagccccgccacccatgcctgtctgctgcagccatccttgcactctccagcgacactctcgcacctccctaggggaagcttccctccccctgggctgctgctctgagcccatctgttctccccctgcaagaaggggcaatgctcttgtgttgtccctctgtctggacgcgcctggccactccgaaggcttttcaccccattatggccaaatagtatagggccactggggagggggaagggaatcattttgtgttcatttttgttttctgtttcacctaaaccagcataggattgataggggagacggttggcgggcatttccgtttctatgtgaccaaggcagcaggggcttttacctgctaagcggcartcctttggccctgagaatttgggagagaacagtgcatcaggccaggctcagcaatatgtttgctcacattctttcagccttctgtcacccccctcaacaccaaactttcttccttgtgagcagaaggttggctgctgttagcaggatcccacagtgataacc

SEQ ID NO: 800786 - DNA, 589 bp, Homo sapiens
tgcctttccttgggggcagctgtctctctgtacatgagcaaatgggcaaaaacagtccccaaacccagcacccccctctccctggctgcagcccacactgtaacatccctagtgaggctccagcctaatgagccccttattttctttttyttccctccccaggtctagtagctctaactaaaaagttcttggagccatcgtgctccccctttgttatttttcttgctatcagagtagcaagaaacagcacccctgtaggtgacaggtgggcagcctggtaggggtcgccagcctccatgccccctcatcttccagttcttgcttagtggcacgacctctttccatagcataaatgcaggccagcgttttagccccaagtgcctgcccttgcttcttacccctcccctgctttctcaaacacttgcccacctcaggcactcagcgggctccgccgtggtgagagaactggccgtggctcagccccgggtagcacctgtagtttcagtgccactctccactgtccccttgtggaccagcttccactcactgtcacgtcccccctcctgcgtcttcactgggtctcaggctg

SEQ ID NO: 800787 - DNA, 589 bp, Homo sapiens
tgcctttccttgggggcagctgtctctctgtacatgagcaaatgggcaaaaacagtccccaaacccagcacccccctctccctggctgcagcccacactgtaacatccctagtgaggctccagcctaatgagccccttattttcttttttttccctccccaggtctmgtagctctaactaaaaagttcttggagccatcgtgctccccctttgttatttttcttgctatcagagtagcaagaaacagcacccctgtaggtgacaggtgggcagcctggtaggggtcgccagcctccatgccccctcatcttccagttcttgcttagtggcacgacctctttccatagcataaatgcaggccagcgttttagccccaagtgcctgcccttgcttcttacccctcccctgctttctcaaacacttgcccacctcaggcactcagcgggctccgccgtggtgagagaactggccgtggctcagccccgggtagcacctgtagtttcagtgccactctccactgtccccttgtggaccagcttccactcactgtcacgtcccccctcctgcgtcttcactgggtctcaggctg

SEQ ID NO: 800788 - DNA, 576 bp, Homo sapiens
tgggccattggctggaatacctacatatgacctgtccatgtggcctgggcttgctcatagcatgactaccttggactccttgcaaggaagctcaagactccaaggcttgtacatcaaaataactagctaaagcctcctggcctttgatgtcctagcattcraagtcacatagcatcacttttccagcactccagtggacatttagtcactaaggtcactgcagattcagtgggagaagacggagaccctattttttgctgaaaggagcatcaaagatcaacttgcgggcctatttttaaataccccaggattccagcaaaaagaggacaataagcaacaatgcaaccctgcccacccagagatcatcacaatcaacatcttcatgtaaacttttctggatactgctttgtcgttgatttttataaagctgaaatagttttagtggagactcttttacttgaaagtgagagaaacccaattcaaactaatgtaagcaataaaggaaatatattggctcatagaactgaaaaatctcaaggggctgtcttcaggaacaggtggatccaggagctcaat

SEQ ID NO: 800789 - DNA, 528 bp, Homo sapiens
gaaacttgactttaccctcttcaaaagcaactggaggccgggcgtggtggctcacgcctgcaatcccagcactttaggaagccgaggtgggcagatcacctgaggtcaggagttcgaggccagcctggccaacatggtgaaaccccatctctactaaaaatacaaaaattagccaagcatgatggtgggtgcctgtagtcccagctactcgggaggctgaggcaggagaatcgctcgaacccgggaggcagagactgcagtgagctgagattatgccactgcactacagcctgggtgacagagtragacctgtctaaaaaaaaaagaaaaaagaaaagcaactggaagagattggggggagccttatgtgctggtatcgttcctaattacactcaccctgacaggggcagctccttgatgtaatgattcaacagactactgtctgcacaggtcctaggggtgccacatgagaacctgtcaccattataagccactaggtgttatttttctataaactagcctatttcc

SEQ ID NO: 800790 - DNA, 641 bp, Homo sapiens
gagttgaatgttaatcaccaagacaatggggtaaacgtctccagggcatgtcacagaccttggcagcagacccttccatcacaggcccagaggcttgggaggataaaatggttttgtaggcaggccccagggtccccctgttgtgtgcagcctagggacttggtgctctgcatccagctgctctagccatagctaaaagggtccaaggtataaatcgggctgtggctctagaaggtgcaagtgccaagtcttggcagcttccacgtgatgttgagcttccagcrcacagaaggaagaattgaggtttgggaacctccgcctagatttcagaggatatatggaaatgcctggatctctaggaagaagtttgccacaggggcagggtcctcatagagaacctctgctagggcagtgcagaagggaaatatgggtttggagcccccacacagagtccctactggggcactgcctagtggagctgtgaaaagaaggccactgtcctccagccccagaatagtagatccactgatagcttgcaccatgcacctggaaaagccatagacactcaatgccagcccatgaaagcagctgggagggaggctgtaccctgcaaagccacaggggcagagctgctcaagacc

SEQ ID NO: 800791 - DNA, 642 bp, Homo sapiens
gccatcagtgaaggatgtggttaggttaaaaaaatagattattttgactgaagtacaaggtcatatacctaggaattcaaagaaaatagcaaaccattttgttgtcttttgctttcataatgattcattcaaattgctgkgagattttattggctatgtgtattcagataacggagtggaagaaccattcaaaactaagtccaattgaggcaataattaatagcctaccaaccaaaaaaagcccaggaccagatggattcacagccaaattctaccagaggtacacagaggagctagtaccattccttctgaaactattccaaccaatagaaaaagagggaatcctccctgattcattttatgaggccaacttcatcctaataccaaagcctggcagagacacacacaaaaaagagaattttagaccaatatccctgatgaacatcgatgcaaaaatcctcaataaaatactggcaaactgaatccagctgcacatcataaagcttatccaccatgatcaagttggcttcatccctgggatgcaaggctggttcaacatatgcaaatcaataaacgtaatccatcacataaacagaacaaatgacaaaaaccacatgagtatctcaatagatgcagaaaagg

SEQ ID NO: 800792 - DNA, 621 bp, Homo sapiens
taggtgagtctggttatgaatcccaggtcaaccatggtataagtcacattctgtgcaaatgttatttagaattgtgttccacatgtgtaaattgagctggggaattgagacagtatatgtgttcttgaaaaagactaaaatgtgtgacttaatacctcagtatttcaggtgagtgtgttttttaatctaggtgtcacagaataattatcttctatttccatcgggtcattcatagccctcatggcttaattgattgaataattctgaattaagtataatttgagcttactgtttatgacctacaaatcatgtggacattataccttattagcttcatcagaatcaccactttcttcctccataaaaagctcattcattatgagccattcctaagagggagagagagagaaagaggaagagagagagaacaatctktataggcactggcctgattctcatagcagcttttccgtattgctattctaatgcagaatttgtgcttccacagtgatccaccaacatttaaacaatttaggtctactttggtgacctgggtcttagtatagatgtagtaaaagagtactttgtttaaaaggcacaaataaagccagtgcttattta

SEQ ID NO: 800793 - DNA, 562 bp, Homo sapiens
ccgactttgtcttacaggggtcctttgggaggactgacagaggaactgggaaaaaaacacagggagaagaaaacttctagccgaactttgtaacaattttgacagaatgtgaaatttcctggacggagtctgggggagggggtgaatagccagtgcaggcacagcacagaagttgccgcaggcacagggtggcacgaatcttgaaagccctgctttctcagccaggasgctggtagcctgggccaagttctcagtcctgcatgcctgctgcctggagatgacctcagtgctgttgggtggggcagtaggaatgagactagccttttgggctgcatgggagtggggtgaggcctgtaactgctggcttttccccacttccctagagacctgcatgacagcagatgcagtcataatccccctgggaacataactccattggtctgagaaccataccccatcccccacagcagcctcagcaagccccaaccaaagagagtctgagttcagacatgcctaaccctgtccccaccataggcacatagaccaatgaaacagaatagag

SEQ ID NO: 800794 - DNA, 562 bp, Homo sapiens
ccgactttgtcttacaggggtcctttgggaggactgacagaggaactgggaaaaaaacacagggagaagaaaacttctagccgaactttgtaacaattttgacagaatgtgaaatttcctggacggagtctgggggagggggtgaatagccagtgcaggcacagcacagaagttgccgcaggcacagggtggcacgaatcttgaaagccctgctttctcagccaggaggctggtagcctgggccaagttctcagtcctgcatgcctgctgcctggagatgacctcagtgctgttgggtggggcagtaggaatgagactagccttttgggctgcatgggagtggggtgaggcctgtaactgctggcttttccccacttccctrgagacctgcatgacagcagatgcagtcataatccccctgggaacataactccattggtctgagaaccataccccatcccccacagcagcctcagcaagccccaaccaaagagagtctgagttcagacatgcctaaccctgtccccaccataggcacatagaccaatgaaacagaatagag

SEQ ID NO: 800795 - DNA, 531 bp, Homo sapiens
aattctgttttgccttcctgctttgcttatttcttactctgtcaatgtcatctgcttcaagaaatgtatcttttaattaattattcttgtctcaagttgtctgctgtggctcactgtcagggcaataattcatatcggtaaaataggatatgttgctaaatggaaatatcttggcttatttcaacatgagattaacttcatttacccaataatcaccttaaatgakttttcagataaatctttttgttgtttatattttatttgaagttgcatacaacattgcttttctaaaagagcagaaatttggaagcatgagaacattaaactatagaagaccctagaagtctgattgaaaaaacatttagaaggaattctaaagctagaagccaagtccaacgacacaacaataacaattccattcatattctgatctatgggaaatctccaaaaaaggcctcccagaaatgcataataaaatatggatagttttgaataggttacacatggtttgcctgagtttattaaaacaat

SEQ ID NO: 800796 - DNA, 605 bp, Homo sapiens
agaaaattacccatttgtcacttgtgttgcaagtagcttttctcagtgggaagtttttgttttgactttatttatgatgatttttttcctgttcggaaataattggtcattttgcagcccaatttgcccaccattcttgttttgcttctgggattaatttattagccattccacacttcagagttaaaacattttcccaatgttttcttctaattctttcctagaaaaatatttttwaaaaaatcttaaagtgcacatacttttatgttggtgaagaaaaaaattgggtttcatttagagagcaagctcagtgccacagactgattcactgtctgaggaaaaccaaagacagatccaattttttggatatgtaagcattttgtgaacggttctaggagctccttatccaaactagtggttttcttaccctggttgacaattatcacgaccttgggaaattttctcaaacatgctggtacccagtatccaccacacaaagcaattgaatcagaacctctagggattgctgggtaagggctttttttaagtgctacaggtgattctaatgtgctgccaagactgagaaccactcatctaattacaca

SEQ ID NO: 800797 - DNA, 628 bp, Homo sapiens
gaagcatgtttgattactcaaattataccagaaacagttctaacacttcatatccccctcaaaaatgtttatgtgtaaatatgatgtgaagccaaatgtgttgtctttacttactgttttaaatgacagatgttatagttttatatgcaactttgtctctttccagttgtgtcacttaagattcctccctctcaattttcttatctgtggaaaggagctactgacactatcagtatatgctgtatgccacacactgttgacatcaaaagaaacaagagataatgttgtgacatgccctgcaatttgtgacacagtatactgctgttaattttgttgtcattattattattattgtcagtatgactctgtcaaataacatggaaagggagaagaaaatcttttggtcacaaayaatataaagcttatttggtagcaacttaccatgacacaagagaaaatgacaagcttctttcctacatattttttaaaaattaaatgttatattttattaataaccatattttgtcagaaaagaggaaatgtgcacattaaaaatgcttcaaaccaaaattagtccaatgtaattagtgtgaattatcaaaataccggcatataagagtatatgtgt

SEQ ID NO: 800798 - DNA, 619 bp, Homo sapiens
gtcttcttccaggatatattttgctgcagcttgttattcaaaaggtccagcgctttgcggcgaacagatggcaggggattgcccaccagccctctgatcacaggaatgaatgtctctgtgggcagcaaggcattgacctaaagagaaattttatatttaacatgaaaagaaaaacaaattaaaaaaaaaaycaacttcaattaagacagactgctgtccactgcacacctccaggcaccaggcacttccacacacattttcttatttaattcttaaaataacctttcaggtaggcattaccaaccacacattatcgaacaaaacaaaagcctgatgtcaggaggaagtgccaaaggcatgcagctaaatgactgagctagatttgaatcagcaatcctaacttcgaggccagtgatatgtatgtaatatacttcatacttttattttattccacttgaataaagtagaacagtatatattatatgacttaattattaaaatatacgaggtacatgttctcataactggtaaggaaacaattttttccagacaaatctatttctagtcatcaagagattgttttctaagaaaaatctgagcttcattatattcataaaag

SEQ ID NO: 800799 - DNA, 606 bp, Homo sapiens
gcacattaggctgatgatggtagtggggtcagtgttcagaattagtaagataggagtaatgaggactttttaattagaaggagaatttaagaatctgaacgtaaagcacttgaactaaagaatgttggagaaggccagcctttgataaagctcattaactgctcttcccaacattcactctgcccatagcatcaaaattattcttcctctaatctaccytggatcttgctgctccctaggcactcttattgcaggtagccaaactccactcacctactaaagttcacttaaaattctcctttcatttatttaatcagtatttatggagcatctattacataccatgtacaacgctagatggtgggaatagtggtataagttgtgcagtttcctagtctatttctgttcttagtgttattgtaaagcaatgacagaagcgtatcatagtggctcagaaaccaaatcgaaccagtaaagttactaagaatctagagaatccagattttgataaatacctttcaaaatgtgacatacgataagcaaacatctttcactaaatacctctgccctcattgctgaccttctcttttgaatttctaagtttac

SEQ ID NO: 800800 - DNA, 606 bp, Homo sapiens
gcacattaggctgatgatggtagtggggtcagtgttcagaattagtaagataggagtaatgaggactttttaattagaaggagaatttaagaatctgaacgtaaagcacttgaactaaagaatgttggagaaggccagcctttgataaagctcattaactgctcttcccaacattcactctgcccatagcatcaaaattattcttcctctaatctaccttggatcttgctgctccctaggcactcttattscaggtagccaaactccactcacctactaaagttcacttaaaattctcctttcatttatttaatcagtatttatggagcatctattacataccatgtacaacgctagatggtgggaatagtggtataagttgtgcagtttcctagtctatttctgttcttagtgttattgtaaagcaatgacagaagcgtatcatagtggctcagaaaccaaatcgaaccagtaaagttactaagaatctagagaatccagattttgataaatacctttcaaaatgtgacatacgataagcaaacatctttcactaaatacctctgccctcattgctgaccttctcttttgaatttctaagtttac

SEQ ID NO: 800801 - DNA, 414 bp, Homo sapiens
tgtttttgttagctcattattaaattgtattatgatgatctgacttccatatctaacccattgctgctacagctcagaaaatgaatagctgattattaagaactcatataatcacctgccatttctattattaaacttttgtgtttggtgagattttgctagtgccagtaacttaaaagcaatacttagaagtgaccagaaatatgtayagatgtacagccctttttttttttttttgagacagggtcttgctctgttgcccagtttggagtgcagtggtgcaatcacagctcactgcagccttgacctcccaggcacaagccatctgcctacctcaggcaactgagtagctgggactacaggcacgcaccatcacgcccagctaatttttgtattttttgtagaggcaggatc

SEQ ID NO: 800802 - DNA, 629 bp, Homo sapiens
aagtcctggtgagtgtgctggtgtgtgcactctgttcaattccgagggcctaattctgtccgtggaggtgcctttcttgctaggttagggctcttctgggttagccttggcgttctctttggcaattcctttgtttcctttgactattctcaaaagtgcacagagagtaatccctttgcaggtgtgacttctttgatttgagccaaaatgttaggaacataagtgtatgggggcgargggggaggattcctgattccaacacctctgaggaagtgcttagcagaagcctgctggtattagaacatccacgcggttaaccttcttttctccacacagatttagtatacactgccagacccgatgaaagagccataatgacttatgtttcctgttactatcatgcttttgctggtgcacagaaggtgaggatgtaaaccatgagtcactgctcacccttcaccttctgtgtcttaattttttttcaattgttttcctcttttttcccccctctcctccgagtaaggagactgtctggttcccaggaggcagttgtttgtcttttttagtctagctttctttgaaacttactttctgttcatgcagtggtatgccgttcatgtttgttttct

SEQ ID NO: 800803 - DNA, 528 bp, Homo sapiens
gaagtgagtcttacaggacaattggatcctttgtattcacttaaggtttactgtacacaatcctgaaaaatatgcaaacataaatagtctacagtgcaactcacatgaaaaaataaactgtgtgtagttgatgacaactaatctgtcattcatctggtttgtaattcatactcttaggtaaatggaattcacagatgctaccacatctcaaatgtattcctttgcccagtgattttgtaacacttaaagggttttattggtaaatttcaagtttggccaattgacttctcaccaaaaaaaaaaaaaaaaaaaaaaggaaaaacccagcaccatctgtgatgaccataaaaatgtgccgctcagacrtcccacggcttcagctgcgagcacagggcaggcaactgacgtgccagctgcagccccctgaatgcaccacacccctgcattcccactgaggccacattccccagagctgctccagccaaagactggggggtgagcagcagagctgagacacccctatgcgac

SEQ ID NO: 800804 - DNA, 557 bp, Homo sapiens
gaatggcatatttagtgaagggcaagtagtgcagtatggccagtatggggcagtgaccagcatggggcataaggaaggcatagggtaggttgggactgaatcctacagcgttgtaaagtcccagcctggaactgaaccacgtatcttggagagcaaggagccactgatgattctgaggaggtaaaactatctgaactggatcagagagaaagataactcatgcaacaatgaagaaaagtcgaagttggaaatttgatatgtcatgaagctactgaaataatccataagagtcaaaaagtacttaaattatagcagaatcaaggtattggaytgggaagaaagttcaaaggaagaaaggacagaacttggcaattgatgatttggatgtcaagagaccctggagtttaaagagaatggagaacaagaaatggaagacgactgaggcttctggcccaaatgaaagcaagggtagaagtcctaatagccatgataagtaaatacggcaagaggagcagtatgcaggatgacatgttaaattaagtgtgctaagttttagt

SEQ ID NO: 800805 - DNA, 505 bp, Homo sapiens
ggctaatgtcagttggccacaccatttaatgatgatgcagatttacatcgttaatgtggagatgtctgtgatatattggtgcatttgttatctgctgctgtgcaacaaagtacccccaagcttagttgcttaaaacaataattgtttatcatctatcacaagttctgcagattgggaatycagacaggatgctgtagaaacagcttatctctatcccgaagtatctgggacctggattcattagaggtacattctctcatatgtctaggtacgttctcttacatagctaggtggtaatgctggctggctgctacaagactagctgggaccactttacagcatgtggctgggacccaggggcaggtgtaaaaagagagaatgagtgagtgccagatggaagccatatgctttttctgatctagcctcagcattaacccccgactatttgcagcatgcttgttagttagaagccagtcactaagtctatcccatactcaggccagaa

SEQ ID NO: 800806 - DNA, 643 bp, Homo sapiens
gtacctcacaaacataaacaattattatttgtcaattaaaaaataaaatttaaaaaagaatgtttacttttgaatactacaagcaattctgcaatagagttttttttatgtgattttaaatctatattatagattctctctagaacattcgtaggagttcgcatttttcacattaatatttattaccagattattttagtagcaatttaaactttctccagcagtgtaaaataatgaccatttcctcatatctccttcagcagtgaatagtatcagtaatttttaattggtactaatcttctaartggaaaggttatctaagtattttaatatgcagttatggggacactaatgatattgatcttttacaatatattagtacgatccgtcacatttccttctttatcaatgccctggtcacatccattcattccttggattgtttatatattgtaggcactctacgtttggcagattaacccaccgtgtgggtcatttattcatctgatttacagccattgagtgcctactacttatcaggcacttttgaaggtagggagtgcagtggtaaacaaagcacagtatatgttctcatgaagcctacattctactgggagaggcaaggaccaagtaatctaaagtc

SEQ ID NO: 800807 - DNA, 528 bp, Homo sapiens
atgaatctggctgacagaaacaagtaagtactccataatagttattatgattatcaccattaataccattactactgtgaaaggaaagaaaatgtagaaaaagaaagctaaatcttcttctcctcctgtgcccgcctgtcagtgaaaaagcctcattttgagcctaaactgccctatggaggagggagatgaagaattgacagctagccctgtccaagaagtttttattcaacttcagaaggcmaacatatggatacaattacacaatgctgtattgccaaatggcaagtacataaatgcttatgaaaatatttataaaataggccacacctagagattaaaaagctgctcacacatgcccttggcatactgtgtgctgaagtagcgaagatttttttcagtatttaaatatacttcttttctaattacaacccaatggagctgaattttactgtttcctcggaggactggaacagctaatgcttcatcttacagaaccccatctcctgttattagcataatgacaat

SEQ ID NO: 800808 - DNA, 679 bp, Homo sapiens
atataagaattgctaaaggaagcacttcaatcagaaagagaaggacattaatgagcaataaataatcacctgaaggtacaaaattcactggtaatagtaagtacacagaaaaacacagaatattataactataaccatggtgtgttaactattcttatcctaagtagaaagacaaaatgatgaactgatcaaaaataataactacaggctgggtgcagtagcccatgcctgtaatcccagcactttgggaggctgaggtgggaagatcactggagttcaggagttcaaggaggtgggtagatcactggagttcaggagttcaagaccagcctggccaacatagtgaaatcccatctctaccaaaaatacaaaagttagccaggtgtggtggggggyacctgtaatcccagctacttgggagtctaaggaggagaattgcttgaactgggaggcagaggcttcagtgagccaagattgtgccactgcactctagcccaggcaacaagagcgagattccatctcaaaaataaaaaataataaaaacaaataataatacctataacaacttttcaagacacaatcagtacaatgaaatataaatagaaataacaaaaagttaaaaagtgaaggtaaaaagttaaggagtagagtttttattagatttatttttgcttgtttg

SEQ ID NO: 800809 - DNA, 679 bp, Homo sapiens
atataagaattgctaaaggaagcacttcaatcagaaagagaaggacattaatgagcaataaataatcacctgaaggtacaaaattcactggtaatagtaagtacacagaaaaacacagaatattataactataaccatggtgtgttaactattcttatcctaagtagaaagacaaaatgatgaactgatcaaaaataataactacaggctgggtgcagtagcccatgcctgtaatcccagcactttgggaggctgaggtgggaagatcactggagttcaggagttcaaggaggtgggtagatcactggagttcaggagttcaagaccagcctggccaacatagtgaaatcccatctctaccaaaaatacaaaagttagccaggtgtggtggggggcacctgtaatcccagctacttgggagtctaaggaggagaattgcytgaactgggaggcagaggcttcagtgagccaagattgtgccactgcactctagcccaggcaacaagagcgagattccatctcaaaaataaaaaataataaaaacaaataataatacctataacaacttttcaagacacaatcagtacaatgaaatataaatagaaataacaaaaagttaaaaagtgaaggtaaaaagttaaggagtagagtttttattagatttatttttgcttgtttg

SEQ ID NO: 800810 - DNA, 626 bp, Homo sapiens
aaggtttgtatagaaagtgcttacttatcaagaatggaacaaagatgacaataaaaatgtgcaattatataattaaaaatagatatgacacatgtaaatacattaatgagattattcaatttagccatttttattacttatctactgctccataaaaaattatcccaaaacttactggcttcaaacaataaacatttattatctcatagtttctgtggatcaagaatttagctgaatgactcaggttcttttatgaggctgtagtaatgatcttrtctgctctcaaaatgcctcacttaacgtattttagtttcttagggctgttataacaaaatactgcaaactaagtgccatagaacaacaaaaattaattctctcatagttctacaggctagaaatctacaatcaaagtgtcagcagggttggtttcttctgagggctgtgagggaaggatatgttccaggcctctcctttgtcttgtagatagtgtcttctctctgtgtccccataccttgccttccctgtatgtgtgtctgtctctgtatttaaatgtccttctctttataaaaacatcagtcatattgaatcagatttcaccctaatgaccttatctagttacatctcca

SEQ ID NO: 800811 - DNA, 626 bp, Homo sapiens
aaggtttgtatagaaagtgcttacttatcaagaatggaacaaagatgacaataaaaatgtgcaattatataattaaaaatagatatgacacatgtaaatacattaatgagattattcaatttagccatttttattacttatctactgctccataaaaaattatcccaaaacttactggcttcaaacaataaacatttattatctcatagtttctgtggatcaagaatttagctgaatgactcaggttcttttatgaggctgtagtaatgatcttatctgctctcaaaatgcctcacttaaygtattttagtttcttagggctgttataacaaaatactgcaaactaagtgccatagaacaacaaaaattaattctctcatagttctacaggctagaaatctacaatcaaagtgtcagcagggttggtttcttctgagggctgtgagggaaggatatgttccaggcctctcctttgtcttgtagatagtgtcttctctctgtgtccccataccttgccttccctgtatgtgtgtctgtctctgtatttaaatgtccttctctttataaaaacatcagtcatattgaatcagatttcaccctaatgaccttatctagttacatctcca

SEQ ID NO: 800812 - DNA, 626 bp, Homo sapiens
aaggtttgtatagaaagtgcttacttatcaagaatggaacaaagatgacaataaaaatgtgcaattatataattaaaaatagatatgacacatgtaaatacattaatgagattattcaatttagccatttttattacttatctactgctccataaaaaattatcccaaaacttactggcttcaaacaataaacatttattatctcatagtttctgtggatcaagaatttagctgaatgactcaggttcttttatgaggctgtagtaatgatcttatctgctctcaaaatgcctcacttaacgtattttagtttcttagggctgttataacaaaatactgcaaactaagtgccatagaacaacaaaaattaattctctcatagttctacaggctagaaatctacaatcaaagtrtcagcagggttggtttcttctgagggctgtgagggaaggatatgttccaggcctctcctttgtcttgtagatagtgtcttctctctgtgtccccataccttgccttccctgtatgtgtgtctgtctctgtatttaaatgtccttctctttataaaaacatcagtcatattgaatcagatttcaccctaatgaccttatctagttacatctcca

SEQ ID NO: 800813 - DNA, 591 bp, Homo sapiens
taatttgcagataagaaaactaaaattaagaaatccctttgccaaggttacacagctagtatgtggattacaacctgagcccaggtcaaatttctaatcttgtaaatttacaagtcttccaaactctccatggttattaaaaaaatcctttaatttggaaataataattagcaacyatcagctacaagaagccttacttcttgtgaagtgtaggtcttgtgaaatataaatatatgttttcacaatatatagtgtaattcttgaagataatgaatagccaaatttatcagtcttgcccctagtcctaggcatatttgtctattgaagggaatcaaaaatgtatattaaaataaattggtattatctctaacattgggtacaaattgtaacatatgtggctctgcttttgttactcccagagtagttgctattaatttaaaggataacgcatttgtgtaaatgtatataagtgtatttggataaatcatggcaccatttctaagagcaagtaggcaaggatgcaaatatattatggaatataagaactgtaggaatttgggaatcgtagttggctttttagctataggatcc

SEQ ID NO: 800814 - DNA, 606 bp, Homo sapiens
ctcggacgcaaggggtgtgtagggatcaagttacggaatgctaaagtgttgtctgtctcttcctgctgctgccctctttccctgagaaactaaaagttcaaaattcttacctacatctaatctgattcagtaagtatgtccaattgaggaaattaaatgcactgcctcactgggagaagacagaatgacaatttagtgttgtatacatagtgttcattcattgtgtcacattgaccataaaaaagtaattctcacatcctagttgctatagatctgcctttttcccctttgagtttgtattgctgatagaacttaaatgtgcttggttagagaaaagtggatactgattaaattttaataattggraaccagagggctaggccagatagcatgtcaggattccataattaggtaatgaggtaaaaaagtttcaggtaatctgatttgcaaagagttgtcaaattgaaatcagctgcatttatgttttattctcataatagttatcttaggagaaactatagcatattaaattggctaacttttttagaacatctaatcactgtatttgagtatttctatcatgtattattgctttaatgtttattc

SEQ ID NO: 800815 - DNA, 507 bp, Homo sapiens
gacagcaaaattaaaaaaattaatatgtagattcaaaagtcaaatggacaatggaaaaatgagagaaaacgttctagagattcacataaaaagactagaagtctatgttgaccacagtacccaaatgcaccaaaattacggcatgactggcaaaaaccctaaagaaatcttaggtttatttgctcaaaaacatttgttacacacgtaccatgcatcaggaactatgttctcggctctagcaataagaacgtacatcacyagtaaagaattttaaaataataattacgccgacttcagtcattcttctttttattcttaacatgagttgacaactctaaacatgtcaaagaaataattcctcttcctgcccaagaggatcactccacaatcttcctcccatttccaacccggagtacatgtctggactccagatctgtatgactaaaacaagttcgtgttcttttcattagagtggtgtctttcaaacttttttgaccacagccttca

SEQ ID NO: 800816 - DNA, 612 bp, Homo sapiens
acaggcctcaccccttcctggtgccccaagtctctcctaacattttattagctgagttttctggcggtttgttacttttcacctgcccgtccaaggcagctacactaaactacttgtccagggcagatccactcgtaatgaccatcagctcagagttggaagtagcgctggagaatgaggtggtttcaggttgctatgcttccctgccctctcttccagggatgccaagtaagtttctgccrtggctgatgatgtcagtactacactgaaattagttcaacggcaggctaccaattagtacttactgaacaacgtccttaagagtgaaaccctgtctctactaaaaatacaaaaatttagctgggtgtgttggtgagcacctataatctcagctactggggggctgaggcaggagaattgtttgaacccaggaggcagagattgcagtgagccaagattgcaccattgcactccagcctgggcaaaaagaacgagactccatctcaaaaataaaaaaaaaagaaaaagaaaaagaaaaagaaaaaaatgattctcacgacactgtcaacatcttaagttcttccggagggtagcgtaaaattatcacacaca

SEQ ID NO: 800817 - DNA, 612 bp, Homo sapiens
acaggcctcaccccttcctggtgccccaagtctctcctaacattttattagctgagttttctggcggtttgttacttttcacctgcccgtccaaggcagctacactaaactacttgtccagggcagatccactcgtaatgaccatcagctcagagttggaagtagcgctggagaatgaggtggtttcaggttgctatgcttccctgccctctcttccagggatgccaagtaagtttctgccgtggctgatgatgtcagtactacactgaaattagttcaacggcaggcyaccaattagtacttactgaacaacgtccttaagagtgaaaccctgtctctactaaaaatacaaaaatttagctgggtgtgttggtgagcacctataatctcagctactggggggctgaggcaggagaattgtttgaacccaggaggcagagattgcagtgagccaagattgcaccattgcactccagcctgggcaaaaagaacgagactccatctcaaaaataaaaaaaaaagaaaaagaaaaagaaaaagaaaaaaatgattctcacgacactgtcaacatcttaagttcttccggagggtagcgtaaaattatcacacaca

SEQ ID NO: 800818 - DNA, 574 bp, Homo sapiens
gtgacggtagcacgtttgggactggggcgggggctccaagaggacttccaggaaaattgaacagattctcaccaggttgtcagtgtttgatcgtgggcaggaaggtatgggaaagagtttttcagttctgctggagaattgtgaaaggattggcaataggtacattgtaagccaagatagtggaaaatagataaaatattaactccagaatcattgaaaagcgtaagatagaacggtatttgtagcacactgcggacgctgatgttgatgaccacagtggcgtraggggtggtgtctaaaaaggacaattcaggaagtcatgtggtaagtccatgtttatgaatgtaagtgccaggtagctactgtttttcatgtgagacttgataatactctttgatttcctaaaatgcatctgtttgataaaaaggtaattgaagatcatttttaaaagatcagttgtagatgatgactggaagaggttggagcagcagacagttcagtcctcaggaactgatggtgatttggatgccctgaaagaaaagcacatgaaacttagcaaaatgacggtgtagga

SEQ ID NO: 800819 - DNA, 628 bp, Homo sapiens
caggcactgtgccaggtatttggcaatatcagaacacaaaacataaaacctctgcaccttcgtggcacttcaattcctggccaggtgtgctggctcacacctgtaatcccagtgctttgggaggctgaggtgggaggatcacttgagcccaggagtctaagaccagcctgggtaacatagtgaaactccatttctacaaaaaacaaaattaattaattgggtatgacagcatgcacctgtagtctcagttactcagtaggctgaggtgggaggattgctygagcctgggaggtcgaggttgcactgagctatgattccaccactatactccagcatgggtgatagtgaccctgtctcaaaaacattcaaattcccacatcatagtttttacaacaccaatataccatgcaaccatctccctgataagcccaatcatttactggtcaatgcacagaatgtgaagatattatgaggcacacacaggaactaaacctacatgaatttttatcttttgctaaaatgagatttgggtgaactaaataaaaccaccatgagtgttcaaaggaaaatacttttcaagtgaactgaaacaaaaattaaaatctatgaaatgcagccaaaataatga

SEQ ID NO: 800820 - DNA, 641 bp, Homo sapiens
aggaaatgttttcaaacactcacaaaattatctatattaaaatgtttttgctttattaatattttttcttttccttaaaccttaaatcattttctttgctgggcttttttttttttttttttttgtggttgttaactgttttatgtcattgaatttttttaaccaccacaagctctttttgtatctttaccctgccctgcatatatttttgtaagtcagcaggatacaaataaatttttaatatagattatgggaacactaattaaataaaattttaattttaaaatatatttctcygaggaatgctaattaaatacaattttaattttaaaatatcttagtctgagcatacataattctgacatcttttgcagcctagcaaaatttgatttctaattactgatttaataggccattaagtacatttggaaattattattgaactgattggatagatgttcagagttgcagttgtcttctatgaaatgctgcccaaattttttctgttaaccagtaaggtgacatgggctatcacagagtaaaacatctaaaatgacaaaaagaaattctcaagaagtatttactaaccaatctcagtgaagaaaagcttaaagaataattttattattttctatctacat

SEQ ID NO: 800821 - DNA, 600 bp, Homo sapiens
agtctatttacattgatttcaacttgtgaaatatttgagctggaaaatatattttgggttttcctggttcaatggtttcaacctaggctgcagattagaatagcctacagaacctctaaaaatacccatggggacgggggacaaagcagtattcaaaccaattaaaacagaatctctgtggggtaaggctcagacctcagcactcgtgaaaggtcacaagatgattctggtgtgcggctaagttaagaagcgctggcktagttcaacccactcataccatcctgactaagacaggttgtagtcccttagtccatttgccatttgggccggttataacaagattcctgggactgggtcatttattaaaacagaaatgtattttctcacagttctggaggctaggaagtccaagatcaaggtgccagcatccggtgagggccttcctgctgtgtcctcagatcacagaaggtgggaaaggggaagagggagccaatctctccatcaaggccctttatagggtacctaatcccattcacaagggaggagccctcagggcctaatcacctctcaaagaccccacctcttttttttttttttttg

SEQ ID NO: 800822 - DNA, 609 bp, Homo sapiens
agtaggagtccaataattgtttgtgaggtggttgatgcaatatgcttccaggagatttagcctttaggaatgcagcatcaggaacaaaatgcttttttaaatgttcayatttttaaattgtaaattggcaaataatatttatatatggctagggtacaaagtcttgtttagatttatgaatacaatgtggaataactaaatcaagctaattaacatatacgtcacctcaaatacttatcatttttgtggtgagaatatttaaaatttactcccttagcaattttgaaatgtacattattattttctatagtcaccatgctgtacaatatcacacacacacacacacaaatattccacctgcctgagattttgtaccctttgaccatcagctacccatttctcccatactccagcctctgtaaacaccattcttctctctgcttctttgagtttgactgtttcggattccacatataagtgaggacatgcagtatttttctttctgtgccttgattatttaatgtatttaaatgttttccaattccatccatgttgttgcaaatgacaaagtttatttttatggttgaatagtaccccattttgtatata

SEQ ID NO: 800823 - DNA, 238 bp, Homo sapiens
ctcctctgacaatattttcaaataacttgtctttggggtcacagatccttttcttctgcttgataaattctattgttgatactgtattgcattttacatttcacttattgtattttttcagctccaggatttctgtttctttaaaaaattacttcactstctctgtagacttcttgttctgataacttattattttccttattttattgaattgtttatctgtattttctggaagttc

SEQ ID NO: 800824 - DNA, 499 bp, Homo sapiens
tctcagcccagttctctgcactggaataatgtgatcctcatttcctgaaatttagtcataacgaaggaagtgatttgaaattagcttctcttataaagatagaggaatcctgatgaattagagctccctttcacctgggacttgcctccatcacacttggcgatccccacaccgccctttgagctgagctgctcttgagggcagacgaactgccctactgggtcaagttgtcatcarttacatccatcagtgctttccagagaaaataaaagggtactttcctcaatctatctgttattgcagtaagtaaaaaacctgaaaatccagattagcacaattcatcttcaatgaggattcttcactttaggaaacaatgtgcttctctggggcactaaaaacaagtttatttccaaaacaaattttgatcaatgctcaacagtttttaaggatgtatctcaaatgatctaagaatatgcatcgaccattatttataagtaag

SEQ ID NO: 800825 - DNA, 574 bp, Homo sapiens
caagattcttagcttccttgcactgggttagaaaattctcctttagctcagaggagtttgttattacctatcttctgaagcctacttctgtcaatttgtcaaagtcattcactgtccagtttcatttcctttctagcaaggagttgtgattttttggaggagaagargcattctggtttttggaatattcagcatttttctgctggtttttcctcatcttcatggatttaactacctgtgatctttgatgctgatgagctttggatggggtttttgcgagggtgtcctttttgttgatgttgatgttattgctttctgtctgttacttttccttttaacagtcagagccctcttctccaggtctgctggagtttgctggagatccactccagacccttttttcctgggtatcaccagcagaggctgcagatccaaagattgctgcctgcttcttcctctggaagctttgtcccagaggggcatccaccagatgccagccagagctctcctgtatgaggtgtctgtcgacccctgctgggaggtgtcgacttctatagatagaagttttatctat

SEQ ID NO: 800826 - DNA, 585 bp, Homo sapiens
agtgcctgggctaggtgccacaaagtcccatggcaagtgccatcgagaggtgaagccgggctgggcttctgggtcaggttgggacttggataacttttctgtctagttaatgcattgtaaatgcaccaatcagcactctgtgtctagctaaaggattgtaaacacaccaatcagcactctgtgtctagctaatctggtggggacttggagaacttttgtgtctagctaaaggattggaaacgcaccaatcarcactctgtgtgtagctaaaggtttggaagtgcaccaatcagtgctctgtgtctagctaatctggtagggacttggagaacttttgtgtctggctaaaggattgtaaacgtaccaatcagcactctgtgtcttgctaaaagattgtaaatgcaccaatcagcactctgtcaaaatggaccaatcagctctctgtgaaacggaccaatcagctctctgtaaaatggaacaatcagctctctgtaaaatggaacaatcagcaggatgtgggaggggccagataagagaataaaagcaggccacctgggacagcagcggcaacctgcttgggtcacc

SEQ ID NO: 800827 - DNA, 599 bp, Homo sapiens
ctcccaaagctccagcccattccaatgtcaactgcattcgttgtttttgttactctcattgtgtcaaatgggttctttcctatgcaactagattgtaggttgctccaaggtaaacaccgtgatttctagttcctttgtttctaccactgcaggactgtaggaagcccagttgtaggcatcactaggactcagtaattacataattgctcagataattgagagaawgattgattgattagtggtcattaatgccataaaatgaaggaatttcgcccctcacattttcaagaacctatgagttcgaagagacctgaaagaacatttttatgggagcctacaccagtgctatcacctaaagtgcgtgaccttagggaagttgcttcaccccttgtttctgtgcctccaaaatactggtgttaatacagtaatttctgattccttccacctgtgccctgctcagcgatccagtgttcaagctggtcatcaggagaaagctacttatgatttcctaacaagccaccacagaacatcacattcccaaacatgctcttcaccgtccctgctgtccccacgtgcctagccctggtgtgggcaggaat

SEQ ID NO: 800828 - DNA, 373 bp, Homo sapiens
aaattatactttgtctctttgcttatttgtgaattaattaagcagaaatttttcttaaaattaaggacaatgtctattaataattttaattctcatcacccatcacagcacccagggcttgtttggcactcaatgcatacttgttaaatgcatacatctaatgtacaaatgcataagtagtggaattatgggcatctggcaggcaaagwggacagatattttgttacaggcactctttcatttgtgcttttaaaattactgtgatgatgatgtgaaaggctggccttattttagtgcaaattctaatctaattattttcttctgactcgcaggtaactttcttctcctgtttaatattgctgatatattgata

SEQ ID NO: 800829 - DNA, 634 bp, Homo sapiens
gcacatgttgacaactctctttttgcccaatatcccttgttcctacaacataatcataaactgctgatgtactgtttctttatcaagcaggaggagataataacttcagggttacgaaaaagtttgcaggaggaataagtcctttgaagtactttgaggccagcttctgtcgcccagaagtctgattgttcaaggaattatctgagactgaagaaacacagactttttccctcgattccctgaaactccccctccctgactcgctggccgcataaacactctctgcttcttctttttgttagggcggatttgagagatcttgccctcccgccttctcgctttggccaaatcgaataaacttttatctccaagcacctatatgtcagtgtttggcatcagctacacatggggtacacgagcctgagtctgggcttctacaacgctgggaccctcgctgttctttggagctgatggtaaattcaacagaaaagaggcgcrtgggtagaaaatgcagcatttcctctcagatgccagatattcatctccaaaggtattaaaaggagggggtgtgtgcctgtgtaaagaggctggtcttttcctagcagtacgatttgggcaagttgcttgatctgct

SEQ ID NO: 800830 - DNA, 592 bp, Homo sapiens
gtggtggctcatgcctgtaatcatagcactttgggaggccgaggcaggtggaccacttgaggtcaggaggttgagaccagcctggtcaacatggcgaaatcctgtctctactaaaaatacaaaaattagccaggcatggtggcagatgcctataatcccagttactcaggaggctgaggcaggagaatcacttgaacccaggaggcggaggctgcagtgagtcaagatcacaccactgcactccagcctgggtgacagagcaagactccatctcaaaataataayaacaacaacaacaacaacaacaacaacaacacaatggcctctaagtgttcaagtgaaaggatgagttacacatctcttgctttaaatcaaaagctagaaataattaagcttagtgaggaaggcatgccaagaactgagatgggccgaaagctaggcctcttgtaccaaacgttagccaaattgtaaatgcaaatgtaaatttattgaaggaaattaagagtgctactcttgcgaacacataagtgataagaaagcaaaacaaccttattggcaatatgtagaaagttttagtggtttctggatagaa

SEQ ID NO: 800831 - DNA, 591 bp, Homo sapiens
atctcatgtctcatcaaccattcaacagaagagaaaactgaaactcagcaaggttaaatgacttctccaggtattcgtggataataaagtacaaaacagatctaaatggaaaaactggaaaaaagtcagtgatattgattgtactacaggataaaatccaacctccttagcaaatatgattaaattcttttatcttcaactttattttcaaccaactaatccccttggtccttgtgctctggccacacggaatgacttaragttctcagaaattgctttaaatctcagcatttttgcccaagcctttgtctctttcttaggtgacttcctcaataccccttcctaatctagaaaattccttcctacacatcctgtcatcccatccaacttacttggagataatttaatcaccccttcctttgtactacttttggacctcagacattatatatatacatatatattcaataaatacttgtgggatggctatatatatttatatatatatatatacatacaccacatgtatataatacacacacacacacacacaccaggtcctatacactaggttttgttttttctttcttt

SEQ ID NO: 800832 - DNA, 591 bp, Homo sapiens
atctcatgtctcatcaaccattcaacagaagagaaaactgaaactcagcaaggttaaatgacttctccaggtattcgtggataataaagtacaaaacagatctaaatggaaaaactggaaaaaagtcagtgatattgattgtactacaggataaaatccaacctccttagcaaatatgattaaattcttttatcttcaactttattttcaaccaactaatccccttggtccttgtgctctggccacacggaatgacttagagttctcaraaattgctttaaatctcagcatttttgcccaagcctttgtctctttcttaggtgacttcctcaataccccttcctaatctagaaaattccttcctacacatcctgtcatcccatccaacttacttggagataatttaatcaccccttcctttgtactacttttggacctcagacattatatatatacatatatattcaataaatacttgtgggatggctatatatatttatatatatatatatacatacaccacatgtatataatacacacacacacacacacaccaggtcctatacactaggttttgttttttctttcttt

SEQ ID NO: 800833 - DNA, 668 bp, Homo sapiens
ctgacagagcaaatgcataaacgtgtgtccacagcaccttacagtttccaaagcacttatcacatagattattttatttgatcttcatgttgcccctgaggaaggagtctcagtcagatcctctccacttcactaatacaaacactggcttacagaagtaagctagcttgcccaagataaggaaaagcaccagtatgagaagcccaggttttggactttttcgcagggattttcctcctctttcccctgcctctcattccccctaggctggccagctctagtctgggctctaggaggcacctcaagattcacactgaataagtcttctttgccctttccacccatagccacactggtttatttccactcagtggggttcctcctccctgaattccactaaaacgatccaatagatctcaccctccctccacaaacccaacaaaaggcccagggaaaactacatctcargtatgcaacattcttgtctattttgtatcttgagacccttagcgtcactttctgtgatgaaaagaacttggttgtcccaagagacacagcaaaggccctcctgattccaaaaggctgctttccacccaaggaatcttggtcagcttggtggcagcccttagaagcaaaagtggccctctccatcagtccccagccctctc

SEQ ID NO: 800834 - DNA, 639 bp, Homo sapiens
gttctgtatttttatcctgccaaatgtgatttcttaaaagtattttgtgtgttattatttcctgagttgtggagacctgcatacctataatagagccatattttctgctagtaaataaaattattcctcattcaggtgatgggaattaaatgtgtcacagcttggtggcattccctaaacaaccccagcggttccaggtgctctaccacctggatgtgtctgggaaggcttgtggtgggggtgggcattgacaaagcctctcccagacagaraagtcgtgccaggagtgacctcagtgtttctcagaaaaatggtgcacttttatccatcactggggtatggagagttggctgggaacacctggactagagctcaaaggaccagagaaggtgaagagtgttagaatgatagagtcagaggaattgtttcacttgcctctgaggaatttgcctctgaacaagaaatgaggtttaggcaaatggaccccaaggatttaagaggtaagatggcatcttggacgtcacacagcaaatagaaaaatccagatggtcagggaggaagtgagctatggtagctacaaagtgagggctacttcaggggctctggctgaagatttctcagtatgaggggatttggggc

SEQ ID NO: 800835 - DNA, 611 bp, Homo sapiens
aggtaataaggctggtgccttaatcagataggattgtggccttataagaagaggaagatcctgctctctttctctctctctctgtgtcatgtgaggacacaaagagatggtggccaactggaagccagaaagaaagagtcctcaccagaactcatccacactggctccttaatattgaactttccagactgcagaactgtgagaaaataaatttctgttgtttaagcatctagtctatggtatttggtatggcartgcaagctaaggcagatgagatgatactaagaaaacttttaattcaaagtataatttaattctatctttaagaagaaaaagagaaagtaaaatgagacaaaaaggaattaccgaagattcctagaggaggaattgtttgtttcttggaaaacaaagagtaaattttttaatgcaaacttacgctctcttcacaaggaaataaaaattcacattttcactacatccttgccaaaactgagtatgttattttcaaaaacagtaatttttttccaatgaaatatgtattgtcttaatttgtgtcaatttgattcctggagaggtaatgtttttcatttgaggataatttatattttttt

SEQ ID NO: 800836 - DNA, 616 bp, Homo sapiens
gtttttttttttttttttgttttttttttttttccagtttaaaggcagctgctggctcctttgcatctagcagttttgctgcaagatgtaaataactttcgttggggtcaattttttttttcctattcttctaaacttttaraattctcattcttttcttcttcatttgttgtttagtgtactgtgaaatccactctttcatatttgcttccatatttccttcttccttttttggcttcatcttagggtcttattcttttgtttgtttgttttgttttaggttgcaatggaggtgaaatagtgctttgtataggagactgcaatttcagcctacttttaggttgttgcccttcaaattcttaactgaatctttcagtgcatcatttgcaaggtttaaacagagccaatccaaggcagaatgaaggtcacctccatgtaagagagcattggtcgtgacatcttcaatgtcttagtcttaaataaaaatgcttgtaaagctgtgtaaaaatcctgcaattttttggcattaagtcttccagaaatcactcccttgtcattgttttgcttgtcattgctcactcccataattccttgctctaatttgttattaattacc

SEQ ID NO: 800837 - DNA, 628 bp, Homo sapiens
tttcttacatcatgaggttctttttatctttctcttcttcagtagcagctgcagatttttcaaataactgaaaagttcaatgcactttctccttctatggccacaggaggctttttttctttcattttgttgatgtgaaatctttatggctggattaaatactggatcatcttctaaagtttcaatttctctttgaaatttccttattttttcctgagcctccttttggtcttgcctggttttttttttttttttttttggtttttttttttttttttgttttttttttttttccagtttaaaggcagctgctggctcctttgcatctagcagttttgctgcaagatgtaaataactttcgttggggtcaattttttttttcctattcttctaaacttttagaattctcattcttttcttcttcatttgttgtttagtgtactgtgaaatccactctttcatatttgcttccatattyccttcttccttttttggcttcatcttagggtcttattcttttgtttgtttgttttgttttaggttgcaatggaggtgaaatagtgctttgtataggagactgcaatttcagcctacttttaggttgttgcccttcaaattcttaactgaa

SEQ ID NO: 800838 - DNA, 616 bp, Homo sapiens
gtttttttttttttttttgttttttttttttttccagtttaaaggcagctgctggctcctttgcatctagcagttttgctgcaagatgtaaataactttcgttggggtcaattttttttttcctattcttctaaacttttagaattctcattcttttcttcttcatttgttgtttagtgtactgtgaaatccactctttcatatttgcttccatatttccttcttccttttttggcttcatcttagggtcttattcttttgtttgtttgttttgttttaggttgcaatggaggtgaaatagtgctttgtataggaractgcaatttcagcctacttttaggttgttgcccttcaaattcttaactgaatctttcagtgcatcatttgcaaggtttaaacagagccaatccaaggcagaatgaaggtcacctccatgtaagagagcattggtcgtgacatcttcaatgtcttagtcttaaataaaaatgcttgtaaagctgtgtaaaaatcctgcaattttttggcattaagtcttccagaaatcactcccttgtcattgttttgcttgtcattgctcactcccataattccttgctctaatttgttattaattacc

SEQ ID NO: 800839 - DNA, 616 bp, Homo sapiens
gtttttttttttttttttgttttttttttttttccagtttaaaggcagctgctggctcctttgcatctagcagttttgctgcaagatgtaaataactttcgttggggtcaattttttttttcctattcttctaaacttttagaattctcattcttttcttcttcatttgttgtttagtgtactgtgaaatccactctttcatatttgcttccatatttccttcttccttttttggcttcatcttagggtcttattcttttgtttgtttgttttgttttaggttgcaatggaggtgaaatagtgctttgtataggagactgcaatttcagcctacttttaggttgttgcccttcaaattcttaactgaatctttcagtgcatcatttgcaaggtttaaacagagccaatccaaggcagaatgaaggtcacctccatgtaaragagcattggtcgtgacatcttcaatgtcttagtcttaaataaaaatgcttgtaaagctgtgtaaaaatcctgcaattttttggcattaagtcttccagaaatcactcccttgtcattgttttgcttgtcattgctcactcccataattccttgctctaatttgttattaattacc

SEQ ID NO: 800840 - DNA, 616 bp, Homo sapiens
gtttttttttttttttttgttttttttttttttccagtttaaaggcagctgctggctcctttgcatctagcagttttgctgcaagatgtaaataactttcgttggggtcaattttttttttcctattcttctaaacttttagaattctcattcttttcttcttcatttgttgtttagtgtactgtgaaatccactctttcatatttgcttccatatttccttcttccttttttggcttcatcttagggtcttattcttttgtttgtttgttttgttttaggttgcaatggaggtgaaatagtgctttgtataggagactgcaatttcagcctacttttaggttgttgcccttcaaattcttaactgaatctttcagtgcatcatttgcaaggtttaaacagagccaatccaaggcagaatgaaggtcacctccatgtaagaragcattggtcgtgacatcttcaatgtcttagtcttaaataaaaatgcttgtaaagctgtgtaaaaatcctgcaattttttggcattaagtcttccagaaatcactcccttgtcattgttttgcttgtcattgctcactcccataattccttgctctaatttgttattaattacc

SEQ ID NO: 800841 - DNA, 528 bp, Homo sapiens
tgtttcagttctcaagggaatgtttctgccatttgcccattcagtatgatgttggttgtgggtttgtcatagagggttcttattattttgatgtgtgttccttcaataccttttttcgtaagggtttcttttttatcatgaagtgatgttagatttcatcaaaagctttttgtgmatctattgagattaatgtatgatttttaattctgtttatatggtgaatcacatttattaatttgtgtatattgaaccaaccttaaatcccaggatgaagcctacttgattgtggtgaattaactttttcagttggctaatattttgctgaggattttcgcatctatgtttatcagggatattgacctgtagttttctttttttattgtgtctttgttcagttttggtatcaggctgattctggcttcatagaatgagttacagaggtcttctccttaatttttttcaatagttaatatttaatttctttttgaattatagcttgtataaagctactactgtagcactcaaatg

SEQ ID NO: 800842 - DNA, 511 bp, Homo sapiens
atggaatcatctagaataaaacataggatcaatgaaaggtatttttacactgggagaaacttggcaaatttttaaacctgaaataggctgagaagagggagtcagacgaagcagagatgcagaagccaaaggaaatgtaggagaaaaccaatggagcaaattcctacagagaatcatctctgtaggaatttaagagcaggtagaaagattcaagttgacaaagttcttcattgagctggagaaattcaaatgattgaatttaggatgagggaggtatgccttactcaggtgggatctttatgttaccacccactcaatatgtgtcaaaattktaaggtattactattaattgtgcattaataataatacaatgtgcacaactaggtgaaagtccactctactgtattccagatctcttttggaatattgtattgactcttgatctcttcttttgaagtgtttcattgacagacaagcacatccagaggggagctaagtagtaagagtggtg

SEQ ID NO: 800843 - DNA, 575 bp, Homo sapiens
cttatttattgcactaataaagaagcacatatactatgattatcactattttaaaaatatattttggttcaacacaaatgcctttgaaatcataatagtcttgtttaacgttactcaaaaattttctgagaagcggctttactatattaccaaaaaagtgcacggcacatacaaaactgaagaaattctgttccataggacagtggtccccaacctttttggcaccagggactagttccgtggaagacaatttttctacagagggggtgaaggagggtatgattttgggatgaaactgttccacctcagattttcaggtattagattctcataargaatgcccaacctagattcctcacatgcacagtttacaatagggtttgcactctatgagaatccaatgccaccactgatctgataggaggtggagctcaggcagtaatgcttgctcgccagccactcacctcctgctgtgtggcccagttcctaacaggccatggaccagtactagtccacagactgtgggttgggaacacctgccatagaatataatccaaactctattataggaaatc

SEQ ID NO: 800844 - DNA, 575 bp, Homo sapiens
cttatttattgcactaataaagaagcacatatactatgattatcactattttaaaaatatattttggttcaacacaaatgcctttgaaatcataatagtcttgtttaacgttactcaaaaattttctgagaagcggctttactatattaccaaaaaagtgcacggcacatacaaaactgaagaaattctgttccataggacagtggtccccaacctttttggcaccagggactagttccgtggaagacaatttttctacagagggggtgaaggagggtatgattttgggatgaaactgttccacctcagattttcaggtattagattctcataaggaatgcccaacctagattcctcacatgcacagtttacaatagggtttgcactctatgagaatccaatgccaccactgatctgataggaggtggagytcaggcagtaatgcttgctcgccagccactcacctcctgctgtgtggcccagttcctaacaggccatggaccagtactagtccacagactgtgggttgggaacacctgccatagaatataatccaaactctattataggaaatc

SEQ ID NO: 800845 - DNA, 616 bp, Homo sapiens
catattctcagacagcacatctcttagtatttagctagtccagagcttaccacccacaaaatagatataaaataggggagaaaattatcctttcatttaaaaaaaaaaagctcttttataatatcaagtattttctaaggaacatgasttctgacaattcaaagtttctttgttctgctgcactttgacgagtttgggattgcaagttgtcctcaggagctagtagctaaatttctatgcaaaattgagggaaaaacttagagctgaagaggacaatgtgtgaaggaggagcagaggaggagaaggaatgagagacataagcaagccggcaaattgggaattacatgagaaagtgcctcccgtcacccatcccttagccctgtcatcttaagattattagttcatagaatttgtggcatgagtatatttctggtggaaactgaagaaaaggataaaaaataagcttatgcgtacataggagtgagaagtagggaagaacatgagagtcaaagtccactgagatgagtagcaatcctcagaaatttggatttcttaggcatggaatgaactggcattgaaaccaatcacctctaaatctctgagaagcagagaaacc

SEQ ID NO: 800846 - DNA, 331 bp, Homo sapiens
ttattctgtatctggcttatttcacttagcataatgttttccaggttcacccacgttgttgcaaatgacagtatttccttcaaaaagagggctgtttttccctaattgtcctgtaaacctcctggagttgaatgtcgttggcscggcttgagttatgtgcccttccctgtgtaatcactgtgacagggcaatgagacgcttggatcggccagacctgtatcatgtgcccaccttgggaattgggggccaaggtcagtcccacccaaattcatggcctgagcatgggggagacgaggaccccaaaggaagctatgcgcactgtttccagaag

SEQ ID NO: 800847 - DNA, 616 bp, Homo sapiens
aaaagctagctcttctgccggatctttaatgggatgatgcctgattcatgaatcacaataaaagctaatttaatctttaaactcaatttgttataattttatttttaaaaaagtctaatgaaagagataaaacagaaacagatccatgtttacaataacttaagtttcttattttatatttaaaatgtgaggctgtaatgcagtggrtaaaggatggaatactctataaatgcactcgatcaattttattcattataatatgttgactaagactctctcctttgactaaaaaaaggactcagactccttcagcttctctacttgactaggaccatactcagtcttgcctctccaaccttttataattcatttcgaggaagaatccagctaaatcagtttagtgaaaatccacccttagtatctgaccactctatatattatcaccttggcctgccttaagcaagaattctgttgagtcagtctagcaagaattacccttaaacccgatgtttcttgttagtaaaatttccgtcacttaccccaccctattcctttgctatacatccccacttgttcctgctggagtcagagttgagtccaaactctccccttcacc

SEQ ID NO: 800848 - DNA, 627 bp, Homo sapiens
tttccagaaagataatcatgaggaaacaataaatccaaaatatggtacgttattttttcactgttcatacaaatcactttttaatgcaaataaacctagaatgaacttctggaaattcctttcttgttctggtctccctttgttgggctctctgttcaaatgtttttgtttttcttctttccctcctgccagagactgattcccaccatggaaaagtcctctaagaagtgagcatgacttcaggctccactcaggagggagagtggaacctccttgaccacatcattacagaggcggcttggatctgtcggattcctccgaggcatcacctgtcacattcccctctggaggaaaataactgtagtgaaaactgggccaggcgcggtggctcacgcctgtaatcccagcactttcagaggccgaggtgggcagatcacgaggtcaggagatcgaggccatccyggctaacacggtgaaaccccgtctctactaaaaaaatacaaaaaattagccaggtgtggtggcgggcacctgtaattccagctactcgggaggctgaggcaggtgaatggtgtgaacacaggaggcggaggttgcagtgagccgagaccctgccattacactcta

SEQ ID NO: 800849 - DNA, 620 bp, Homo sapiens
gaccacgaagccaagttggctggtgtcccacacaagatgttgtactgtttaaggggctttaggaagtataagtgagaatgggagtttgggagtctgagaggtgggatggaagacttaaacaggaagtggatctctcatgtgtctgcatattgcagtggacaagctctgcagagtcccttgaagaattcacaacttctctgaaaaggtcagcatttgaaatcttgcctcaagaggccaccaagggccatcaatattggtcaatgaggcagtgaaaaattcggattagtcaattaaaaataaaatccaattatttcacgctgttgcttaaaatgctactgctaccatgactttctgtttcttttagcaacactcaaattccagactaggcaggcaacactgggtcacaagaagccctactgatttgtatatacagcctcagcgctctgccctccagccagattgggcttytaattcccaattacagtacatttttttttaagctcattgggatttgtcatacttttctactatctggattgccctttcttgaaccttttcctggcttgttctcccaggatttagcttagatgggacattctgagatgatttatgggatactg

SEQ ID NO: 800850 - DNA, 647 bp, Homo sapiens
atctttagaggacatagatgagaactagattctgagtggaagagtcatgctggaaataatttccattttcaggtggacaagtcacttccattagcgggtacatgagtttgaatgatggtcataaactgagagcaagcaaaaacctgaccttgatcagacaaagacaagttagaaaccagacatgcaggcacttattagtggggccctgtaaagagcttggatttttggaataggacagcagtacttctagtaaataactgtaaatttatctgtagtgtcatcagaattttaaaatattttagattgtggatagattttgttaactgtcttgttaacaaaaagattaaactaaaagtttttttcttttactacatataaaatggagaaaagaakgtatgcctacatttgaaccaaaatattgtagaagagagcaattgcagcttgagaaaatctagattcaagatgtttgagatgacatgctgcagaggagggcacgcaggacagagatctacagccagacagcagagagccagctaagaatgcaactgtgagccaggacacgtttgtggaacatgttaacacttcctggggatgtctatagtcattgttaaagaagactgtgataatttactaaatactcaagcaat

SEQ ID NO: 800851 - DNA, 616 bp, Homo sapiens
gattaggaatagctggaaagggtggatggaaaacgctaaggtatgcttttatgttaatggcaatgatgcactagagacggagaaactgatgatgtaaagcaacaaacatatagttagggaacacaagaaggcatgggattcaaagaaaaaggcaaggcttgacttaagatggagcaaggccaccacaaccattgtaatacaatatagggtagaaactacaggtgcagaaaaggacgccctctgcatttgatggtaagaattagaggaagtcctggctaacacggtgaaccctgtctctactaaaaatacaaaaaatcagccaggcgcagtggcgggcgcctgtagtcccagctattcgggaggctgaggcaggagaatggcatgaaccccgggggcggagcttkcagtgagccgagatagcaccactgcactccagcctgggctacagagcgagactccgtctcaaaaaacaaaaaaaaaaagaattagaggaagttcccttccaataccttattttctcactgaagcatgaagcaaggtcatcagatgagactgaggtgttgtagctttaaggagagaggacaagttatgaaacagtcattttggagagtggaag

SEQ ID NO: 800852 - DNA, 618 bp, Homo sapiens
actgtggcatctgtcttgtttcttggctccttctggggaaagccagctgccacactgtgagctgcctagggagacgcacatgtggcaaggaaccagtaggtccccagctaacaacctttgagaaactgaatcctgccagcagctgcacgaaggagctcaacactgggttttccttcagcagagctttcggatgtgacacaagtccctgacggacaccttgattgctccttgtaagaggcagaggcatcaggggagccacacctggatttctggcccgcagaaactgtgaaataataaacgttgattgttttaagctgctaaattatagggtgattcgttacacagctattgatagctaatatacayacacatggattttcatgtaaaacttgcatataatttcaagagacgttgagacatccctgaagcccattaatggacaatctgtgcatctcattaactcatttatgcctagtgttccattagtggaacgctaagcgtgtgggagtcatttatatcctactgctcaaggtcattgccgaggtctgatttttcacacaaaaaatttgcaacctccagcataaatgggttaattacccctgctcgaggaatacctta

SEQ ID NO: 800853 - DNA, 644 bp, Homo sapiens
gatctctacccaaagggtaaggagtttgggggacatggtgagtcctgtgaaataggccagcagagtttgcacagagtaggggcccggagcccactgcttgaggttgtgaggggcagagaaggtctctagaccagagacaatgggggtgcactgcatgcatgcacagggaggtaagcatgcacagaaccccgagtctgcagctcagtaactaaggcctcgtacgaaaayggtggcttcattcattccaaatccccttgtgtggtctcttccttgccgtgactgccacttgctgttgctgccttgcctgtttcttgttcccaacctcatgacttttgcttccttgtgctttctaggccttatggcttctgctctctgtctcttcttttgaagtccttctgcctacttgctgctgtcctggctgcttcagctgctgcagactgtgacaggctctcccacaatccagcttctgagagaggatctgattggacttgaatggttgctgcacagtttagagtttccctccgaggcagagttttcttgtcccgacttgtcagaggccactggcccgctcttggttgattcagttgctgtacctcaacattggatgagttgagggaggcaagacccctgttagccgatggtga

SEQ ID NO: 800854 - DNA, 654 bp, Homo sapiens
tagtgctttctttggggcattgtccccattaactttttgtaaagcattaatgatttcaccattctttcacccaagtgtcaccacaaatttggtgtttgttcttgttttactttagcagaattcatgttgctgtgacagggattcttttccaacagacgtcttatccttcagaatgcctcagactagatcctgctcagacatgttataataagttagtacaaatttatgttggtgcaaaaaaatttgaaattcatgaatttttttcataatatgcatttccatgaatgtttgaagacctctagtatttcatatcaaattctaagcagaaagatttagcaattctaagtctggttagactgggaagtcaygtcagctgctggccacagtagaacttggaatgacaacctctcttccatcccgtccaatagatttgggatgagcatcctaattaaatggacaatatctaatcaaaattgaaagtctgtcacaaacttgcccaacgattatttacatatgtgagattgctgttgtacagtggacttttctggggaacactttcaagttgaaccagacttaatgtttattagaaaagcattctggctgagttgctggctctgtgagccaatcacaaatgccaaaattgctggctaattg

SEQ ID NO: 800855 - DNA, 633 bp, Homo sapiens
atatatttctatatcctgtttatcttttataaatcccaacaatgaaaaagatattctaagctgtagccagtgagatgcttattggaagtaataatacaaaacttataatatgccaaagtgactacagaataattagtwtggccccttggtgatggtggaaatgagttttgacaggtgagtatgaaagtagacgtggccagcatatgttaaggatagaattggagctgccaaagatctcctgcaatagctctttagagtcagccttgaggtcatgcttttacttaggctgccatataacctagaggctgggactttctctggcttagccagacacaatattagatgtagaataaggaattagggtcagggaaatctaattattctccaacctctatccactcacccattttcgctgacaaatacacattgagattgtcctccaagactctagttatgtggaagaagaagagtgattttccttctctatatttctgggaaagaattaattctaattctggtgggtttttctgtagcaagattgtatgatgagtttataagctactcatgacaaatgggagactgaggatggttgaatgaaaaagttcttactagagtcataaagggctgattttt

SEQ ID NO: 800856 - DNA, 633 bp, Homo sapiens
atatatttctatatcctgtttatcttttataaatcccaacaatgaaaaagatattctaagctgtagccagtgagatgcttattggaagtaataatacaaaacttataatatgccaaagtgactacagaataattagtatggccccttggtgatggtggaaatgagttttgacaggtgagtatgaaagtagacgtggccagcatatgttaaggatagaattggagctgccaaagatctcctgcaatagctctttagagtcagccttgaggtcatgcttttacttaggctgccatataacctagaggctgggactttctctggcttagccagacacaatattagatgtagaataaggaattagggtcagggaaatctaattattctccaacctctatccactcacccattttcgctgacaaatacacattgagattgtcctccaagactctagttatgtggaagaagaagagtgrttttccttctctatatttctgggaaagaattaattctaattctggtgggtttttctgtagcaagattgtatgatgagtttataagctactcatgacaaatgggagactgaggatggttgaatgaaaaagttcttactagagtcataaagggctgattttt

SEQ ID NO: 800857 - DNA, 601 bp, Homo sapiens
tctataattatatgatttcactattgtataaatgggacgatgcagtatgtattcttttgagattggctttttcactcagcataatttccttgaaattgatccaacttgttgcatcagtcaatagtgtattccttcttattgctgagtagtattccatagtatagaagtatcacagtttgttctaccattcacctattgaaggccatttaggtagtttttagttttttacttgcatgaataaaactgctgtaaatcttcctgtagaagtttttcatgaaaataagtttttatttttctgggataaatgcccagtaatgcaattgctgggttgtatggtaagtccatttttagcttcaaaagaaagtgcaaacyaattttcaaagtggttgtgccatttgcagtctcatcagtaatgtacgagtaatccagtttctccacatccttgccagcactgagtgttgtatttattattttatccatcttaataggtatatagagacaattattgtgactttaatttgcatttccctaatggttaatgatgttgagcatgttttcataggcctatttgctatctatatatcctcctcagtgaaaaatc

SEQ ID NO: 800858 - DNA, 587 bp, Homo sapiens
ttggtaaaacctatgataacttggaagatacacagggtacttaatgaatttatggacttgggcaaggtaattttttgaagtgttaaaattatgaaatggttacatttagctatatatgaataaagatctaaaggaaagagctaaaggattaaaaagggaccaagacttatccaaattaaagtctctcaccttctctggaaaagatggtagtcttaaaaaacagctcagccaccaaaacaggacgtttctaatgctctcttccaaaatggtcaagaaagatgatggaaatgaaaaggcatcctagaatggggaaccaagagccatgactaccaaaggaagaggaaggaagcagagctyggtctcatcagggaacattcctgactgagagcaggaagccctggcaacactttctaagtgagatttcaaaactgctacaagtcagtgctatgtgccttcccttcttcccttttctgatgagtgtgtttgttgtgtttatcttgtccctgttttcacaggacatgtatgcagaagacaacgtgtctatctaattcatataactctaagttcagaaaagccacatttggact

SEQ ID NO: 800859 - DNA, 669 bp, Homo sapiens
catttgtccaatagaagtttcccttttcctcatggtattgttgctcatgttcttctaccctccataatgttgctaacctgtaagttagattcaaaggcttggctatattggggtcaaagtttagaaaaaaatgtcccatagatggtgctgggcacttcttaatgcttcacatcrgaatgcacataaaggttggctttcccaactgtagtgatgttaggatacatcagtgggttcaggtgccagcaaacccatttattatgaaacttgtcccttgatatttcacttaatggcttagctgttattgctgattgttggttagatctattatttcattacagttgcacaattgtgattttttaaaaattctatcagcccttcttcatttgttcacagtaattcttctctaaggaagaaatgtcttctgtcaactgtgtatttgttctgaaatatagcccttacaggaaaggcaagataaatattcaatttttttctgatacaaattttagaataataaattactgtcttaacaacctccaaaggtaatcaatgagttttatttttagagtattgttataatgcatgggttcttatatatttgatatctttccttttttgcagtcattattcttcttggctctctaattatgccgtctttggccagtgagagcc

SEQ ID NO: 800860 - DNA, 445 bp, Homo sapiens
acaaagtcaattttattatttaaataatttgataaagtattttaacaaatgtatttttcatagtagcccatgtggatctatatataaatagaaagccacagaatatacattattaatttgaaaatgtaaaatgaatgtcctaaattatttatctcacctatcttcgacagtgggttatctgcaagagttaatttggcatgttttccatttttaatgyaacctagtgttatttttttccacatcttgatgatcctaatgaactttggtcatcataggcttgctgaaaagatttatcacaaaatgattaacaacacagtttagagagtcatgaagacatgaggaatcataatggttacattttgatactggagttaatgtattctgagttacagggaaaataatgacttaagtaaactggcttgaaaaatttttggtccaattattc

SEQ ID NO: 800861 - DNA, 689 bp, Homo sapiens
atgaaatatggaggatcttacaattaatggcaccttagcataaatgaaacttagttgtattaatctaggattactttttatacctctacaaatctctatgcctttaccccatcagttttgaaaacatattttattttcttttttttctccatgcgtgacctgctattgtcaatggccatttggaattcccaaaggattggtagaggtatgcagttgggataaagcattaaggataccaaccaaatgactcaccagggaaaacctgagctctgctcttaaatctgtctgtattcctggccaagatgcctcatctcctccttagtgctctcagtcttcttctactttaatgttatttttaatgaccatataattttctttcargtgggaaaaatgatgggcttgattgttctcctattcgtggcatttcttttatttcaatatattcactatataaataaggtaggagcaagcattaaaacatggtgggtgagaaactctagagatggagggaaaaagaacataggaattatttattttctctgggtactgtgctcttctacagggtgttcataaaggctagaaacatagaaaaatatatataacaaatgttttattgatattacagacaataggcgatgtgttcaaagtgctatctctcattatcaatgtgtggttcaatgtgctgatga

SEQ ID NO: 800862 - DNA, 635 bp, Homo sapiens
acaccacacacacacacacacacacacacacacacacacacacacacagtcacacaatattcagataaaaagaaagcctaattattttatattcagaaaaaaatgaattggcctttctgaacaaccacaacgatgaaaaaggaaaagaaatctgttaaaactttaattttagttttccttttagattttaaaataattgtgaaatatttcaaacatagaaaatatatagagtttttctttctttttgggaaacagagttacaaygaaagatacaattggagaccacagggtaccattgcgccggtcctattcttctgcttctcttctgagtactcatgcttattttatacttttactatctatgtatgcatccctaaactgtaaatagcaaaattttgcacattttaagattttatctgaatggtcctatgtctgtatcattctgcagtgtgtgttttatcaatattagtatttgttgttctctcaatttgaagttttccacatttattttaagtgttccattaaacatattccattccagaaaatatattgaaatttattcatttctattgatagatatttaaatcatttccaaatgtttgctcccaggaaaacagctgcaatggacattatta

SEQ ID NO: 800863 - DNA, 628 bp, Homo sapiens
atatgttttaattgagtaacctttataaatattctttttcataaatctttatatttcttaatgttttgtttcttaagaaatatttctttctttttttgtgatggggtcttgctatgttgtccagtctgagtgcaayggctatttacaggcatgatcatagtgtgccacagcctcaaactcctgggttgaagaaatcctcctgtcttggcctcccaagtagctgggactatagacatgtacttccacacttggatcaaagggatatttctgaaagtaaaatttgggggtcaaaggtatggattattgtttttctgactctttttttaaaaagttgcttcagtgtctttgtttttctttcttccccagcatctccccaatcctcctccccactgccaacctctgataagcataattctactctgtttatatgggtttgactttgttagatttcacacatgtgaaatcatggatcatatggttatcctatttttaatttttgaggaaaatccacactgctttccataatggctacattaatatgcctttctaacaacagttccctttactctacaaccttgtcaacacttgttattgtttgtctttttgataatggccattctaacaggtg

SEQ ID NO: 800864 - DNA, 628 bp, Homo sapiens
atatgttttaattgagtaacctttataaatattctttttcataaatctttatatttcttaatgttttgtttcttaagaaatatttctttctttttttgtgatggggtcttgctatgttgtccagtctgagtgcaatggctatttacaggcatgatcatagtgtgccacagcctcaaactcctgggttgaagaaatcctcctgtcttggcctcccaagtagctgggactatagacatgtacttccacacttggatcaaagrgatatttctgaaagtaaaatttgggggtcaaaggtatggattattgtttttctgactctttttttaaaaagttgcttcagtgtctttgtttttctttcttccccagcatctccccaatcctcctccccactgccaacctctgataagcataattctactctgtttatatgggtttgactttgttagatttcacacatgtgaaatcatggatcatatggttatcctatttttaatttttgaggaaaatccacactgctttccataatggctacattaatatgcctttctaacaacagttccctttactctacaaccttgtcaacacttgttattgtttgtctttttgataatggccattctaacaggtg

SEQ ID NO: 800865 - DNA, 637 bp, Homo sapiens
atatgtaaattaaacaatacatttctaagcaattaatgggtcaagtaaaaaatcataaaggcagttagaaaacattttaactgcataaaaatgaaaacaaaatatgaagactttaaagctacagctaaagtagtaataataagaaaatttatattattaaatgtataccttaaaagaagaaaaatgtgagatagtttatctaagcttctaccttagtaagctagagaaataaaagcaaactaaacccaaaataacaagaaagaagaaaataataaaaataagacagaattcaatgagaaaaaatagacaaactatarggaaaattgattaaaacaaagctgttctttgaaaagagtattgaagttgacatatctagactgatcaagaacaaagacaaaaggtacagattatcaagaaaatgagcgggcaaagcaagatggccaaacagaagcctgcaacaattatccccccaccaaaggaacactaaattttaacaactaactacacacaaaaaagcactatcacaaaaaacaaaaatcaggtgagcaatcacagtacctgattttaacttcatattgctgaaagagacattgaagagggtaggaaagacagtcttgaattgcctatgccacttctc

SEQ ID NO: 800866 - DNA, 526 bp, Homo sapiens
gtggaggaaagagaacacttatatactgttagtgcgaatgtcaattagtactaccactatggagaacagtttgggggttcctcaaaaatctaaaaatagagctgccatatgatccagcaatcccactgctaagtatatatctagaagaaaggaaatcagtatagggaagggatatctgcaccaccatgtttgttgcaacactgttcatagtagccaagatttggaagcaacctaagtgtccatcracagatgaatggataaaggaaatgtgctgcatatacacaatggagtattattcagccattaaaagaatgtgatcttgtcattgcaacatgggtggaactggaagtcattacattaagtgaaataagccaagcacagcaagacaaactttatatgttctcatttatttgttgggtctaaaaataaaaaacaattgaactcatggaggcagagaatagaacgatggtcactaaagtctgggaagggtcgtggggactggggaaagaagtaggggtggtcaatg

SEQ ID NO: 800867 - DNA, 617 bp, Homo sapiens
cttatctataagatggaggtgagggccaccttgaagcatggttcagaggtaaacctatgcaaaagtgccagcacaagtactggcagacaatcattactcagcagtgttagcaatcttttattgttcaccttaccaggtctttctaagcccaaagacctcagaattgagtccctccaactcaaggctttggtctgtgatgaggaaccagaggggcaggctgtggcagggcctgaccatcttccatgacwtcaagcacaaagccaagagatatgctccaaagtcccataagatcccttttcacccttcctttagtggcctgtcccaagcatattcccctttccccatgaagtaaaacttatcctagaactacgtccttgaagattccaatatcaataaaaggccctcagtctggaattctgggatataactaaaaaggtcttcctactccctctccaaagccatatccacatcctgaatgatattagaagcttgcaagtgggtacatattacagacgccacactgacccctcccagccttcatcttttcagattccattctttgattctcaccccctgccccaccaaccctaccatgtggcagaagaggccggctcagt

SEQ ID NO: 800868 - DNA, 579 bp, Homo sapiens
aaaaggtggagacaatccccatgtccatcaacagatgaacagataaacaaatgtatatacctacagtagaatattattcagtctcaaaaagtaatatatgctataacatggacaaatttaaaaaatatgctaaaaraaataagccagacacaaaacaagtattgtataatttcacttttatgaaatacctataacagacaaattcatagagacaaaataaattagaggttactagcaactgaggggtggagggaatggggagttattgcttaatgggtatggagtttctgtttgggatgatgaaaaagttctggaaatggatagtggtgagcattgtgcaactttgtgaatgtgcttaatgccattgaattgtatacttgaaaatggtttaaaatggtaatattatattctatatattttaccataaatttttttaatgctggacttgagatgcctgtagtgacaatacaccaatactgcataatatttcttgctttaaatagtttttctcactcatttaagcacctccaatgccagtaagtttggtgaggatatacaattgctgacagaaacatgatg

SEQ ID NO: 800869 - DNA, 579 bp, Homo sapiens
aaaaggtggagacaatccccatgtccatcaacagatgaacagataaacaaatgtatatacctacagtagaatattattcagtctcaaaaagtaatatatgctataacatggacaaatttaaaaaatatgctaaaagaaataagccagacacaaaacaagtattgtataatttcacttttatgaaatacctataacagacaaattcatagagacaaaataaattagaggttactascaactgaggggtggagggaatggggagttattgcttaatgggtatggagtttctgtttgggatgatgaaaaagttctggaaatggatagtggtgagcattgtgcaactttgtgaatgtgcttaatgccattgaattgtatacttgaaaatggtttaaaatggtaatattatattctatatattttaccataaatttttttaatgctggacttgagatgcctgtagtgacaatacaccaatactgcataatatttcttgctttaaatagtttttctcactcatttaagcacctccaatgccagtaagtttggtgaggatatacaattgctgacagaaacatgatg

SEQ ID NO: 800870 - DNA, 579 bp, Homo sapiens
aaaaggtggagacaatccccatgtccatcaacagatgaacagataaacaaatgtatatacctacagtagaatattattcagtctcaaaaagtaatatatgctataacatggacaaatttaaaaaatatgctaaaagaaataagccagacacaaaacaagtattgtataatttcacttttatgaaatacctataacagacaaattcatagagacaaaataaattagaggttactagcaactgaggggtggagggaatggggagttattgcttaatgggtatggagtttctgtttgggatgatgaaaaagttctggaaatggatagtggtgagcattgtgcaactttgtgaatgtgcttaatgccattgaattgtatacttgaaaatggtttaaaatggtaayattatattctatatattttaccataaatttttttaatgctggacttgagatgcctgtagtgacaatacaccaatactgcataatatttcttgctttaaatagtttttctcactcatttaagcacctccaatgccagtaagtttggtgaggatatacaattgctgacagaaacatgatg

SEQ ID NO: 800871 - DNA, 701 bp, Homo sapiens
ttgggaggccaaggcaggtagatcgcttgagcccagaagttccagaccagtctgagtgacatggtgaaaccctgtcactactaaacaatgaaaaagttatctgggcatggtggcttgcacctgtatctccagctacttgggaagctgaaatgggaggatcacctaagtctgggaggttaaggctgcaatgaaccatgattgcaccactgcactccagcctgggcaacagagtgagacactgtctcaaaagagaaaaaaaaaattattttttaaaaaagtattggccaggcatggtggctcatgcctgtaatcccagcactttgggaggctgaggcgggtggatcatctgaagtcaggagttcgagaccagcctgaccaacacggtgaaaccctatctctactaaatacaagaaattagctgggtgtggtgatgcatgcctgtaaccccagctacttgggaggccgaggcacaagaattgcttgaacctgggaggcggaggttgcagtgagccaagactgcactattgcactccagcctgggyaacaagagcaaaacttcatctcgaaaaaaaaaaaaaagtgtcatagcaatgaaagagaagacttaggaacaatcacagattagaagagactaaggagataagacaactaaatgcaatatgcgattcgggactggatcctagaataaaaagatgacatta

SEQ ID NO: 800872 - DNA, 636 bp, Homo sapiens
atcagcaggatcctaaaagtagccaatcacagggaggattgaaaaagtcactctaataggacaaaaatggaacacgcgaggggacaaataagggaataaaagttggccacccccattcagcagcagcaatccactcaggtccccttccacactgtggaagctttgttctttcactcttcacaataaactttgctaccactcactctttgggtccataccatctttaagagctgtaacactcactgcaaaggtccatggttccattcttgaagtcagcgagaccacaaaaccaccagcagaaccaactccagacacatcttgtgggctcctccggaatattgccatgcagtgagtaccattggacccctkttgcttgctattctgtcctgtttttcctcagaattcgggggctaaataccaggcacctgttggccagttaaaagtgactagcacagggcctgactaaagacacgggtgtcaggctttctgggaaagggctctctaaccatccctgactctttggagttgggagcgttggttttcctggaaccagattccgctttccctgtacttctgggctgagccaagggtcaacagagaagaaagccattcagcttcggggtcccgacaacaagt

SEQ ID NO: 800873 - DNA, 545 bp, Homo sapiens
gtccccagcagagcatgaggaacccagtcccctatcctcaccagcacttgatattatctgactttctcatgtttgccaaatgatgagtgtaaagtagtattgttattttgaacagcatttccttgattactattaagatttagcatctctttagtatttactarccatcaggatttctctttctgccaattgtctagccacaacatttacctattttttctattgaatttactatgttttcttgatttgtaggagtttcttttaccttctagccatctatctcttctagatttagacctcactatgacacacatacttcctatttctacaaaagtcaagaaaaaactttgttgggaaagtgaaatagaatggagcctagtcttaccaggaacctctccccaaccccaacacattccagagactattaatgtagtttcagaagatcagtttacacccagtgaagatactgagctgcctgttaaaccaatttccttattctctgtcctctgccacatttcaataatgttactggaactccctagaaa

SEQ ID NO: 800874 - DNA, 625 bp, Homo sapiens
agtaaaggaacttgttccaatgaccacatatattctctctctctctctctctctctctctctctcttgcataaacatacaagaactaccccctggctcaagccatctttcctgccagactcagctcagaatcttccaaaaggaagtaagccacatcttctgcctctttggggccttcgagaccttgggaatatatatatatatatatatatatatatatwttttttttttttttttttttgagatggagtctatcttctagctctgtcacccaggctggagtgcagtggcacaatctcaggtcactgcaacctccaccttctgggttcaagcaggttcaagcaattctcctgcctcagcttcctgagtagctgggattataggcacgcgccaccacacccggctaatttttgtatttttagtagagacagggtttcaccatgttgactagactggtctcgaactactgacctcaagtgatccgcccacctcggcctctcaaagtcctgggattacaggcgtgagccaccgtggctggccaagaccctggggaaatcttgggtgtgtggagttttctcaagattcctggtggggaccctctcaaacatttcagagccgaccccggc

SEQ ID NO: 800875 - DNA, 597 bp, Homo sapiens
gtcacacttttactgatgctatttcagtcacaaaagccaggagctgcatggaattccaaggagggaattctccctagtaccttctgttcactcggtagtcagagctgcaggcacacaagccacttcacaagtcaattgtattgcaagccatacataatagtgtacttaatcaatagataagtgttacagatcaaacatttcacaacaaacaaagtaacatataacatcaagagaaaagggacaagaagcaacaaagacccaaagaatcccctggtcggggccaggcaagtggtccacaggttttgcaacaaagagtcttcagtgggggcasagccttcccggcaaatgccaagtgctaatcacagttgacagcaaggcagtgtcagttgagatggccgttttgagctaccaatgtcctgctctttttatggccacagagtcctctggcgaggactgatagtgacagaatgtgcttgtttttgcccttatctggttggatgcagactttatttattaagcataacatcttgtccacgttggcaaagtgccctatgaaatgtaagatggagtctttttctaagatggagttactcatgt

SEQ ID NO: 800876 - DNA, 652 bp, Homo sapiens
caaaactgcgttttatgggtaattcatattaacttcacttttgaaacttattcttgatgtttgtattattttatttgtatgaattcccacccaaactcttaaaatttattatacaaaaagccctgaactttttgcacaaactttaaggggcagtggcactgcttttcttttcatgtgtgatgactcacaagttgagttaaagattttgaggacaatatcaatactttggttttacatttgagaaaattaaggcacagtggccttaagagactttcttgatatcaaagaattactggtggactcttctagggctgcttctattacatcaaccgtatgatttttctggataatatcactaaatcataaatcaaacttacatattctttttgtgttgatcaaggttcctacctgatcccgctcccagcagcagaactggccagctgtgcagayctggggaccctctgtcaaggtagggagcccacaccgtgctctggaatctctttgctttctacttgcaattttgggtaatgtggttgtcattgttttgatttgtatctgaattttcacttggaaagccagaaaacagcaaaacagaagaatttctgcatgtgttttagttgtgtgggtgcacagtacgtacggcatggagaaa

SEQ ID NO: 800877 - DNA, 594 bp, Homo sapiens
gagtccagcctaaggctcttcccaattgctgagcacagcttgtgggtagagtccagctagtagccccgccagaccagggagcccagccagtggccctgcttgacttcggatcccaggcaggaaacccagccagctttagagtacctgcagtggccccactcaactagagatcgcaacaggaagctctgtctgtctgtcaatgctaccagttggcctgtcaagaaccatagrctggactgagtagtgaagttctttccctgccaaagtgaacctataaaggtttgaagagatgactgtagagttttatgtgcagtggaagttaagttgttatcagcttaaattagggtgatgctataactataagatattttatgtaatccttatggtaaacacaaaggaaagacctgtagtagatacacacaagataaagagaaaagaaagtataccaccactacaaaaaatcttcaggttacaaaggaagacagcaagagaggaagaatggaataaaggaactacaaaacaggcagaaaacagcgaacaaaatggcagtggtgaatgtttacctatcaatatgtaatttcaatgtacatggat

SEQ ID NO: 800878 - DNA, 563 bp, Homo sapiens
tatatagacacatatagctatgtggacataatgctttgtaaataagtttatgctacattgcaggttaattttttcacacttaaaaacatgctgagaggtcaggcatggtggctcacgcttgtaatcccagcactctggtggatcacttgaggtcggagttcgagactagcctggccaacatggtgaaaccgcatttctactaaaaatacaaaaattagcctggcatggtggcacatgcctgtagtcccagctactcgggaggctgtggcaggagaatcacttgaacctgggaggtggaggttgaggtgagcagagatcgcrccactgcatgcgccatagcctgggagacagagacagactctgtctcaaaaaacaaaaacaaagccaaacaaacagataaacaaacaaaaaacatgctgagattatgtttctacctcagtaaataaaaaaacacacactcttattttttaatggtagcagagtatctcatgtttttaaccaatcatccagtgatggagattttgttgtttcttttcaatttcgcttttatgaatgctaaaata

SEQ ID NO: 800879 - DNA, 598 bp, Homo sapiens
tcccaaatacagaaatctccactgatcccctctacaacattgtgaggtgggcatcagtatccccacttgatgtaggaggaacttgaggctcagagggtagaagtgacttgacaaggacatacagtttgtatggatggaacttgtgttcaaagcttgttcaaatattgtgtatttatttatatctatgtgtgtaaatatatctaaggawaataataaaagtggagacatggaacattccagtcaaaggagcagcagatgccaggaacacagaggcagtgaatcagtgtttgaatgaactcacagagagggagcaggaaggcattctgagtgagggaatagcataggagaagcacaagtcaataacccttcaccccttgcagtagatactgctggttgcctaccccaatctccgtcctccccttccccctttagttatgggaattcctgctttgacctgggaatatggctgcccagaataaaggctgcatttcttagcctcccttacagctagatgtggccatgttactaaatttgggcttgagagatgttagtagaagtattatgtttcagcttcccagaaactgccttcaagaaaatt

SEQ ID NO: 800880 - DNA, 613 bp, Homo sapiens
gacacatttctagaatcccctgactatcttaaacagtcttttaacaccttgcactttttcttcctaattctcacctcaatttgtaattaatggtttgtaaaattaactgtaataaagtcatgatttatgggatcatctgtacactctgcatagcatgacccaggcttatcttgaagactgtattgccagcctgttggcatagtactttgtacttggtaggtgttcagttaatctttgtggattgactgyggaaggaagggagggagggaaggaagaaggaacaaaagaaaaaaaaaggagggaaggaagtaggaaggaaggaaaaaaaaggagggaaggagggaagaaagggaagaaaaaagggaatggtgcctctgattctcaaatccacacatgtggccttgacttcttattctgcagcttcctataagacattcctcttggtggcagtggagaagtttacttgagaaaccaagttaggatcaggagatgtctggtgaaaacagaagcagtgtagaggcagtgggacagtcccaagggatggcctcatgagaacatagtaggctggtgagttacttcctgttctgcagaacaccgacattagcaaagctgc

SEQ ID NO: 800881 - DNA, 655 bp, Homo sapiens
caataaaaatcttgggcactgagtctctataggcttgcttgagcagacacacaatatgcatattgcatttccattgcaagggaaagggtactctgtatgacccctcatgggagggaagagcctaagcaaacctgcttatggattgctctgaatgcatatgtccccttctgatctggctgtttattcttagtactttgctgaaatagatcttagcatgagtaaaactatttctgagtcccatgaatcctttagtgaatgtctaaacatggggactcttgacacatcctcttgaacagaatttccatttttatttttaaaggaatagtaaaacagcttttattatgggcagctaataggtcccaatgctcaaactgaaacagacttcaattcctcaaacctcgaatgttatgggaggttatatgaggaggttacagataatgaagtaacacttaaaatatatgtcgaggtacctggcacatagtargcattcaaataacattacttgtatttttttccttattccctccagtcccagccccattagaatgcaatgtttttttaagctggtgggcatcatgacatatttatgttgcctgttttcctacttccgttttcttcgctagaaagcatacaatatatttaaaaattagatcat

SEQ ID NO: 800882 - DNA, 680 bp, Homo sapiens
tggttatgtggctcccctatgtttcctcatagatggaactgtgttccctctcagtgctctgaaagtgtggattccttttccactttaatgctggctatagttcacaacttggcattcctggactgtctgctgcagctctggaatgatctcagggtttatgtttcttccccagcttagaggcaacacagaaagggatcttaatagtggttgtagccaagggttcatttgcttgattcccgggagtttcaccccagagaaatgcaggtcagcaattgctcagtacagtgagaccaagaaggaaggtttgtgctgtgggcccaagccaggggttccctgtctggtgacgagctgayggaggggtgtgggacccgtggaaggtggactggactccttttcttgggtctactgcagcttgttggaggtgtggataaggcatttagggtctttgctccttcatttgtccaagggtggcaagagaagctccactgcagaggcagtggccaagaggctttcagttgcctctggaggctctgtccagggagttgccaagttggtactggcttgatagctctggtagggggtggctggaggcccaagcccggaggccctgcttggtgaggaaatacgggaatgggcacccatgtaacagtgtggccacttttctgtaggactgctgtggt

SEQ ID NO: 800883 - DNA, 680 bp, Homo sapiens
tggttatgtggctcccctatgtttcctcatagatggaactgtgttccctctcagtgctctgaaagtgtggattccttttccactttaatgctggctatagttcacaacttggcattcctggactgtctgctgcagctctggaatgatctcagggtttatgtttcttccccagcttagaggcaacacagaaagggatcttaatagtggttgtagccaagggttcatttgcttgattcccgggagtttcaccccagagaaatgcaggtcagcaattgctcagtacagtgagaccaagaaggaaggtttgtgctgtgggcccaagccaggggttccctgtctggtgacgagctgatggaggggtgtgggacccgtggaaggtggactggactccttttcttgggtctactgcagcttgttggaggtgtggataaggcatttagggtctttgstccttcatttgtccaagggtggcaagagaagctccactgcagaggcagtggccaagaggctttcagttgcctctggaggctctgtccagggagttgccaagttggtactggcttgatagctctggtagggggtggctggaggcccaagcccggaggccctgcttggtgaggaaatacgggaatgggcacccatgtaacagtgtggccacttttctgtaggactgctgtggt

SEQ ID NO: 800884 - DNA, 634 bp, Homo sapiens
ctctcaacagtcttatgagacttgttcctttcaagtagaaaaagactttcaaatgtagaagatataataatcaattatttctgttcaagatagtgaattatggctttacaatacgtattttcaaaacatgggtgaattattgcaggttcataatttaagcctacttatcaataagtacagataataaaatgccatagatataaataatctgaatccttggtttattcttgatgatttactgattcacacctgacgtttacttactggtaactgtaggcaaatgtaacatgcttaagcctgaatactaagatgagcaaattggttactgcttgatgaccatttcaaatgataagtactggcaaaataaacagttacattttttgctaccctcaccctctattaactattacttcagagtgacaggtttttttcagttctgatggtggatcaacatagatatagacagctcaaatagcgagtcacaccaggagygtcacctgctatttgagaaactgagtggatggcataaaacacagtgattatagctatgctttcatctggaaagagctctcatagggtcatcaaaaaccaaaggagtgcttggaagggacataggtacctgacaggttaataa

SEQ ID NO: 800885 - DNA, 604 bp, Homo sapiens
tttaatccatcttgagttaatttttgtataaggtgtaaggagggggtccagtttcagttttctgcatgtggctagccagttttcccagcaccatttattaaataaaaaaattttctccattgcttgtttttgtcaggtttgtcaaagatcagatggttgtagatgtgtggtgttatttctgagatctttattttgttctgttggtcaatgtgtctgtttttcggctttatgttttttaaccagtaccatgctgttttggtaaaactgattcttttggaaactacaacttrtcctattgaaattaggattatttgatattgagtttatttaaaactgagggacagcagtcagggaagggcaggaggaatgctgtgaagtcattgacgtattccccaggctttgagcagtatagtatttacataaagagttgagtcccttcaaaaacacttgatttcatgcaataattcctggttcatttgtccattgattccttgatttattctttcaacaagactttattttctgtctcccactcattgtggtaggccccatggataagttaataaataaggcaagtatcgttcatctccttttatagcttaac

SEQ ID NO: 800886 - DNA, 606 bp, Homo sapiens
atgtcttttatcccaccatccaggaaggcaactttgtgatgtccaccataaatagtgatttgttgtcattatcaaccagaggaagagaaaaaatcatgtgcagtttttcacctctctttcaggttccattttgcagagtagctgagatgctattcagtcctctctcctagctctattagcctcagtaactgcctgaaacagcaagactgcagacaatattcgggcttatgaccacagaaatccaaacagaatgacaattttcattcatttgaggtgaactgggttattctaattttcaggaattggatrttcttctaggagacctgtccctgtggcagtagaaggggcctgttgctgtcagcacagttgctcaaggaatggcttgtgagctgcaattttttcacactactaatgcattgccttcaccagggagcacagccggttgctgtgggattgcattagaggctttggtgaaaagcctggagacctcactatcaaggaggaagtgaaaggtgatcagtgggactctaccagttaactcttcagggaacctaccaccatttatgtgtttaccagagatatgcttctgattgtaatgggacccct

SEQ ID NO: 800887 - DNA, 520 bp, Homo sapiens
taaaattggaatagagaaaagaatgtgaagaactaagcaaaaaccactaatgtttgatgacctgtcaattctcaaatgaaaagcaggtgtcctgtctcctaacccaatcctacaaagactcagggcttccaaagggaaaggaaaggcaggcttcgattacagctaaaatatgcctatatcacattggatgtatgcattttctacttttgttttgaagtcgccctgactacatctgtgaaggatttgagscaactttccgtctcatatatatatattttttattatactttaagttctagggtacataagtctatgtttctttctatcaactggttactatcttaaattacatagtgtctcctactttgtctcatctctaattactaattaactcacattttataacttttatagtagagtagagattctggttctccttctgagatgcagcactagtatgagaaacagtcactttgtaccagaactttaaactgtatcatttgaaaatcaacagagagca

SEQ ID NO: 800888 - DNA, 612 bp, Homo sapiens
attaaaaaataaacataccatacaaccccaaaatagtacttttagccatttattccagataaatgaagacttatttctgtgcaagaatgtgcacatgagtgttcatagcaccattattcataatagccataagctggaaaccacccaaatgtttttttaatyggtaaatggttaaagaaactatggtatatccacatcatggaatattattcatcagtaaaaaggagcagactgttgatatacacaacaatttggatgaacatcaaggaattatgctgagtgaaaaaagccagtctcaaaagaatacaaactgcttgcttccattatgttacatttgtgaaagaacataatcagagatatggagagcagattagtgtttgccaggagctagggatgaggaagatggatgcatgactatgaagagaatcttatggtgatataacagttgagtatcttgattgcaatggtagttacacaaggctacatatgtgataaaattgcataaaactatgtacatgaaatagtgtatgtgtaacctaaaaatctgaataagctgtatgtattgtataaatctcagtatattggttttgctattttaacatgtgtgtataa

SEQ ID NO: 800889 - DNA, 612 bp, Homo sapiens
attaaaaaataaacataccatacaaccccaaaatagtacttttagccatttattccagataaatgaagacttatttctgtgcaagaatgtgcacatgagtgttcatagcaccattattcataatagccataagctggaaaccacccaaatgtttttttaatcggtaaatggttaaagaaactatggtatatccacatcatggaatattattcatcagtaaaaaggagcagactgttgatatacacaacaatttggatgaacatcaaggaattatgctgagtgaaaaaagccagtctcaaaagaatacaaactgcttgcttccattatgttacatttgtgaaagaacataatcagagatatggagagcagattagtgtttgccaggagctagggatgaggaagayggatgcatgactatgaagagaatcttatggtgatataacagttgagtatcttgattgcaatggtagttacacaaggctacatatgtgataaaattgcataaaactatgtacatgaaatagtgtatgtgtaacctaaaaatctgaataagctgtatgtattgtataaatctcagtatattggttttgctattttaacatgtgtgtataa

SEQ ID NO: 800890 - DNA, 558 bp, Homo sapiens
ccttattaggaaaaaacaaaagttggggaaacactggataagttgtcccattgaagttgcatatctataaaatggtttaaataaaagaatatttggtgaaaatatctttttctatttattgcaaaactacagctggacttctccagtgtatcctcgaagtttttttttaattttgtttcatcaataagaatcatcaaagtgaagatgcatcaactaaaaagaaaactgtgttgctccataaagcagtttaaaacagtaatggattccagaaaattaataaacttaattttaaatttaaattaagacattaataaaaaagtgagattttattccttttggggccctaggtgtgtgagaagcattgctgatattctgtcataaagatttagcagtcacgwctccatcctttcctttaagctcctatcccaccttactatagaattgattgcaagggatgccttcacatagaattgcttgtttttccttgaaaatgatgtctgaatccactcaagcttttccacagatatttagtttatgttctaaggttttctgatataa

SEQ ID NO: 800891 - DNA, 585 bp, Homo sapiens
aatatgattgtaaatttatgataagggtacattttctttctatcatcctaaattttagagtttttacgtaacatcaatggttcaccaaaactgaaggtttgatgagtgtgttgaatttcagtgaaaatcaaatttcttttccatattgctttatattagataataaagactttaaaaggtygacttggcaaataatattatttgttactttttattctaatgaacaatggagatacactcccctgtaatctaaatgatttttgtaatggtggaaaagatgttttgtttgatttttaaactaaccatttatatgaataaccataccaaatatgaaaatgagaatacaaaattctgacgattttagttttgctacaataatagattagactactcatctggagatttgattatgtccatagggctagaaacacgcacatacatgcatttacagaaaacagaagacagaggctgtaattagctattgaagtgtgacctcattatttaatgctttaacaaggcatgtatctactcagatagctggaataataatgatggtagagccctccaaagcaatgcacctcattt

SEQ ID NO: 800892 - DNA, 539 bp, Homo sapiens
ggacagcatcaagaggatggtgctgaaccattcatgagaaatccacccctatgatctaatcacctcccaccaggccccacttccaacattgggggactgcaattcaacatgagatttgagcagggacatgtatccaaaacgatatcaccctgctttactatagttattgtaaaatcattttcatgaagaggcctaaagatgcttatcataaaattaatactcttaaaagtacaatgatactgaatcttcagaataattaagattttggggggctcaactacactagttttaactattaatttatgcactatttattttaacctgcaatttttatttttatagttgttcgaaataatgaaaactgcttctgatggtrtaaatgataaattcctatacactgttttactagaagtagttcttttagcaattgtatgacaaaacaaaggacatttcttctatacacaaaagctatcttttaatccacagattgttgttggcttctgagatactaggtacaaatatttagcttagcctcataa

SEQ ID NO: 800893 - DNA, 505 bp, Homo sapiens
gatacagtccctgcagctgctttcatgggctgacatggagtgcctgcagctttttcaagcacatgctgcaagctgttggtggatctaccattctggggtctggaggatggtgaccctcttctcacagcttcactagggagtgccccagtggygactctgtatgggggctccaacccacatttcccctctgcatttctctagtagaagttctccatcagggctctgcttctgcagcagacttctgcctggacttccatgtatgtctgaacaacctctgaaacctaggaggaggcttccaaagcttaactcttgtcttctgtgcacctgtgggcccaacaccacatggaaggtggcaaagcttgggtatttcaccctctgaagcaatggcctgagctgtgtcttggccccttttagccacggctggagctggagtggttgggacacagggtgccatgtcctgaagctacacagagcaacagaatgctgggcccagcccatgaggtca

SEQ ID NO: 800894 - DNA, 626 bp, Homo sapiens
ctacttctaccattaacagaatgttggtgcctcctcaaacttcatatgttgaaacctatccctgatgtgatggtattaggatgtagggtcttcaggaggtagttaggtcacaagggtaaaaccctcatgaatgggattagtgcccttctaaaaaacggccccagaaagctcccctgttccttctgctatatgaaaacacagcaagaaggtactgtctatgaaccaagaggagaggcctcaccaaaaaatgaatctgatcgcaygttgatcttagacttggcaacctctagaactttgggacataaattcctattgtttataaaccaacgagtatggcactctcttttaggatcctaaagggactaaggcaatttcctttgagggtcttgtaggttctcttgcaataaatgtcactcttgcaaagtctgtggacagcctgaattttctcaacacatagatgcttgatgttttttgcctgcctgtccaaacaatttgttctctacatttgatgtccaatatatttactagttcaagcctcgatatcaattttggaggttaaatttgcagtatatggtgcaaagtgcattcttatatttagattcaagttttttgaattgttaaactct

SEQ ID NO: 800895 - DNA, 626 bp, Homo sapiens
caactaaaagtagaagagctaaacttgagcgctcatcttctgtattcaccgtaacacagatctctctcataagtaggggctagaatctttctttttaatgtttaaagttggaaattgccagcagaacacgacaacaccgtgtgtcccttagatatctccattatctttgcctactgccaatctttaactttgctcattctctctttacttgagagagattcatcacttcagcaaatcatagagctgaaagagactcaaatctctyctttagtgtatgagaaaaccaacagccagagaaataaacctattttgttgtagatgatctaagtaattattagaaaattttgaactgaacttagttttgccaattcctattgcattcccaatcagtctcataggcattcaaaagtatctattgaaaatccgcacaatgaggtgatgcaaaacttctcggacatgtaagtgctggacacctcaggtggtggagtcaattggcccgacatgtaagtgctgtatactacaggtggtccgacataaaaaaataaaataacccacccccagcccttgccagtaagtgcacaaaaacactttggagcgaagggaacccaacgcaggctgagattaag

SEQ ID NO: 800896 - DNA, 577 bp, Homo sapiens
ttaccatttgttttatttacacaaatctagggttatgaaagttcagttataactcaaatcattatgtgaattccaactaataattatgtgctttcagccaaactctatggttcttgtgaaagcaattcgtcgggtgaaataattattatccgtgaagctcattttgytcttcagattaaacattttctcatattttatagctacaaactctagaaatacgatggcatttttcttcctggagctagaaaaatgtaataagatatcaagcatgcttatgcaacaatggtgctggcagctggattatgtcaaaattccttcatttattacttcagatttaccacaattatggacattttttaaaactagcttgcagaatttgaacgtattttacttctataaccagagcacactccaaacagatggattgagacaataagactattcacttgtgaatgacagttggggcaatttgggggcagtatgggaagtattagggctgctggaaatttcctccttatatattaagctttggagctgaagaacattaaaatctttttttatttttctgactagtgat

SEQ ID NO: 800897 - DNA, 602 bp, Homo sapiens
cattctacacgagcagaatgctcttcaacttagtgcactactaatttggaaacagtttgctatttcctttctatctgtggtcttattcccttttttatctttcttagatagctttcctgtttttctataaatgccttaggaccaatgattctctaatctcactgtatgttgttattattgagagaatattttaaaaatgtcaatgccggtgtgccactttaaggcattctaatttaattggtgttctaggaattggtattttttaaaaagtccccccacccctgggaattgttatgtgtagccagagttgagaaccactgtattacaaatgtcagcttccctggttcacaatgcttacctaacatgaggaacaaaagcctgggcctgggctctgctcttcctgggaagttttgggagcttcctacacatggagagctatttgtggrctatgaagagcctcagttctggacctacctgacaagctccaggcaacttttgcaaatgtagtggagagggtgctgccctgctcagacacccaactagaaacttttgggttaacttccaccaaggcaacacagagaaagggggttataataaggcag

SEQ ID NO: 800898 - DNA, 511 bp, Homo sapiens
aacttccattatctggcccttgtgacttttcagacctcattttctaacattcttcattctttgtaggaacctagaaattgtctactgatgttctcagaattcccccaatcctggaacttactttagggctgtcactcttcctcttcccagggcactcttcccagtggctcaccccgctccactgtggtctgsgttcatctgtcagtttagctgagcagtctttccttaccaccctacccacgcatgaacactgccaccctgcccgctcattctctagactcttgtgctgcttctccttccatggtatttatcagtacctggcattatattatttaaggtttttttgctatctctgccactggagtaaaatctccacgagggcaggaataccttttattttgttccttgaccccaagggcctaaaataaaacctaacatctactgtgtgctcaatgaatattttttaatgccctcttcttcctcattattaaaaaataaaccataccccaag

SEQ ID NO: 800899 - DNA, 600 bp, Homo sapiens
taaccaagtggccgtaagaaaccctggccgagacactattttgggctccctgatttcaaggtgttctgtgctcaggtctgcttcctgatctgagggaaaatgtgttcctgatacagaacttacagaggaagggcaactggagtttgcatctggctttcctggaccccttgctgtgagatagcctttggctgtcacrcatatccttattttaataatattgctatattgtatcttttttggaaacaatctgtaaatttataagcattgtcattttgggctctaagtcttcctcagcaactggaccctgtctaactgccattattagcgcagcaagcctggcttaaagtgtaataattgcatggcctcacaaggtaagtgggaagatgttccaaatgcagaataggtttcaccccagagagaaccacttgggaaacagctttgtaaagactatttttaagagcctcagaaactttctatttgccacctctcctcctatcttgcttgaaatttctctagatttgacaactattaacaggatcctacatcccatcttgttgcctttaatatttccaagccagtaagtttttgtcattttttata

SEQ ID NO: 800900 - DNA, 605 bp, Homo sapiens
gatgtttttttttttttaattttattttatatacctggatgcctttgaggatttgactgtggtataagttgagttcagatgaatggtttcattctggatgatttctggtggccatacctgagcttagcactgctgactgcataccctaaccataagcggcaggtatcagggcattgtattattctctgacccctcaagattaagcacctgctatgctggaggggctgagggctcacagtccacaggcaaccaacactcttatgggggttgctaacaaaagcacttgagtgggrtggtggaagtggggccagcatgcacatgtactctagcgtgggagaggattcatgtctggatgcgcatgtgtggtgatggagcatcatcatccatgcacactagtagcaacaatgcaacagtttccacacatgtgcatatgctcatgtggtagtggcatgttttttgtcttttcgataatagctattctcactatgttgatgtggtatctcatcattattttaatttacatttatttaatgattcgtgatgttgaccatttcttcatatacttggtgaccatcttatgtcttcttttgagaaatatctattca

SEQ ID NO: 800901 - DNA, 625 bp, Homo sapiens
atcaacatccaaaaaccagtagcacttctgtacaccaataacaaattagctctaaatttaagaaagcaattccattgacaatagctgcaaaaaataataaaggacctaggaataaatttaagcaaggaggtaaaaactcttgacaatgaaagctacaaaacattgatgaaagaaatagaaaaacatttttgaagaagcagacagttagcagacataatgcttttttctgcaatttcaattraagtcaactgagtggtaatacagtgccaaataaatttagcccaaatccacagagaatgtgcaattaagaggcttcttctacactgaactggttagtcttttttggattacattgacaggaagttgaacaaaattgaaagctttgatagataaattaccaggaagagaatgggagtgaaaaccaactcaagaaaattcctctctttgtttcatattccattttcaatccgtttgaaaaaacagttggctttaccttcaaaacacaggcagaatctaattagttcctacctgctccaatgttgccatcctgtctcaagctactatcattccttctctgaatttttgtaatagcctcctgattggcctctctactttcacttttgtc

SEQ ID NO: 800902 - DNA, 596 bp, Homo sapiens
taactctggtagggggaggtagaggtcccagttctgtaacttatcaaaaagtcaagcatttctcatttatccttttacacttttgtaggcaatccaatcctaaagcatgcctatcatgtggataaatatctatgtcgaataagtggtctagggcaataattgtcatttgggaactaggggcttggcaatgggtgatgtgtctgaattayaggaagagttcccctccacaccacaatcctcatatcaaggttgtaagaccctgatattgagcagtgttacccaaacatgaaatatttatctggagcatattccaaaatccaatttctatactccagccaaaatataatcaatcaaaatctctgagtgagaggcccagatactggtatttttaaaagctccctagatgattctgaagatcagccaggtttgggaattactaggatatagcatctggtctcaaagcaaaaagagaattagaactcagcaagcatatgcttcaattgtacaggcagttgcttatcacccctttgcttgctttgaatcaaaaataactcaagcgtttctttatttggggtttgagcagaatgcatcagcag

SEQ ID NO: 800903 - DNA, 608 bp, Homo sapiens
atatggctcaatttcactgtcacttgggttcactgtattgtagaagacctgcaaacttcactaaccagagaaacaaacgtgctccaggccttcaatgccaagattttcatcctccagttcttccccaacccccaaatctgccccatcctaaccctctatccctaccccaacttttgcccaattaccattaatgactaatgttttcttctaagctgtctcttcccacagctattctagtagatccctccagtggcaagtgattctagggcaattaaggaagctcaaatgaagaatcatacaccayagagttagcttaattcagaatctactcagagcctacagtttctcccagagatatttacctctgacctgaacactttctagttcttcgtctcacacagatatatgggtacatgcaataagggtcagacagcaaagcgctagtcagcttctttcttccaactggccagtccactgatcaaagaccaaccattctgccagatagtacaggtaaactgtctcatcaacaataccactaccattagccacagacattgagaggagaaagggtctgtagctccaactgtcatgtagttgtggcttcttgc

SEQ ID NO: 800904 - DNA, 570 bp, Homo sapiens
atcccgcagtggaaaaaaaaatcactgtattatttatacataaattatttagttatacataaattctttagttttctaaatttctaagggcttaaaactgtagcatcattatgacacaaaaattacacatcacagataaactctcttcccaaggttttggatattgttttttctttaaaaatgaaaatacatctatctttataatatacatgttcattgaagataagtttcaagaaaggcagaaaagtatgaggaatacacctagtggtttacattgtccaagacatttttctatgaacatttatttaaatataagtttactttaaaataagatcatatcatacgtactgtttcataacttattttttacgtaacatatcttagacagctttgctragtaccacagacttaatggcttaaaacaccacacgtttattatctgtttctgtgcatcatcagtcctgtcacagtttctgtcaacagattgcaattcaagtactggccagggctacaatcttatcagaagctcaactgggaaaagatccacttccatgtgccctcaagttattg

SEQ ID NO: 800905 - DNA, 618 bp, Homo sapiens
aagatgttttccccctaaaatctaccattaatttattcattgaccaaaggtttattgaatacccactgtgactcaaacactgggctggcctctaggtttgaactgcaaaaaagatcaacatggtcccttgcccttatatgaagcttaaaatctagaagttagaaacttcaagagtgtaaagtattttgatggctaagggcaagatgctctgggagtgagtgcacagggaacaaacctagtccagggaggtgaggttctctaaggaaataatatcttaggtgacaactgaatatgaatgtgagttaacagggggagggagggaggaaagggtgggagagatttcaggccaaagaaataaccacactcttataagttagctcttattaaattgaaaaatcaagacaatatctaaaagaaaaaggatattctaagtggaraaggcaaaagtgagatttcagacttggatcaacatcattccttttcctgagaattttgccctcttgtggcagttacctgtcaatgaccatactgtgtcaacaggtttccttagattcctggtactttttgagctggaggtctttgctttagaaaaggactattccattggtttccaagttt

SEQ ID NO: 800906 - DNA, 638 bp, Homo sapiens
tctctttgctggtgaaataacactatgcctagaaaaccctaaagactccatcaaaatgctccaagacctaataaataactttagtaaagtttcaggatacaaaatcaatattcaaagatcagtagcatttcagtacaccaatatgttcaagctgagagtcaaatcaagaatgcaattccatttacactagccacaaaaaataaaatatctagtgatatgrtttggctgtgtccccatccaaatctcaacttgaactgtatctcccagaattcacatgtgttgtgggaggaacccagggggaggtaattgaatcatgggggctggtctttcccgtgttattctcgtgacagtgaaaaagtctcatgagatctaatgggtttatcaggggtttctgcttttgcttctggctcatttttctcttgccactgccatgtaagaagtgcctttcacttcccaccatgattcttaggcttccccagccatgtggaactctaaatccaattaaacctctttttgttcccagtttcaggtatgtctttatcagtagcatgaaaatgaactaatatatctaggaatatatcttaccaaggaggtgaaagacctatacaagtagaactacaaaacactgctaaaagaaa

SEQ ID NO: 800907 - DNA, 638 bp, Homo sapiens
tctctttgctggtgaaataacactatgcctagaaaaccctaaagactccatcaaaatgctccaagacctaataaataactttagtaaagtttcaggatacaaaatcaatattcaaagatcagtagcatttcagtacaccaatatgttcaagctgagagtcaaatcaagaatgcaattccatttacactagccacaaaaaataaaatatctagtgatatggtttggctgtgtccccatccaaatctcaacttgaactgtatctcccagaattcacatgtgttgtgggaggaacccagggggaggtaattgaatcatgggggctggtctttcccgtgttattctcgtgacagtgaaaaagtctcatgagatctaaygggtttatcaggggtttctgcttttgcttctggctcatttttctcttgccactgccatgtaagaagtgcctttcacttcccaccatgattcttaggcttccccagccatgtggaactctaaatccaattaaacctctttttgttcccagtttcaggtatgtctttatcagtagcatgaaaatgaactaatatatctaggaatatatcttaccaaggaggtgaaagacctatacaagtagaactacaaaacactgctaaaagaaa

SEQ ID NO: 800908 - DNA, 576 bp, Homo sapiens
ggcttactacatgcagaagaataaaaatagaacaactacatgccaccatatacaaaaattaactcaagatggataaaatgcctaaatgtaatacataaaaagattaaaatcctataagaaaacctaggaaatacccttctagacattggccttgggacataatttatgactaagttctcaaaagcatttgcaacaaaaacaaaaatagacagatgagacctaattaaactaaagagcttctgcatggcaaaagaaattatcaatttagtaaactgacaacctacagcatgagaraaaatattcacaaactatgcgtcagacaacggtctcatatcaagaatctataaggaatatacacaaacaagcaaaaaacaatagccccattaaaaagtgagcaaaggaaacagacatttctcaaaagaagacatacaagcagccaacaaacataagaaaaaaaatgctcaacctcactaatcatcagagaaatgcaaatcaaaaccacagtgagatattatctcaaaccagtcagaatggctactattaaaaagtcaaaagatattatgttgatgaggctat

SEQ ID NO: 800909 - DNA, 576 bp, Homo sapiens
ggcttactacatgcagaagaataaaaatagaacaactacatgccaccatatacaaaaattaactcaagatggataaaatgcctaaatgtaatacataaaaagattaaaatcctataagaaaacctaggaaatacccttctagacattggccttgggacataatttatgactaagttctcaaaagcatttgcaacaaaaacaaaaatagacagatgagacctaattaaactaaagagcttctgcatggcaaaagaaattatcaatttagtaaactgacaacctacagcatgagagaaaatattcacaaactatgcgtcagacaacrgtctcatatcaagaatctataaggaatatacacaaacaagcaaaaaacaatagccccattaaaaagtgagcaaaggaaacagacatttctcaaaagaagacatacaagcagccaacaaacataagaaaaaaaatgctcaacctcactaatcatcagagaaatgcaaatcaaaaccacagtgagatattatctcaaaccagtcagaatggctactattaaaaagtcaaaagatattatgttgatgaggctat

SEQ ID NO: 800910 - DNA, 622 bp, Homo sapiens
agaagttacagcagattttgtcctttttccatcttctttagccaacaccttaagattaaggtgttataaaacccaaatggagggattgaaacctccattgcaaaattgtaaccaaggcagtcaaagagatctgatctaaccaactccatcttgcttctaacctccaagccatccttgtttattcctggscataggctgaactaactttaggaggaattgagtttatagtttaaaacaaagacgataacaggcctttcccaaggcaaatcccccttttgcctagggattagactgtctttgtaggactaacaaattagccacaagattagaaattatggtttaggagtcatgcagctggaggttacaagattctgaccctccctagactgctcctaagatcagtgtttaaaatatttcgcagactctgcagatgatggatcaactggcaccacccagatcaataaactggctcatctgatcttgtggcccccacccaggaactgactctgcacaagaagagtcaactccctatgatttcatctctgacctgaccaatcagcatttctggctcactggctttccccacccactaagttgtccttaaaaactgatccctgaatgc

SEQ ID NO: 800911 - DNA, 622 bp, Homo sapiens
tgaacacaggaagtcctagcactctcgcctactaacaagagaatttttgtggtttggatgggtgtttaggaattagtgtttggtgaagaaatttttttttgcaatgctagaaatatcctggaaacaaaaacttgatgactaaaaagaacagatttttatgctgctggattcaaaggcatcacttatcctacagagaagtgattctagtgggttctaccgaacaggtgcaggcgctcacagctcaggtgagtgctgctgaaaatcaccaactttgtcattttacagctttggccttcaagaaaaacactatctagtaatgctggggcttttaaaaagcagaaggataagtcctttcgttcatatttaaatctccatgagatattacactcataataagaatgctacatttgacaaattaattagtttttaactagctttcccctttatcaaatattagctcctaagaacattaatatggaattgtatrgaatgctactagcaataatctgtagctgttataactgtttacatatgggtcatcttcacagtttgacagttcataatgcaatcagctaagattcagtatttatggcttcgtgttatacaatttttttcagagaca

SEQ ID NO: 800912 - DNA, 565 bp, Homo sapiens
aggaaaggaaacctgggaacgaggaacactagcagatctggttgttctggtgatagatgagccaggttgggtggaggcagggctcaccccactgagttccagtctaaggtagagatctcctaacaaccaccactagccttgatatcccacacccaaacaccaccctatataacctttacaaaaatttgttttctattctaaaatgatagtcaccctcaacctaaaccaaaatatcttctttyactttatgtgagctccttatatctaacctcctaagacacactgaaggcttctgtcatcaccatgtgcatccattgagatcagcccgggttggagctcaaaggagattttgagcctagaaggaagagattgaggttcccatccctatgctcaacagacagctggcaggtgggggatggaagcagacctcttagagggctagttcccacaggatggtaagcaatgggttcagctcaaaccctggggctaggagataatgcagggtcagaaagagagagagacagacacacagagagcagggagagagagagatcagaggagggcc

SEQ ID NO: 800913 - DNA, 638 bp, Homo sapiens
tcacataacataatgtcctccaggctatccatgttgttgcaaaggacagaatttcattatttttatgggtgaatagtattccattgtgtgtgtgtgtgtatatatatatatatatattccattgtgtgttatgtatgtatagtattccattgtgtgcatatatatgtatatatgtgtgtacatatatatatacataatatatattcttctgcacatggaaatccagtttctccagcatgatttattgaagaggrtatcctttccccagtgtatgttcttggtgcttttataaaaaatcaggtgacctcagatcagacccaactacatcataccttctttcgaaatgtgcaagaaacctactagaaattcttattgttagagtttcagatttatgtcctggtttatactgccacattcattcttggaggtgagtacatttcgatcttggtccggctgcgcagagagtcaaagcaggaaaatcacagattcttcccagcagtctacagcctacacagcggcatttggtgcgatgggatggaacatgctgtatctctattccatgtgggggtaaagtgggtggcctgaaatttcctgtgtctgcctgcatgatgcaaagctcacagttcagaagcttaagg

SEQ ID NO: 800914 - DNA, 633 bp, Homo sapiens
agtcactaaaactacaagataccactctatgcctaaaagaaggcctacaatttaaaaagactgatactatcaggtactgggaaagatgtagagtgaagcaaccggaagttgcataaagttatggtggcaatggaaaatggtataaacactttggaaaacagttgggtaatttcttaaaaaattaaatgtgtacctatcatatgacccatttagtccattctgaactacttatttacccaaaagaaataaaagcggtggttcacataaagacttctaaaaaacrttcatagcagctttactcataatagccaaaacctggaaataattgtttatcaacaggttaacagataaataaattgctatacatcatacaatggactacccactagccaacaaaaagaaatgaagatgcaacagcatggatgaatcttgaaataatcatgctgagtaaaagaagttagacagaaaagagtacatattgtaggatcccatttcaattaaattctaaagggcacaacctactgaatagtgacacaaggcagctgaatgtacctggtgatggaagaggacaagatggagagttacaaagtggtgtaagaaaactgtgggggtgacaaatgtgttcattatttt

SEQ ID NO: 800915 - DNA, 604 bp, Homo sapiens
tttatattccctggtgcccagcacaacgttgagaacctcagccagcacacagtaggtgtattagtctgttctcatgccgctaataaagacatacctgggactgggtaattattataaaggaaagactttttctgtttgtttttctgttttttttttttcttcttgagatggagtttcgctcttgttgcccaggctggaatgcagtgacgtgatctaggctcactacaacctccaccacctgggttcaagtaattctcctgccccagcctcccaagtagctgggattacaggcatgtgtcaccatacctggctaattttgtatttttagtagagagggggtttcactatgttggtcagactggacttgaactcctgacctcaggtgattcacccacctcggcctyccaaagtgctgggattacaggtatgagccaccacgctgggcaggaaagaggtgcaattggctcacagttcacattcatgacgaaagacaaaggggaaagcaagacacatcttacatggcagcaggcaagagagcttgtgcaggagaattcccatttataaaaccatcagatctcatgagacttattcactcccatgagaa

SEQ ID NO: 800916 - DNA, 474 bp, Homo sapiens
atacatgaaaatgtaagaatcctcataaagacagtaactgaatctagcagtgttaaatagtacatcatgaataagatgtttcattccagaaatgcaaaaatactttaacacccaaaccttagacactgtaagttttaggacattagtggactaaaaagrtgaaaaatcacactgatctattcatcagatacttactgaatgcctcttatgtgctagtctctgttttgatggcagggggaaatgtaccagggagcgttctgcagcacttagaaccagtgcatgaggctgggtgtggtggctcacgcctgtaatcccagcactttggaaagctgaggcagttgatcctgaggttaggagttggagaccagcctggccaacatgtcaaaaccctgtctctactaaaagtacaaaaaactcagccttgcgtagtagcgggcgcctgtcatcccagctacttgggaggctgaggcagga

SEQ ID NO: 800917 - DNA, 474 bp, Homo sapiens
atacatgaaaatgtaagaatcctcataaagacagtaactgaatctagcagtgttaaatagtacatcatgaataagatgtttcattccagaaatgcaaaaatactttaacacccaaaccttagacactgtaagttttaggacattagtggactaaaaagatgaaaaatcacaytgatctattcatcagatacttactgaatgcctcttatgtgctagtctctgttttgatggcagggggaaatgtaccagggagcgttctgcagcacttagaaccagtgcatgaggctgggtgtggtggctcacgcctgtaatcccagcactttggaaagctgaggcagttgatcctgaggttaggagttggagaccagcctggccaacatgtcaaaaccctgtctctactaaaagtacaaaaaactcagccttgcgtagtagcgggcgcctgtcatcccagctacttgggaggctgaggcagga

SEQ ID NO: 800918 - DNA, 474 bp, Homo sapiens
atacatgaaaatgtaagaatcctcataaagacagtaactgaatctagcagtgttaaatagtacatcatgaataagatgtttcattccagaaatgcaaaaatactttaacacccaaaccttagacactgtaagttttaggacattagtggactaaaaagatgaaaaatcacactgatctattcatcagatacttactgaatgcctcttatgtgctagtctctgttttgatggcagggggaaatgtaccagggagcgttckgcagcacttagaaccagtgcatgaggctgggtgtggtggctcacgcctgtaatcccagcactttggaaagctgaggcagttgatcctgaggttaggagttggagaccagcctggccaacatgtcaaaaccctgtctctactaaaagtacaaaaaactcagccttgcgtagtagcgggcgcctgtcatcccagctacttgggaggctgaggcagga

SEQ ID NO: 800919 - DNA, 571 bp, Homo sapiens
gaacagaatcagtatgagaatactgtttacctccctgtccatgacttcacgatgacctctttgatcaatgaatgatctccacattttagccctctccaagaaccctagccctcagctcctccgggagatggatttgatgtttgctgctcctcgttcagcagccccataattaaaccactttctctgctgtaacccagtgtctcctattgacttgctgcacacatcaggcaacaaacctattaaaatcacagcacttcttcaagttcaagrtgattgactcaggttgggttgcttggcatttccctggctttagtatgaaagtcccacctctaaggacactcctcaattgtggaaatcctgggatggccagttactctgtcaacttggccttcctcagcagcacagtgcctggcatacagtaagtattccataaaatattcatttaatgaatcaatgagttttgttttctgcccgctttcactgcatgcacatacatttcttgccatattccattccactcctgatccttctatctaattgtctaagtctgccccaggctactggatcctgg

SEQ ID NO: 800920 - DNA, 666 bp, Homo sapiens
aaacatattttgcaaaagtgtacttgcccttactatgtatgttgtttactgataattgtttttctttttctattctgtgctttattttattttttaaaaattgctgatctgactcagtagggaagaacttcctaactgggtggctgatattattgatctcttcagccttgccccatttgcctctgttgggagtagcctttgttgttttgattctctgttacaggagggrtcccaacttgcagtgtgaaaaatactgttgtagtaacttaaaatgttaaaccaaaagatttcctgacgtgttttttgattcccgaaagtgataacactttcatggtacagaaaagcataatgaagaaaaaaatgcgtacactaaccactgataacattttagtgtatttcctttcggttttattctgtgcatatgcgtatggatttttaatagtaatgtgtatattttgaacaatataagattgggctctttttgtttaatcctgatgtagagtggtagacttctggttcatagaaatatagaaagaaaagataccacatgcttagatgtattctaccacttggaaataactcctagcttgaccatgtaacttcaaaaagttatttaacctttctgagtttccattttctcacatatcagatagagataaagacctc

SEQ ID NO: 800921 - DNA, 644 bp, Homo sapiens
cagcctcttatacccctaccactgcactggcaaggacctatgtcatcagggtcctccttgttactagatccaatgtatacttttcagtaactcttcttggcaggatttactgctgttcattaaattttttttcactaccttaaaaaatgttttcttggccgggcgcagtggctcacgcccgtaatcccagcactttgggaggtcaaggtgggtggatcacgaggtcaggagttcaagaccagcctggccaagatggtgaaaccccatctctactaaaaatacaaaaattagccaggcgtgatggtgggcgcctgtaatcccagctactcagtgactggagatcgtgccactgcactactgcactttaacctgggcaacagagtgagactccatctcaaaaaaaaaraaaagttttctcctcctctgtttattcagagttcctcagagctttcccactttatgcacgcttcttggacaatttcatccattcctgtggtttcaaaggccaactatgctaaagactccccattatgtgacattaccccagatctttctcttgaacttccagacccatttatccagctagtagacatgacaacttcataacccacaataccccacccaactcattacatccaacttga

SEQ ID NO: 800922 - DNA, 605 bp, Homo sapiens
aaattctaaagccctacaacaccatcttctgtaaactgcaatctgtcattgggaaaatcacctatatccctttatcaacttttctgtatgttccctgtatcttctttctctagctgaaaagtgactctcacctatgagggcaatgcttcctctgcccagacattacatatagtagctcttttctcttccacaactttcctctctcctaaacacttcccagatttgaattataggccatcaaaaaaaatcatctgctacccctgaaacagtttttcacttgccttctaagacacaatacagccctcattttcttcttacctttcttctcacagcattaatatattttgcttattsttcctcttctcacatcctctaaatgtcaaagtattccagaactcagcctttcaatatcttatcttctttttctacaagcatatcttaagtgatttcatcaagcctcatggcttcaaataatcatttatatgcgagtaactttcagatttcttttttcagcctgtacaaatttctgaagtttgtgatcgaatattcagtggcctacacattatctctatttggatagctaatggaaatcttaaaatttaaca

SEQ ID NO: 800923 - DNA, 614 bp, Homo sapiens
atttcttaagggcttatagaacaagacgagtgacatgatgccaattgtaacttttatcacactaatttccaatgtaatgctttaagacaatgaaggtagttataatcagaatagcttgtatgctttcccagtcatcgtaaatatcttaatttacatctcactttctatctgtattgtatatttcacatatttattctaagcctagagtgtttratatcaatctgtaaattttagaattaaaaaataaatttattgactgggcgcggaggctcacgcttgtaatctcagcactctgagaggccgaggcaggcggatcacaaggtcaagagatcgagaccagcctggccaacatggtgaaaccctgtctttactaaaaatacaaaaattagctgggcatggtggtgcgtgcctgtagtcccagctactcgggaggctgaggcaggagaatcacttgaacctgggaggcagaggttgcagtgagctgagatcaagccactgaactccagcctggcgacagagcaagactccatctcaaaaaaaaatgaacaaataaataaatttatttttaatattttattatactacaaatgcactacatattgcaaatatacata

SEQ ID NO: 800924 - DNA, 530 bp, Homo sapiens
ttttcgatacctctctctatgtttatctttatccgtatcctttataatatcctttagaataaactggtaggctgggtgtggtggctcacgcctgtaatcccagcactttgggaggccaaggtgggcagatcacgaggtcaggagatcaaaaccatcctggctaacacggtgaaaccccatctctactaaaaatacaaaaaaattagccaggcatggtggcaggcacctgtagtcccagctactttagaggctgaggcaggagaatcgcttgaacccgggaggcggaggttgcagtgagccgagatggcgccactgcactccagcctgggcgacagagcgagacccatctcaaaaataaataaataaataaactggtacttttttaaaaaaagaaraaaagtaattatcttctttaatgcataggatctttaataataataacacccagaatttattatatattataaaaatcagtggctatcatgggccagagacccatactgaagtcatttataaaatatctttaaaat

SEQ ID NO: 800925 - DNA, 616 bp, Homo sapiens
ccctctctaatcatattgggaaaaaaccctttgcgattttgccaataccaggcctgtatctgctcctagcactgttctatctccctcctatgctcaagccaattcttggaggtgcagatcccctctcagccctggcatcttactctccccgtgcccaagcttccaaaattaccccattcactctcttctcttcccaaccccagcccatattttcctaagcagaaagaaatgagatctaatttattccacagtattgatagtggcacaatgatttcatttggggagagggagagatttctggtwgttcaggggacaggagtgctgcctgatgcccctttatggacccctgaaacttctcctttttcctccgtacccaacctcctggctgtgaccaggaggaaagccaggagaaagaaacagaatgctagtgcccagagcctccagcctgccctagccttggaacaaagacgtggtcgcctgcaggaagcagcacacattctccacaggcccgtcaacctgccctcagcctccgtcctggaaaacgcccgccgcgctccacctctcacaacagctggcccgcgtgtcacagccaattaggctttggagggagtgagag

SEQ ID NO: 800926 - DNA, 590 bp, Homo sapiens
aggttttgagcacaataaagacaatgatctgatacatgtttcaaaaagtaaagacttttacctttttgagacagagtctcactctgttgtctaggctggagtatagtggcatgatctcagctcactgcatcctctgcctctcgggttcaaggaattctcctgcctcatcctccacgtagctgggattacaggtgtgtgcaaccacgtctggctactttttgtatttttagtagagatggggttttggcatgttggccaagctggtctcgaacttctgaccttaggtgatccacctgcctccgcctcccaaagtgctggggttacaggcrtgagccaccactcctggcctcacaaagtatgactttgaatgctgtgttgaataataaatatgacaagattccctgaggggttgcgcataagatgtcagaggaaaagagaagttaagaacaactccaaatttctcaaagaacttaaaacagaattcccatttgacccagcaatcccattgctgggtatatatccaaaggaaaataaatcattctgccaaaaagatgcatgtacacttatattcactgaagcactgttcacaa

SEQ ID NO: 800927 - DNA, 555 bp, Homo sapiens
gtccagaggagatcaggaccccgttatttcctcactccaatccctagaatattcattcctagggctcacttccattgataagttattgctcattcatttttctgatgctgggctcccgtttaaaccacaggctccatgagggcaatgcccaggcctgtcttattyaagctgtgtacccagcacctagcaaatagcctggcacagagtgggtgctccgtaaatagttaaagagcacggaaataaatgaagccatggatctgatggaatcagcccccttacccaatgtgtcatcagtaggctgaggttggttgatagcaaggagggagtcacaaggagatgagggtgactgggaacctgagagtgtcattcagcctggagaatggcgaggaaaaggcaagagctgtgtgcaaaggggaaagagaaggactatagcttccaggctgaggaagccagcaggacaaccctgcagagaaacggggcaggtggtctgttcaggtttgggaagcagacatctgggtcaggacagacagtgcctgtttcatcacaggccagtgg

SEQ ID NO: 800928 - DNA, 555 bp, Homo sapiens
gtccagaggagatcaggaccccgttatttcctcactccaatccctagaatattcattcctagggctcacttccattgataagttattgctcattcatttttctgatgctgggctcccgtttaaaccacaggctccatgagggcaatgcccaggcctgtcttattcaagctgtgtacccagcacctagcaaatagcctggcacagagtgggtgctccgtaaatagttaaagagcacggaaataaatgaagccatggatctgatggaatcagcccccttacccaatgtgtcatcagtaggctgaggttggwtgatagcaaggagggagtcacaaggagatgagggtgactgggaacctgagagtgtcattcagcctggagaatggcgaggaaaaggcaagagctgtgtgcaaaggggaaagagaaggactatagcttccaggctgaggaagccagcaggacaaccctgcagagaaacggggcaggtggtctgttcaggtttgggaagcagacatctgggtcaggacagacagtgcctgtttcatcacaggccagtgg

SEQ ID NO: 800929 - DNA, 589 bp, Homo sapiens
gcacccccaccactccattgcacttttgccagcagcccacattgaagtgttgttggcaacaaactaggaacaactcagcttctccagtgcagcaagtgcttgaccttgaggggccagagaacaaagctgcaggcctagttccagccctccagagctagagcacacagtcctggagtgctgaactgagcctcggccatctgaaagcatccagaaacaaarccaataaatgaaacccaacttataccacaatcaaaccctccaggacatcaaagactataaaagcaagaagcctgattcaaaggacagcaacttcaaagattaaaagatcagccacacagatgagaaagaactagtgcaagaattctggcaactctaaaaaccagagtgtcttcttacctccaaatgactgcactagatccccagcaatggttcttaaccggattgaaatgacatagaattcagaatgtaaatggcaaagaagctcaattttccttgacatataggagaaggttgaaatccctttcaaggaaagcagtaatatgatccaagagttaaaaacgacataaacattttcagaaagaatcaaact

SEQ ID NO: 800930 - DNA, 589 bp, Homo sapiens
gcacccccaccactccattgcacttttgccagcagcccacattgaagtgttgttggcaacaaactaggaacaactcagcttctccagtgcagcaagtgcttgaccttgaggggccagagaacaaagctgcaggcctagttccagccctccagagctagagcacacagtcctggagtgctgaactgagcctcggccatctgaaagcatccagaaacaaagccaataaatgaaacccaacttataccacaatcaaaccctccaggrcatcaaagactataaaagcaagaagcctgattcaaaggacagcaacttcaaagattaaaagatcagccacacagatgagaaagaactagtgcaagaattctggcaactctaaaaaccagagtgtcttcttacctccaaatgactgcactagatccccagcaatggttcttaaccggattgaaatgacatagaattcagaatgtaaatggcaaagaagctcaattttccttgacatataggagaaggttgaaatccctttcaaggaaagcagtaatatgatccaagagttaaaaacgacataaacattttcagaaagaatcaaact

SEQ ID NO: 800931 - DNA, 431 bp, Homo sapiens
agaagggaattgccctggagagccactgagcttgctgtaaactttgcacgggtaataaaattctttgctgtgttaagccactgatacttgggggaggttatttgttattgcagcataacctgtgtatcttaactaacgcccttgtataacctgtacacttcacccagcctgatgaataaagagttggggggtgggggagaatggccaagygaaggctaataactggcaatgggctaaactggaatgatgaagtgttgtcacataccaagaatggagactgaagagtctcaaatgcctcttgagcaagtagtgaacattcaggagtgaatactaaacgtgggtgtcaggtttacccaaagggccaaagctagaggcagatcacaaaggaaaagagttgattttgcatgcaccctcaccaccccccaaagacc

SEQ ID NO: 800932 - DNA, 686 bp, Homo sapiens
ccctaactcttgcttagtgattcttgcagggaagagtccaggctctagcttagcatttactcctgggcattgtctggctctcgtctacagaatcagatctataggtttatggagcccctacctaccctcctgcgaaaggcatytcccaactctcccgcataacatcaatcccacacatttacctcggtccactttgagcccagatgaggactctgtcaggcagtgatttagggcagagactctacttgggcctgagagatgggccagccagccaaactaggctcaaggaatcttgcaaacttcatttgatctgggcatgggttgacaccaaaaaagttggcccggcgcagggaggggcattcctggttatatcaggctgagaatgtatttaatgggcctgagagacccagaaaatggctgaaaacagggaatcagagccagcctggagagaagcatgggggatctcagggaatgggaggcaaggcctcagccaagaaagctgcagtattcaggacttaggaggccctggaaaaccaggggctgggtcagaagcctgtcattgggggcacagcacacacgcaggagggggaggctgtggcttgggacctgtggggctatctccagctcatggggcaagcatgactccctctttcactagagggacaggatcccccaccattgccagg

SEQ ID NO: 800933 - DNA, 462 bp, Homo sapiens
ctagcttccatggggccctgctagaaagacaagtttgtttttcctttggataaagccaattagctaacacagttggtcacctcaattaccatgtcgatttaggataaactatgtgtggcaaatgatggtgtcaagtcctcttacttgagactagctattttttactctgagaacaggaatgaaaaggcttggatctggttggctctataggaggggcagacttccttctgyctttgcaatctctcagcagattgcctgtgatgggcatcacattctggtttaatgcttattcaataataaaattgttttctttctcttctacctttgtggatagattttctgggttggagggagattttgtttttaattttatttcctcaagaagcacgaggaatcttggtggtaatggaatagttctggatcttaattgcggtggtgggttcacaaatctacatgtgataa

SEQ ID NO: 800934 - DNA, 608 bp, Homo sapiens
  misc_feature 409: n = A,T,C or G
tcactttctcgggatcttgcatgtctgacgtggctggctctgattaaagaagcaagagtatacccttagattgtggggtcgggggtaacattagacaccacctgtctgttttcttgcaagggcccttctcccaggaatgggggaasgggcccttctttgcccaagaggacactggagtggcatagttagctagttaatcactgaccagactcatttagcaactgtaaggaaaaaaggcggtaattatacttattaaatatgatttatagggacaccaaaaattactgcaagaagatagtaagttttaaatgcctacttgagttcgctggaaagcagtgggcagaaaattacttgtggatgtcaaatgttttactgaatctgattttaaaaaataaatggcaaataattnaagctcttttctgtatcttcacatttatagttgtgatgttttaagggtttagtataagcagtagttcaaatgtaggtcttggtagttgttcacttgccttgaagctagtttatccaataattagtttgcctagagaccagttcacctaaaatattcaaatgtatctgaaatgcatcttaaacttttgagaattttatat

SEQ ID NO: 800935 - DNA, 688 bp, Homo sapiens
gagtctagtagtttgttttgctttttctctagagtctcttgtggttttatgtgtacaaaatcatcagtaaaagcaaaacaagatgactttatccctttttccccaatrtttatgcaaattatttaattttcttgttttgtcatatttgctaaagtctctaagcaagtgttcaataataagggtgataatgaacacccttacctaattcctcattttaattgaagcagttttagtcatttattgcaggatcatatctgcctcttgattttggttaacctttttttccatcaatgtccattttgctattagagtttttgttgggaatgtctgctaaattttggcaatgccttttcagtgtatattaacatgatcacatggttgttcttctttaatctattgatgtaatgattatattcaaacgtaccactgttgaattcctggattaaactctgtctcactgttgttattcttatgctacattgcttatttgttcaaaatcttaataaatgccataattccccctcccacctaattatatgtatcggtaaaatacacatccagcagttaacactgctttcctttggagtggaaagagaaagatgagacaggatgaacgtggagagattaaactttttcttatgcaacaccacattggtggatttactataagaatattattttacaaata

SEQ ID NO: 800936 - DNA, 688 bp, Homo sapiens
gagtctagtagtttgttttgctttttctctagagtctcttgtggttttatgtgtacaaaatcatcagtaaaagcaaaacaagatgactttatccctttttccccaatatttatgcaaattatttaattttcttgttttgtcatatttgctaaagtctctaagcaagtgttcaataataagggtgataatgaacacccttacctaattcctcattttaattgaagcagttttagtcatttattgcaggatcatatctgcctcttgattttggttaacctttttttccatcaatgtccattttgctattagagtttttgttgggaatgtctgctaaattttggcaatgcctyttcagtgtatattaacatgatcacatggttgttcttctttaatctattgatgtaatgattatattcaaacgtaccactgttgaattcctggattaaactctgtctcactgttgttattcttatgctacattgcttatttgttcaaaatcttaataaatgccataattccccctcccacctaattatatgtatcggtaaaatacacatccagcagttaacactgctttcctttggagtggaaagagaaagatgagacaggatgaacgtggagagattaaactttttcttatgcaacaccacattggtggatttactataagaatattattttacaaata

SEQ ID NO: 800937 - DNA, 618 bp, Homo sapiens
aaaagtctctttgtcatctgtgaattcttggggaaggagaactttccatggaatgaaaagtgtgggcactgccatgaagggctgtgtggccctgtctgaggggtgtttccctgcctcctcccgtgtgccaccctttccttgctgaggagcctccctgattttgtgttactttttcttttcttttcttttcttttttttttttttttgagacagggtctcgctctgttgctgaggctggagtgcagtggcacgatcacggctcactgcagccttgacctctctgggctcaagcgatcctyccattccagtctcccaagtagatgggactacaagtgatatgaccaccacgcctagctaactttttttgtattttgtagaggcaggggggtcttgccactttgctcaggctggtctccaactcctgggctcaagcaatctgcctgccttcacctcctacagtgctgggattacaggcatgagccatcacacccagcctctgtgtttcattttttatctctggggatgagcacaagccagagctctattctaccaagctactatttggattgtacaatatcgtgattcttagaatgtaatgaaaaaggaaagccctttctt

SEQ ID NO: 800938 - DNA, 495 bp, Homo sapiens
agcaggagtttcttagttaggatccacagcctgggactgaccctctgtcctgtgggtctttgcctctgggctctctgctctgcatttcttgaaaccattattatttatcatttttctcacactcttttgcgtatggctcctattgcactcaaaatgtttttgagattcatccatgttgttctgtgtgtcaaaagtttgttcctttagccattccatggaatgaatgtatcacattcttgtattgatagatattkgaatgtatatttgaatgtatatatgacagatatttgaatacaagaatgtatccattcttgtattgatagatatttgaatgtttccagtttttcctattacgaataaaactgctatggacattcttgtttatatcattttctgcacatatgttttaatttctcttggataaatgcttaggaattactgagtcatagaataggtagttgtttagttctgtaagaatatgccagacattttttc

SEQ ID NO: 800939 - DNA, 488 bp, Homo sapiens
tgagccgagattatgccactgcactctagcctgggaaacagagtgagatcctacctcaaaaaaaaaaaaaaaaaggatatatttaaaatatacaacatgatatgttttatgtagttgtacattgtgaaatgattaccaaaatcaacctcattaacatatccctcaccttatataattacattttttttgtagtgagaacacttaagatcttctatcttagcaaatttcaagtatacaatacattaatattaattacagctatcatcytgtaaattaaacttccataacttattcatcttataactgaatgtttgtacccctttttttttagtgaaacacctttagtgttacagaatatatcttgagcactataaaacactgaaaaaaaatatatatatgactctacaattcagaccctacaattcggaaacagaggatacagtttcttttcaagttttcgcaaaacatttgtagaagtaatcatgtaa

SEQ ID NO: 800940 - DNA, 604 bp, Homo sapiens
gcacccaaacctcagcaggtggtcttgacaattaggcatgatatccaacttaaaacacttaaactaatatctcagttctgtagtttcagtgtcaagagttctgggttatttttgagctttataatccattgaggatgacatgtgaactatttctaaaaatgcaagacccatgattgttctttttaagcttatctgaatttttgtcccattcctagctcagaattcaaggctgttatggtgcttgcatttttctttcttattcttaacattttattttccaggcatccagagctgcttctctgaccctctggtttcttggcccagctgataagataacccctatttgtctgtttgaatttccattatttcgtagcttctgtactgtttatctcattagttttctttcattaactactttgactttagcttctcaactaagaaactcggagtttttytacttaaaagttcatcctaatgatcattacaaattccggcacccaaggttaagattttagatccctgaactcattttatttactggtaaattcaaaattaggagagctacctttgtagctctggggcacattggctggcatttttgctt

SEQ ID NO: 800941 - DNA, 607 bp, Homo sapiens
ggaaagcagtctggctatttctcaaagaacttaaaacaaaattaccattcaactcaacaatcctattgctgaatatatacccaagaaaatataaactgttctaccataaagacatatgctatatgttcatcacagcattatccacaataggaaagatgtgtaatcaacctaaatgcaaagacatggaatcagttatcaacggtaaactgaataaagaaaatgtggtactcatataccatggaataccacacagccataaaaaagaacaagatcgtgttttttgcaacaacatgggtggagctggaggccattatcttaagtgagctaacacaggaacagaaaaccaaatactgtatgttctcacttataagtgggagccaaacattgagtacayatgggcataaagaaggaaacgacagacaccagggcctgcgtgagtgtggagggagggagaatcaaaaactacctatttggtactgtgcttatcgcctgtgtgatgaaatgatttgaacatcaaacccctgtgacacacaatttacctatatgacaaacctgcacatgcgtacctgaactaaaataagagttaagaaaaaaaaaaaaccctgaa

SEQ ID NO: 800942 - DNA, 533 bp, Homo sapiens
tactgtatagtcctgcatactgagtgggggtctggtcgtgctggaagcactgcccttggtggaggattcaccagcagccagagactcaagactgggcagtccgaagaggccaaggaggaacagggaggactgacattctctgcccctctagggacagtgagggctgtagggcttgtagaattmttgcatacactatccaggtaagtgtatgccacttggatcttgctttgattcaggcatgcagtgtctgctatagcatatctttttggatgtgccatatggtaacaaatgaaggaagttaccccaaagcatgagctcaggcagcatgatatgaaagggtaaaaaaacatttcgtgagtcctgcttggtacaaaccatgattctaaagccaattgagggcagataaaaaggaaagaaaaaaggaaagctataatccttggacttgcgcttgtttggaagttcgtagtatttccatttcctccctttctttatttcaatattgccttctttatcctatatcgttcacgtttgtt

SEQ ID NO: 800943 - DNA, 533 bp, Homo sapiens
tactgtatagtcctgcatactgagtgggggtctggtcgtgctggaagcactgcccttggtggaggattcaccagcagccagagactcaagactgggcagtccgaagaggccaaggaggaacagggaggactgacattctctgcccctctagggacagtgagggctgtagggcttgtagaattattgcatacactatccaggtaagtgtatgccacttggatcttgctttgattcrggcatgcagtgtctgctatagcatatctttttggatgtgccatatggtaacaaatgaaggaagttaccccaaagcatgagctcaggcagcatgatatgaaagggtaaaaaaacatttcgtgagtcctgcttggtacaaaccatgattctaaagccaattgagggcagataaaaaggaaagaaaaaaggaaagctataatccttggacttgcgcttgtttggaagttcgtagtatttccatttcctccctttctttatttcaatattgccttctttatcctatatcgttcacgtttgtt

SEQ ID NO: 800944 - DNA, 630 bp, Homo sapiens
aaattgaattacatctttgcctccccccaccttcaatttaggagcattttcaaaattaggcatcaaaatgcaaaaacatcataaaataaatttgaaatgcagaaattactacttgcacagtgtctgtacaattttaattctaaacatttctaaaaactcagttctaagatagcattttcctgtgcgtgaagggaggtggaatggataatttgaattacaaaaaagacttgataaccccccacacatcaatttacctgtgaacaaaaagactcacactgagaaaatgggacttgggactatttgataaattactacagactacttgaatattccattagcaaaataatagctcgttatggaatctcagaagaatgtagtataattacaatagtactatcctcccttggagattgggaggaatgcaaatgttcaaaatgatagctatttaaccaatgttagagaaaaatgcytgaaaacaaactcggagggtatatgatttatggaacttagggaaattattatagtttccaccagctttaattagttgaatgtgtttctaccaaatgaaggttattcacattattgggccatatagatgtatatatgcacaccccacatgtgagtaatggt

SEQ ID NO: 800945 - DNA, 593 bp, Homo sapiens
cactcctatgatagccagtatcctttgtgcttggttggtgagtgtacctgttgtactgtgtctgttaatgttcatattaatgtaacattacttctgatgtttaccttgctgttttgcctttgacttagacaaataacaaataaactgccctctattttaggctataggtccagttttctgccaattcctcacttttttttcctcctaatgttctccctgagaagttagtctaccrtctcacagaccctactccacaaatgatggattgatattttcatttttaagtacttttactttttttaatcatgcaactatgaacaccaccactttttagtcaataaaaacagaataaagagacactacacttgcaaaatgaagaaatttgaaagtaagaatttgccaatgatagtttaactagattgtaggtcaaggcagttggtcacatctctgattcagtgacattaggaagacataattacagcaagatggctgcattcatgccaacgtgaatagtttctttcttgagataactgatcccaaaggatggcaggaatcatttccttctgtgttctgtgggcatttgttttgtcaga

SEQ ID NO: 800946 - DNA, 600 bp, Homo sapiens
aatatttacaaggaatgaggagagtagatgattgcaaaaagtaggactgttgtgaaattcaaagctggggttttaggaagaaggaaggatgatctctatgtggcaatgcatggcaaaaggtacataagacctagtgatataagagccatgatagaaataacagccatcttttgaggatgctgcctgggaggctgtgttttaggtaggacttcgttttgagagttaggtttgggtagagtaaaaaggtgacattcagagaaacagctgagcatatgaggcgttttgctgatgatgtgtgccatgttccaaagggcacggtggaaagtttcaagagtcagggagaagatggaatcagaaargtatgtaaaaagccatgaagcacttagtattgggggatgaagaatgacccgggagtcctgagcttcctgtgactgccatgaataggcatcaaagtcacaatggtcccaaggaatataacaatgaaattgtaggcatttgaggggagaaacaagtgaaatcttggcagagcatgtagagatctggagtttccattaatacaggattgtggccagtagaaggtgggggtaagtttgatagatc

SEQ ID NO: 800947 - DNA, 622 bp, Homo sapiens
aacaactctgtccaacagttgctggagcaactatccactagttgaatgatattaattttgctgtgtaaaaatagcttcagtttaaacattttaagaaagttatgggcaaaataaatgcctcagaggatttgtgatggtatagtttttggtttcgtggtctacagaaatatttaaaagagctacaaaattaggtaatttaagaagcasttactacacaaaatttggtatttttagtggtgaccttcttgaaaatttgtaaaagtttaggttgaatgatgacttaagcatcacttcatgaactcataatgaaatacttacctaaatgcttaaagagccagaaaaaaaggttcacataatctgtggctaaaaatgtttagccaatcatctcacctcagtaatcatattttatgatcaaagcaaagacaaaaagtaaaaataatgtctggtttctaggttcttagcttttgctttttcctagtaaggagaaaacatgctacagttgatgtcccttcaaattaaaattaatcacatgagaactaaacagctacttcagatgattacagactgaatctagcaaaacaatatcagccttggtgacaatgaagagtaaaggtgttttatt

SEQ ID NO: 800948 - DNA, 622 bp, Homo sapiens
aacaactctgtccaacagttgctggagcaactatccactagttgaatgatattaattttgctgtgtaaaaatagcttcagtttaaacattttaagaaagttatgggcaaaataaatgcctcagaggatttgtgatggtatagtttttggtttcgtggtctacagaaatatttaaaagagctacaaaattaggtaatttaagaagcacttactacacaaaatttggtatttttagtggtgaccttcttgaaaatttgtaaaagtttaggttgaatgatgacttaagcatcacttcatgaactcataatgaaatacttacctaaatgcttaaagagccagaaaaaaaggttcacataatctgtggctaaaaatgtttagccaatcatctcacctcagtaatcatattttatgatcaaagcaaagacaaaaagtaaaaataatgtctggtttctaggttcttagcttttgctytttcctagtaaggagaaaacatgctacagttgatgtcccttcaaattaaaattaatcacatgagaactaaacagctacttcagatgattacagactgaatctagcaaaacaatatcagccttggtgacaatgaagagtaaaggtgttttatt

SEQ ID NO: 800949 - DNA, 623 bp, Homo sapiens
tggtaaaagtctggaaggttatatgaagtcagtgaaaatttagttcttttgtattaacaagaagccctttgtgtggtattactgggtcaaaaagaggcagctaaattttaacagaaaaagaaaggagtgcttatcaagcaccatatatattgcagctactgtttggagtctgaagttatccagttctttgtcccttagattaccatgtgcatgattcacctctttattagtcattagacatgcatgttgtgtatrtgcatacacacgtgcatgtggagcagtggggggtggaggaaagagcaactaattaattagcaaagtgtgtgatgataaaataacaggtacatttttttttcctttaagaagtatgtttcactgcaaggactgaaaaaaaggggcacgtactcaatgaggacgacgtgggcaaatcttatcaggtctgcccacaggagcagatggcatcaatgactgaaaccacctgcctcaaaaattccctcctcattttttcagtgtgcttaatgaaatgacaaaaagagaaaattctgcaaaacaaaaaacacaaacaaagctcaggggttggagcttttaatttcaaggcaagtgtgggatgaaatgagtgcctc

SEQ ID NO: 800950 - DNA, 623 bp, Homo sapiens
tggtaaaagtctggaaggttatatgaagtcagtgaaaatttagttcttttgtattaacaagaagccctttgtgtggtattactgggtcaaaaagaggcagctaaattttaacagaaaaagaaaggagtgcttatcaagcaccatatatattgcagctactgtttggagtctgaagttatccagttctttgtcccttagattaccatgtgcatgattcacctctttattagtcattagacatgcatgttgtgtatgtgcatacacacgtgcatgtggagcagtgggrggtggaggaaagagcaactaattaattagcaaagtgtgtgatgataaaataacaggtacatttttttttcctttaagaagtatgtttcactgcaaggactgaaaaaaaggggcacgtactcaatgaggacgacgtgggcaaatcttatcaggtctgcccacaggagcagatggcatcaatgactgaaaccacctgcctcaaaaattccctcctcattttttcagtgtgcttaatgaaatgacaaaaagagaaaattctgcaaaacaaaaaacacaaacaaagctcaggggttggagcttttaatttcaaggcaagtgtgggatgaaatgagtgcctc

SEQ ID NO: 800951 - DNA, 589 bp, Homo sapiens
tctttttctaagctacaagaaaatatgggtgaattcctctatcacttacatgtggaaaaagactttccaattatgactcaaaatccagcgcaataagagactgacaaatttgactagataaaaaaaagttttaaaccttctgcatggcaaaaaatacactaagcaaagtcaaagttaacaaattgagagaagacatttgtaatatacaccacagataaaagactaatattactgtctccaatatacatagacattttacaatttgaaggtgaccaaaatttctatagaaaaatagatgaaagatatagacaattcacaagatttttwaaatggcccttaaatgtttgaaaatatgttcaaccttactcataataggagatatccaaattaaaaccacactgcagtgccattttcttctaccatattggcaacaatgtaaaagcttggtaatatactatgggtgaagctgtgggagaaaatggtattctcataaattgctgctgggaatgcaaaatggttcatcattatggaaagaagtttggcaatatctaagaaaactatatatgtcttcacattacaatgcagcgat

SEQ ID NO: 800952 - DNA, 632 bp, Homo sapiens
aacattttttccttacccaccctatagcttccccatagaaaaagataagaaaaagcttaatgtgactccacatagaatagcagctaattcagcaattcgcactgtatggttgttgacaggactaggaaaggcagcctagtgccccaagctgtaggagctgaacctgcaaaagtgtgcaggtctgctgtgttcacagcactcagggaaagaggggaggaggtggctgatgagggtgcacgttcggagaagtctgtatgtgtttcatggcatattctgccacagcaacaaaacaaccaaatcagcagtagatttgactgtacccttcgatttcaaagaagtctgcgcccctcgcccactcgccacctacacttcatgcaggaaagayagatcactatcatctatttgaatacagggcctcagaagaggtgggctggtatgggtacaaacagcgtattttataacaaaacactttttgaaaagatttatataactttaagtattaaaatgaatgctttacctctacatatgtatcactgtacagtcctgcacccacacgattatggtcatatttgaaagcgaactcaagcacaaacactgaatccaaaaggcagttttaagggagatccaacctt

SEQ ID NO: 800953 - DNA, 466 bp, Homo sapiens
cacaggctctggaggtagactgatctgggccaaatcctttgtcctgctgcttattggccgtgggaccttgggcaagtcatttacccactccaagcctcagcctccccttctctaaatgctgagagcacattcacctcctatgctgtgaagtaggrtaactgatctacctcattgtctgagaatgcaagagtttgcttttctcaggccaaactccttattctctttaccaggttcagttcctgccctgggtttcaggatctgaagaaatatggctagagtcactaccgccaagacctattgctgatttggggcaaagcaagaaaatagactgacctggggcacctggaggtcctgggggtcccatggctccaggaggtcctggggggcctgggacagtgagcatcgatgacccctctgaaaacagaaggcacatggaacattgagccctacttttctcactcagagg

SEQ ID NO: 800954 - DNA, 688 bp, Homo sapiens
agacagaaaagcaggaacaacctaagaaaactgacatagatggatctctagggcatgagtgattagtctgcctatctgccccaaattcctaggattttcttacatgtattcctaggattttcttcttttttcagtttactttctttcactgactgaaataaccaccactctgaaattcattcactgacttaatagcctcttttaaaaatgcaaataacttgtataagaatgaagaagatattaattattgaacttttagtaggagctgaagaaatgtgaagtttggaggttaaggtgtagataggtgtattttttggagtctgccaactttagattttagaggaatcctgggtagggtaccatagtcctggactttggaagaagagcatgaggatccyggaagcttggagaagagaacagtaagaggagaggatgcagaaaggtgattggaaggtgccaaagagaaactgtttaaaatttggatgcattttgagtttagcattttcacattccatttttgcttcctctgccttctaaccctttcttccatatcaacacccagtaagtatctgccctgaacacttagtttaccaaaatgtatttgtaggagtcttatatgtctgttatttctgtttgcatttaaatgtttttggataccagttgaggaatgaagagtttagtcttaata

SEQ ID NO: 800955 - DNA, 415 bp, Homo sapiens
ccaacaatctttccatttgttaggaactgcacttagcaattaccctgcatgtcaataaaaacaagggcttactatgtaccaggtactgttccaatcactttacacatattatctcatttattattatcctgtggagattcttgttaggattaaatgagataatacatggaaagarctacctttctcctcatttacatgtaagggaactctggcttggagaacccggccacatattttaaagtatttatgaaatatcatctgcttgttttcatcttttatgaagatgcatctaggatacatcctgggcaagttgcctggacaatctaggcaattgagtttcctactgaatttcctcagagaagctatcacaaaaaaggtcaaccaaaggctaggacagtagttcttaactctggat

SEQ ID NO: 800956 - DNA, 415 bp, Homo sapiens
ccaacaatctttccatttgttaggaactgcacttagcaattaccctgcatgtcaataaaaacaagggcttactatgtaccaggtactgttccaatcactttacacatattatctcatttattattatcctgtggagattcttgttaggattaaatgagataatacatggaaagagctacctttctcctcatttacawgtaagggaactctggcttggagaacccggccacatattttaaagtatttatgaaatatcatctgcttgttttcatcttttatgaagatgcatctaggatacatcctgggcaagttgcctggacaatctaggcaattgagtttcctactgaatttcctcagagaagctatcacaaaaaaggtcaaccaaaggctaggacagtagttcttaactctggat

SEQ ID NO: 800957 - DNA, 415 bp, Homo sapiens
ccaacaatctttccatttgttaggaactgcacttagcaattaccctgcatgtcaataaaaacaagggcttactatgtaccaggtactgttccaatcactttacacatattatctcatttattattatcctgtggagattcttgttaggattaaatgagataatacatggaaagagctacctttctcctcatttacatgtaagggaactctrgcttggagaacccggccacatattttaaagtatttatgaaatatcatctgcttgttttcatcttttatgaagatgcatctaggatacatcctgggcaagttgcctggacaatctaggcaattgagtttcctactgaatttcctcagagaagctatcacaaaaaaggtcaaccaaaggctaggacagtagttcttaactctggat

SEQ ID NO: 800958 - DNA, 454 bp, Homo sapiens
ggcattcacgccaacatttactttctttttgattttttgattagggctgttcttgctggagtaaggtggtatcgcattgtggttttgatttgcatttctctgataattagtgatgttgagcatatttccatatgctcattggccatttgtacatctttttttttgagaattgtcaattcatgtccttagcccactttttgatgggattgtcttttttttcttgctaatttgtttgagtttgttgtagattctggatattagtcctttgtcagatgtatasattgtaaagattttctcccactctgtgggttgtctatttactctgctgattatttctttgctgtgcagaagctttgtagtttaattaagtcccatctatttatctttgtttttgttgcatttgcttttgggttcttggtcataaagtcttgcctaagccaatgtttagaagggt

SEQ ID NO: 800959 - DNA, 658 bp, Homo sapiens
tctggatgagtctttagggttttctaggtatacgatcatatcatcaacaaacagtgacagtttgacttcctctttactgatttggatgcccttgatttctttctcttgtctgactgctctgtctaggacttccaatactatgttgaatagaggtggtgaaagtgggcatccttgtcttgttccagttctcagcgagaatgctttcacctttttcccattcagtataatgttggctgtgggtttgttgtagacggcttttattaccttaaggtatgtccctggtatgctgattttgctgagggttttaatcaaagggatgctgaattttgtcaaatgctttttctgtgtctattgagatgatcatgtgatttttgtttttaattccatttacrtggtatattacatttattgacctacgtatgtaggtcatacctgcatccctggcatgaaacccatttgatcatggtagattatctttttgatatgctgttggattcagtttgctagtattttgttgaggatttttgtatctatgttcatcagggatattggtctgtggttttctttgttatgtcctttgctggtttgggtattagggtgatagtggcttcatataacgatttagggaggattccctttttaccttgtggaatagtgt

SEQ ID NO: 800960 - DNA, 468 bp, Homo sapiens
gctgatgagatgaattgtctcccgtgagaaaaatttccctagacatgtttgaacatacagttctgtgtttcactctgagttttgtctgttcctgaggtttttaaatcgaccaaagagaggacttaggactctttgtgactctgccaataaaacaccgsggggctccaccttcctccagccaagtgctgggccacatttgcacttcagtctccctgtgactgctttgaaagggcctgcttttcctctcagaggcttttgggatctgggcagacacacaccctgaagttatctcctcttaagcatataaaccagggattatcttatctcggtaagcacagtgatcttagaaggacagccactcacctcccagaagagttggaaagtctccagggagcaagggaagccattctaggctggagcctcctggagaagtttcaggtcaccccaaaccattgtgcatacaggggc

SEQ ID NO: 800961 - DNA, 639 bp, Homo sapiens
gggaatatgaatttgagtgagaggagatattttgtctgaaaccatgaaagctatcatgaaataacactatttttcaagtattgaatgaaaagacctttcaatttcagatcctgtattcagtaaaactatgattcaggaatggacggacaattagaactttgccagattaaggaaaactaagagaatttgttgctagcaaatttactcataaagaatggcaaaaggaagttctctaaatggaaaataaatgaaaacaaaagaatggccagagtttcaggagagaaataaaagcattggataggctaaaaacagggataaatataacagattaaccttttatatgcgtttcttatatcatatttgatggttatagcaaaaattttaacaccatctgacatgctgctcaatacgtgtagaggaaatccttaagaaaaatgcagtcatgtgttgcttaacaacagggacacattctgagacatgcttcatttctcaattacatcmttgtagaaacctcatagaatgtatttacacaaacctagatggtatagcttactgcacacataggctatatggtatagcctattgctcctgggctgcaaacctgtagcatgttgctgtactgaataccatagacaattg

SEQ ID NO: 800962 - DNA, 512 bp, Homo sapiens
cagacatctcggacctctgtcccagactattatggcaccaccagggaaatgggcggcaaatggattatctgtccagcacccttttcctgggtatgggctcatctccacatggcttcagcaggaacagtcacgtttgtagaaaagagccctgtccctcattcccaggtgatttagaattaagactgtggtggtgtgatagatttcccatgttaacacaagcagcattgatttctataacccaaaagtaataaaagagccagtcaaagttctaagtgaaaaatggtgagatggcattcaaggcataragccaaagtaaaatttgtaagggaaggaagattgatcacatacccacaccatggtgtcacctctaatcctgcatccatgcttctctccatgctcccctccatgctcatcatgactcatgattacctctctgattttatttcctatcactctctcttccttattctgatccagccatctaggctgcctttccgtccctcaattgtgaa

SEQ ID NO: 800963 - DNA, 600 bp, Homo sapiens
atctttatgaattatcctagggcttcaatgtcaagtgagacacccctggcctagcaggtgccttagaattggaagggcagctctacctcctgctgggctgttgcacagattgctcaccttctcccagcccgtttcctcacttgcagcatggggataattgtctctctgtggctttcatagacatgtgtatggtcttccctgcttaggatgagtctcaggattacatgagggaatttgagtaaagtcctgaattagctcagggcttggtacaggtgttaacatcctttccttcctttcccccatcttatgtttgccattattgtctattctaaaagcagtcacctttttcatatcttttaaagggtttacattctcacttactagggactgtatttattatgagtctacaaataaccacaactcttgtgtctgtaatagaaacaccyttgaactggctccagagggactgaggagagggtgcaggatgtgacccagagcccaaggacagacactgccactcactgcagtcaggaagagcaaaaggcttcacctgccttctcacaggtgcatctcatgtggggagtatgcaccgctctccca

SEQ ID NO: 800964 - DNA, 533 bp, Homo sapiens
ccatctgatctcccaggaatctgaggggctagagaggccggtatttactgagaagaggttcatgtgcaaatgcagtgccctgcagaaaggctttggaaatctgttcccaaacttcattcccaaagttcccaaacttcattcccaactcagcctgaagtttaggctaagttgactgaaacccagacttgtctcttagtagcatgtgggctggtggtgggaaggctctgcccacacacctctgtctccttgaaagatctggctgaaaggcatttgggctccccgtctctgatctccattcctcataaccctgaggagtggacattcctattgttccatttttytggtgaggaaacagactctggtgaggtgaaatgatttgtcagggtcacatgctagtgagtggcagaaccagaacaaaattaaaaggcatggacgagcataagcactgaggcctagactaatgaaattcatcagccacctcgtaggagattcacactagttgagaggttagaatttggtgatgattgttctcc

SEQ ID NO: 800965 - DNA, 625 bp, Homo sapiens
tttttttattttttattttttttgagacagagtctcactcagtcacccaggctggagtacagtggcatgatcttggcccactgcaacctctgcctcccgggttcaagcgattcttgtgcttctgcctcccaagtagctgggattacaggtgygcaccaccacgtcctgctaatttttgtatttttagtagagacagggtttcaccatattggccatgctggtcttgaactcctgaccttgtgatccgcccaccttggcctcccaaagtgctaggattacaggcatgagccaccacccctggcctttgattttgtttcttggagaagaggtctcactttgtcacccaggctggagtatagtagcacagtcctggctcattggaacctccacctcctgtgctgaagcgatgctgtcaccatcagcctcccgggtagctggggccgcaggtgtgcatcaccacacctgactaattttttttgtatttttggtagagactgggtttcaccatcttgctcaggctggtcttgaattcctgggctcaagcgatcctcccatcttgtcctcccaaagtgctgcgattacaggtgtgagtcactatgcctagcctagttgtcttttctttttg

SEQ ID NO: 800966 - DNA, 622 bp, Homo sapiens
cacgcgtgtaatcccagcatttcaggaggccaaggtgggcagatcacctgaggtcagaagttcaagaccaacctggccaacatggtgaaaccctgtctctactaaaaatacaaaaattagctgggcctggtggtgggcgcctgtaatcccagctacttgggaggctgaggcaggagaatcacttgaaccctgraggcagaggttgcagtgagttgagatcgtgccattacactccagcctgggtgacaagagtgaaactctgtctgaaaaaaaaaaaaaagaaatttaaaaacaaattagccagacatagtggtgcatgccagtagtcccagctacttgggaggctgaggtgagaggatcacttgagctctggagtttgaggttgcagtgagcagtgagctgtgatcttgccactgtacttcagccagagcaagagaccttgcctcaaaaaaaaaaaaaaaaaaggtggggggtgcggggctgggggcagtgattcatgcctgtaatcacagaactttgggaggccaaggtgggtggatcacctgaggtcaggagtttgagaccagcctgaccaacatagtgaaaccttgtctctactaaaaatacaaaattagccaggcct

SEQ ID NO: 800967 - DNA, 640 bp, Homo sapiens
gtaaatttttcaaaacaaaattatagtggccaactcctccaaaatgtcaccagttaacatcatttaaagctatctacatattacaagaaaatgagacttttacaatacaattccacctttgtaaagggattaatgactgagttcacacaacggggttctgaagttttggtaatgtcttgatctggccactggtcacataggtatgttcactttgtacartttcactgggctgtaccttatggtatgtatacttttctgtgtgtatattatacttgaattaaaatttccttaaaaaatgaactctataagcaagtaaacaaactaacataaaaagagtactaatggtactttagcagacaataagcttaagtaaagaaaaacatgtaagtcagtttaatattggccgggcgcggtggctcatgcctgtaatcacagcactttgggaggccaaggtgggtggatcacttaaggtcaggagttcgagaccagcctgggtaacatggtgaaaccccacctctactaaaaatacaaaaattagctgagcatggtggcacacgcctgtaatcccagctactcgagaggctgaggctggagaatggcttgaacctgggaggcaaagggccaagatcacactactgta

SEQ ID NO: 800968 - DNA, 624 bp, Homo sapiens
atttaaaattttgttgtgtacaacatggaagatacaatcctttttgtatggcagcagtgagtgcattttgaaaagtttggtgggataatttaaagtttatttacccttgaaatgttctagactgacttgaaggatctaggtgcttcttttcaagccagccrgctttaaaaaaaagttagctcttaaaatgcttctagcagagctgtcagttttctttctggcattttgtgaaaacaagtattctagctattgtatgaattttagtcacctcatggaattttttaagtgtagttgaaaagaaaagtgggtacttttagaaaaaaaactgacaggttttcagggctcatgtagacctgaagaaaaatgagagggagcaaaattaaggcattttttgtgtgtgtatctttttggggggggattgggtagagtggctttaccatattttttgaaaaagtccctttttttcatttgaggagctaattcaattggtttgggcaaaagcagcattatcagaaatacacagttggattctgtatcatgcctctgtttagtaagaccacggggagataatggaataggaattagaaacctcaggcttgagtgcccgtagcagtattaaactaa

SEQ ID NO: 800969 - DNA, 593 bp, Homo sapiens
tgtaattaggtcccatttgtcaatttttgtttttgttaaaattgcttttggtgtcttcctcctgaagtctttgccaggtcccatatccagatggtatttcctaggttgtcttccagagtttatagttttgggttttacgtttaagtctttaattgatgttgaatttatwtttgtcaatggttaaagataggggcccattttcatcttctgcatatggctggccagttaccccagcagcatttattgaatagaaaatcctttccccattgcttgttactgttggctttgttgaacatcagatggctgttggtgtgcagctttatttctgggtcctctaacctgttccaatggtcagtctgtctgtttttataccagtaccatgcttttttagttactatagccttgtagtatagtttgaagtcaagtattgtgatgcctccatgcctccagcttttttgttgttgttgttgttgttttgtttttgtttctgtttttgcttttgcttaggattgttttggctatttgagctactttttggttccgaattaattttagaatgtttttttcagattctttgaaaaacgttggtagtt

SEQ ID NO: 800970 - DNA, 576 bp, Homo sapiens
aacatgaaaaaaagttcaatatcactggtcattagcgaaatgcaaatcaaaaccacaataagataccatctcatgccagttagaatggcgatcattaaaaagtcaggaaacaaaagatgctggaaaggatgtggagaaataggaacatttttacactgtttttgggagagtaaattagttcaaccattgtggaagacagtgtagcgattccttaaggatctagaaccagagataccatttgacccagcagtcccattactggrtatatacccaaatgattataaatcattctactataaagacacatgcacacgtatgtttattgcagcagtatgtacaatagcaaagacttggaaccaaccaaatatccatcaatgatagactggataaagaaaatgtggcatatatacaccctggaatgctatgcagccataaaaaagaatgagttcatgtctttacagggacatggatgaagctggaaaaccatcattctcagcaaactaacacaggaacataaaaccaaacaccacatgttctcactcataagtcggagctgaacagtgagaacaaatggac

SEQ ID NO: 800971 - DNA, 474 bp, Homo sapiens
agtgggccccacacagtgcagcttcgtagtctgcaaagaaaatgtccaaagaatgagttgtggatcctcccagccagagcccagatcccaggcaccccgccccacttcccccgaccaccaggcggccccagagcccaggttgtccctcccgccacctcctgtaatgggtccacccccaactccggtcagactggtcacagagcaccrcccagctccagccctcctctctgcatcctgggtcccagctcaggggctgcagagatcaacccagggcagaggcctggaccacgtcctccccagacacttccagaacccacacaaaagcacacatccacgttttccttgttctagaatatttggcccctttctgccccaaggatgtgggggtcaaagccccggggttcccggccgaggagaaaggaagcaggtggagtcccaagtcaggaggcaggtgctgctggagcaggtgcaggt

SEQ ID NO: 800972 - DNA, 649 bp, Homo sapiens
atgactttgcaaacacttcctacttctgccaccaaaataaatgccgttgtccttgatcagatttttacagaggaggaacccaaggctcggaaacagtagctgctgctgtcacagctcccgggtcccggcccgctgctgtcgggtcagagscccccgggtcccagcccactgctctcgggtcagaggcggcaggaagagcctctcctgacacactctgctgctcacttttcttcctgcatagcatctttcacgttaaactgctcaatctttaaaaatgacaaaaacagttgcagacctgtgggtgagagttctcggttaacatgcagtgtctctgtggctcaggaaacccacggctccccgcgcccaagagcgtcctgcggtctcgctggcacagcgccccgtacactagggggtcctacagctacgtggccgtgggcagtactgggggcgacctggacctgctggctcagcccctccctgcagacggcgccggcgcccaggtatgtggcgtgccccagtcggggggcgtgggtcccgctgcagaggcccccgccgagtctgggcgctgcaggagcaccagccagtggcgggtgggctgggatcccagactcggaagccattttctttttgaaactaagaataattttta

SEQ ID NO: 800973 - DNA, 589 bp, Homo sapiens
taccatctgggagcagcaggcggacaggaccccaaagtctgcagccaagcccagacagggtcccttccccagatttggagccacatctcagccggggtgggcttgcctgcacccccaaggttctcctgcggtctggagtgggggtctggaaccctgggacttgccccctsgagccccggggacaccagccccaggccctgggggaagcccctgtcatccccactcctgcccttggtccctcaaactccagccctgccccatcttcttcctgtacctgtcactgcagcaagttctggggagcaagacgagggtccggacagtggctggtggttattcttccccatccttggggaccagtccaagcatcccatgggcaagcctcccaggcaccccctttcaggaaccccctgcatcccacctctgcctggcactggactccaaatgacctagtgtcctttacctcccctgcctgccagggcaagtgaggctttcagcgggaggccacctatgccacaggcatagggcatggcccacaccgaggcctctccagccgacagttcctcccgaagcgtccaggccagcccctgcc

SEQ ID NO: 800974 - DNA, 627 bp, Homo sapiens
agatacctctaaatacaatgtcaggcatttgatgcctcaataatcagaaaaactgttggatttcatctctgcagggctttacatttacctttttatccttatatttttctaaaggtaaattatttgttagatgagtaagcaagataccattgtcgtcattggttggcttcagtagaatgaaacgtgaagaaattgcatttgataactgctattcatttaacttttctcattatcagtaccacggttccctcaaagtttgttgaataaagcaacttttgtagatgctgtttcatacagcacttagatgaattattgatcttcctaatatcaggcgcctacttaacctatggtrtgtactttttgtaagttgtaacttgaaattttcagatgctttgaacttgacacatactctagcaattcattggaacaccaaggcaaaaacaccaacctgctaaaagagatcttttcatttttcttattttcagctttaaaacttagctgtcgttcagttaagcttaaagataggttaatttgtaaatggcaaagtttgttttgaggtttttcctcaataacttgtttcccaggcctattaggccatctctaaaattgatctagctgttttatttt

SEQ ID NO: 800975 - DNA, 609 bp, Homo sapiens
ttgctctgggaagggagttaagaatgggtgccatacccacactgaagcctaagcagccacagcagagtgctattttgagagcccagtccccaccagtttgcatcctgccctagagtccaacttctgcctctccagattcctagaacgccactgacctcccccacctgcagccaggcaccactggtggctactgttgctaggaccaaagcatgaggcactgacagtgacccagcaacctttagcagcagggtcgcmacacgcttaaaagcaccccgaagaaaggctgcccggtttatagctgtcacctagggctgaaacttgcattcctcagctatctgctcgtgtgtactaaaactgaaagtaacctctgcttccccaccccaaccccacagcagtgctgcaagtgcagcttctgccaccttcatctaaacattctgttgggggtttggggatcactccacccctgtataccacagccagtgactgtaaacactaccggggggctgagggaaggcccatgtgatgtagctctaccctcctgagtgcacaagcacacccttcaagggcctgtgtatcatcctgccccacctacactattagcagctgagc

SEQ ID NO: 800976 - DNA, 576 bp, Homo sapiens
attctgagtctagatcgtaaggaattaacatttttctgaacaagggcttacagttatactggtcttttaattttattttaaaaagtcagtgagactacagttgtcattttttaaattctttcaatttttaattatgtaactacaaagattctgcacaaattttgggaagtggcytttaaatccagccaaaataaagactctagtgcaacaatttagaggtgcagtgggcctatatataactggaatataagcatgcctgtagttaaatgttctattcttaatgtcccaccacccacccaagcatcatgggtcagcctagatcatacctgttatggtagcggcaggtgctttttacttgaataactcccttttcataatgcatgtctgtgtgctgcacatgcacacacacaaacacacatacagagacacatacttaaactctatatatcaattctttgcaaattctaccagtaatattgtagagcagtattattccagctattcctataattgaaacctgcagagtcagctattgagcagcaaatcagggccccttattcaacaatgccagctcgg

SEQ ID NO: 800977 - DNA, 548 bp, Homo sapiens
cttatgtaacccttcatactgtccttctccgtcacattctcatcatatccccaactcttggttttattgtctctgcctaaaaaaaagtcctcttttagagaaacaaagccaaaaaaaaaaaaaaaaaaaaaaacaagactctaaaatctgaccttcaccctgctaataaaatttatatatatattatatatatatatacttattttccaaatttattaaaattttaacacagccagtacaagttttttttgtgagaacacaatagaggaagagtatactgaaactggattttacagttcagaagtagttttctaatatgacccaaatcacttcacttacgagttttctttgctatgcaacagagataatactacttttaactgatktgtgaggataaaatgagaaaatgcatccacaatttacttaacataatgcaataaatttgtgatgtagatcttactgtgagttctcagactctactatcccaatagagttttttgtttgtttgtttttgcttgtctgtctaaagtttatctacaacatacaat

SEQ ID NO: 800978 - DNA, 562 bp, Homo sapiens
  misc_feature 538, 546, 547, 548, 549, 550, 551, 552, 553, 554, 555, 556,557, 558, 559, 560, 561, 562: n = A,T,C or G
ttaactggtggacggctagaagtttaaaggcttatcaactccagcaatacttggtgtgtgttcttcaggtatagcaacaatattggtattaatttatgagttgcataaaattcatgtttgacacttgttatctcatctccagtgatttatttagaatgctttggagaccacaaacataacagaaatttagtaaatgaggcayattatacctatgaatatattttaaaccttatctaaaaataccatcaaaaattagcttctagcaataaagcataaatattacaaataattcaattttgagacatttttaaataatagtatcattactaatctggttctggaagttactgaataatacaataactatcagctgaaaaaatcattaattttattccttttaagaaaattacattgcaaataggtatttacataccggatcatctggattatactgaataacatactctatctgtccatttggtccatcatctatatctgtagctccattgtctcctgaaaatcctgtgaatattgtggnaccaactnnnnnnnnnnnnnnnnn

SEQ ID NO: 800979 - DNA, 576 bp, Homo sapiens; identical to SEQ ID NO: 795678

SEQ ID NO: 800980 - DNA, 576 bp, Homo sapiens; identical to SEQ ID NO: 795679

SEQ ID NO: 800981 - DNA, 607 bp, Homo sapiens
tcaatgatataagtatccattacaaaagttacaagataacaggaaattaaacatgaaaagcagaaagattaagataattaatgtaaaataggaattaataaaataaaataagagaaaaattaccaaagtcaaaatttagttctttgaaaaattagtaaaattgataaaccccaagaaagattgatcaaggaaaaaagagagtacaaatgactacaattaggcattagaggaaataactaaattttccacagacatatattaaaataatgatatattgtcaatatatttggtagtatagataaaattaaagcttataatttaccaaaaattatacaaaaggtaattaaatataaatagtcctacatgtatttatacacaaacaccttccccccatccccaaaatctccaggtccagagccttcatcagtgaaattgaaaygcttaaagaaataacatcaattttaagaagctcttctagagaatagaatggcaagcaacaccttccaacttacctttcaaagccagcgtaactttgatactaaaatgtgagaaagatgtaaaaatacaggccaatttctctcaaggatgtagatgcaaaattctactc

SEQ ID NO: 800982 - DNA, 563 bp, Homo sapiens
ataaagaaatcactactacatgcaataacactgacgaatttcacaaacgttgctcagaagaagtcagacaaaataaaatacatattgtatgagtctatttacatactcttcaaaaatgggcaaaaataatggatagtaattgacatcagaacagtggttacctttggggagccaaactactggggagagagaagtgtgggtaatattttatttctcagtctgggtgatagttacatgtgttcactttgtgaaaaytgagttagacacaggatttgttgcatttttctgtacacttgttacacttcaataaaaagaaaatttaaaaaatgaggtgatagaacactcaagtgcaaagttgaacttagattagacactgctaatatgtttttggcacaatatgggaatttgaatattatctagataagagatgacattaaaatatcttttagttttttgatgtatcatggtattatggttattaaggagagtgttctcatttttagcagaggtaaactgaagggattatgagttaagtgtcaagatgttggcaacatactttgaaa

SEQ ID NO: 800983 - DNA, 623 bp, Homo sapiens
tgggaagggactttcttctggctaggggaaacatcaattccttgacacaaacaaaaattgaattaagagtttattctgaattaatagtactgaggaaggttaatgaaaaataaacaaagagtagtcattaattaaaaatattagcaatccagtaatatagtctccgtatggagcatcctcactactaacaggcatctttagcatttattagatttcaggcaaggctctctttagtagcctttgttcaggcacacaaaatgacctgctcctttatacttctgtacttttaaacaatctatttatttatttagatggagtctcactctgtcacccaggctggagtgcagtggcacgatcttggcttaatgcagcctctgcctcctgggttcaagygattctcgtgcctcaccctcccgggtagcatgtgcctgccaccacgcccagctaatttttgtatttttagtagagacggggtttcaccatgttggccagggtggtcttgaactcctgacctcaagttatccacctgccttggcctcccaaagtgctgggattacaggcatgagccacctcaaccagcccttctatgcttttgcacatggtttttccctttgcctggactg

SEQ ID NO: 800984 - DNA, 619 bp, Homo sapiens
atttatatatgtgatggaatactacacagatataaaaagtaatgcattaacagcattttcagtgacctggatgagactggagactattattctaagtgatgtaactcaggaattgaaaaccaaacattgtatgttctcactgatatgtgggagctagcctatgagtatgcaaaggcataagaatgatacaatggactttggggacttgggggaaagaatgggaaggagtgagggataaaagactacaaattcggtgcaytgtgtacttctcaggtgatgagtgcaccaaaatcccacaaatcacaactaaagaactactcatgtaaccaaataccatctgtaccccaataacttatggaaaaaagaacccattttctggggatgaggcatgtataatttcccctaaagcacagaactgtgcagatgaaagtggacacctgaacaaagtaggcatttgcctggagaaagaataaatctgctccatgccacttttacactgattagattgttcctgacttatgacacactcttcaaaatacttgcacatctattattccatttgtactaagagtctaaccaaaacaaaatgaagctccaatctcatcttttagaatagata

SEQ ID NO: 800985 - DNA, 603 bp, Homo sapiens
gcaatctagctatgtgcaatctctgtacattctcagaaaacaagcctgaggcctccttgtccaggtgacatttaagcactggtgatttctctgattgcataatattcttgttttccacattgccatggttgttttggctgtgtggttcaattgtcagacactactatcttagtttggactcttcaattctttttttccatgatccttgaaatgccactggatgaacagtccttgagaaaacatggacatcctggtccatgatcacttcccgctttctatccttttccatatgtggctgagagaatttaaatcatgctgtggcttgcagctggggctgtgtatagctgaagaaaagcctcacagcacaagattgtttcttaaatcctctatccctgcwttatactttataatggtctctcattgatgaaatagaaccatagaatagctatcaaatagaaaaataacaataaagacatctggccccaaatttggctatttacatttttttctttactgaatttttccagcaactaaacttaaaaagatatttttccattctcatctagaagaaggtcctgtcatcattcctcaaggattccttgg

SEQ ID NO: 800986 - DNA, 588 bp, Homo sapiens
aaaattaacacatgtctaggaaatctatcaagaataaaatgagagaagacacaaattaccaacgtcacttatgagacagctgacataacttcaggatctacagatactaaaaggatagtaagaaaatgttgtaatcaacggtgtcaataaatttgactatgtagatgaaataaatttcttaaaaaacacaatctactaaagctcactcaaaaattagataactcagatagctttatatttactaaacaaattgaatttgtagttgaaaacctcacaaaacatccttcaggcccagttggcttcattggtgaattctacaargcaacttaggaagaaataatactcattctactattcctgaaaattgaagaaaaggcaatattactcaatttattctatgaggccagcattactgtgattccaaagtcacaaaatgaagcataagaaaactatagtgcaatattcctcataaacaaagatgcaagcattcttaaaacatgtttgcaaactgaattcagcaatatataaaaagtacaatgcatcatgaccatttgaggtttttcccaggaatgattaaaaaatcagtca

SEQ ID NO: 800987 - DNA, 649 bp, Homo sapiens
tcaacactatggccttccaaggattagactggatggtgccagatctgccagggatgggccactttgtcctggtccatgatgacccccacctactttgagatctggtcattgttctctctcccagtcctctctcacatgggcatcagttaggcatcaggtataggttgaggccctaagaaaggacttagcacatgttgccaaaacaactctgtgcaccraactcagtctaccctgcatggactgttgcttccattcccaaaacaaaatcactgaaaaggaaatcatatatttcccaaccacagggctctgccactgagagaagttaattggcttttggaaaaaaaacaacttggcttagtgagatctttttgttctcataaactctaaccactcactgaggatgcaaagtttgacgtcaaaagaagaggacatttagatttataaaaaaattctgagaaagataagtagaaacaatgaggcacagattaagagacataaaacaaataagaaagattctgttttgaaagtgaaggaaattgtactgtcacttgattgaaacaaaagaaaacagtttgacaagcatttattgagtactacctgtgtaccaggccctgtgctaaaagttagagatgtgaattagtcacagtct

SEQ ID NO: 800988 - DNA, 592 bp, Homo sapiens
tcaataatcaactgtagaaagtcacagacggaatgatttttactagccctttctttgggataacttttgattactctatactgtgtacaatttcagcaacgactgtattcttgccaatcctcctgcctctagattctctgactacacttaaaataaatattacaaatatttaagaggtgagcacaccagcatctagacatgagataagcttttgtcctgccacaagtttagattttctttatataagaggagaaaatgacacataattacctatgtctgtactttcatgtattctttaatattgtttttgttatgaatttcccaaatacttcatactgttatattataaacttcatattgtgtgtttttayggtctcacacattctttaagatttcagcttgtcatcatctccccagcatggcttccctgaactcctataataggctaagtactcttttatcacttaacatattttactgtatctgtttttatctccaggatggagaactgttctagttagctttgcacatgcagaatctacatgtagtatttctatatcttttaaaacagatggatacatatttttaattc

SEQ ID NO: 800989 - DNA, 592 bp, Homo sapiens
tcaataatcaactgtagaaagtcacagacggaatgatttttactagccctttctttgggataacttttgattactctatactgtgtacaatttcagcaacgactgtattcttgccaatcctcctgcctctagattctctgactacacttaaaataaatattacaaatatttaagaggtgagcacaccagcatctagacatgagataagcttttgtcctgccacaagtttagattttctttatataagaggagaaaatgacacataattacctatgtctgtactttcatgtattctttaatattgtttttgttatgaatttcccaaatacttcatactgttatattataaacttcatattgtgtgtttttacggtctcacacattctttaagatttcagcttgtcatcatctccccagcatggcttccctgaactcctataataggctaagtactcttttatcayttaacatattttactgtatctgtttttatctccaggatggagaactgttctagttagctttgcacatgcagaatctacatgtagtatttctatatcttttaaaacagatggatacatatttttaattc

SEQ ID NO: 800990 - DNA, 598 bp, Homo sapiens
gaattaaaaatgaattcgtaaacctagctatgtttcctgataatgttacttattcataaatatcttgcacattataatatatgctagatttagcttattctgttagaaaatatttgatactttttatgaaacagtttcataagaagaatgttagataaattgagcatatcttaaaagctgtttgaaggttttgttcaactatacataattcatgttaaaaaaaaagtccccatccaaatgtcaagcagtacatgtcctattaatgttgaaaaataaattttgttactgtatycctaatgttttcttgcaactgttactaacattttgccatgaatttttgttaatttaacattgttaaagtatatgctattaaaaattatgtttagataattgttatataaaaatttaaaatataaataccattacccatacttaggtaaattataatgtaattcataactacagttaacttttccaagtcttttctaacttggtttgaagaatgtaatttgccagatacatgtgctcataaacatattactattgttattgtttccctgaataattgaactgaattctagttgtacaatggagaaag

SEQ ID NO: 800991 - DNA, 626 bp, Homo sapiens
acttgaactcagctctgcaccaagcagacctaatagacatctacagaactctctacccaaaatcaacagaatatacattcttctcagcaccacatcacacttattccaaaatggaccacacagttggaagtaaagcactcctcagcaaatgtaaaagatcagaaatcacaacaaactctctctcagaccacagtgcaatcaaattagaactcaggattaaaaccacacaactacatggaaaccaaacaacttgcttctgaatgactattgggtaaataacaaaatgaaggcagaaatacagatgttctttgaaaccaatgagaacaaagacacaacgtaccagaatctctgggacacatttaaagcagtatgtagagggaaatttatagcactaaatgcccacaaggtaaagcaggmaagatctaaaattgacaccctaacatcagaattaaaggaactagagaagcaagagcaaacaaattcaaaagctagcagaaggcaagaaataattaagattagagcagaactgaaggaaatagagacacgaaaaatccttcaaaaaatccatgaatccaggagctgtttcttttttgaaaagatcagcaaaatagaccactagcaagact

SEQ ID NO: 800992 - DNA, 587 bp, Homo sapiens
tgtgagcgacatagaagacggtgatttctgcacttccacctgaggtactgggttcatatcactggggctagttggacagtaggtgcaggacagtgggtgcagcccatggattgtgaactgaagcagggtgaggcatcgcctcacccaggaagcacaagcggctggggaattccctttcctagctaagggaagccataacagacggcacctggaaaatcgggtcactctcatcctaatactgcrcttttccaatggtcttagcaaatggcacaccaggagattatatcctgtgccttgctcagagggtcccatgcccacggagccttgctcactgctagcacagcagtctgagatcaaactgcaagatggcagtgaggctgggggaggggcgcccgccattgctgaggcttgagtaggtaaacaaagtggccaagtagctctaactgggtggagcccaccgcagctcaaggaggcctgcctgcctctgtagactccacctctgggggaagggcatagctgaagaaaaggcagcagaaacttctgcagacttaaacattcctgtctgacagctttgaagagagtagtgg

SEQ ID NO: 800993 - DNA, 587 bp, Homo sapiens
tgtgagcgacatagaagacggtgatttctgcacttccacctgaggtactgggttcatatcactggggctagttggacagtaggtgcaggacagtgggtgcagcccatggattgtgaactgaagcagggtgaggcatcgcctcacccaggaagcacaagcggctggggaattccctttcctagctaagggaagccataacagacggcacctggaaaatcgggtcactctcatcctaatactgcacttttccaatggtcttagcaaatggcacaccaggagattatatcctgtgccttgctcagagggtcccatgcccacggagccttgctcactgctagcacagcagtctgagatcraactgcaagatggcagtgaggctgggggaggggcgcccgccattgctgaggcttgagtaggtaaacaaagtggccaagtagctctaactgggtggagcccaccgcagctcaaggaggcctgcctgcctctgtagactccacctctgggggaagggcatagctgaagaaaaggcagcagaaacttctgcagacttaaacattcctgtctgacagctttgaagagagtagtgg

SEQ ID NO: 800994 - DNA, 586 bp, Homo sapiens
ttgggttgcttatgcaaaaatatttgtgaatttgttcatttgcatgcaatcgaatgactcagacaggcacacatatagccacaatgtaggttaagcctctcaggaacatagcaaaatatggaataactgatgatgcatgagcattagcaaccagaatggacagtggctgaagcagggtccaagaggccttctatgctagaccatctcaggagggactaagaggtggcagggtaaggaaaggaggacactttgaggacttagtagagctgctatgtgccaactagtaaggaagtatttttatattttatagtaggtatggccataatggtgtgtataagtaattatcagtcttttcccttttgcttcaactatgttgcccttatatgaattattttccctttctagcaagctctacatgttgwctgtcactgtcttatttcctctgctcaatgtctttcccaactttctacagatgatgattcccatctacagactcgagccttcaccaattcctgaggcagtcctgaagatggtggcagtccaatcagtaacaccagcaacctgatgcatgctttccaaaaagagc

SEQ ID NO: 800995 - DNA, 567 bp, Homo sapiens
tgcctcagtttcctgagtagctgagactaaaggcatgtgccaccacgcctggctaatttttgtatttttagtagagatgaggtttcaccatgttggccaggctggtctcaacctcctgacctcaaatgacccacctgcctcagcctctcaaagtgctgggattacaggcatgaactaccataccaggccaaaaactgacatttctaataatacaatgtgactactctggaaatcaaagtatttccccttctaaggacttgttgatgttgtttttttgttgttgttgatgttgggkttttttttagtggcttttccaaatgaatctgtgaagtatgtcttctttgtcactgaattctctgctcacttagcttagtggtcagctagtgattagatagttacttaaatgactgaatctatttcccctcccagccatttccaagaggctctgtgtatgtttgtgttggggcacccttcacactcaggcaggcatttaaaaatgctgacttagctttcatcatttttttgcagtgcctcaaggtcagccagatgttgtgttagaacttagga

SEQ ID NO: 800996 - DNA, 508 bp, Homo sapiens
aaagatattaaaaaaaataatggccacaaaggaagagacaaagttctcattatttgcagattatgtacgattgccaagatagagaacccaaagaatcctcagatgtattaattataattaacttaaaagcatttagcaaggttgctggatacaaaaatgatgcacaaagatcagctgcatttctaaagaccagcagttacaaaattataacatgttaagttaaaaaaggaaaccaaaggactagagactcaaccaagcagttggttaagtttatggtctctgaactgcctaatttytaatccgagctccaccccactagctgtgtgactgtaggcaagctatttagttgctctgcaccctaccttttagaattcttgtgaggattaaatgagttcatgcgcataaggcacttaggacaatgcctggcacaaagtaagggcaaaataaatgtgagctgttatcattactgtgaagaagtaggtaataggcctattacccacggctctga

SEQ ID NO: 800997 - DNA, 463 bp, Homo sapiens
gcacaaggctgagaacactgggaacgctcaataaagaaatatttttggcctgaatgaatggcctgaaggactgctcctttcaacaattatggcccaataaattataccgacattgcctcctggagggaaaggccacaccaaggcccccacagatggggaaactgctctgtctgccaaaacccagatgcagggcagccttggccctgcttggctgtctacctgaatctgggtttaacaacttggcctgcagttttacagcctgaatcaycaggctcagcacaacagcatgagttctttgtccgcatgctgctgccaggtgttgaaggaacgggctgcagtgacttacccggctcaaggagacctgcaggcggggcagacgggtgcctgcaccccaggctgggaggccaggggacttgtctgcaaaagaaacccttgtctggaccctaaacagaaaaaaagaggt

SEQ ID NO: 800998 - DNA, 581 bp, Homo sapiens
gctattccaaatgaagctgctatgaacgctcatgcacaagtcttttgcagacatatatttcatttttcttgggtaaatatctgagtggaatgtttctgttacgtgatagctatattaatattaagcatttaagaaacttccaaactgcttttgaaatggctgtgccattatatatcctcacccgcagtgaatgggaattctaattccttcacatcctcaccaatacttcgtacggccagtctctttttttttttttttttttttgagacggagcttcgctcttgttgcccaggctggattgcaatggcatgatctcggctcactgcaacctctgcctccygggttcaagagattctcctgcctcagcctcccaagtagctgggattacaggcgcctgccaccatgctcgactaatttttgtatttttagtagcaacggggtttcaccatgatggccaggctattctcgaactcctggcctcaagtgatctgccacctcggcctcccaaagtgctgggattacaagcatgagccactgcacccagcccagtatttttaattctattgattctaataggtgtg

SEQ ID NO: 800999 - DNA, 592 bp, Homo sapiens
ctgtcgaaagagacctttctgacccattgaaccctgtcagttgctagttgtttcttatcccatgcacatctggaggcctggaagcactttcccttcaacttgccctacatttttgaataggatagtacccctaatgaggctgaattcatgttctcaggtcctgctgtttctgctttgactacagagaccctcctaggtaggggaccgggcagaggccagctggaccctctaccactgattccacccattttactcccagaggaggccattgcgtccagrttcttggcacttccataagttgtctcgcatgctggaggctggctatcctgatgcaggttctgaggggcctcttggtgtctccatatgttgtttaatcatggctacaggttcgccatcttgatgctgaccctaagggctgggactctggagcaagggcagaaaagcttctttgtctcagtttctactgagtgagtaagttcttccctgcaccatccaagggacagggagatggagtctttccttcaggccctggaatctcattcccagaagctgggagtcacccagggggaatccggtggttctcataactcca

SEQ ID NO: 801000 - DNA, 592 bp, Homo sapiens
ctgtcgaaagagacctttctgacccattgaaccctgtcagttgctagttgtttcttatcccatgcacatctggaggcctggaagcactttcccttcaacttgccctacatttttgaataggatagtacccctaatgaggctgaattcatgttctcaggtcctgctgtttctgctttgactacagagaccctcctaggtaggggaccgggcagaggccagctggaccctctaccactgattccacccattttactcccagaggaggccattgcgtccaggttcttggcacttccataagttgtctcgcatgctggaggctggctatcctgatgcaggttctgaggggcctcttggtgtctccatatgttgtttaatcatggctacaggttcgccatcttgatgctgaccctaagrgctgggactctggagcaagggcagaaaagcttctttgtctcagtttctactgagtgagtaagttcttccctgcaccatccaagggacagggagatggagtctttccttcaggccctggaatctcattcccagaagctgggagtcacccagggggaatccggtggttctcataactcca

SEQ ID NO: 801001 - DNA, 590 bp, Homo sapiens
gatccctagcagtggggcctggggaccctcttttttaaagctccctaggaggttcttaaacacagccggactggagaatcattgctgaagaatgtcagtgcatgataaagctttacctctcacaaatggtcaaccttcttagaaaacacggcactgtaaagagagcactgctcaccttctgctcaggcacttcctgggatgggacgtcgctactcctgaggcaccccatttcatcttgaatgacttggaaagtcagaaagttgtctcctatattgaattgatatctgcctccctgattatgggagccattggctstaggtcaacactcagaggatgcatagagcaattccaatctctcttgcacatgacaatttaaagacacctatattgtcccacctgtaagcatccctgatcactttaactgtccctctccatgactgggctatagtgtgcattgtccttcatcaagtggggtgacctggttaggtcaacccttcaaggggtggaacaaactcctcccacaccctcctttccatgagttgagctagagcccagcgatgtgcttttacataccttgggagacgggaagg

SEQ ID NO: 801002 - DNA, 609 bp, Homo sapiens
atcattatgttctttgaaacaattatggtaaggaataaaactagttaaagttttttgaaaaggctatcagtagtaaaagcaaacaatttgttagaaagtaagattaaagttggttaataattaaaattttggataataatgctagtctagcaacatgctgaggtaatcataaggaactctagaatctgataaaattaaggcatgttggcaatcctctctctgagatgcccttctccctctaytaatccacagctagcaccaccttcaaatcaggctcaagaatcacttctaggctttcccaaattaatctcacctcactctgatcaccctttactgaatctccactctttgtttagccaacatattaagcaactactgtgtaccagatacattgtggaaaagaatattaaaaatctggtccttggccagacgtggtggctcacacctgtaatcccaacactttgggtggccaaggcaggaggatggcttgagaccagtctggcaacatagcaaaaccccatctctatttaaaaaaaaaaaaaatagctgaaattagctgggtgtgatggcacatgcctgtagtcctagctactcaggaagctggggcag

SEQ ID NO: 801003 - DNA, 349 bp, Homo sapiens
catataaaactttgataatcataaaaaattaattttaggaagaaaacataccaactttgttgaaattaatctgggcatatgacccaggtcctgcttttaaaaatcatatgatccattatgatgaacaagacttcacaaaactacctatcaaacagsctacactgagaatgacactaccaggaataggagagtcatgacagtggcatagccttgctgaggatttgagaattcttatcaaaattcctgggaatagattggatctgtaggtcaggtatcaaagaaagaagcgggttccttaaaccaatgcagaacatagtttctcctgattggggtgggtggttgggggacc

SEQ ID NO: 801004 - DNA, 638 bp, Homo sapiens
cgatctcgtgtcatattttctattcagttttccattgatttaacatcaaaagtcatctggacataggccaatttcaagtaacattcgtataaattaaaatattcttaaatgcagctaaaaggattagaattatccgaagtaaacatgtttacttttaaactgtgtgtacttttactttttttttttttttttgagatggagtctcgctctgtcgcccaggctggagtgcagtggcgcaatctcgcctcactgcaacctctgcctcctggattcttctcctgcctcagcttcccgagtagctgggactacaggtgcatgccgacacgcctggctaatttttttgtattttagtagagatggagyttcaccgtgtttcccaggctggttgcgaactcctgagctcaggcaatccgcctgcctcagcctcccaaagtgctgggattacaagcgtgagccactgcgcccagccagaatttgaatcttaatacaagaactatgcaattttcagtggaaattttaagtcttgtagcagggctatggagtaagcattgtaaatatgatcaaagagatgaacacatcttgcataaagtatcaataatctgggtggtatattactgcttaaatggatggatcccagc

SEQ ID NO: 801005 - DNA, 638 bp, Homo sapiens
cgatctcgtgtcatattttctattcagttttccattgatttaacatcaaaagtcatctggacataggccaatttcaagtaacattcgtataaattaaaatattcttaaatgcagctaaaaggattagaattatccgaagtaaacatgtttacttttaaactgtgtgtacttttactttttttttttttttttgagatggagtctcgctctgtcgcccaggctggagtgcagtggcgcaatctcgcctcactgcaacctctgcctcctggattcttctcctgcctcagcttcccgagtagctgggactacaggtgcatgccgacacgcctggctaatttttttgtattttagtagagatggagcttcaccgtgtttcccaggctggttgcgaactcctgagctcaggcaatccgcctgcctcrgcctcccaaagtgctgggattacaagcgtgagccactgcgcccagccagaatttgaatcttaatacaagaactatgcaattttcagtggaaattttaagtcttgtagcagggctatggagtaagcattgtaaatatgatcaaagagatgaacacatcttgcataaagtatcaataatctgggtggtatattactgcttaaatggatggatcccagc

SEQ ID NO: 801006 - DNA, 630 bp, Homo sapiens
ctactgtctcaaaaggaaattttttagtgaaagaatctcgacgtcctctggccctccagctttccttgtggaattaataaactgcagatgtcttcaaagtgaagaaaaagccagtcatgctcctttgtctttcagcccrcgaatgtcatagagtttggagtcgagtctctatgtgacatcaaatattacacaatgggagcaactacttgaaaatgagatgttatgattgggggaatgaaagagtttaattgtaaaccagtcaacttagtcttgcaagtattggttaagagccgcttaaactgttttttttttcttctttcttcttcttcttaaaatagacagagtatagtttgtttacaaaagagaaatggaaaatgttctcccctttagcacggcgcaaatgtgaagggccgcatgcctctggagtgagtaagggctttgccggctgactcttactcaggggagctcacgtatacgaagttgttcctctatgcagcagagacacagcccacatgatttctggaggaggagtaacttggaaattccttcatgaaggaaggaaaaaatgtgttggaggctgagaaataaatcacatgttgcactgtttctgcctctagagatcgcagcacg

SEQ ID NO: 801007 - DNA, 640 bp, Homo sapiens; identical to SEQ ID NO: 761543

SEQ ID NO: 801008 - DNA, 626 bp, Homo sapiens
ctaatggcctacatagaatcagtgtgatggtctctagctggttcccaggggacaaattgatcaccatggcaatcatcacagactctcgccctgtggaggggcaaggtaaaattcacagagccgtggaggaagcagatctgattatctcagaagggttacctccttygagtaggctgcagctgtccattaggctgctcctacacacacgcgcggagcccgtgccaaaacgtggaacgaggcatatggttagaaaccgagtggggaaggcatgccaactgctgatgcgcccagctggctgcctctgcttcattggtccgagtgagcactctgcaaataagacctgctcagaccctggaaagggtcctgacagatatccgaagaattgcagctgggttgaaatcagtgaaccactagcaacacagtctgagaaaaatcgaggaagcatgatcctacgaaaatgatgaaaagaaagcaatagaaacctaaacaacactactatcattatgaattgttagatttgacagtaattctgccgagactatattaagggacaaactctttatttttttctgctatattgaccctaagtaaattggtgacttttgtttgagacatcctctgaaaag

SEQ ID NO: 801009 - DNA, 598 bp, Homo sapiens
gcatgcagatagaaggaagcaaggttaaaaaataaacagaaaaataaatttaaaaagaaggcaaaagaaataaaattgaggatattagacagggaaaggaaattaatactcactgagatctatcttagtctaggtactttataaacatttcggtctgatgaccatcttatggaacagggatttctgaatctttgtttaataagaccccactcgacactaatgtccttcatattatgccgtattttttttcagtcatctaatttttttctttatgacttaagtttaatttaaatktttttcccacagggagttacagcatacagataattaacgcaggttatcatatgccagctatttctctaaatactttgcatgtattaccttatttaatcgttaaaacaactttactgttattccccctttaccaacagggaacactaaggctaagagttacagagctagtacgtgcagaagccatgactcaaacacaggtagactcaaattcagaatccttgtgcttaattgctacctgatactgcttctttgtagagcaagcagattattaagcaatcgaagtgatttgtcttagcggtcttta

SEQ ID NO: 801010 - DNA, 583 bp, Homo sapiens
cctgcatttcctgtttttcctgaggatccagtaatgtgctcttgaatgcaataaatgcttactcaccctctccagtaggctatttccatctgattctgtcattcatcccttcagtgattatttgttaagtacctagtgcattttgagcacactgtgtggttctagatacacaccacatagtgaaacagacttggtccctgccctcgtggaccttacaaccccatgatgaagsccacataacaagaaacttctctggacacacattttatccagtgaagatgtttttaaaatgtgattaattaacattttttcaggtggactttagcctgacttacagccaactagctacaaaccaagatttctttcttgtgaataacaatttaaattggcaacttgtgaatcacaagatctttccagtcctcactgaatgtgataaagccatttatgttgaacccagtgtgtgttttagttgctttctcataatgtaggaaatgacatcaacaaattgtaaaatgtttaatgactgaaacaacaattatacttaaattccttttcaaatccaatgaatcatactaacctgtaa

SEQ ID NO: 801011 - DNA, 634 bp, Homo sapiens
agagatgtgtacacccatgttcatagcagcattgttcacaatagccagaatgtggaaacgacccaagtgtatactgacaagtgaacggataagcaaaatatggcatatacatacaaaaaaagtattcacccttaaaaagaaggaaattttgacatatgcttcaacatggattaatgttggggacattatgccaagtgaaataagccagccacaaaaagaaaaataatgtatgattccacttatatgagtgagatacctagaatagtcaaaaaagtatagagacaaagtggaatggttgttgccaggggctgtagggatcagggaatagtgagttattgtttaatagatgaagagtttcagcattacaagaagaaaagagttagggagatgggtggtggggatggttctgtaacattacgaatgtatttaataccacactgaaccatactttaaaatggttaarctgtaaattttatattacatatggggtaccacaataaaaaaattgagaaaaatcttttaaaagattaaatgagcattaggaaaaatagctaatacacgctgggcttaatacctaagtgatgggttgatagatgcagcaaaccaccatggcacacatttacctatgtaacaa

SEQ ID NO: 801012 - DNA, 619 bp, Homo sapiens
tgcagatttaaacgtccctgtctgacagctctgaagagagcagtggttctcccagcatggtgttcgagatctgagaatggacacactgcctcctcaagtgggtccctgacccccatgtagcctaactgggagacagctcccagtaggggccgactgacacctcatacagcccgatgcccctctgggacgaagcttccagaggaagggtcaggcagcaatatttgctagtctgcaatatttgctgttctgcagcctccactggtgacacccaggaaaacagggtctggagtggaccgccaggagtggaccgccagcaaactccaatagatctgcagctgagggacctgactgttagaaggaaaattaacaaacagaaaggaatagcatgaacatccacaaaaaggacatccacaccaaaaccccatctgtagatcaccatcatcaaagaccaaaggtagataaaaccacraagatggggagaaacaagaacagaaaagctgaaaattctaaaaagcagagtgcctcttctcctccaaaggatcgcagcgcctcaccagcaatggaacaaaactggacagagaatgactttgacaagttggcagaagtaggcttcagaagg

SEQ ID NO: 801013 - DNA, 612 bp, Homo sapiens
ttttatattaaataccttccagaactcaaaattgaatattgttatgtggccaccctgaccctgggagttctctctgaccacctctctccatggagcttctctttgactcactgaccactccctcttttttcttcttgtttgttcctgactaaaaaaatcctatttattcattatacaagaaatagcagtcagcacttgcccccaatctccttccaaaacatgtccacataccttgaactttcacatctaaagaagttcattgaggtctttgttttatttgtttgaaaacaaataatkttcagcctaagaggaatctggagctatttggtacattaatattaatattgccaatgcttactatggcagcaagtaaagataatgccatacattggtttcatagaatcgctgcctcagcatccactatttttttttttttttttttttgagatggagtcttgctctgttgcccaggctggattgcagtggtgtgatctcggctcactgcaacctccaccccccaggttcaagtgattctcctgcctcagcctcccaagtagctgggattataggtgcccgccaccacgccctgctaatttttgtattttttagtag

SEQ ID NO: 801014 - DNA, 612 bp, Homo sapiens
ttttatattaaataccttccagaactcaaaattgaatattgttatgtggccaccctgaccctgggagttctctctgaccacctctctccatggagcttctctttgactcactgaccactccctcttttttcttcttgtttgttcctgactaaaaaaatcctatttattcattatacaagaaatagcagtcagcacttgcccccaatctccttccaaaacatgtccacataccttgaactttcacatctaaagaagttcattgaggtctttgttttatttgtttgaaaacaaataattttcagcctaagaggaatctggagctatttggtacattaatattaatattgccaatgcttactatggcagcaagtaaagataatgccatacattggtttcatagaatygctgcctcagcatccactatttttttttttttttttttttgagatggagtcttgctctgttgcccaggctggattgcagtggtgtgatctcggctcactgcaacctccaccccccaggttcaagtgattctcctgcctcagcctcccaagtagctgggattataggtgcccgccaccacgccctgctaatttttgtattttttagtag

SEQ ID NO: 801015 - DNA, 629 bp, Homo sapiens
tagcattcaaagggcactgggaacaattttaaatgctgcatctaaggaatgccaagttctggtcctcttggagttggattaaaattgttaacactttcacattcaagggctgcttacaactactacagaccctattatctgttcttctgaattagcatgaaaatgaatagcacaatataactagaaakgagtatttctagaaatgagtatatacatctatagatgtataacatcggtttttcttattgaatggtgctacttattttaacaaccaggctgccttaaatataatggacatccgtatggattaagactctatacaagctttctctttagtacaccaggggaaagtgaaaaaagaaccacatttgaattcggctttgtcactacaagtgggtgaccatgagcaagttactaacctcagtgaacctgttcctaacctaaaaaggaggagaatggagagcaggtaataataccttatgagatggttgtgagagttatatagcattctttatgtcatagtcctagcaaagtgctggcataaaataggtgctccctaaatgttaattacctaccttcctttccctttctgtcagattttctctactattcttatgaaataataaaga

SEQ ID NO: 801016 - DNA, 492 bp, Homo sapiens
cactcttggccaggaactatattaatgttagtttggagcctatagttacagatttccacctttgatttccatggaaacagggaggttactatacctacctatgctctgattgtcaaacatgcatgaagtttttgaaagtgaggctcttccttcttgaccwagccaatcaagacatacaagtatgtaattttttaaaaagttgatgaatcttataaaattgtttttgtaggtagaaaatcgtcaaatataggcagttttaacttaatgcctaaaaattgtagtagttatgtttatataatattctttatattatatattatataatataattaggtatatatatatatatatatatattatatatacctaatttataagtctttttggagatggccctgataaaatgggagagaaattgtcattcagttgcttgggtagtggttgaagaaaagatctaaagctgtggtttgtgaactatacaccatggcatcc

SEQ ID NO: 801017 - DNA, 566 bp, Homo sapiens
accacacccagctagtttttaattttttttttttttttttttttttttttgtggagatgggtctcactatgttgcccagactggtcttaatactcctagcctcaagtgatcctcccgcctcaacctcccaaagctttgggattacaggtgtgagccaccacacttggcctccatgtaatcttaatagtattaacagcaacagcttttaaactgagtggttgctatgtgccacgcattgtatcatacccaatttaattgttcctttatcttttacccctcatttgctaggcagacattgttttggttatgtactattgcttaaccaccccaaaactaagtaggttaaaacacaaatgtrctgtgatcttttagggttctgtgggttgactaccctcaagtatgtgttttttgctctaggtgtctcttgtatttggagtcagaagttggctggggctgcagtcaactggaggttcattggactggttgcctaaggtgactcacttgtggccacagttgactggagtgcctatgtgtgacatcaccatgtggcttgggctactcaaagt

SEQ ID NO: 801018 - DNA, 589 bp, Homo sapiens
cattcatactgtacgagagaggcactttatccctattttacacgtgacgaaatgggagctctgaggggacgtggggaatctctcagctggtgaggagcaacgacaggctgtcactgtaccccaccaatgcttttgacatgtgctcatctcaggatatgtgtgcaagggtgaggatcttggcctaggacggggctgactgctgttagactagggtgtactcagattccagtctgcaactgtggggaccaacgtgctgcttctaccttttggaggaggcacctgctgttcttctaagcagtgagctttgttctggtgccactgctggggtgcgtgtttttgtggccatgcatacatgtctgtatttttctgtttaaacatgtacatgtatgtatatgagsaggcagaattggggtgagagggcaaacccaatcacagccaaaagtcccttggttaaaaagggcatgaacagagttttggagattgtttccttcaacattgtgaatgtatttaacactagtgaactgtatacttaaaaatcgttaagatggtaagttttattttatgtgtattttactacggttaaaaaaga

SEQ ID NO: 801019 - DNA, 659 bp, Homo sapiens
attttttttttccctcttccagaagcttatgtgctttgaagaaggcctctttccccatcttaacagaaaaattccttgcttttaaatttccagagtgtctagttatctctctctccagctcatcctggtttcacccatgtctagttcccgtgtcaggcacattcaaattcacttgccttggccatgtctcttccctgactcctgtgttctacaaccatctccacgtggtctgtggagaagatggctgagtaccctgaaggtgtccagctccctcaggcctgtctttctcattggcatcattctgggtcagctccttgtccacgaggcttgggtataaacctcctcgattggtggaagtggactcccaggggtgagccatggcttggagacagtttggttcatgggccccagcacaccaaacataaaaggcctcacttgtggttgggatacatttggcaggtcgggggtttgacctggctttgggcctgtcggctccctggccrccatcagggctcagtgaagtgcttgagttaggagagagaagccagctttgggaagcgctgcagccacaaagcccaaactccagctgcacaggatggtgaaattcaccaaagcaaagtgaaagttgtgaaacttcaagtgacatagttcccttttga

SEQ ID NO: 801020 - DNA, 436 bp, Homo sapiens
cattaaaacaagatacaaaaagataaagattttgagatatttagggaaatttgaatattgatattaaggaatcactgggtatgataatggaagtatgattttacaaaatcttcatcttttaaaattatatactaaaatatttatgaataaaataaaatggcatttgcttcaaaataattaaggatgagtaggtggggatataaatgatacaagatgcccaagctgatcaccattgaagctggtacctgcaggttcattayacaattctcttcccttttctatatgcttaaaattttctatgacgtttttaaaagagagtagtgggtaggagggtagtcagtgggacaaatgccaggaaaggaagggaaagatagattttttaaattgcagacctcgctctttggtcttggtaagaagccaatgaataaattatgtc

SEQ ID NO: 801021 - DNA, 636 bp, Homo sapiens
taaaagactaaaaaattcataattatcctaactgtaagtacaaatctagactttgttctaatggggattcattatatatttatccatgaaattttcttccaaagcaattaatttcctagaggtaaaatatctaaataaagaaaaggtctgaagggttaacaaaactgcaattatgcstaaaccatgtcatactagtatttttttgagacagggtcttactctttttactcaggctggagtgtagtggcaggaacatggctcactgcagcctcaaactcctgggctcaaatgatcctccagtctcagccttctgagtagctgggactacaggtgtatgccaccatgcccagctaatttttaaatttttgtagagacaggtctttccatcccaggctggtcttaaactcctgggctcaagtgatctgccttcctcagccttccaaagggctgggattacaggcaggagtgactgcgccaggcatcatactaaatttttaaggtcactattgatacatccaaaggcaagtaagattatagataacataacatcatttttagaactacatattatatcaagacctgcaaggatctgaggcaggaagagaaagactaaaggactaagatgtgttgatgtat

SEQ ID NO: 801022 - DNA, 481 bp, Homo sapiens
ttttggatttccttaaatcgggcttcacatgtctctggtgctccctgattagcttaataattaacctcctcaattctttttcaggcaaatcagggatttcttcttggtttgggtccattgctggggagctagtgtgattttttgggagttgtaaagaactttgttttgtcatattaacagaatcggtttctggttccttcttatttgggtaggctctgtcagagggaagrtctagggctgaaggctgttgttcagattcttttgtaccacagggtgttcccttggtgtagtactctccccctgttcctatggatgtgacttcctgagagctgagctgtagtgattgttatctatcttgtggatctagccacccaacaagtcttccagactccgggctggcactggggattgtctacagagtcctgtgatgtgaaccatctgtgggtttctcagccgtggatgctagcacagtatttagggt

SEQ ID NO: 801023 - DNA, 626 bp, Homo sapiens
gtacacccatgttcatagcagcattgttcacaatagccagaatgtggaaacgacccaagtgtatactgacaagtgaacggataagcaaaatatggcatatacatacaaaaaaagtattcacccttaaaaagaaggaaattttgacatatgcttcaacatggattaatgttggggacattatgccaagtgaaataagccagccacaaaaagaaaaataatgtatgattccacttatatgagtgagatacctagaatagtcaaaaaagtatagagacaaagtggaatggttgttgccaggggctgtagggatcagggaatagtgagttattgtttaatagatgaagagtttcagcattacaagaagaaaagagttagggagatgggtggtggggatggttctgtaacattacgaatgtatttaataccacactgaaccatactttaaaatggttaarctgtaaattttatattacatatattttaccccaataaaaaaattgagaaaaatcttttaaaagattaaatgagcattaggaaaaatagctaatacacgctgggcttaatacctaagtgatgggttgatagatgcagcaaaccaccatggcacacatttacctatgtaacaa

SEQ ID NO: 801024 - DNA, 609 bp, Homo sapiens
caagggggtccctaatccaatctgactgacgtccctataagaagaggaagtctgtacacacagacaccaggctgcgtgtgcacagaggaaaggccatgtgaggacatagcaaggaagtggcatctgcaagccacaaggagaggcctcaggagaaaccagccctgcccataccttgacctcagaattctggcctcctgaactgtgagaacataaatgtctgttgtttcagcccaccagcctgagatattttattatgacagcccaaagcaagctggctggagttcacagggcagaagactggagaggaggagggagctgcagagggctgcagagtgtcttcgtcaggactgatcagtgcacaagggcaagaaaactacctaagacaygggaaagaaccacccaaattgcaggagaaaaaatcagtggagctcacacaaagctgggaataggtcgctaatagccagatcagaaaacttcacaattaatgggacatagagaagaggacaagaaggacacagagatggccaaatgagcccttgactatgagtcactctgtgcttgttgaaaaacactcaaaagcagtctttgaaaggatcagattgcatccca

SEQ ID NO: 801025 - DNA, 606 bp, Homo sapiens
gcacttgatgaaatttaacatctttcatgataaaaactctgaacgcattaagttaaagattgcacagggggaaaaaaccctattcgagctaacaaacaaatttggtaaagttgaagggtacacaatcaacatacaaaaattagtagtatttctatatgctaataatgtacgatctgaaaaagaaattatgaaaacaattccacttttaatagttaccccaaaatacctagtaataaatttaaccaaggaggttaagatatctgcaatgaaaaagataaaacattgatgaaaggcattgagaaagatacaaataaatggaaagatataccatgttcatggttggaaaaatatttttaaaatatccatactatccaaagcgatctacagatttaatgcaatatgtataaaaataccaattacattcttcacataaatttwaaaaatgtaaaatatatatggaactataaaagaccccaaattgtcaaaaagatcttaagcaaaaaatacaaagttgggggcaaaacctcaaaatattctacaaaattatagtaattaaaacagcatgataccagcatataaacagacacatgaccactgggacaaaat

SEQ ID NO: 801026 - DNA, 566 bp, Homo sapiens; identical to SEQ ID NO: 745764

SEQ ID NO: 801027 - DNA, 655 bp, Homo sapiens
ttgccttatccagtctgtcattgatgggcatttagattgcttccatgtccttgctattgtgaatagtgctacaatgaacatacatatgcatgtgtctttatgatagaatgatttctattcctttgggtatatacccagtaatgggattgctgggtcaaatggtaattcgattttggctctttgaggaatcaccatactgctttccataaggattgaactactttacactttcaccaacagtgtataagcattgccttttctccacaacctcaccagcatctgttattttttgacttttgaataatagtcattctgactgatgtaagatggtatctcattgtggttttgatttgcatttctctactgctcagtgatattgagctttttttcatatgcttgtggcccgcatgtatgtcttcttttgaaaagtgtctgatcatgtactttgtctactttttaatgggktttttttcttataaatttgtttaagttccttataggtgctggatattagatctttgtcagaagcatagtttacaaaaaagaatgagatcatgttttttgagaaacatggatggagctagaggccattatcctcagcaaactaacgcaggaacagaaaaccaaataccacatgttctcacttataaatggg

SEQ ID NO: 801028 - DNA, 542 bp, Homo sapiens
cacccagatatataaaccaaatattattagagctaaggcgagggatagaccctaatacaataatagctggagacttgaacacccaatattcagcattggacatatctttcagacagaaaatcaacaaagaaacatcagacctaatctgcactattgaccaaatggacttacagataattatagaacatttcatccctcggctgcagaatacacatgcttctcctcaatacatgaataaatctcaaggatataccatattttaggtaacaaaacgagtcttaaaacattcaaaaaaattgaaataatatcaagcatcttctctgatcacaatggaataaaactagaaattaataacaagaagaaccttgaaaactatacaaatacatggaaattaaacawtatgctccagaatgaccagtgggttgatgaagaaattaaaaaggaaattgaaaaatttcttgaaacaagtgataatggaaacacaacataccaaaacttacaggatacaacaaaggcagtactaagagtgaagtttatagcta

SEQ ID NO: 801029 - DNA, 599 bp, Homo sapiens
gaggtttcaaaatgcatttagaacacaagcattacttcactgcaaaatactgtctcaaagctgactgagtctctttcttctccaaagacttcctcttctcttcctacaactcctcctcttcttttttcttctctggcagaaatcttatttttttcaaaacttctcaggtactaacacaattctcttcacagccaccaactcagatttgtatatgtgaaatttytaagacgttaaaatatgctgttctggcatattgactatttcagttaaagacacttgagggctaggtgtggtgactcatgcctgtaatcctagtacttgggaggccaaggtgggaggatcacttggacccaggagttcaagaacagctagggcaacatggagagaccccatctctattaaaaaaaaaaaaaagagagagagagagacttgaaaaacagcaggtacataaagatcactttgaccttcactctttttttaaaaaagcagaagataaacttcccatgtgaaagtcagcctccctatactggaagaaaaggcaaaatccttatcttcaaaaagaacacatatacaccttattagaatgacacaacttttaa

SEQ ID NO: 801030 - DNA, 615 bp, Homo sapiens
agaagctaattctgtcctgaaagctatcactttaaatctaagagaaatgatttttacacctgcaaatattttgctaaagacatatcagtccttgaagacatttaacagaagagatgtaaaacctttttggatataattaataaccatcaatatttattttgatgaaacatatataattaaagctctcattttcctgagggtgctttatacctatttttaatataaaatactaatgtaataaatgtcttaactgttttatatgttttcaatcaggaaggtttctcctgataattagttctccctaccgttgccagaaagacattttccattcattgttcagtgcttctccaaccwtccttaccacaccagtaaaaatgcttttatcaagctctttctacaatctccttgaagccaagcctgttaggcacttctctttcttgatttgacagcttagcaacttggggcagagttaaatgttccctcctgcttgaaacactgtattttcttagcttccaggccaccactgtcacctaattacattcccacctcacagtctctcctgtctttctgttcttggcacatcctcctctgacctaccactctctgacacagtgc

SEQ ID NO: 801031 - DNA, 362 bp, Homo sapiens
aagggatgaagtcatgagaggaaggactggaattttctagagaaacatttaagttgagactggcatgctcgagcttctgcagaccagtggattttcctactggtctgtgtcagcaccagtatattcaatggtgcttctccaaaaagccctcacctcttttaccagggacatgactgcctggaggaatgtagaactgaacaacagtgggacccactctcctrcagacttatgagggcctggaccaatggctgaggctgccctgaggacaaggatgggtaaaaccaggagtcaaccagtttaagaattggctgccagatcgaggcaaaaaaaaaaattcaaaaaaaaaaaattcaagtgagact

SEQ ID NO: 801032 - DNA, 634 bp, Homo sapiens
taaggaaactggataaaatgaaaaaagtttaatcacttttttccattgtaaaatgagtggcttcttgaaagtttttttggttaaaggagatgatgatatgaccacgtattagaatattatgcaaaaatttagaactatgctatgaaagaacatttaaggacactaacataccattgagtgcaaaaagcagaatataaaccttaattacagcatgatacaattttatcgttgttagataggyagatggaatataggaaagaacaagaatgaaatataaatggcagttaggtctcagtaggattatgagtggttttctttcttcattatgagggcttttttcaacacagttaaaagcaaacattttctgattatagaaacaatgaatatcattaaaataaataaaaactgatatccagtagaaaacattttcaaaatttaaagatattatttaaaattattttttaagccaccacaaagaaaataaattacaaaatttatgttttttttcattagggtgtatttatcatgatccttttaatgttcacaaatgaactactaaaggcaggtaaatttgatggatgaacatgtactaagtaggatttattttagatgatactttagggccccggttcaa

SEQ ID NO: 801033 - DNA, 613 bp, Homo sapiens
caaataataagtgcaaaaaaagaaaaatagaaatataaaaatcaccattttgcaactcctaatgaaataatgtatcaagcaacaatcattgaaggtcccaaaatcatcagatgaaaggttgatgggaagctttccagtggaagggacaggtggacaccacctgaatgtatcagtcagttttggcatcagtaaagggggggcagctgaacactgtgtgtttcataatgtgatatactccctctgaagtactgccaaacaaacttgaatctgatcaacactcagtagcagtgtagaggaaatccaagggacagaggaacaaaccaaacaataccatgaggaagcaatcaaccaaatcaaaaatgtagaacctccttcaggtcacataaccygatatctctaccaaatcaaaggtattaaaaagaggtggtagatattaaaaagaggtggtagataagggagtttttaaagaataaaaaagacttaggagataaaacgaccaaatacaatgtgtggaccttgcttggatcctgatttgaacaaaccaactgcaagaaggctataacaaatcaggaaactgacgatggactggctattactatttatttttaaattt

SEQ ID NO: 801034 - DNA, 537 bp, Homo sapiens
taatctatgaacaaataagaggagaccttcaagctgagactcaaagaatgagaaggaacccgtgataaaaagagcttccgagtgagatctcagtgctatgcatgtgtaaagggcttgagatgggtgtgagtgtctgggagttgtcagggttggttggggggcaggtatctgtagcccagggaagacagaatggggtgcagagtgggaatggggagagagttaagggaagtgaggattggatcaagcaaggccttgcaggtcacagtgagatgtttggatttaattctaactacaatggaaagccactgtayatttttatgcagagaaatgacatgatctgaattatgctttgagaagtgacatggtctctgggacagctgtctggaggaggcactggtggaaaggcaggaagagcagtgagtagagatgatggaggctacctgggaggtgactgaggttgtccagccagaagatgctggtgcctggaggagtcgatggcagtgtatagattcaagacatatttttgggcctgggagt

SEQ ID NO: 801035 - DNA, 630 bp, Homo sapiens
acagatagaaatgcagatcagtgaaacagatgagagagtccaaatagacctacacgtttttggagtatttattttcagcataggtgccaagataactcaatagggaaaggacagtcttcaatatatgatgctggaacaaytggacatccatatgcaaaaaagtgaacctcgattcttaccccataccatgtacaaatattaactgaaaatgaatcacagacccaaacacaagtaaccataaaaattctagaagaaataggacaaaatttttgtgcccttataagcaaagctttcttagctaacatacttatctgtaaaaaaaagatcgataaatcagactatgtcaaaattaccaactcaagagaaatgaaaacatgtccatgttttataggtgaacatttatatatttttatgtaaactttattcctaattgctcaaaactggaaatatcccaaatgtccactacaaagaaaccaaatgcggtacacccatagaagggaacactcttcagcaataaaaaaggaatgtattattgatatatgcaataacacagatgaacttcaaatgcattatgctaaatgaaaagaagtcagactcaaaggggtacatatatacaatttgcatttgtat

SEQ ID NO: 801036 - DNA, 610 bp, Homo sapiens
tagttgcgattcaaaaacactgtttcaattttaaattcaagactttttatttgaaaaccatcagactcaaagaattatgaggctcagttaatattattatgccacattatttacatttgttaactgtcatttaccygctctatgttaatctttttagaaaaaatttgcatttcagaaacaaaaagcacggatagatatataatatcaaaatattcccaaaggattttgatgttccatctatgcttgttaaaatgtatgattatgattaaactttttatcattcttattttccttggcatccataatcatggaaaattacaagcttgcagtaaacatcctaacttaacttaacttttaaacgatagcatttattgtatttggttttgatctgccaggcttatagatggtataaaattttcaggggataatttttcacatcaaaattccttctctcccacattatacattttaaagtatgcacaaggcagaaaatatagggtttgggtttttttccttcgttttattccacctgatctccttatagtcccagagaaggaagactcaatgtacatttctctcagaaatatgacaggtctgtgtttttgttggt

SEQ ID NO: 801037 - DNA, 545 bp, Homo sapiens
acccaggccaaaagtcatctgtaactttcccttagcactctggttcatgctcctatgtgtataagtttgtaaataaaacagtggaggaagctctcgggagaacttggagccctccccgcagtcccaactgataattgggctgtcaaattccctttgctcctagtgcaagggctccccctagtggcctcaggccagcctacactggcagagtgggtggagcagggcagcagsactctcatctccgccttcctgggaggtctgcgcattttgctttggtttctggctagttacagtgctaggtcctaggcactaatcattggtagctgttaggggtgggtactgttttgccagtcggcttaagagctatgactcttggaatggcagaggatcccttgctgtatgtcttacgatcctctaggtgctaaactcagtttccccactagctgctggtcttgggaaagtcaactctgagatgtatgtttctcatctgtaaaagtaaacaagagtctggcagcgttggcttaaggacaaatggccatgggaaa

SEQ ID NO: 801038 - DNA, 567 bp, Homo sapiens
cacactttctgatattcacacccttggatggtccctcccacattgatcctagggttggcttgcaatttgccttcaccagtgggacattgacaagtgtaatataagcacaataattatcttttgggagtcagctgctatgctgtaaagaagcttaagctagactcctgaatgatgagaggccacgtgcagagaaaccctatgcaatgaaaggctatctttcatgtcccagccccattttacctctcagctgaacagccttccacagaatcctgagaaataataagccaatgttgtttccagccactgagtttttaggcagtttgttataccgcagtagaaatttaaataattggtrcaacgaatgtgtgcaaattccttgggcaatttatgtgaatgactttcttttcctttcttactatttgtgatcagccagaaaaagctaaggggaagattatgagcctcacagggctcatttattcattcattcaacacatattgattgcatgtctgctctgtgccaagcagtgtgctggggtaccactgtgagtaaacagcccctgccttcgt

SEQ ID NO: 801039 - DNA, 635 bp, Homo sapiens
tttggatttctctaatgaccagtgatgatgagctttttttcatatgtttgttggctacataaatgtcttcttttgagaagtgtctgttcatatcctttgcccactttttgatggggttgttttattcttgtaaatttgtttaagtttcttgtagattctggatattagacctttgtcagatggatagattccaaaaattccctctcattctgaaggttgcctgttcactctgatgatagttgcttttgctgtgcagaagctctttagtttaattagatcccattggtcaattttggctgttgttgcaattgcttttggtgttttagtcatgaagsctttgtccatgcctatgtcctgaatggtattgcctaggttttcttcttgggtttttatggttttaagttttccatttaagtctttaatccctcttgagttaatttttatgtaaggtgtgaggaaggggtccagtttctgttttccgcatgtggctagccagttttcccagcaccatttatcaaacaggaaatcctttccttattgcttgtttttgtcaggtttgtcaaagatcatatggttgtacatgtgtgatgttaccttctcactcttttaacggtatattttaatgattgtatcct

SEQ ID NO: 801040 - DNA, 644 bp, Homo sapiens
cattcacttactttctaaatacttgaggacctgttatgtgctaggcattacagaacaaatgacaaaaacactgatgagcttggattaaagaaaggcaaagcataaaagctaagaatctgattttaccccttttcctatcagtaaatcaaaaaataggggagagcctaacttatctctataagccatccattttcttttaaaaaaatattttcacaaagggctaatatccagaatctacaacgaactcaaatgaatttacaagaaaaaaacaaacaaccccatcaaaaagtgggcraaggatatgaacagacacttctcaaaagaagacatttatgcagccaaaaaacacatgaaaaaatgctcaccatcactggccatcagagaaatgcaaatcaaaaccacaatgagataccatctcacaccagttagaatggcgatcattaaaaagtcaggaaacaacaggtgctggagaggatgtggagaaattggaacacttttacactgttggtgggactgtaaactagttcaaccattgtggaagtcagtgtgacgattcctcagggatctagaactagaaataccatttgacccagccatcccattactaggtatatacccaaaggattataaatcatgctgctata

SEQ ID NO: 801041 - DNA, 614 bp, Homo sapiens
  misc_feature 611, 612, 613, 614: n = A,T,C or G
tctaatgaagaacactgctatacaattctcctataaataaattaccagtgatttatttactggcttccttccttcatggcaatcaagtttgctacattgactgacgtttcctttcccaaaagatttctctgtggcgggtgacactcactgctggatagcattttacccatagtagaacttctttcaaaattgaagtcagtcctctcacatcctgctgctgcttcatcagttgtttatataacattctaaatcatttattgtcatttccatgttcatagcatcttcactagcagtggattccatttcaagaaacccccttctytgatcatccataagaagtaactccttaccggtttaagttttatcatgagattgcagcaattcagtcacatcttcaggcttcatttctaattctagttctcttgaaccagaagtaccacctttgcaggtacttcctccactgaagtcttgaacccttcaaagtcattcaggaaggctggaattgacttcttccagactcttgtcaatgttgatattttgaactcctctcatgaataagaaatgttcttaatggatctgaaatggtaaatgcttcagagattttgtcagannnn

SEQ ID NO: 801042 - DNA, 621 bp, Homo sapiens
gacctaattacctcttaaaggtcccacctcttaacactatcacaatggcaatcaaattttaacatgagttttggagtggactttcaaaccgtagtaatagccaagcagatacgacaattatgaacctgtttttgagataaataataactagttctcaagtaagacgacttgtcacacatcatttatcctaactttatcatggtaattgagggaccacctatgttggttttatccagaggagaaacaagtttcttatctctttccaacaggacatagttttgcaaggcactaartactcactaaagttaggctagtaggggaggaaaaaaaataatgttctctaaactgggacttcctataacaaaagatagattaacaagagaaatacagacagaagcttattaaaatgtatacctcacatacacatgggagaaaacccagagaaatcagtaaatctctggagtatatctcaaagaaagcatttaaatttcaggcttagatgccatctttctctggaaggaaagatgtggaggagggcctggtttagatgaaatgacctgggaaagcatcttaaacaaaggtaaggtttgttttgcagatttaagtagataccttctccat

SEQ ID NO: 801043 - DNA, 571 bp, Homo sapiens
aatgtttagaattgttatccaactaatggggaaccaaaaaggcaaaaagagagcattgtgatatcaccagaagtattaactctaggaaacaggaaacagctgccacctgtggggactataagaacaatgggaagaggttgggatcattaaaatgcagtagcttgggctctatggaactggtacctgtgctgcccaggtgttactggtacctcaggaagactgtgtcagagctgagactcagaactctgaggaggagacacctagccaagtgcttgatatctgtaaaggaaaccatgaggctgatttggggattgtgtgtctgtatgtgtgataagggaacagtactctrgaagcagttgccactgccagggtgaaccctggctggtgagacactatcagaaactagaagtaagcaggagggaataagactcttcttcctccagtcttgtattgtctttttagaacctcctaatgttagtgcctaaaagggagccagttggtaaattaaatgcatttgtgtagttccaactcccatataccaaagtagagtatagaagaatggatttgaacc

SEQ ID NO: 801044 - DNA, 608 bp, Homo sapiens
cctgggaggcgggggttgcagtgagccaagatcatgccattgcactccagcctgggcaacaagcaaaactccgtctcaaaaaaaaaaaaaaagaagaagaagaaaaaagaaagaaaaaagaaagacagggattaacataaaccatatgaaattacttcaaaatatattaaatgaaaagggtaaggtgcagaaactatgtatcatgggaacacttcaggtaaatacaaaattatttgtaaatgtacatatctatatactagtatagaaatgttatacatataaattttatgctagacattttttttccagaatattcaaggaagcgtcaagartggttgcttttggggatatagagcttcttacttttacttctttctatattttttaatgctaagtatatattgttcttaattttactttcataacagctttccaaagtctctccgaccatccctcagaagctttccagcctcttcctcttgactccagggtaccttctatggttatgtaggctgcattctgaatgtaagctcctagcccatgggacagaatccagtctgaagcacgcttgtctagctgtgaaccctgtcactgtgctgtatccactt

SEQ ID NO: 801045 - DNA, 618 bp, Homo sapiens
gcttatacaaatgtatttatttgtcaaaactcatgattttacattgctaaaaacacactattatctactccattttatgtagattttataccaaaagaaaaattgcagatgttgaattgtaattaatcatatgcatgttaaattatttaggaagataaatactgatgmctgtaatttactgagaaatgtgtcaaaaataaaattgatttataggtggatagatgtatatttaagtgaatagatatgtgataagcaagtgtaataaatgttaattatagaatctaggtggtaggtatacagatatgcactgtaacattttttcaagtttttttgtatgcttggatttttcataataaaatgctgaaaacaagtaagaagaatgacttattaacatgccaaaattcatacctatacaggagtatttatttctaaaaaaatgatcatgagactctacgtactcaatccaattttgtgtcatttgcttaaaaaagaaaaaaattgtctgtgactcctcttttagtgttgccttcaggaaatagtacgtaaatcacagaagaaaatcagtgttcttatcttttagtcacatctagtattctaattccatatgctattattgaa

SEQ ID NO: 801046 - DNA, 599 bp, Homo sapiens
cagggaaaggcacaacaacaaaagaagaaaactacaggctaatatctctggtgaacatacatgcaaaaatcttcaacaaaatactaacaaacaaaatccaatggcacatcaaaatgatattacaccacaatcaggtgggttttatacaaggaatgcaaggatggtttaacatacataaatcaataaatatgatatatcattaacagaatgaaaggcaaaaaccatatgatcatcttaagagacacagaaaaagcayttgataaaattcaacattctttcatgattaaaaactctcaacaaactagaaatagaagaaacgtacctcacaataataaaagaccatataagacaaacccacagataacatcatagtgaatgggggaaaggtgaaagcctttcctctaagaactagaacaagaaaaggatgcctattttcaccattcctatttaacatagtactactataaaaatcagtaacatttcaatacactattagtggtctagtcaaataagaaatcaagaaagcaatcccatttatgattgctgcaaaaataaaagaaaacaaaatacctaagaatatacttaaccaaggaagtgaa

SEQ ID NO: 801047 - DNA, 549 bp, Homo sapiens
cctcctgagtagctggaactacaggcatacgccacttcccctggttaatgtgtgtatttttggtagagatggggtttcaccacggtgcccaggctggtcttgaacccctgggttcaattgatttggcctcccaaagtgctgggattacaggtgtgagataccatacccagctrtcgttgtttcctgtgttatatttttgcacatattttttctggtcatgtttctctgtggtgtcttgttctgggcctgacttatgcttcctaccctttattattttactcttctctagatgcaaatttgccattttgggtaaaattaactcatctttgttggaatttttatttcttctggatcacaaaaatatccagggaagccatctctccttcattttgtttataagtattctttgactttatttttgtataagcttcattgtcataattattcccacaattcccatcattcctataattgtattttcagagtaaattattctcttctgggcccagcacagtggcttatgcctgtaatcccagcactttgggaggc

SEQ ID NO: 801048 - DNA, 621 bp, Homo sapiens
agatgaaaatgaggaatattttattggacactgaagtaaaggccaaccttgttatgaagtggcaaaaacttgactgaactgtgtccacgacctagggctttaaggaaggcagaacttaagggcaatgaacaagcatatctggtgggaaaattcttaagcaaaatattgaggaaaccacatagctcttttgtctgcatacagtgcaataagagaataccaaaatgacttaaatacagaatttataactaaaagggacacagaatgtaaacatacagaatattcccagtctggccatgtaaagaaataaaaacgcattttgagagaaaatatcagtggtgtggcctagtgactatttgttaaggagattagcatggctagaagaaaccrggtgctattcatcaaaataacgagagaatagccctgaaggcatttcagagatcttcaaggctgtccctcccatcacaggcacagaatgttagaaccttgagggtagaaagggctcactgcccagtacggcttggagtctctactccctgcatttcagtgcagcacctccagccaccccagccatggctcaagctggcccagatgctgctcatgctgctgcactggaaggcaaaa

SEQ ID NO: 801049 - DNA, 616 bp, Homo sapiens
acttctcactcctgggaaaattcaagccagaggtggaggctgcagtgagctgagtttgcaccactgcacttcagcctgggcgacagagtgagacttggtctcaaaaaaaaaaaaaagaaattgagaccttaagtactatttttgcagattcttggagctgttctagcagaggcagaaaatcatcccaggaaacagagaggttttgtagactgaaggatccagaattgataatttagagttgattgaattttaaggactcccaaagaaatacgtacaaataccaggaaaagatataagaaatactagtatataggaaacaaatactaggaaaagaatattctcaacacctctaagcttggcaggatggagacagtcaaacaattcggaggatattttctaactatcyacaaatgagcacctacaacctgcctgacaacgttttaaagcaaatattaaataagtatttgcttttaaaatgtattttcttgtattataagatgcatgttggctgggtgtagtggcttatgcctgtaatcccagcgctttgggaggctgcgttgggaggatcagttgagcccaggaattcaagaccagcttaagtgatgtagtgagacct

SEQ ID NO: 801050 - DNA, 547 bp, Homo sapiens
taacatgcatcaggttggttatttcctgggctacataccttggtaggatagcattatacaaacaagtttcttttagagtcctggtacacttataataaccataaaataataggactgtagcaatcttttgtcctacctcagtgacttgatgaatatactggaaacagttctcagtctgaggaaggtcagttgaagtccttactatacaagtccaaattttaaggaaaatgagtcctgtgatgagtttcctcatgtttcggccgygtgtggaccagttagcttccaggtgtgactggagcagggcttgtcgtcttcttcagagtcactttgcaggggttggcgaagctgctcctatccacgtgcagctcccagtctactgatggtctcggtggttgggcccactagaataaactgagtccaatacttttacacagttatgtttaactgagctctctgataccaggagtaaggtggcggggttagggtgttgcaaactttaatggttatgcggggattttcacagagcaagctttggtatctagttagt

SEQ ID NO: 801051 - DNA, 630 bp, Homo sapiens
tgagtgaaagcattcaagtatatgctttaaaaataattttttagcctaaaaatttaaaatttgcacccaaagttttgtttcacaggttgatcaaccaattatcggagtccccttcatataagttatttcacaattgaccctgtcataaaggaaaactttcaccaaaaatacccttttttttctttttgaggttttccctttatatggagttgtggaaaagtagagtttctgacggaaactgtcttgctttatagctaaatataagagcaaatccaagtacagcagaaaacaattatccagaagtggccagggaagcattcctggcttgtagtcatgtggtctcaggaggcgggcaagccctttgcacaaaacccaaaccttacagtatgaatggcagggktgtcaaatcagggttaataattcaacacaagaaccaagcccaaaggccacccaaaactaagttcagtggctgaaacagaagcccaataggggtgtggcactgtgcccatattcaacataaaaataaataaatgggccactgtgggcagatgtgaggacatcccaagttgtccctggggacagacctccccacccccaggtccatccaaggtacagaagagtgcttttctc

SEQ ID NO: 801052 - DNA, 604 bp, Homo sapiens
ttgctagtaagcatgttctgggcggtcctcttcgtgcatttgcgcagtagctgtacatggatgttcatatgtcgcatgtctcattagcatcttaaatctccacccaggtgtgtgttttttattattataatgagcaaagcgtgagtttgaggacaggtaaagtcaaaatgcgcatgttccctacaggggaaattcccttctggagacagctttgtttgaatgagctggccttcagtgtgaatgctgaggctcatcgtgttgactggccagtcaccatagttgccgtaccccgcrgacacagttgcttccttgcctacctatcctgcctcatatgcaacattgttgagtgtctagactatgtgtcttcctttaaagagtgttgaatttcttttccaaccagctaagtttattctgatcagcgtaactcttaaactttgttagtgaagttctggagtagtttttagggtagggctagtttagtcccactaccaaggcataactaagcatccagtgtctcttttgaatgtgctgaggattcagcaaggtctattcccttgggctagtcagaaatcaaatgtcttccagccccgcgaggtctgtaatt

SEQ ID NO: 801053 - DNA, 491 bp, Homo sapiens
gattatttctttcctgctctctttctgtccttgacctttcccctgagatgttgaaggtcctggccacactccctgctgtgtcttcccaactacccctgctctgccctcaccgcacccaggggtggctgctagcctaactgtggctctctgggtctcctctccttcctcccctgcccctcatttccttattcctggagtcctgtccttatgacactagccagggaaggggaaaataatgccacctctgctggcattgtggggagtggggggacctgactgttggtctagattaggctcagcccctgactgggtgtrcagcttcaggtgtgccatcccagcccccgatgtgcccctcgtgtgccccctgggtgcatgcccgccctgccctgcccaaggtgtattgggaggaagcagtcaggtaacaaggataaggaaactcgccctcagaccaagcttagagcaaaagatgcacttcctttgctggcgtttct

SEQ ID NO: 801054 - DNA, 601 bp, Homo sapiens
ttagatctcaaagaaccttgcagaacagaagggcactcactcagttcttcacacaccccgaatttttttttttttttttttgagacggagtctttcttcgtcgcccaggctggagtgcagtggcgcgatcttggctcactgcaacttccgcctcccaggttcaagcgattctcctgcctcgcctcccctcccgcctcccgaatagctgggacgacaggcgcacgcccccacgcccggctaattttttgtgttttagtggagatgggatttcaccgtgttacccaggctggtctcgaactcctgagctcaagcaatccgcccgcctcggccttccaaagtgctaggattacaggcgtgagccaccgcgcccagacacacaccctgatttctggctggatctgatttaccggacaaagactccaatatatagagagaggcaacatgtcatkgtggttagaaatgtcaactttgccgtcaagctgtcctggttcagatcctcactccaccattcattagctgtgaacacaggcatattatttaactttcccctacctcatggtgaccatgactagagatggtgataatagtagctaactcagaa

SEQ ID NO: 801055 - DNA, 627 bp, Homo sapiens
ctgctgagtttggagttggagaggctctggctgtgtacataccgggtcagtcatggccatgggaccagaactgtctaagcttcagtttccttgtgtatagaatggggagaaattggccgggcacagtggctcatgcctataataccagcactttgggaggccaagtagggatgattgcttgagcccacgagttcaagaccagcytaggcaacatgctatctctacaaaaaaatttttaaaaattagctaggtgtggtggcacgcgcctgtagtcctagctatttgggaggctgaagtggaagaattgcttgagcccgggagattaagactgcagagagctgagatcacaccattgcactccagcctggggtgacagaatgagaccctgtctcaaaagaaaaaaaaaattacttgaaaatgttttcatgaccctttaatactataacatatgactatataattaatcatatttccttgtgagatatctcagttatttttaatattttaccattataaatattgttacttcaagggttgagttattaggttaaaggctaaagagtttgaagaatcttaaaactttttttctttttgcacttctatgaggttgaacattttcatgtttat

SEQ ID NO: 801056 - DNA, 598 bp, Homo sapiens
agtaatcagtaaaacacctttatatgatcttcaatcttatctactgatgaagtgttttactctgtaggagaaaattgtccttatttatttttctgcccttctacctggtaaacagatacacgtatgtcattgtctatctccaagatttaatctactctcacagagatttcaaaattgcttttcaaggtgtggcttccttgttagctaaggtcattaggtatcaraaaagtagggaaggctgggcgcagtggctcatgcctgtaatcccagcactttgggaggcccaggcgagtggatcacctaaggtcgggagttctcgaccagcctggccaacatggtggaactccgtctctaccaaaaatacaaaaattagctgggcgtggtggctcatgcctgtaatcccagctacctgggaggctgaagcaggaaaatcactggaacccaggaggtggaggttgcagtgagccaagatcgtgccattgcactccagcctaggcaacagagcgagactctgtctcaaaaaataaaataataaagaaacataggggatgctccttatatctcatagatatgttgactgcttatgacttttatttct

SEQ ID NO: 801057 - DNA, 568 bp, Homo sapiens
aggcagaggctgcagtatgcagagatcaaaccacagcactccagcctgggctgcagagtgagactccttctaaaaaaaagaaaagaaaaaaagacttggaggagtcttgactgggaccgggacctcatttgggctactcattctagsagatctacctctttatttccaaaaacactaattaaagcccagcaccccaaataagggctttctctcattagctcccaaattaccacctgacagacttgtgacttccactcaggttgttggaaacattctgccaggatcatggtgcagagggctggagagtgggcacatggttggagctctctctcattgccttacagccaaggtgcagggcctgcgctcctgctgtcgaggctgcctggtggattcagatccaacctgatggtctagtttcccctcaggtgtgtgagtcccgacaggcttcccaaattctttttttgcgagttaactagaatgggtttctttgcttgcaactgaagaattcagactaatgttctgagttatttgtttaagactttaggatatatgtttaaatataacacaa

SEQ ID NO: 801058 - DNA, 517 bp, Homo sapiens
aggtttcccagaaagcaggctctggacaagatttgcatgcaggaagaggggatgctcttggctggatacctatgggagaatgaaagaaactggattgggctgaagggagcttgaactgccattcaatcacaacaaagtctctgatgatcccagtgagacctttgcagctgcaataactccttaaagttccctaaatgggaagcaaagggacaggcctttagacccttctatcacccagtcattggatgtgggctaccgccgggaaggagcatgactttgggtaaggcggttttcttgagctgaacatatgacccttagagggaatgtcactaagagctgttggtttctaaaacttcctgmagctggaggtgtaagtactatagttttggaggtagaaatttaggcagtattccatggtatccactacggtgtactccttgcaaccattcatacccgcttgcttcttataataagttctaggccttcaggtggattagtgagatgagctacagctcct

SEQ ID NO: 801059 - DNA, 617 bp, Homo sapiens
gagtatctgagtgcttgttaaaaatgtagatttccaaaccctgtgctagagacttgaattcagtagctcttgggaagagtgaaatgctttgtcaacgagctcccccaggtgatggggtgcctgtagttcatggaacacactatgaagacaaatagtttggtacttaataagcctctaataaatagttgttgaatatatgaatgtgactatatgaatatatgaatgtggctgtactaacagctttattcctgtcaacagaggcttttacctataaccacagaagcttatattcctaggaaattcttaccttttccttcccctcacctttgtccacctattttcggcaactcttgaagtcttgtttgggcagatcccttccatyttcatgcctatcgtgctgctttagcacctcctgtctcgggcttgttaacaggttccccaggctccagactcttttgacttcaactcatctttaaaaccactaccagattaatcttcctcaaacctgtgcttatctgtatttaagactcttcatgatttgactcaacctacttttccccttaatttccttctcttcttctctttaaaataccagatcccactcttgtccctaattg

SEQ ID NO: 801060 - DNA, 566 bp, Homo sapiens
aggcctgggttattcaaatcctgcacatttcaaagaaatgcctgccttcaggactagcccttggtcagctcctgggaattaacctctgagctcttgaaatattcttccagataagagtctttttgtatgcctgaggccttggaccatgctgtacagataaatttatcctgacgatgtgatttatggtgaagrcttttttttttcttttaggtagggggaggctggaatctcagtagctgaggtcagttaaggggcctatattgctgatctccaataacaactctggacaccaaggctcatgtgagcctttctggttggcaacattgagcatgtgttgtcatacattgctgctgggagaattagacacatccccatgagactccatggggaggggaccacaaaaaccttgcacctggtttcttctggacttccaaacatgtaccttctccctttcctttgctaattttaatctgcgtcctttcactatagtaaacgataccctgtgaatttaacagcttttctgaagcctgtaagttcttctcatgaatcatcaagcctgaaagtgg

SEQ ID NO: 801061 - DNA, 566 bp, Homo sapiens
aggcctgggttattcaaatcctgcacatttcaaagaaatgcctgccttcaggactagcccttggtcagctcctgggaattaacctctgagctcttgaaatattcttccagataagagtctttttgtatgcctgaggccttggaccatgctgtacagataaatttatcctgacgatgtgatttatggtgaaggcttttttttttcttttaggtagggggaggctggaatctcagtagctgaggtcagttaaggggcctatattgctgatctccaataacaactctggacaccaaggctcatgtgagcctttctggttggcaacattgagcatgtgttgtcatacattgytgctgggagaattagacacatccccatgagactccatggggaggggaccacaaaaaccttgcacctggtttcttctggacttccaaacatgtaccttctccctttcctttgctaattttaatctgcgtcctttcactatagtaaacgataccctgtgaatttaacagcttttctgaagcctgtaagttcttctcatgaatcatcaagcctgaaagtgg

SEQ ID NO: 801062 - DNA, 637 bp, Homo sapiens
acaaaaacaatgctggataaaactgcagtttagcacaaatcaatgccatggtgccaactgtactagcaattattatattcttcaccaccacacacttgcaggaagaaaaaagagtgtccttgataaaaaaataagaaattctaatttttgttgtcctgaatctttttttttttttttttttttgagacagagtcttgctctgtcgcccaggctggagtgcagtggtgcaatctcggctcactgcaagctccgcctcccgggttcacgccattctcctgcctcagcctgccaagtagctgggactacaggcacccgcaaccacacccggctaacgtttttgtgtttttagtagagacggggtttcacctgttagccaggatggtctcaatctcctgaccttgtgatccgcccgcctcggcctcccaaagtgctgggattacaggygtgagccaccacgcccggccctgtcctgaatctcaagtacacatctttttaatattctgtgtgacaaataggaagtatacataaagcccttctggtacctagtggagcatgcagatcgtctcaaggaaaagcatatgtgcaattgagttgcaagctgacctagctgctgttttcatgtatcatcatttttact

SEQ ID NO: 801063 - DNA, 668 bp, Homo sapiens; identical to SEQ ID NO: 800759

SEQ ID NO: 801064 - DNA, 644 bp, Homo sapiens
cccaactcaaggagaagaaaatgctttgcatcctgaaattcccactctgccctcccctgcaaaaataaaatcaaacaaaaatccaacaagatcactctgtctagtgagccattttctgtaaatgactaactccttgatagaatgatacccctgacttaaaatactgatatatgttcctataagaaaatagctgctttctaccaggaagagactataaacttagaaactttagtaatttggggtcttttctttaaactatctagtgagtttttttttaatttggtgagaaaagttagcaactaaaaatcctctctctttgtaattcttccaygcctgtgtcttcttaatacagttattatcctgtaaagaaaaccaaagaactaattatggtaaaagttaggacgacttttagtgagagagtgagttttgcttaggagggaggaatcactggagatgtggcttagtgaaagaagaaaggtaaaataatacatattttcaccttagaggaaaggtgaaaatacatattaaaaaaggagagaaaaataaataaaatctacacaaaaacaagaacaaccaccactcatatggagcccttgcagaacttgcaggatcctggcctgtgatgagggtctatactctgggct

SEQ ID NO: 801065 - DNA, 647 bp, Homo sapiens
ccctacaagctaaaagggattgggatcctatttttagcctccttaaacaaaaccattattagccaagaattttgtatccagtgaaactagcatcataaaggaaggaaagatacagcctttttcagacaaacaaatgctgagagaatttgccactatcaagctagcactacaagaactgataaaaggagctctaagtcttgaaataaatgcttaaaatacacaaaaatagaacctccttaaagcatacatttcacgggaactataaaacaatgatacaattwaaaaaacccaccaaagtattgaggcaacaaatagcatgatgaatagaatagtacctcacagctcaatactaatgttgaatgtaaatggcctgaatgctgcacttaaaagatacaggatggcagaataagaaattgtgtccggaattgtttcttccagtgggttcttggtcttgctgacttcaagaatgaagctgcagatgctcacagtgagtgttacagttcttaaagatggagtgtccagagtttgttccttcagatgttcagatgtgtccagagtttcttccttctggtgggtttgtggtcttgctgacttcaggagtgaagctgcaggctttctcagtgagtgttacagctcttaaaggtggc

SEQ ID NO: 801066 - DNA, 596 bp, Homo sapiens
aaaagaatagagaggatccaaataagttcaattggaaatgaaacagaagatattacaactgacaccacagaaacaccaaagattattcaagacggttatgaacacctttacacacacaaactagaaaacctagaggcgattcataaattcctggaaatatacaaccctcctagattaaaccaggaagaaatagaaactctgaacagaccaataaaaagcagcaagattgaaatggtagtaaaaaaaatgccaggaaaaaagtccaggaccaggtggattcacagcttaattctatcagacatttgaagaagamtttgtaccaatcctgttgacactattctaaaagatagagacagagggactcctttctaaatcattctataaagccagtatcaccctaatacctaaaccaggaaaggacataacaaaaaagaaaactatagaccaaaatccatgatgaacatacatgtaaaaatcctcaacaaaatactagctaactgactccaacaacatatcaaaaaggtaatccaccatgatcaagtgggtttcataccagggatgcagggacagtttaacagtaagtcgaatacaccaag

SEQ ID NO: 801067 - DNA, 613 bp, Homo sapiens
cagtgacttttagcgtcttatactccatttggccaacctccttgaacaacttcttcaaaggaaggggacttttcattctggacttatccttccgtgattgggtgaccacttcagggatatgagatgcccaaggcgtgggttctagtagggagctaataggcctccatttgtctttgttttatagggtaaaccttagaatagaaatttactaaggacctctgtgctttaggagttatgagataaaactgctatttttttttttcctatttagctcctctgtctattccctattagctagaacttggggatatatagamaaaggctgattaatttaaacttaattccacaaaggtgtggatttcaactaatcattgctgtgaagaatctgatgctcacatttttatcttttctaaattttctataaaatatatttctttaataatcacaagatttaaaaaatccccaaacttaattttgtgttggtgtagaaaacctgatgttttagttttttattgttgccataacaaattactgcaagcttagtggcttaaaaacaatataaattaattatctcacatttctgtaggtcagagaggtctaaattggcttggat

SEQ ID NO: 801068 - DNA, 627 bp, Homo sapiens
gtccagagatgctgtctcagagcctcagattggagtcattagcaatttagttaatgttctattttactgtgtctgagcttgccctcaaaccatagtgcaaaatccttcctgatcttcccacccctttccacaggcagaggagccaccaccacataagtcaatgttggctacctggacactgccaatgtttgcttaaagccccagggctcttccatcagcttgtgaatgctgcctggccagagactcacccttcagggcagttgactccccttttgtcaagggctagtccagaaatgctgtccaagagcttagacctggactcgaggaccccaagagcctacttgttgctctaccacactgtggctgagctagtatctagggtaccaaagtcccctttacttttccctctgcttttctcaaacaggagtcttttattatagccatcacagctgggaatgtgctatgtctcccctgaagccgayccatagcccaaggcccacagcatactccctaggtatcactagtggttagttattcagggcccaaagtttctttagttagcagttgatgaatgctgctaggactgggttcctcccttcaagggactaggttccatttttgcccaga

SEQ ID NO: 801069 - DNA, 621 bp, Homo sapiens
caaagaacccagaatagtcaaaacaatcttgtgaaaaatcaaagcagactcaccgtttgtgatttcaaaagttaatataatgaaacagtaatcaagattgtatggtttgggcataagagtagacataaagatcaatagaataaaattgagcattctaaaataaaccgatatatttatgtttaatttaattgccctggctaaaactttagtacaacattgaataaaagtggtgagagcagatgttcttctcttgttcctgattttaggtgtacaaattatagttgttcaccttttaagtataatgttagttgtgggatattaattcatgtactttattgggttgaggaagttaacttccattcttagtttgttgagcayttctatcaggaaagggtgttggatttttttcacatgatttttctgtgtttatttaggtgatcatatgtgtttttttccattatattagtatggtatgttatattaattttcatatgttgaaccaacctgcttttctgagataactacttgcacatgggatggatggatagatgatagatagatagatagatagatagatagatagatagatagatagatggatagataatgttttatataaaa

SEQ ID NO: 801070 - DNA, 616 bp, Homo sapiens
aaagtaatagttacttgaacacaagcactgcaaaagtccatctgataatccagacgtctactaagtgactatcaggagggtagtgtatacggtttggatatgctggacaaagggacaattcacattccaggctggatggagtaggwcaatacaggattctatcatgctactcagaattgcatgtaatttaaaacttatgaattgtttgtttctggaattttccacttaatattttcagaccatggttgactgtgggttactgaaggcaaaatcatggataagagggaactactgtattatattctattgttaacatatatttgcctgattcaatatgtccacctctgaaagagatatattgatctctcttaccataatcaaacttttaatcaatttcttctttaatcaatcatatcttcaatcaatttatagcaaacttttgcataataaatttgtcttttctgatgtaaagaactatatgactaatatcttttctgtaaattccattttttattttaataaatcatgccctttactatgcttaatgcttttatatttaaaggctactttctattgttttaataatgttactgttacttattgtggcattgtcctg

SEQ ID NO: 801071 - DNA, 533 bp, Homo sapiens
aattattcactttaagttttgaagacaatttgtagtgtaggaggcaagaagagatcaatactcagagcaataactaaaaactagcaaaaaacaacaaaacaaaacttctgaaaagcagagtccttctggtccaggctgcagttaactcaaatccctgccaagctgttcccatctgatgctggcaggtccttggctccttgagagagaagagcgtcctgaacracgccacagaaccctcaagattaacccagcaccacccacattccctctcccgagaagtgcaacaccctgcctctcaacaccgcactgcttcctcaagaacactgacattagtccaagaactgcagaagcacttaagggcttcccagaactttcttgactcaggtatcatcacaaagcacctccctacactctgtaaggctgtcagtgcacaaacacaaactcaggcctcctctctgcaccttgctcacaagccatctccacaaccaacactcatctctgcccagacaaatgtgacccagctccacaagcat

SEQ ID NO: 801072 - DNA, 602 bp, Homo sapiens
tgtgtaaaagaaaaaagaaaatctgaaagaattcatctctggcagccttatagtacatgaaattttggaggaagtccttcaggcagaaggtcaatgataccagatggaagtatggatctaatcagagaaacaagaaatgcttaaaatgataactccatgggtaaatctataataaccttttcttattatgtaaatattttgaaacttaattgaatctttaaaaaaattttaagaatgtagtctgcagcttataatctatgttaatgtacaaagctttaaggtaaacacaagagaaatgaaagtatgctattataatgttagtatattatgtgtgaattattataatatcacttgaatatagactgttatatgttagagataactaatataaacctatagcaaccaataaaataacagtacagaattagctgaaaagccaacaaagagaagacagmatgcaaataaaattaaattaatccaaaagacagaaaagaagaggtataagaggaaaaaagacactaagacatacaaccgaacaaaacccaaaagtgaatagcaacatgctatacttaaccatatcaatgatcacaataaatgtaagt

SEQ ID NO: 801073 - DNA, 595 bp, Homo sapiens
agaccctaaggacgaaaaacacacatggacgaggacatctgtataaaaataataaaaacaaaagcaagcaaaccagaaactcttctatggctttccagggccctttagataaagagtgaaattttttggatagcttagaggggccagctcaaacccttcctccaagcctcatccctacccctctcacatgtattaaatgaaagaatgaccattcctgtgagatggaaatcgtgacccctatttacaaagaaatggaagctcagagaggtaagtgagttgcccagggttctgcagccaggtggggcagtgccaggacttgagagcccggcaagggggcaactcagttcctctgcctcgctgccccctaaatcagctcacccccctcctcaccrggagcccagatggcccctcctgagccaaaaagggcaaggcttgggcagggaggttgggtcctgggctcttggctatagtggctccatgcagtgttcagggaggaagacatgaatgaaaaaatgggagggcggggcatccctcgatgccttctttcctccctgtaggatgctccaggagactggatgacatcgcagggcccttg

SEQ ID NO: 801074 - DNA, 534 bp, Homo sapiens
aaatctttcctttaaatattctcggcttgcaaagttcttatggccactcatttcaacaaatagtacatcttattatcttagtcaccacctcttctcttgcacattggctactgggcacagtaatcctattcctattaaacagatgaggaaactgggaatacttagaggttaacagttttgcaacagtcatagaaccagacctataatcagtctcctgattctccacccagtgaagctttcactaccccagtgtagagaaaatgctaagggtccatggatgccacttgttgtttgytcgtttctttcctgtttctatttttttcctcatgtgtttccaatgagagagcattttgatccctatttggcattccagcaaatcattttccagaaaaatcccagatccagagatttgtccatcccaaaggcgtcatggaaagaccaaagtggcaggacaaatccagaagcctgatttccatgggcagttatcacaattcttttgtaacagggttattgcatatgcgttaacacgtatgt

SEQ ID NO: 801075 - DNA, 592 bp, Homo sapiens
ctgcctacctcacaattttcctcatcatcagcctagatttaatctccctgggaaagtttcctatgactcttaatatttaactaggtggacctctctatgttcccaaagcactaatcacccaggaatagcaagtatttctgaattataaccatgtacctgcatatttttactgctataccatacaatccttgaggatgaaaatacagctttgctcactgttttacgaccataaaacttatcaagtgactagcaaatgaagatggcctgtggaagtcaraaatggtattcaactctgcaggatcttgcctcaaacatctttaaaaaaccacatagcccttctacttctaatcaatacaaacctccacaaattttctgttgtcatcaccttctctttcactcccacaatccattctaatttaaagtctggcataatgactgactgactggtatttagatcaagaagaggagtagggagggaggccaaggagagagtgacaggtgacctgtgatatgaggcagaccgtttatgtttgtggatcctgcagttagattatttatgtttaaatcctggcttcattaccttctaccttgt

SEQ ID NO: 801076 - DNA, 569 bp, Homo sapiens
ccagcagagattaagaggggagaatagtgtccttgaaactcagaaaaagtttttagttcaagcaagaaacttaggaccaagttaaaaataaatccttttattccaagcctcatttattatttaaaacaaacaaacacacatacaaagcaaacttcttagtawgctaaaaataaaagggaactacttcaatttgaaaaagaatatctacaaaaatcctacagctaatatcatatataatggtaaaagactgaatgttttcctctaagattgggaagaagttgaggatgtccattcttctcactgttattcaacatagtattggaaattctagccacagcaataaggtcagaaaaagaaataaaaggcctacatatttgaaagaaaaaaataaagttgttcttatttgcagatgattttatacattgaaaatctcaaggaatccatacaaatcttctagaacaagtaattgagttcagcatagtcatagaatacaaaagcaatgcacacacaaattatgatgattcatatttgtatatataaggtagtaaaaaactatatctcttttttaa

SEQ ID NO: 801077 - DNA, 588 bp, Homo sapiens
agcaattaaccatcaacaggcagaaggaggaggaagaggaagccccagcagcaacaaaagcagcttgatctaagtctcaagacttatacaaaaattaactcaaaatctatattgatttaaatataaaacataaaatattagaaaaaaaagcaggaacaagtatttgggatctagacctaggagtagagttcttacacttgatatgaaaagcatgatttgaaaaattaaaaatggataaattggacctcatcaaaataaaaacttatactctgttaaagtccacctgaagataatgtaaagacaagcaacagactgagagaaaacatttgcaaaccacgtatctgatgataatgctatctagaatatattttaaaactctcaaaactcacaagagaaakaatacaattagaaaatcagcaaaaattagccattagaaaaatgtaaatataaattacattgaattatctctatacaagatcagaatgaatcaagaaaacaaacaaaactagtgaaaaaataaaatgctgatgagcatgcagagaaactggattgctcacacattgctggtgggaatgtaaagtggtacag

SEQ ID NO: 801078 - DNA, 579 bp, Homo sapiens
attaatattgtaaattctggtgcaatctgtattcagttacgatactaatataactatgtaaatgttttgcatagaggaacgacatggtgaactgaagtagtcttccccgttcctcataaatgtttagtttaaactatttaataattaggccgggcgtggtggctcacgcctgtaatcccagcactttcggaggccgaggcaggcgtatcacttgaggttaggagtttgagaccagcctggccaacacagtgaaaccygtctctactgaaaatacaaaattagctgggtgtggtggcacatgtctgtattcccagctacctgggaggctgaggcaggagaatcgcttgaaacctggaggtggaggttgcagtgagccgagatcatgccattttactgcagcctgggtgacaggagagaaactctgtctcaaaaaataaataagtaaaaaattgtatctcgttctgttatttagatttctgtatatcaataattatcccttttatgtccagactgagctgtgaatctggttatataggagtcccatttttccttagaatttccttcttggaaccctctatg

SEQ ID NO: 801079 - DNA, 630 bp, Homo sapiens
gaaaattttttaaaagtaaaaaaaataataaaaaaagaaaggaaggaaggaagaatttgattggagttcttcccacttcttggtgatatttctgttttctctcactaaactcatatgttaacaagataataattaagatccatatcttgggccgggcgcggtggctcacgcctgtaatcccagcactttgggaggccgaggcgggcggatcacgargtcaggagatcaagaccatcctggctaaaacggtgaaaccccgtctctactaaaaatacaaaaaattagccgggcgtagtggcgggcgcctgtagtcccagctacttgggaggctgaggcaggagaatggcgtgaacccgggaggcggagcttgcagtgagccgagatcccgccactgcactccagcctgggcgacagagcaagactccgtctcaaaaaaaaaaaaaaagatccatatcttgttctaagaggatatcaacacaagtaagcaaaacacaaaccaaaatacccatttccgaaagcatgtttctcaatgacaattcctgcatgggcttccaagaccgatctttcacatgatcaaaatcatagtcattgctttgtatgttgctaaataaatagagccaataagaagga

SEQ ID NO: 801080 - DNA, 630 bp, Homo sapiens
gaaaattttttaaaagtaaaaaaaataataaaaaaagaaaggaaggaaggaagaatttgattggagttcttcccacttcttggtgatatttctgttttctctcactaaactcatatgttaacaagataataattaagatccatatcttgggccgggcgcggtggctcacgcctgtaatcccagcactttgggaggccgaggcgggcggatcacgaggtcaggagatcaagaccatcctggctaaaacggtgaaaccccgtctctactaaaaatacaaaaaattagccgggcgtagtggcgggcgcctgtagtcccagctacttgggaggctgaggcaggagaatggcgtgaacccgggaggcggagcttgcagtgagccgagatcccgccactgcactccagcctgggcgacagagcragactccgtctcaaaaaaaaaaaaaaagatccatatcttgttctaagaggatatcaacacaagtaagcaaaacacaaaccaaaatacccatttccgaaagcatgtttctcaatgacaattcctgcatgggcttccaagaccgatctttcacatgatcaaaatcatagtcattgctttgtatgttgctaaataaatagagccaataagaagga

SEQ ID NO: 801081 - DNA, 418 bp, Homo sapiens
cagaaatggcctttgacaaaattcaacaactcttcatgctaaaaactctcaataaattagatattgatgggatgtatctcaaaataataagagctatctatgacaaacccacagccaatatcataccaaatgggcacmaactgtaagcattccctttgaaaactggcagaagacagggatgccctctctcaccactcctattcaacatagtgctggaagttctggccagggcaatcaggcaggagaaggaaataaagggtactcaattaggaaaagaggaagtcaaattgtccctgtttgcagacgacatgaatgtatatctagaaagccccatcgtctcagcccaaaatctccttaagctgataagcaacttcagcaaagtctcaggatataaaatcaatgtgcaaaaatcacaagc

SEQ ID NO: 801082 - DNA, 584 bp, Homo sapiens
ccccatgcatggacagggcatccacgctatccgtgtcacccagggcaggtcactgagcctcccgcagccccatttccccgagtcgcccaggcgtggtggagcatacgcagcacaattgttttaggaattggatgactcacgaagctcctggcaagtagtaggtccggcacgtggttgtggcacttttttctaactgcctgggttccatctcaactcccagagagtgaacatcccgcctctcatctcaggactggtgctctccgaagcattaagtaggaaattgagagtagcagcaagtgagacttagggggcgggtgggcagaaatcagtgatggcatagccgtgccaccatgaccaccctggccattgtctcctgtgtctcctgcycctccaggtctccaaagtctcatgccttgttctccagcagctgctctctgtgatgggagggtgggcacagggtgggtttgtgggtgattctgctgaagccagggagatgacgtctgttcaaggaccctcagcctagagcccaggctccaggaagctctgcgggggacagctggcgtcactgggcatctcctttctgt

SEQ ID NO: 801083 - DNA, 586 bp, Homo sapiens
ttttataaatgtaggagctccagtgtcatgtgcatacttatgtagaattattatattttgttgaattaattatttaattattatgtaatgactttctttgttttttttttttactattgttgctttaaagtctactttatctgatataactacacctgcttgcttttggtttccatttgcatygaatatctttctccacccccttaccttgaatctatgagaatctttgtatgttaggtgagtttcttgaagacagcagatatttgatttgtgattttttttaaatcaactctgccattctgtatcttttaagtggagtatatagaccatttacagccaatgtcaattatgagacatgaagtggagttccagtcagtatgttgttacctagaaattttaggtttttttttttttcactttgttattgctttataggctctataagttttatactttcaagacgtctattctgatgcagctcaaccttttgtttcaagatttagcatttcttgtaggactggtctgatagggacagattccctcagcatttgcttgtctgaggaagacattatttctctttcattta

SEQ ID NO: 801084 - DNA, 612 bp, Homo sapiens
aaatataaaacaacatttgagaattgccaagactttataatgaaaatggtcaatgttcccaacattcctaccaattctgaagtccgaagtaatcctcctcatttcattcatcagatctgttccaagactttttacattctccaaatcgtctttcattgagtaagacaggtccataaggtagtagaggtcaatgggatagtcttcagctctcttgaattttaatgtaaatgtctgtggctcccctaattagacaagagattagaaaatgaaacttgcctgttggcaatcaaacgcaaacgagaaaaaccaaataaatgtggtttacacggtaaacacaataaaataaaacatgttgtcataatttttacaaaaacctgggaattccataagtaactcaatgggtatgtattcagtttcattcaacaaatacttwaaacaccaggccttcaggatgcaaagataaaaaagatattcccaatccacagtggacaaaacagacaaaaagtcagtttataagagaagaaaacaaatagaacaccataaattagtctggagagggcaaggcagaacacgtgatagggtacaactgactttttagacactgaagttgtg

SEQ ID NO: 801085 - DNA, 617 bp, Homo sapiens
tagtactagaattcctaagcaaagcaattaggcaagaagaaataaaaggtatgcaaactggaaaggaaaaagtaaaattatgtctgctggaagacaacatgacttacgcgtaggacaccctaaacattacacatatacacmtgtacaagctgtcagaactaacaaatcagttcagcaaagttgcaagatacaaaaacaacacacacaaaaatcagttgtgtttttatacactaataataaacaatcccaaaaggaaattcagaaatcaattccatttgcaatagcatcaaaaagaataaaatatttaggccaaagaggtgaaaaacttgtacagggaaaactataaaacatcactgaaagaaactaaagaagaggtaaggaaaagatatcctgacggatggaaagacttaagatgtcaatatatctgacactaatctacagattcaatgcaatccttaccaaaattccagtggcatttttgcagaaatataaaaatttattctacaattcatattgaatctcaagggaccctgaatagccaaaacaatcttgaaaaagaagaaacacttcctgattgcaaaacttgttacaaagctatagtaatcaaaacagtgtga

SEQ ID NO: 801086 - DNA, 656 bp, Homo sapiens
ttttactacttctgtgaagtgtaattttaggttgtttatttgattcttcttttatgatgtagacatttaatgctataaactttcctcttaggactacttttgccgcatcccattaagtttttgtatgttacgtttttattttcttttgtctgtagatatatttaaatttccctttttaatttccttcttgacacagtagttcttcaggagcatattgtttaatgtttcaaagatttattaagtttctttttattctcctgttactgatatctagttgatatttgatgtaattttgatcttacattgttaagacctcttttgtggcctaacataygatctgttctggagaatgttctttgtgcacttgagaagaatgtgtatcctgttactgttggatagaacattgtgtaattgtctgataaatatgctttatcttatgtgtagttcaattccagtgtttatttattttctatctggatgacctgtctcttgttcaataataggggatattgaaattttgttgcagtctatgtatcctttcagtttttttaaatgtttgctttatatatttagatgctttgatgttgtgtgcatatatactgtgtgagtattaaaaataattacaaatgtcatctattgtatggctaacatatttt

SEQ ID NO: 801087 - DNA, 562 bp, Homo sapiens
gaaggaaaattaagcttaaaggtcttggaaaaagcattattataaccaccagttagaagatcaattggagagtaattgtaaaagtgccatgaagatatgaggcatgtaagaagcaacataaaaagggtggccaaacagcagttttaaaacaaaactgaatttactgcttactggcaaaggaagaatgcaccacacagatgtaagttcagaaagttgttcaaagcagaaattaaaggggttaaaagatatatagagaaaaacmccaaatagggcacggtcctgattaatggatgtggattatgagctgggttgtaaactcttatttgtatctggttacctttagagttagcatcactagtatggagaaacaaggtttcaaataggtctggaaagaagagagaaaattttcagagagcctagggtcatgcttgtatacccttgctcaaagatttccaagattttaacttaacaggtgtcattatcatgtacagtcttacttagaagcaagaaataaagctaaggaatttatagaggtaccttccattgataagatttaagggaa

SEQ ID NO: 801088 - DNA, 562 bp, Homo sapiens
gaaggaaaattaagcttaaaggtcttggaaaaagcattattataaccaccagttagaagatcaattggagagtaattgtaaaagtgccatgaagatatgaggcatgtaagaagcaacataaaaagggtggccaaacagcagttttaaaacaaaactgaatttactgcttactggcaaaggaagaatgcaccacacagatgtaagttcagaaagttgttcaaagcagaaattaaaggggttaaaagatatatagagaaaaacaccaaatagggcacggtcctgattaatggatgtggattatgagctgggttgtaaactyttatttgtatctggttacctttagagttagcatcactagtatggagaaacaaggtttcaaataggtctggaaagaagagagaaaattttcagagagcctagggtcatgcttgtatacccttgctcaaagatttccaagattttaacttaacaggtgtcattatcatgtacagtcttacttagaagcaagaaataaagctaaggaatttatagaggtaccttccattgataagatttaagggaa

SEQ ID NO: 801089 - DNA, 586 bp, Homo sapiens
tattttcaaaataataaaacattttaaaaattatacatattgtacattttcaaaacctgcacatgagtaaaaccatggcaatattgccctaaagctacctaactgtgactatggaaattgctactttgcattcagtgttgtgggatttgcacgggcagtactcattttccctcatacttcggattgaccacagttgttacggcactcttataaataggattttcaccctamaacaaaaaaaaagtgagaaaaattatcagttaccctactaaaattatgtagaataatttttataaatcaagactaaaagttgcaatcatcttaagaagtcatttctattttatttgtccagatatcacagttgttttaaaggcattaataatggtttatataaaaatagaaaatggaagctttgctttacaagtctaatgatgccccgttatctggtgctatttcattcttgagtccttcctccactggaggcttgatttaagaatgttctccatggcacagaatgtgctgtcatcgtggattctctcctctgaactagtttgcaatgcctgccttaatgaagcatgaactccgc

SEQ ID NO: 801090 - DNA, 607 bp, Homo sapiens
cacaaagccgggcacctagaaggccatcagtaaggatgcctcctcccttcctgggtgtctggggcttccaaagaagcccaggaagtcttgcctgaaccagtctccttccctggccagtcaagacaggttccagccggaggtcctttggtcacccatgctggcagctcagaagaaaggccaggaaacaggtatggtgctcagacaggggcctcagcaagttcccaccctgcttttttatttttatttttttcatacaaattcttttttcaattgagtccaggtctcgctatgttgcccaggctggtctcgaactcctgagctccagygatcctcccacctaggcctcccaaagatctgcttagagcaggaaaccctggatagagaaaagaaggtccccagaccaccacacccccaccttttaagagagaactcctgggaaaccccttgaagaagtggtcttctttagggactgagaacacagactttggagtcaattggacctaggttaaaattccaatcctgtcacttccaggctgtgtgattttaagtgacttgcttaacctctctgagtaagtaagtgtaatgcaaacagtaattcccacctcac

SEQ ID NO: 801091 - DNA, 583 bp, Homo sapiens
ccacttgtcttgcttcaccaggtgagtcactctctgggtctctctgggctcccgtttctccagggatggtcattccttgcatagttgcctgcgcagaggagttggatgagtgacacacgcaagtgagagcatcacaagtgctccaggtgcaggttgtcattaggcacactctctgtttttgtgttctttttttttttgagatggagtctcgctctgtcgcccagctggagtgcagtggtgtgacctcggctccgtctcccaggctcaagcaattctcctgcctcagcctcctgggtagatgggattacaggctcccaccaccacgcctggctaatttttgtatttttaatagagacagggtttcaccatattggccaggctggtctkgaactcctgaccttgtgatccacccgcctcggcctcccaaagttctgggatcacaggcatgagccacctcaccctggccattaggctcatttttaagggatcattagtataatgactgagttaatgggtgggggcagggaaccattagccctgctgatgaaggagggtatctacagctgtctccttctccctgcac

SEQ ID NO: 801092 - DNA, 547 bp, Homo sapiens
actggtccttttttgaatttgtattacaattaatgaaattgcttttttcttgccatgtattagcccaatcttacagattgtttcccacttgtaggtaatagagaagaggaaacctaaccaatgactgtggaataatatggaagaagatggaaaaaacttgtttaatgggtaagaaataaaaactgtaataaaacattattaatgaaagctatttataataatagtattatgtgtggctgaggttggcatactatgagggtaattgatcagttactgttttgtctaactccattctgaactttcaccgcttgctttcatcttaaccttgtgaattttttagtaccacgaattaacttaagctaagaggggacacagccrtatttgaagttaaaatgggacctaaagaccagcaaccatactgaaacaagtctagggtaggtcttgaaacttggtggtaagatagagatcgtatctgtcatgacctgtcaagagtaattatctaccccttctttttctccaaatatgtcagttgctatgatgtttgtcc

SEQ ID NO: 801093 - DNA, 625 bp, Homo sapiens
cttaattataacaatgagaatattatattacccctatcttcaataacaattaaagatattcactgaaaattaagcgatgtggcaagttaaactaaaaatctggccggaaagacactaggcaagtttccccaaaaggccatcataatgtacagcagaatgaaaggtataatggccaccctccaaattgcataatcacagcaaatgtgggctactcttattagcccaataacccggggaaggcactcacaggaagcccaarctaacatacaagcctctcattgtcatggtaggcacacacatacctgactgagcagctgcccatgaaatatggtattcaccacctttaagacctgtttggtgagcttcctctgggagaaggggatgaggatccggcgtgtggtgccctcagactcgagttcctgctgcaccttgtgcagcagctcgcagagaaattcctgcgcgtcctgttggtcgtagccgcggaaggcagggatcaggctccacactgagtggagcatggcgaagggcgacactagggcccacttcccggaccacatgactcggaagagggtgtgcagttcacggcagagggaaatgtgctttgaactcggctccttgttctgga

SEQ ID NO: 801094 - DNA, 658 bp, Homo sapiens
gtcttgttgtatttttcttcaatttaaactggatattgagttgtacatctttattgttttagtagtacaaaatcacctaagcttagctcttaatattcaaagtagagaggaagatgggaatctggagcaaagaaatacacacttgagaaaaagaagacaagggaaaatttcctctaatcacggatctatctccaagcaggctactcagtctctggggttgtagagagacagacctaatacacacagttcttctatcccatcctgtcttctagagtggtagtacagagagagccagcaggttggaggtagaagatttaaaaataaaaaatttttaaaaaaagagttggaggtttctttaacttcctggcagcatctccaaagagtggtacccttctgtgrtcctgttctctgtggaagcagtctctgtctttagacctggttggttgactttcatgagatcacagaactggaagtgcccagcacacaatgctgaaaaatttttatgaagctctcagctgctatagtgtagcccttgatggaaatgggtttttgttgggtatgtggaaaacccatcagtcttaccatcccagcactgccagttcttactgtctaacatatgtgaaggagaaggaaaatggtacttctcaaaacataacta

SEQ ID NO: 801095 - DNA, 576 bp, Homo sapiens
aggtcactcccactctaatactgcgcttttccaacagtcttagcaaatggcacaccaggagattatatcccgcacatggctcacagggacccatgcccgtggagtctcgctcattgctagcacagtagtctgagatcaaactgcaaggcagcagcgaggctgggggaggggtgaccgccattgctgaggcttgggtaggtaaacaaagcaggctggaagcttgaactgggtggaacccaccacagctaaaggaagcctgcctgcctctgtaggctccaaccctgggggcagggcatagctgaacaaaaggcagcagaaacctctgcrgatttaaatgtccctgtctgacagctttgaagagagtagtggttctccaagcacagagtttgagacctaagaacagacagactgcctcctcaagtgggtccctgatccccgagtagcctaactgggaggcaccccctagtaggggcagagtgacacctcacacggctgggtatccctctgagacgaagcttccagagaaacaatgaggcagctacatttcctgttcagcaatattcaccgttctgcagc

SEQ ID NO: 801096 - DNA, 596 bp, Homo sapiens
ccacacttgacatgtgagcctctactcataggcccatgcaacctgcttttttttatttttaagttaatttgtaatttttaattgtaatgggttgaatagcagtccccaaaaagatatgtccatgtcctaattctcagaacctatgaatgacaccttatttggaaaaaggctccttgcagatataattaagtattttgagaggaaaagatcatcctgaattacccaggtgtgtcctaaatccagtgacaagtgtccttgtaagagacatactaggaagatttgacacagacagaggaggaggaggcaatgtgaagatggaggcakaggttagagcaatgccaaggaatgcctggaaccaccagaggctgaaagaggcagggacctgaatctcccgtagcagcgtgacactgatgacactttaattttggacttttgatctccaaaactttgagagtcaatgtctgttcttttaaaccaccaagtatgtggcaatttgttatggcagcctcaggaatctaatacattgaaagagacaatttatcacatcatctaaaactgcaccagtgtactaaccagcagccaaatttaaaatgtag

SEQ ID NO: 801097 - DNA, 596 bp, Homo sapiens
ccacacttgacatgtgagcctctactcataggcccatgcaacctgcttttttttatttttaagttaatttgtaatttttaattgtaatgggttgaatagcagtccccaaaaagatatgtccatgtcctaattctcagaacctatgaatgacaccttatttggaaaaaggctccttgcagatataattaagtattttgagaggaaaagatcatcctgaattacccaggtgtgtcctaaatccagtgacaagtgtccttgtaagagacatactaggaagatttgacacagacagaggaggaggaggcaatgtgaagatggaggcataggttagagcaatgccaaggaatgcctggaaccaccagaggctgaaagaggcagggacctgaatctcccgtagcagcgtgacactgatgacactttaattktggacttttgatctccaaaactttgagagtcaatgtctgttcttttaaaccaccaagtatgtggcaatttgttatggcagcctcaggaatctaatacattgaaagagacaatttatcacatcatctaaaactgcaccagtgtactaaccagcagccaaatttaaaatgtag

SEQ ID NO: 801098 - DNA, 644 bp, Homo sapiens
ttcattgattatctaagatgtgatcaaattatgcagtaagagaagcaggaagtcagagatgagtaactagctaggccctgtcttagaggattttatggtctaatagaggacacaggtccattatttgacctccttgtgcttcctcatccataaagcagatagcactactgcttgctttacatggttatcctgaagattcatatgaagggcaactcatcaagattataagattataaagatatagctgttgtctgtatctgtctatctagttgtccatctagttatttgrtttggccttgatttttaaaaactagctgcagctatattgatatgtgctttggaaataaaacaacatggaggaaacacagcatgttaacgatgcctatatttgggttttggcataatgaagaatttgtttttctttttatatgtttcagtatttcctaaaatttctttcatgatcatctgtgaccaaaaaaaaaaaaaaaccaatatacattttaaaagataatttacccagcgaattggtttaactggggaattctagctccaaaatttgttttatttgctaaagactttgaccaaattgtgtagataattatgcaaacattaatgtttactttgttttcatagctaccaccttg

SEQ ID NO: 801099 - DNA, 535 bp, Homo sapiens
tgttgcaggggagctgagtaagatagagcaatgtgacaagcaggtcttataagactaggtagaagatcaatactctgagaaggagatatggaggggtcagaacggtctgtggaaaaagtactgaatgtggtccagttgaagaggaagrgaatcaatatattaaaaaagacccaaatgaaaaaaagaaataaagctgtctttatttgcagatagcataattttctatggagggacaccaaagagtctattaaaaaaaactttctagaacaaataagtgagtaaagcaagatgcaatatcaatgtacaaacgtctattgtttttctatgttccagaaatgaacaattggaacttgaaatttcttttcttcaacttttattttatctggggttcatgcactggatgtgcaggtttgttacacaggtaaatgtgtgctatggtggtttgctgcacagatcaatccatcacctaggtattaagccaagcatccattagctattttttctgatgctctccctcgcctgacccccaccctgg

SEQ ID NO: 801100 - DNA, 516 bp, Homo sapiens
acatttcctgtactgagttaaatttaactgaactccatgcctggatgatttctgccagtggcgcccgtgggattgtgtgaccccctctggctttgctatctgcaggtttcttgatcacacgtggtatccatttatcagtcctggctggagccagtttcccagagcaaacagatkcaggatgatccgcactatcagcagaggttcaccaaagttctaattagaccaggaaggtttattaatacaattagctttagggaggacagttacaacaggaagcaaattccttgcagcatccggtcctctcttagccatgttagttgattaagaggaaagcctcagacttcaaaatcaagagcaaaattgaaaatgtctgggaatttaactttccagtaactgtaaagttttaaccgtgaactttctattaactgtaaagtataatttaactttctaataactgtagaacaagaaaggattctagaaaaatcttgggaaaaattattaatgaggggcctgagg

SEQ ID NO: 801101 - DNA, 583 bp, Homo sapiens
gcttatagggtttctactgagaggtctgctgttggtctgatgcgcttccctttgtaggtgacctggcctttctctctggctgctcttaacattttttcctacattttgaccttgaagaatctgaaaattatgtgtcttggggttgatcttcttgtggggtatcttaacggtgttctctgtatttcctgaatttgcatgttggcctatcttgctaggttggggaagttctcctggatgatatcctgaagtgtgttttccagcttcttttcattctccttgtccctgtcacgtactccattcaatcgtaggttcagtctttctrcatagtcccatatctcttggaggctttgtttgttccttttcattattttttctctaatcttgtctgcatgccttatttcagcaaggtggtcttcaaactctgatatcctttcttctgcttgattgatttggctattgatacttgtgcatgcttcacaaagttcttgtgctgtatttttcagctccatcaggtcatttatgttcctctctaaactggttttctagttagcagctcctctaaccttttatcaaggttcttagc

SEQ ID NO: 801102 - DNA, 491 bp, Homo sapiens
atagagaaaaaagttggagggcaaagaattgtgtgcaaggaactttcattcaatttacatgcaacatatattaatcaactcacaaacttagaagatcaagaaatgtaacttcattttttaaccagatctgatatgagctggtgtgcaccagcacaagcataacagatgttaaatattaaaatgttccattatcagtcaagagcattcctctccactgtcactgccaccctaagccctactccacaaagccccagctctctgaatgtcccagaaatttgagagatgatgtcaggcacagcaggcagctgccaagatttttcagccaacctctgatctgattcgttggtrggggtgttacacagttactaaatatttaatattacccttgcctttatttaaatttaatttcaatttttagttcccattccactgagtggcagaaacagtgtcagttacgccaaggtccccatctgctttcccaggggggttta

SEQ ID NO: 801103 - DNA, 656 bp, Homo sapiens
acttagtcaaactctaatatcctatctttttctgatttttcaggcatttccccccaatacaatataaattctactgtatcagactcaattcttagtaaagcttaatctcattgaaaatattaagaggatttaaaataaatcttaaggtaggaagcttaaaagtgctttatatctataaagtcatatctataaagtcacctaagaacttcaaagtttctaagaaggcttgctaaaagaagtctttaaaacatatgccgagataacatagcatttattttgatacacagatttacttttatctcttagaactttttcaaatcacctgagcagttgagtattgctcttttataactaatcccttccckcacccacacatcctgatgtatatacagaccagtgcacacatagaaaacaactggcttgtgtattgatttaatgatgagatattttgggggataaaacaggtatggttaaacacatctactaagaccactaatattccgactctatttcattttgaataaagtgaagaagatcctagttaaagtgtaagaacaagtaggaaattcaatttacacaggatggagtggaagaggtaattgtacttgaatggaatagaatgttaattatgaaaagaaaaattactgcattttgaa

SEQ ID NO: 801104 - DNA, 626 bp, Homo sapiens
tccctaatttttaatattttgaggttttctaccactcagcttccagagtctcagtagcatctctagtagtgggctcatctgatattatgtacatatctttcccctatccccttcttctgactaaaaaataaggaaatatttaaaaagtctatggcccccttagggcagagattgtatcttattcctgtttccctctttatatcccatggatttagtactggcagctgtagatacttcacaatgaaaaggctgttcctaaatggaagtcattttgtagaagtgtgatcttctttcaaacatggttactatgctgggaaatactgaaatttcttaccatttaaaccaattacttgtatgattctcttatctgtcacggttaaccttygttcataatgttgaaaggtttaaatgccctatgaaaggtgatatggtttggctgtgtccccacgcaaatctcatcttgaattgtagttctcacaatctccacacatcatggaggggggatccagttggaggtaattgaatcataggggtggttgcctccatgctgttctcatgatagtgagtgagttctcaagagatctgatggttttataaggggcttttccccgtttgcacttctccat

SEQ ID NO: 801105 - DNA, 540 bp, Homo sapiens
cagtccttttcatcacatcatagacagatactttccaagaacttgaatggggatccacaacctctcctctggctgcgcattaatctgctcgttcaaacattcctcggggggtaggctggcctggccaactgcccaaaacggtaatacttagagtgggatgacttcttgtgaacagtaagtccagttcaggagggcagggccatctaataacatctgagcctaaaatagagatgagctccctaaatgcccatctggatctggagtatgtgaattgccataaaatattaactctggaaggtgtgggcatataaccattgggargctaccatgagtaaaggtctgctgggtgcctggtgatggatgataaataggaggcattttattgttcatccttgtctttaaggagctgcctttaaagatctatctcagagtcagtctttgcctttaagaagctgcctttctagctgggaagataaaacataaccacatgaatagcagagagcttccacatgaagaggaagtaaattatgaatttaacag

SEQ ID NO: 801106 - DNA, 647 bp, Homo sapiens
aaaaaaaagaaattgtcttacaacagtgcaattataatattaagagattaacattagtatcatatgattatttatgcagtatattacatattatctgttatataatctgtgagatttattcaaatttgtctttatatagacttcattcagactttatacagtaatgttctgctagacaaagtaaacccaaggtcatgtattatatttggttaccatatatcttaaatatcttttaatttgaatcttcttaagtctttgtctttcatgacattgacactcttgaagagcaaggccatttattcagtagactgtttctcagtttgggtttgtctggtgttttctcgggattaaatttagtttakgcacgtttggcaggaatattatagatgtgatgctgaattcttactgcattatatcaggaagcacaaactatcaattagtctcattatcaaatatattaaacttgattaagatggtgtctgccaggtttttcccctatgaagttactattttatcctttgcagttagtatgtatcctgggggtagatactttgacactatgtaaatattctgttattcccttaaattttgtcctctagttttagcatcctttgctaattcttgcctaaactaactgtcataatagt

SEQ ID NO: 801107 - DNA, 647 bp, Homo sapiens
aaaaaaaagaaattgtcttacaacagtgcaattataatattaagagattaacattagtatcatatgattatttatgcagtatattacatattatctgttatataatctgtgagatttattcaaatttgtctttatatagacttcattcagactttatacagtaatgttctgctagacaaagtaaacccaaggtcatgtattatatttggttaccatatatcttaaatatcttttaatttgaatcttcttaagtctttgtctttcatgacattgacactcttgaagagcaaggccatttattcagtagactgtttctcagtttgggtttgtctggtgttttctcgggattaaatttagtttatgcacgtttggcaggaatattatagatgtgatgctgaattcttactgcattatatcaggaagcacaaactatcaattagtctcattatcaaatatattaaacttgattaaratggtgtctgccaggtttttcccctatgaagttactattttatcctttgcagttagtatgtatcctgggggtagatactttgacactatgtaaatattctgttattcccttaaattttgtcctctagttttagcatcctttgctaattcttgcctaaactaactgtcataatagt

SEQ ID NO: 801108 - DNA, 619 bp, Homo sapiens
tgtttgaagcagagattcgtgggggtccaggctgagagtgaaacgctgaaccaggagactccagccttgcccattgaaacatttcttggctgacccttatgtgagaccctctagataccccctagggttctcaggctttgttgaatgtagcttgaaagcaattgatttatatcagttattttcaaagtgtgctacccagacctgcaacatctgcatcacctggtactttagaaatgcacattttcagccctaacccacacccactgagtcagaaatcctgggactagaacccagaaatctatgttttaacaaatcttgatgcacactgaagtttgggtgtcactgcttttataacagtccatgtttttcaaagtgccctttcctatacccactccttatatttttataacacccatggtgtgcagatgctatctcttctttgtagwtgggagaccctaagaaggttataattaacattcaggttttctcacttttgaattgggacactttttatcatatcatttaaccatgatgacctgtctcttctgtcatggaaattctgtatttcaaatgctgggatgtatttttaaatgatacttggcaattatgtaaggagagc

SEQ ID NO: 801109 - DNA, 512 bp, Homo sapiens
actggaaaaatggctgtgtattcctttctttcttcatgtggtaggtttctatgttggatgctggtggtatagaaatgaattaaattgaatgtgcattcactagctaggacttgaacttgttcattggtgttcctactgactaacactgcacctggtgcatagtccttactcaatagtttttttttaattaaatgacttaatgtctcatcatgctttcagctgagcaatggagatgattatgtaaacaattttaygaagtgcactgcaacaagtgctataacttaggtgtcttcttctcgatttaattttgtttcttcagctattctattattgtttatctaaattttattttcttcccttttaatttttcctgttatggcatcattgtttttggttcttaggcttttccaacacttgcagtgtctccttattttgtatcatgtaaaaatttcattaacttggtgtttatttcctctgcctgacattgaataaaaataatttcatacaacagt

SEQ ID NO: 801110 - DNA, 512 bp, Homo sapiens
actggaaaaatggctgtgtattcctttctttcttcatgtggtaggtttctatgttggatgctggtggtatagaaatgaattaaattgaatgtgcattcactagctaggacttgaacttgttcattggtgttcctactgactaacactgcacctggtgcatagtccttactcaatagtttttttttaattaaatgacttaatgtctcatcatgctttcagctgagcaatggagatgattatgtaaacaattttatgaagtgcactgcaacaagtgctataacttaggtgtcttcttctcgatttaattttgtttcttcagctattctrttattgtttatctaaattttattttcttcccttttaatttttcctgttatggcatcattgtttttggttcttaggcttttccaacacttgcagtgtctccttattttgtatcatgtaaaaatttcattaacttggtgtttatttcctctgcctgacattgaataaaaataatttcatacaacagt

SEQ ID NO: 801111 - DNA, 659 bp, Homo sapiens
acacaagttgggcttgggatcccattgggccccaaatgagatgaaatttgtttaagctctattttccacctgaagcatgatttgttcctgcttcagtattgctcttttctgccaatgccaaaacagtacttgaatgcctgtcctttctccagctacgattatgtgacagttctggctaaggggatttcagaagcacctgaagaggactgtacttccagaataaagctggcaaagtcatgtgaagaaaatatttgactttgtcttttgcctcactttctttttcctgcctaaatgcagatgcagtgcacagaagtacagatccctgatcaacctccttctaaactgctcattacatgaaacwcatgggaaagggtagcctctgacatgtcatttcaccagtttggtagatttttctcataatacgattcacatacataactgaatagatagaccacacaagttatatcagtccctactctgagcagtgaccatacaacccaatcaatttggaatggtgtttttttttttccttttacccagtccacagttatgccactgtaagatgaaagttatattgaaaagtgctaggagaaaaatgtactatacagattgttactgcaagtctttctttaggtttatcttatccttcatgtatccaa

SEQ ID NO: 801112 - DNA, 659 bp, Homo sapiens
acacaagttgggcttgggatcccattgggccccaaatgagatgaaatttgtttaagctctattttccacctgaagcatgatttgttcctgcttcagtattgctcttttctgccaatgccaaaacagtacttgaatgcctgtcctttctccagctacgattatgtgacagttctggctaaggggatttcagaagcacctgaagaggactgtacttccagaataaagctggcaaagtcatgtgaagaaaatatttgactttgtcttttgcctcactttctttttcctgcctaaatgcagatgcagtgcacagaagtacagatccctgatcaacctccttctaaactgctcattacatgaaacacatgggaaagggtagcctctgacatgtcatttcaccagtttggtagatttttctcataataygattcacatacataactgaatagatagaccacacaagttatatcagtccctactctgagcagtgaccatacaacccaatcaatttggaatggtgtttttttttttccttttacccagtccacagttatgccactgtaagatgaaagttatattgaaaagtgctaggagaaaaatgtactatacagattgttactgcaagtctttctttaggtttatcttatccttcatgtatccaa

SEQ ID NO: 801113 - DNA, 621 bp, Homo sapiens
tgtggaaagggaagggaagggcaagaaggaccttgtattgtggtttgaatgccagtttagccacagtaacgtagaatatcaggtaaatttctaaggtttttgattctaatccttggctgccagtcatcatctctggacttgmctggggccagaggaagcttgctgccctgaaggggagaacacaaacatagctggcttcattacctgctaatcatagagctctagggccttgagtgaacataagtagtagttaggtagtggttacagcgagccttgtgtgacacctagtgctgtgctggcttcagttctgaatcagcttaatcctattggtggtggccacaggggcgcttgcatcatgacaccaccagttggaggcagctcagcacagaaagagagactgtttgtttgggagaaagtaatggaaaagaaaaataatttcttcctaataatcaagagaattcttctgggtcttatccaacaccaagaaggctgttcctccatgagtctgcaaaagccacactgttactgagcttggggcccaagtccctttgaatgcctgggaagccttctcaagaagaaaagacacaaaacagcccagactgtgaagactacaataaatac

SEQ ID NO: 801114 - DNA, 601 bp, Homo sapiens
ccgagagtgcaggaatgcctgggtctggagatgtgcctgggcacttacagctgtgcccaagagcatgttctcctgctccgccaactcggtagagtgtggggctcccactgggatcacctattcccagcccctgctggctctgcggagcgtgcagcccaggcggtacctcccscactgcaactggagtccttgcagcagccactccagatgggccaccactgccatcagaactggaggtcattatgttaaatgaaatgagctaggcacagaaagacgaacatcgcatgttctcacttacttgcgggattcaaaaatcgaaacagttgaattcgtgaacatagagagtagaagaatggttaccagaggctgggaagggtaatgggaaagtgggaaggagatgggattgttaactggtacagaaaaaaaagaatcagtaggacctagtattatttgatatcacaaaagggtggctctagtcaataataatttaactatacattctaaaataactaaaagaatataattggattgtttataacacaaagaataaattcttaagtggaaggataccctgttttacatgactttatattatgcaatg

SEQ ID NO: 801115 - DNA, 614 bp, Homo sapiens
gccttctctctcactaccatcagtgccttagattcaggaagacctggaaccaaattcccactccaccgttacctacagtgggcctttgggcaaatcagtgaaccttcctgatttagtatcctcagaagttcaaagtgagacaatgtaaaaatgtccatggggtagagctgctgggatgacaaaagggaaaaaaatacataaagcttctgacatgcrgtaagcattccatgtgtattgattcctggacaatgcacactgttatttatttatttatttatttttacctgagaattggattagattagtgctggagttctcagtgggcaggaaagagaaggagatggtatcctcttaaagaaaacctcaaatttctctctctacctcactccatccccgccttggcctggatctcctccttttttctgtcccttcttcctacttgcctttttgcctcttgagattccagttgctgttcctttctctgctttcccatctccatttggtcttcagtctttgaggtctgggttctaccctgaccactccactacaactgctctgccaagatccgcaaggatgtcatgcttacaaaagccaagtcctttcttcatattgat

SEQ ID NO: 801116 - DNA, 639 bp, Homo sapiens
aaaccaccatggcacatgtatacctatgtaagaaacctgcatgttttggacatgtattccagaacttacagtatatatatatatatatatttaaaaaaaaatacagggtcttccctaaatccccaaaaggaaaaaagttagcttatgatgtctattaacaaataaacttgagttttggagctttagattgcagtctaaataccaaacaacaactatgcttattagaatgacttaatggagtgagagtattagtcaaaatgtctcttctttgatacaaacatggcagcattccgtattttatktcactgagaagttattccaggacatacttcactcacacacacacatacacagggacataaatgattctagtgaactaattaaacttgcagaattattttctttttttaacttttaattttgaactaatttgggacttgcagagaagtttcagaaatagcacaaagaattcccatatccctctcacctggtttctcccaattaaaacatcttatgtaaccattgtacaatgttcagaccaggaaattaacactggtatagtgctactcactaaactatagaccttgctggagtatcacccatttttccaataatgccctttttctgtttcgggatcca

SEQ ID NO: 801117 - DNA, 571 bp, Homo sapiens
tattgtgccaccatatgccaagcacagctgcaggccttgaacgtacagtagtgagcaaagtgcctccctcgtggagtctgggtgtgagtgagggtgccattttacattagggggtcaggaaaagtctctctgatatggtcacatatgatcaggaacctcagtgagtcccctcctgtcaccytggagcctgtggaggcctgctgggaacaggacttcttaaaaggaaatacgtctggaaggctgtggtctaagtccttttttgctggctataagcggagcctccagaaccaaagggagcatacagctcttcttaaaattgaaggtggttatgcccaagatgaaactgaattctatttgggcaagagatgtgcttgtgtatacaaagcaaagagcaacacaatgattcctggcagcaaaccaaacaaaagcagagtaatctggggaaaggtaacccgggcccacaggaacagtggcatggttgctgccaagttccatagcaatcttcctgctaaggccggcccggcgcggtggttcacacctgtaatcccagcactttgggaggccaaagcgg

SEQ ID NO: 801118 - DNA, 633 bp, Homo sapiens
aaactttttgcccatttttatctcttggtttttgacaagctagaaaccattctgagtatctttgtggcgatagggggcagaccaacccagataaactgaaaagcttcattttagtcagtatttcaatcgtcttcttgacaaaccttttatcatagatgctacagctaagttttcattcacttattttcctttaatattccctgatggaaggacagtgaggagtaaaataaccacaagatgaacaacagccaagagcagaggcaaaaattctggataatctacccccagtgaaaaggaaacaacccaaaaactatatctctggcatattattgctttacaattcaacactaacttaaggcaagtataaataaacattatagagctgtgagcttttatatatatcagtttttcctgacttccaagatgatttacgttgtctttgccatactacatgtgaagtatatgagcacagcrttttaggtttgcttgtttgttttctgaatttttctgtgtagaaccacctcctcatagaattgttcctgatatgtagcatgcacctagaacatttttatggtattgatggttgccagaaaagttagtaagcctggtatccaatctagctctaaacaacaa

SEQ ID NO: 801119 - DNA, 600 bp, Homo sapiens
gcacccccttagaggtcaaactcatacagtgtggccaaggacctcaggtgaaaaacaaaacaaacaaaactaaaaaaacagacatccaccaaaaatcaccttgttagcatgagctatccatgctaacagatgttagagtggccaaaggtccaaagtatacaaaacactcattggacaggatgatccaagggtttataasgtatctctaaggagccagtcaagaccagtcctttctttggaatgtacataaagtttgaacacccaaagcctgctgagttaaccctttactaaatatcatgtttcaagactttgttaaagcttgtcaggaaaaaagttgtccaagacttgaaaagtacaaaaaagattactacatatcctctcagtagagagctagatattgtctagcagacattttgggaattatctgattctacagaggtatacagcttatactgccttgtagaaaattaatagaaatgtaaattattatccatagtaatataaacaattattttccactgcaataaaatgattttttccagtagatatgtaattgatctatgccttgtagaaaagatacactaacattatatgtttgag

SEQ ID NO: 801120 - DNA, 499 bp, Homo sapiens
tccactcatggccagggcaacaaaaattaagggaacagccataacctgttctgtagcacagtcctggctggccccacccatctttctgtgactctaggcagtgcaggcttcagacttggtgtggtctcttggcctctctgactgagatctatccctagacttgcaaatcctgttgctcccagcgactccctaatggctcagactcctggaaattcctgatacaaagcctgccagatctgaccccaggagagtgctcaccctttctacctactcattcaataatcaatcmatccagcatccatgctgtgtcatggagtgctccagaaagttgtgggagtatagctagacccagttcctgcctcaggagctccgtcttagaagggcggcagctacatgcagaaatgcctccacagggaagtcacagagaaacaatcacccctggtgttagcaggaaggaggtgactgctaagatgaggcctgaggaacaaggcctgacatg

SEQ ID NO: 801121 - DNA, 628 bp, Homo sapiens
acccaggaggcggaggttgcagtgagccgagatagcgccattgcacttcagcctgggcaacgagcgaaaatctgtctcaaaaacaaacaaacaaaaaaacttgtgattcatgggaggaagttcaaatagcaacattaacgagagtttggaagaagttgattccaaccctcatggatatctttgaggggttcaaggcttcaggggaggaagtaactgcagatgtggtggaaatagcaacagaacagaattagaagtagagcctgaagacrggactgaatgactgcaatctcatgacaaaacttgaacagataagttgcttcttatggatcagcaaagaaagtgttttcttgagacggaaattactggtgtagatactgtgaatattgttgaagtgacaacaaaggatttagattattaaataaacttaataaagtggcagcagggtttgagaggattgagtccaattgcgaaagaagttccattgttcgtaaaaaacagcatcacatgttactgaaattattttgtgaaaggaaaagtcaatcaatgtggcaaacttcattgctgtcttttttaattgccacagccacttcagccttcaacaaccaccactgttgtcagtcagcagcca

SEQ ID NO: 801122 - DNA, 583 bp, Homo sapiens
aactgatgacaacttaactctgatagcataaacaaactgagaaacaagcaaaaagaaaactaataaaaactctacattttaactttcttttttttttttttttttgagatagagttttgctgttgttgcctaggctggagtgcaatggtgcaattttggctcactgcaacctccacctcctgggttcaagaggttctcctgtctcagcctccgaagtagctgggattacatgcatgcaccaccatgcccagttaattttgtatttttagtagagacagggtttcactatgttggtcaggcyggtctcaaactcctgacctcaggtgattcacccactttgacctcccaaagtgctgggattataggtgagagccaccatgcctggccctacactttaactttgtctgcccacggttttactttttcttgtttttacttatatctttttgtactgtctggttttgtttttgcttttttttttttccttaagatggagtcttgctctgttgcccagtctagagtgtggtggcagcacgatctggactcactgcaacctccgcctcacaggttcaagcaattctcc

SEQ ID NO: 801123 - DNA, 588 bp, Homo sapiens
agacaaaaagaattagataatcatgtcacataccaagaggagaacatttataatacccatgagagtaaaacctttcagggctgaatggaaggttactcagtctccctgaaacataaagtcctgacaagaggaaacaaaaaagctagcaaaaccaacctggatagctgtatcatgctaaggtccccgggtgaagactataattgttccagtggatgaaatytacatcatatagtagcaatgaatagcatctattaaatacttcatatctgccagacatgctactaaatactgtatctgatttacccctgcaaacagtaccatgaggcaggaactattatcttcatattagaaacagagaaaccaaggtttagaaaagatatgaaacttaaccagatactaaatggcatagcaggaactctgttatccaagtctatactcgtttccatttcgtacatttcctttcttaggaatgtgaccccacttttatcaataatcaatgtattagttagctattgctccataacaaattgccacaaacttagtggcttaaaaaatgctaacttattatctgtaggacatgaatctggg

SEQ ID NO: 801124 - DNA, 588 bp, Homo sapiens
agacaaaaagaattagataatcatgtcacataccaagaggagaacatttataatacccatgagagtaaaacctttcagggctgaatggaaggttactcagtctccctgaaacataaagtcctgacaagaggaaacaaaaaagctagcaaaaccaacctggatagctgtatcatgctaaggtccccgggtgaagactataattgttccagtggatgaaatctacatcatatagtagcaatgaatagcatctattaaatacttcatatctgccagacatgctactaaatactgtatctgatttacccctgcaaacagtaccatgaggcaggaactattatyttcatattagaaacagagaaaccaaggtttagaaaagatatgaaacttaaccagatactaaatggcatagcaggaactctgttatccaagtctatactcgtttccatttcgtacatttcctttcttaggaatgtgaccccacttttatcaataatcaatgtattagttagctattgctccataacaaattgccacaaacttagtggcttaaaaaatgctaacttattatctgtaggacatgaatctggg

SEQ ID NO: 801125 - DNA, 507 bp, Homo sapiens
tccattctccccgtcactttcaggtacaccagtcagatgtagatttggtcttttcacatagtcccatatttcttggaggctttgttcgtttctttttattcttttttctctaaacttctcttctcacttcatttcattcatttcgtcttccatcactgataccctttcttccagttgatygcatcagctactgaggcttctgcatttgtcaggtagctctcgtgccttggttttcagctccatctggtcctttaaggacttctctgcaatggttattctagttatccatttgtctaattttttttcaaagcttttaacttctttgctgttggttcaaatttcctcctgtagctcggagtagtttgatcatctgaagccttcttctctcaactcgtcaaagtcattctctgtccagctttgttccattgctggtgaggagctgcgttcctttggaggaggagaggcgctctgcttttagagttttcagtttttctgctttgttttttt

SEQ ID NO: 801126 - DNA, 507 bp, Homo sapiens
tccattctccccgtcactttcaggtacaccagtcagatgtagatttggtcttttcacatagtcccatatttcttggaggctttgttcgtttctttttattcttttttctctaaacttctcttctcacttcatttcattcatttcgtcttccatcactgataccctttcttccagttgattgcatcagctactgaggcttctgcatttgtcaggtagctctcgtgccttggttttcagctccatctggtcctttaaggacttctctgcaatggttattctagttatccatttgtctaattttttttcaaagcttttaacttctttgctgttggttcaaatttcctcctgtagctcggagtagtttgatcrtctgaagccttcttctctcaactcgtcaaagtcattctctgtccagctttgttccattgctggtgaggagctgcgttcctttggaggaggagaggcgctctgcttttagagttttcagtttttctgctttgttttttt

SEQ ID NO: 801127 - DNA, 644 bp, Homo sapiens
ttttcactcgtttagcaatcataaaaataggccgggtgtggtggttcacgcctgtaataccagaagtttgggaggccaagacgggtggatcatgaggtcaggagttcaagaccagcctggccaagatgctgaaaccccgtctctactaaaaatacaaaaattagccaggcgtggtggcatgtgcctgtaatcacagctactcaggaggctgaggcaggagaattgcccgagcctgggcggcagaggttgcagtaagctgaaatcatgccattgcacaccagcctgggcaacagagcaagactctgtctcaggaaaaaataaaaaataaaaaattatatatatatatatatatatatatatatatatatatgtttaatagtatatgtagaaagttttactttgctgtttagaattatgatttggggatataaggtagacatcaagttatagtttccatatccagacaacaaattaaacatcatttattaaaattgatcagtartttagttttcactaatgtccttacataacattaacagctacgaaagtgtggcaatgttattttacctaaaaagtatatgtcagtatctgaaatggtgggttacatattaaattaaacactatatacttgctaataaaccata

SEQ ID NO: 801128 - DNA, 672 bp, Homo sapiens
cttcctactctttcttctcctcatgtggaaggaagggttgtcttttggagccttgagctgtgcaacctgggtttaggggaggggtgatgccagaactcccttggctgccccagctggtgtttcagtaggtcacatgactccaacycacctcagcagtcaactgtctctgtgcctagttcagccctagaactcgcctatgagagttgcagtccttatggtctagactgtcatttaagtttacttagagatggagagtactttggctttcagtggtgtggtttgtgggcactcaagttcagaccactggaattggcaattcccctctgattaggactggtttaaatgttccctctgtgggcaggcatcagctgagtttggtatggttttcctttctgctctaacaggacagcactgccagggatagagtaggggtggtgtcagtgattcagggttgtcttttctatctcatcagtgcctctttcagtgatatgaaattaaaaccaggtactgtgagtgctcacctgatttttggttcttatgaatgtgttttgttttcttctgtgtaatagttattaacttggtgtccttgtggggaggggagacaatcagtggaactttcctttttgccatcttgctccacctctctccaaaaactttaaatttttatttaaa

SEQ ID NO: 801129 - DNA, 602 bp, Homo sapiens
cagaaggtcagttagtatttgacaggggcttggaaaagcaggaatgaggagtgattgctaatgggtgggggtttctttgtagaaattaaagtactaatttgataatgatgatgaccatacaactcttcagacttattaaaatcsatccaatcctacactttaaaagggtgaatttaatggtatttgaattatatctcaatttttaaatttctgaagaactctatggaaggacataagggctcttatttgggatagaaaaattcagtattgaaaagatgtcaaccttccccaaattagcccataaattccatgtagatctaatcaaaatcttaatagaactttttttggcttaacaaaatgattctaaatttcactggaaaaataaatgtgaaagaatcgttttaaagtctggaaaatataaaatttagggtggtaaggttatagacttagctctcctggatattatatgtgtattttgaaatgtttgaaacatgtttaaaatcacattcagtgaggtttttttcaatttttaatttttaaaataattcaagtatacagttggccctctacatccattagttccacatccatagattccaacc

SEQ ID NO: 801130 - DNA, 584 bp, Homo sapiens
tccatcaacaatagactggattaagaaaatgtggcacatatactccatggagtactatgcagccataaaaaattatgcattcatgtcctttgtagggacatggatgaagctggaaaccattattctcaacaaactatcccaaggacaaaaaaccaaacaccgcatgttctcactcataggtgggaattgaacaatgagaacacttggacaaaggaaggggaacatcacacacaggggcctgtcgtggggtgtggggatgggggagggatagcattaggagatataccaaatgtaaatgacgagttaatgkgtgcagcacaccagcatggcacatgtatacatatgtaacaaacctgcacattgtgcacatgtaccctagaacttaaaatataataaaaaataaataaataaataaataaaagaaggaaggagtctgggtcctcagataattacatgaagagccaccttccaaccttgcactgtactgtgacatgaacaagaaattaacctttagtgttaagccacagagactcagaggttgtttattaagcatgtagttagccctgactaatagaatcacaaac

SEQ ID NO: 801131 - DNA, 565 bp, Homo sapiens
tcaaactttctcaaaaaattaaggagaaggtaatacttccaaattcatgctacaagactgcattactctgatgccaaaaccagacaaggacacagcaacaacaacaaaaatctacagaccaatatccctgacgaacatagatgcaaaaatcctcaacaaaatactagcaaattttaatccaagaacacatcaaaaatatactacattatgatcccataagatttatcacaggaactaaaatatagtttgacatagtgcaagtcaataaatgagatatatcaacaaaaggaagaacaaaaaccatataattatctcaatagatgcaaaacccrcttaataaaattaaacaactcttcatgataaaactctcaacaaattaggcatagaacaaacatatctcagcattataaggaccatatatgacaaacacacagctaacattatactgaatgagaaaaaactaaaaagtgaaacatgactaagatgccaacttttaccattcatattcaacatagtagtagaagtcctagccagagccatcaggcaagagaaaaaaatgaaaaat

SEQ ID NO: 801132 - DNA, 666 bp, Homo sapiens
ccatcattctatcgactcaactaatttggggtcacagagaatgtgttaagactagtgaatacccttggcatgtgtgtcttgatcaactgcctttcctgtagtgtgtcttctaatcagataggatagatgtgagatgaaatagtaacacacgagagataatttaaatctatgaatgttggtgttgatagatgtgcttcaagttcttataaaaatacaacatacaacyccaactgtggcaaaaagggttgaaaataatcaaccctattcaggtggctgcctagactcctaggaataatgaaatattgaaaactcattaatctctgcttttggcagattaggcattcagattagctttgctaagagaaagactacattgtcaagtgtatgcagtctccaccatggtcattttgttcatggactcatttaaaaagccatatggaggtggagcaagatagtggaatagaaggctatgctgatcatcctccacccccagccaggacaccaagttaacaatcgtctacacagaaaaaacaaaaaacaaaacaaacaaacaaacaaaaaaaacactttcataagaaccaatattcaggtgagcactcatagtacctggtttcaacttcacatccctgaaagaggtactaaagagatagaaaaaacagtctagaa

SEQ ID NO: 801133 - DNA, 695 bp, Homo sapiens
ctgggtttaaataaatagcaaaataataatatatgcatatagttagaatcataggctacttatattttaatcctcctttcacgtaacattgtagcataagtgtttccccacattattgtagattcccaagtctcatttttaataactgttatgttttttcaaggacggtaatttaccaaagttttttcctgtagttggtcacttatttccagtgttcctgggttgtaaatgtttcagggaacatatggaccaaattattaatcgtcaaagcactcacatttcctgtttatacagccttgtgcaacaggggttgcagaatgaggagctggcatcatcgctgtccttgaggaatttgctatttatggggtggagagagagggtgatacatattaaacaatgatggggcaatgcaacagcacatataaatacagggaaaggyggtggtgctagaaaagactttaaacatacaaataaaaatattttaaatggtagtgccaaccgtaagtcaaagcgcgcgtgtgtgtgtgtgttccagagaaaaaatgtgtgtgtgtatgtgtgtgtgttttccagagaaaaatcgagagacattgacttgtcgtaaacgttagtaacaatagagccactgaaaagacattcctgaccacactttgtggcgttgcgaggaactggatccaagatgcgctgtttgtgtt

SEQ ID NO: 801134 - DNA, 695 bp, Homo sapiens
ctgggtttaaataaatagcaaaataataatatatgcatatagttagaatcataggctacttatattttaatcctcctttcacgtaacattgtagcataagtgtttccccacattattgtagattcccaagtctcatttttaataactgttatgttttttcaaggacggtaatttaccaaagttttttcctgtagttggtcacttatttccagtgttcctgggttgtaaatgtttcagggaacatatggaccaaattattaatcgtcaaagcactcacatttcctgtttatacagccttgtgcaacaggggttgcagaatgaggagctggcatcatcgctgtccttgaggaatttgctatttatggggtggagagagagggtgatacatattaaacaatgatggggcaatgcaacagcacatataaatacagggaaaggtggtggtgctagaaaagactttaaacatacaaataaaaatattttaaatggtagtgccaaccgtaagtcaaagcgcgygtgtgtgtgtgtgttccagagaaaaaatgtgtgtgtgtatgtgtgtgtgttttccagagaaaaatcgagagacattgacttgtcgtaaacgttagtaacaatagagccactgaaaagacattcctgaccacactttgtggcgttgcgaggaactggatccaagatgcgctgtttgtgtt

SEQ ID NO: 801135 - DNA, 612 bp, Homo sapiens
gggtatgaaagaggatgtcaagtatgattgatatggtttggatctgtgtcctcaccaaatctcacatcgaattataatctccagtgttggaggtggggccaggtgggaggcgactggatcacggaggcggaagtctcacgagtggtttagcaccatcctcttggtgctgttctcgtgatagagttctcatgagatctggttgtttaaaagtgtgtagcacctatgtccctctctcttgctcctcctctggtcatgtaagatgagcctgcttccctttagccttccgccatgattgtaagtttcctgaggccttccaagaagctgagcagatgctagcatcatgcttcctgtrtagcctgtagaaccatcatctacttaaacctctcttctttataaattacccagtctcaggtatttctttatagcagaatgagaatggactaatacagaaaattggtaccaggaatggggcattgctataaagatacccaaatatgtggaagcagctttggaactgggtaacagacacacagacagaggttggaagaatgtggagagatcagaaaaagataggaagatgagggaaaatttggaattttctagataattatt

SEQ ID NO: 801136 - DNA, 385 bp, Homo sapiens
cctttcccaagggatccatgctgttcatagctttactgcgcacagaggaaggggaagtacctgcaatgtggactcttgggcactggctctgggctcacacatccgcatggtcccctagttgaaatggagtcaagtgggggtgtggtgacttggtgagatcttttagcccctctgtrtgctcaatcctgagtccacttactggttatttccccagctccagggtgaacacttggtatcctcagtaagagatgggatctcctcatggctcatgttgacagaggaatcacgaagagccatggaatctgggctctaaggcaagggtggactagtgtgagagccccagccttcatcttcacatccaagtagcaaggcaaaagcaagtgca

SEQ ID NO: 801137 - DNA, 385 bp, Homo sapiens
cctttcccaagggatccatgctgttcatagctttactgcgcacagaggaaggggaagtacctgcaatgtggactcttgggcactggctctgggctcacacatccgcatggtcccctagttgaaatggagtcaagtgggggtgtggtgacttggtgagatcttttagcccctctgtgygctcaatcctgagtccacttactggttatttccccagctccagggtgaacacttggtatcctcagtaagagatgggatctcctcatggctcatgttgacagaggaatcacgaagagccatggaatctgggctctaaggcaagggtggactagtgtgagagccccagccttcatcttcacatccaagtagcaaggcaaaagcaagtgca

SEQ ID NO: 801138 - DNA, 562 bp, Homo sapiens
caaaccaaggaaaaatttagtggcttaaaactacttattattatctttcacatttctgtggattgactaggctcaactgggtgattcttgcttagggtttcccatatgctagtggtcagatagcaactgggattgrtttcatatgaaggctcaactatgttggatgacccacatggcagccatagatactgctggctgggagcccagctggagatgcaacagaaggtcctcacttggtctctccatgtggcttgagcttctcccagaatggaggctgccttctgagaagagtcatcctgctttttattcatcaagcaaatcactgggactaggattcaaggggcagggaattcaacttcatctcctgatgtgaggggcagcatgctcatccagggagagaagcaatggatggtggcatctgtggagactctgtcccagataggatggaggaaaggtcattagatgagtggagcccaaggaactgagaggctggggtgttgaaaggaatatctacatggatattgaatacaacaaaaatgaagagaagcagtgatgttggtga

SEQ ID NO: 801139 - DNA, 494 bp, Homo sapiens
acgatcagcttgctaattgaggtctttggtgctattaactgatcatgagtttcttggaatgaaaatcaaagggctgcccggtaaagcctacttgatttgtaaactgatatcaatacataaatgaataaatgaaagtctagatctggaaagcagaatgagcaagggagcgtgggagggacccagggggaggtaattgaattatggggctggtctttcccgtgctattctagtgatagtgactaagtcttatgagatatgatgggcttatcagggctttccactttggcttcttcctcattttctcttgctgcygccatgtaagaagtaccatgtttctgaggcctccccagccatatggaactgtaagtccaattaaacctctttttcttctcagtctcaggcatgccttagtcagcagcatgaaaacggacgaatacacttccccttcaccttccaccacgattgtaagtttcctgaggcctctccagccatgc

SEQ ID NO: 801140 - DNA, 522 bp, Homo sapiens
tcagtgctatgtgtgtggcatattctgaggctcagcagcagctgggcagctgctctagtgcctgagtccagcccacctgccccaggagagctgagaagtccacctactgcaaagagaggctctaagccaccatgacaagcagcatggtgcctccatcccacagccaagacagtggccactgtaatgctccccacccccrgcccaggagccagggatgctctggtgttcccgacagtcctccccaacccaggtggatgggggtagggggtctccccacctgacactctggctccagtctgggctaacgtgagagatcccaacttgggtttgcagagcaccagaggaggtttccagctggaggccagagtcagtgctgacttggcaggggtgtacaaagcgggcctcggtatgtgacgcagtcacggggtgaagtggtctctcgctgttcccaccataggctgccttggcaggcagggcccttcagaggtcatcttgtctgtctcctagcctccacaggagccc

SEQ ID NO: 801141 - DNA, 459 bp, Homo sapiens
ggcagattgagtgtctgctgagggcctgcttcctggctcatagaggccatcttctcgctgtgtcctcacatggcagaaggggcaagagaactcttttaaaagggcaccaatcctattgatgagggcttccaccctcatgacctaattgcctcccaaaggctccacttccaatgccatcacactgggkgttaggtttcagcataatctggggaggagcacagtctgtagcagccgcctccacactcttcacccatcactgtaataaaatcactgagaagaggtcaggcagtgccgtgttctctgggtctagagcctctccaggatcaggtccctcagcaggcaggcagctgctccctgtctgcctcctcggtgccaaatctgggctgccagtgtgtctttcattgccacagccccagaactaacatgaggctcagcatacaggaaggtagacagatacta

SEQ ID NO: 801142 - DNA, 459 bp, Homo sapiens
ggcagattgagtgtctgctgagggcctgcttcctggctcatagaggccatcttctcgctgtgtcctcacatggcagaaggggcaagagaactcttttaaaagggcaccaatcctattgatgagggcttccaccctcatgacctaattgcctcccaaaggctccacttccaatgccatcacactgggggttaggtttcagcataatctggggaggagcacagtctgtagcagccgcctccacactcttcacccatcactgtaataaaatcactragaagaggtcaggcagtgccgtgttctctgggtctagagcctctccaggatcaggtccctcagcaggcaggcagctgctccctgtctgcctcctcggtgccaaatctgggctgccagtgtgtctttcattgccacagccccagaactaacatgaggctcagcatacaggaaggtagacagatacta

SEQ ID NO: 801143 - DNA, 604 bp, Homo sapiens
gctgcgatcagttgttttctgtgtccccagcatcttcacagcaggcttatacacaattgaggctctgtggtgttgggtgtgggtaggtgggtttcagtgctgtctgacattcccttaggggaggttaggttgcatgcactgaggtatacttccaagggtcagcaagcttgggatctttaaatcagaaaatgagtttctttgagagcctaccctttccttgctcaccactgagagtgactgtttttgagaacacacttgcagagtactgagtctgacttggagccctctctttataaatgggactgatcacagactctaggactcagatctaataaagccttacaggccamtgagtttgaaaccctagaggtgtgggacatggcagagttggaaccagcaccatggtctgactcttggtgcagggcactgcccatctgtaggtttgcatagatctttagtctcctggcctctttcctgtatacctcacctcctaagggaggccaggctaaagggaagactaggattggctgtacatggacagggagagctgtctagcctggctgactggcagagttcaagttcagtaggaggaaagccatttagg

SEQ ID NO: 801144 - DNA, 562 bp, Homo sapiens
  misc_feature 332, 342: n = A,T,C or G
catcctctatttttgcaacaatttgagaattggcgttagttctttacaggtttggtagtaaagccatccagtcctggtcttccctttactgaaaaaccttttattactgattcaatctcattatccattattgttcttttcaggttttttatttcttccttgttcaatcttggtaggttgtgtttgcccaagaacttattcatattctttaggttttgcagtttgttagccacatcattggtcattgtttgtaatagttgtcagtgatctttatattgttgtggtaacagttgtaaggtcttccggtttctgattgtgtttgtttgggtctnctctcttttnttcttagtctagccagcagtttatgaattttgtttatcttttcaaaagccaactttttgtttagttgattctytttttcttttttttgcccctattcattttgttctgctctgatctttatcttttctttacttttactaattttgagtctggtttgctcttgcttttctagtttattgaggtgcataattggttatttgaaatctttctacttttctgg

SEQ ID NO: 801145 - DNA, 614 bp, Homo sapiens
cccctaactccctcattgtccaagagtcaaatgtacatacatacatacatagaaaaatactgaaataaaatatacatgtttactgaatcctgtctcaagagagagctagaagtcccggattaggacactatcccatctgggaagctgattccacacggccgtgggttgacatagaagggaaggctgtttatcactatggggtgcagaaggtctggtgatggagcaagggggggcatctcactcacaaayccagaaggcacttaggaccactcagggacaagtgcactgccaggttttctcccagggccagaggatgctaaaggcattcctacgtgacactcctcttccaaagtacagtggaaagaaccctggtcttagagaagaccaggtggaattttgccactttagagctgttggattcaaataatgcttgtaaagaagaaatctgaatttaaactgagcaagaaaatgttacagccaatggttgtcaggattctgatggtgggggctatctcattcagttgcttctctgctttaataggaaatgaaccctcttttgaagcagcaaatctgaggtgtcagggaatgcctttctctgggtgccttggaatgtc

SEQ ID NO: 801146 - DNA, 639 bp, Homo sapiens
  misc_feature 443: n = A,T,C or G
tgtaaatcccttgaaactgctaattatacatatttgcatcccaaagtatcttatacagcgggaggtgctctgtaccttggttcaaccttatcaatattcactgaacaagtgaatgaatgaatgcataaaggagaaccctggtaacaaatttgtctagcctaattgtggtaagttttggctgataggtatagaagagtggcgggggggagaggtgcaaaatttgagaagaaacatagattgtgagctcattgaaaaggtatcatttcaaagtttcctttgaatctccatagggatatgatgaaagagaaaatatttttaagggcaactgygaatttcaattactggagcagaggatcagagaagagttgcatccaatctattgtctttcaaaagaatttctttgctgacattctgcctggaagtaggaaacgtaaaaatattgnattaatttgtagtgtgtaattttgtattaatagccaagggcacgataatggaatcaatgacatgcaaataggatgaaaatagaatgaacataattgaactgaagcctatatactttttcacaaatttgaatgaaaatgaatcccaaaacaaaagtgaccactttgtaatctgtcctcatactcagatcacccctga

SEQ ID NO: 801147 - DNA, 626 bp, Homo sapiens
tgccagccagaggggccctggactaaactgcaatccctggcccattttagttcttcagagaattctcacccagctctatgtatgctgaccagcatgcccatcagcttcattgcccctttcagtgcggtggccttggctgccgcatctgtgagggcatttccttttacatggtcagtctctcttttgatgtcctctacartgaattatagtcacttttttttttttttggcagcaaagcagcattctaacaaactcaaaacctgagtgatgttgtctagaaaagcccttggtggtcaggagtccctacccattccaaattgcagcataagtatgaaacgctaaaatatcacacttggaatcggtgtaaatgttaacttttaaatcccttcccaactgcagggctgtagtaagttcagttaactcagctttttgagctgaggttgaggccagcaaggcttgtgccttctcttgtgctgactaataatagcatatctagccctcctgttttcctgatgcataaaacaacttgcatttgttaacccctcttccttgggatggggaaggggctcatctctcttcagtctggcctgctaaaataaatttgtttcataacctgtgacatggtt

SEQ ID NO: 801148 - DNA, 626 bp, Homo sapiens
tgccagccagaggggccctggactaaactgcaatccctggcccattttagttcttcagagaattctcacccagctctatgtatgctgaccagcatgcccatcagcttcattgcccctttcagtgcggtggccttggctgccgcatctgtgagggcatttccttttacatggtcagtctctcttttgatgtcctctacaatgaattayagtcacttttttttttttttggcagcaaagcagcattctaacaaactcaaaacctgagtgatgttgtctagaaaagcccttggtggtcaggagtccctacccattccaaattgcagcataagtatgaaacgctaaaatatcacacttggaatcggtgtaaatgttaacttttaaatcccttcccaactgcagggctgtagtaagttcagttaactcagctttttgagctgaggttgaggccagcaaggcttgtgccttctcttgtgctgactaataatagcatatctagccctcctgttttcctgatgcataaaacaacttgcatttgttaacccctcttccttgggatggggaaggggctcatctctcttcagtctggcctgctaaaataaatttgtttcataacctgtgacatggtt

SEQ ID NO: 801149 - DNA, 659 bp, Homo sapiens
ttggctattcatgctctgcagtttcagaagcagcgactgtccatgagggtggcagatcctttgtgcaagggacctccaggaagagggccaatgagcagcttcagtggggagcaggatcatgaaagctcatctcagggatgcaggtggagcctgcctggggtaactcttgaccctaataaccctcttcctttgtcataatggccttaattcataaaaatacctctcctggaggtgatcatgacagtggtgatgtkggaacgctcatgaaagggcctgccatcctctgcagacccagtgagttattctcctaagtattcataatttccagagagcctaattccttcagatctcactctcagcatgcatgctgctcagggatggaatgctgatgtgcagattttaccgtgcctggcctctgtgcacatttaggaactgtgtgactagaaccctcctcccctctccccatcatggctgttgacagcagcagcattcgctcatgaaacatttgcagaatgcttgctaggaggacaggggtagaaaacccttgctctgagggggttaagttccagtcaacaatattaactgagcactcactgtgtcctgaatattgcactagacaatggggcaaaagtgactaagatgctgtcaaggtcataacc

SEQ ID NO: 801150 - DNA, 519 bp, Homo sapiens
acagtctgatgagaatacagggattcctaaagggagaagggttagaaaaatagctcggtgcatttaaaggtggtcttaaattctaggatcagtttcaactttcctttttcttttccatgaccaccagtcaagaacagtttgaactttcataagcaatcaggagttacttaaatttgggaatagtgaaaagtaaaaataagcatttactttttttttttttttgtaaagacagggtctcactatgttgcccaggctagtttccaactcctggcctcgagcaattctcccaccttggcctcccaaagtgttaggactacaggcatgaaccamcactcctagccaagaattaacatttatagttttaaaataacagctaatatttacattttgtaaggaagagtttgtttctttggaccctcacgatagccctgtggaaaaagtcgtgttgaatctggaggcaggtataggatgaattgcagtgttgcccaactgttcatgtctcctgctcctgtggagccc

SEQ ID NO: 801151 - DNA, 478 bp, Homo sapiens
gcttcaaaagcctcctccatgttgccttccctgggccttcctcctccttccctctgcgggaagggctctcccttctctttcccctctataagcacccatttgtgctatacatgtaaattatatcacaatgctttgtaccatggatgtttgtgcctakgtttcattctcttccttgaggtcagggacattgtctgtgatgttagatcccttatagtacccagacagggctttgtctataataggaaaatggataaacaagaaaatggaggactttgggcatgaggattcactgacctggttctccttgtctttctgtcttgcatgtcatgaacctcactgcatccactctgtttttagatctcactgagttcatgtgttcaaccatacaccttattgggtgctcttacggacactgtgatgtgctatccagctcctgggggtgctgctgacagcaagccctcagcccttatcacacaat

SEQ ID NO: 801152 - DNA, 617 bp, Homo sapiens
taattacctcttaaaggtcccacctcttaacactatcacaatggcaatcaaattttaacatgagttttggagtggactttcaaaccgtagtaatagccaagcagatacgacaattatgaacctgtttttgagataaataataactagttctcaagtaagacgacttgtcacacatcatttatcctaactttatcatggtaattgagggaccacctatgttggttttatccagaggagaaacaagtttcttatctctttccaacaggacatagttttgcaaggcactaartactcactaaagttaggctagtaggggaggaaaaaaaataatgttctctaaactgggacttcctataacaaaagatagattaacaagagaaatacagacagaagcttattaaaatgtatacctcacatacacatgggagaaaacccagagaaatcagtaaatctctggagtatatctcaaagaaagcatttaaatttcaggcttagatgccatctttctctggaaggaaagatgtggaggagggcctggtttagatgaaatgacctgggaaagcatcttaaacaaaggtaaggtttgttttgcagatttaagtagataccttctccat

SEQ ID NO: 801153 - DNA, 540 bp, Homo sapiens
ttggaattaagcaaatagcgttaagcagatgatgatatgtattaggccgttcttgcactgctataaagaaattcctgagactgggtaatttataaagaaaagaagtttaattggctcacgattctgcaggctttacaggaagcatggtgctggaatctgcctggcttctggtgaagcctcagggagctttcagtcatgatggacggcgaggggaaacagkcatgtcatatgtcgaaagcaggagcaagagggagagagagtggtggggaggtgccacataagtttaaacgaccagatctcatgtgaactcagggcctgagagctcacttatcaccaaggggatgacccaagccatttataagggatctgccccaatgacccacacacctcccaccaggcacctcctccaatataatataattggggattatatttcaacatgagatttgggtgaagacaaatatctaaactttatcatgatgatatcttttgaatcctttcttcatgcacttcactgtactaaataactttgcatgcatg

SEQ ID NO: 801154 - DNA, 628 bp, Homo sapiens
actgcgtggtgtatctcttgtttagaaaggggcttatttttcagtattttgatgttgttctattgaggccacatggtcccatgggttgctggggaaaaagagatggcttgaatctctccttaacggggtatcatcccagtggcagtctcaaggaagagaagagatgggtccttatagtaaatgagaactgagaggagtctgggcaggctcctgaatagaggtggaaaggtggtttctgcctcaattcctaaccagggagtgtgtgtggcctaaaatgccattacccattataatgtgtgtctcaaataatgttctattcatttacttttatcattatttttttgagacagggtctcactctgttgcccaggctggagtgcagtggtgcaaacattggctcactgcagcctaaacctcctgggctcatgcaatccttccacctcagcctcctgagtagctgggaccacaggyggacctccacacctggctaatttttaaatttttttgtagagatgggggtctcaccatattgcccaggttggttttaaactcctgggctcaagcagtcctcccatcttggcctctcaaagtgctggggttacaggtgtgagccaccatgcccagcctt

SEQ ID NO: 801155 - DNA, 418 bp, Homo sapiens
agccaatttcttataataaaactccttctatatatacaaatcctattggttctatttctctggggaactctgactaattcagggctcttattaataatagtactgtgagcatttttttttttttccagacagagtctcactttgttgcataggctggagtacaatggtgtgaccttggctcactgcaacctccgcttcccgggttcaagcaatcctcccacctcagcctcctgagtagctgggactacaggwgcatgccagcacacctggctaatttttatatttttagcagaaatggtttttcaccaggttggccaggttggtctcagactcctgacctcagatgatccacccaacttggcctcccagagtgctgggattacaggtgtgagccaccacgtccagccctgtgagcatt

SEQ ID NO: 801156 - DNA, 609 bp, Homo sapiens
caaaggcctcaggtggtaacggccaaagggtcaccgcctccgcggggcgctgcgtccacaacacgggtggggaaacggtcaaggtttgcggcgtttgggttcatgactgcaaaaacaccgtccactacgggccaagccgagtgccatgccctgcacctacgtctaagctcacagcagcccgcactggggcgaggaatcctgaggaggctcgccccggtctctgggactgggctctcgccgcgctgcctcagggcgcaagttccacgcgcttcgccgggcgcagaaaagcmccccccgctccgcggcgcccaggccgcctcccccgacaacgcacctccgcagcgacgcctgcgcctggaaggggctcggcatctagaccgcagccccgcgcgggccacactccccagcaagtgcctcggcagcgtcccaggagactcgccgcgctcgccggagctggacgtggcgccgaggtccgcgtcgccgcccgcaccccggtgctcacctgtaccacgcagcagcccagggcatccttctgagcgtcaggagggacgatgttccggggcgtgtggcccgggtgcaagaaatgaaccatggcaaccccggcggcgg

SEQ ID NO: 801157 - DNA, 609 bp, Homo sapiens
caaaggcctcaggtggtaacggccaaagggtcaccgcctccgcggggcgctgcgtccacaacacgggtggggaaacggtcaaggtttgcggcgtttgggttcatgactgcaaaaacaccgtccactacgggccaagccgagtgccatgccctgcacctacgtctaagctcacagcagcccgcactggggcgaggaatcctgaggaggctcgccccggtctctgggactgggctctcgccgcgctgcctcagggcgcaagttccacgcgcttcgccgggcgcagaaaagcaccccccgctccgcggcgcccaggccgcctcccccgacaacgcacctccgcrgcgacgcctgcgcctggaaggggctcggcatctagaccgcagccccgcgcgggccacactccccagcaagtgcctcggcagcgtcccaggagactcgccgcgctcgccggagctggacgtggcgccgaggtccgcgtcgccgcccgcaccccggtgctcacctgtaccacgcagcagcccagggcatccttctgagcgtcaggagggacgatgttccggggcgtgtggcccgggtgcaagaaatgaaccatggcaaccccggcggcgg

SEQ ID NO: 801158 - DNA, 639 bp, Homo sapiens
atctcttactgatccattcaatggatccataaatgagtggattattatttaaagaatgcagaacatcatccattggtttttttggaaaaatatcggctccatgagttatacggccctttcaaattttgactttatataattccaaaaactcacctttgttaatattacctgtcccgttaaaaaacaaaaaaaaawtttttaatagtaggaagttatgaagcagatacaagttttctaaaattctaattttcacttgaaagcccaaattttatctttagaaacaaacacttcagttgttttccttgacgtgactgctgacttcattcgtttttgagaaaatgtctgtaaaatactcaagtatgaattaaccatcacatgtgtgccatttgttctctcaagtaaaatgtgtttcatgaaaaaaagtagttggtttagctcataatgcaaatcatctcttaagggttgagattcaataaaattaaccaatgttttctgcttcatcgaggtcttaagtgaaaattagtgcttttctttttcctgtgaatgcataagtgcatgacaaatatagtgactactagtttggtgccagtgctttgattcatgctaagatgccaacagtgttacccaccattacttttg

SEQ ID NO: 801159 - DNA, 512 bp, Homo sapiens
atcctcttttttcaaaagaaaccaaggcgtgcagcaattaagaagttgctcaaaatcacacctttagtaggtaccaatgtcagggcttgaatccagacaatctgacccagagcctatgcccagcagcagtacattacaccactcatcagcatgagagacatatcctgtgttcctttccctctcattctcctctcaaacatgtaaacaacgaatgcacagaaaggaaaggtcagtctttgaggtccrtgtgtacataaacaggccttatcggcttggccagtgtcctgcccatagcactgagctgacagctacagttgagcaacactgcgtttaaaaaaaaaaaaaaagttagaatgtggctacatacagaagaaatataaatgtggtcttgatagtgttcatcccagtttaggaaatcattgatatgcattcacataagaaaagcctagagagcccattatgagttttgcaactaggatgtgatactgagtgcaggaaattactggactggt

SEQ ID NO: 801160 - DNA, 652 bp, Homo sapiens
atttgggaggtgttatagaaccctgttttgtcatcttatcagagttacttttctgtttccttctcattttggtagactatttcttcaaatttttcttgaatttatatttgattgaactgtatttttttaatttaaatttctctttttcttctctctctctctctctctttttttttgagatggagtktcgctcttgttgcccaggctggagtgcaatggtgcaatctcagctcaccgcaacctccaccttccaggttcaagtgatcctcctgcctcagcctcttgagtagctgggattacaggcatgcgccatcatgcctggctaattttgtatttttagtaaagacagggtttttccatgttggtcaagctggtcatgaactcccgacctcaggtgatctgcccccttagcctcccaaagtgctgggattacaggcatcagccactgtgcccggccttcttctctctcttaaggatcagaccatagtgtttattttagcctaatttggttcttgtgcttgtaggggtgaagactttgtataagttcattagttatagagagtctttttatgctgtctttctctgatgctggtatattcttggtttgtcagtgagttgcctgtctctgacggagttgaaatggcagggatct

SEQ ID NO: 801161 - DNA, 626 bp, Homo sapiens
tattatcttggcaaagtgattttatacaaaaatatctttattaataaagagaatgtgttcaacacagctttttgaaagcatcactgccacagatagaaataatacagaaggcataggaataaagtccaaggtaacagaacaatgatctttgtgtgagaaaaatattaaataggaaggcatataatcttaaatatactcaaaatataaaatgcatctggaaactcagaaaaccctatctgaaaaatacaaagaagcatctggaaactctggatccaaggcagagaaaggaaggaattgtgcaaaattcagggccttctgtgctgttctatattgaggaaaagcaggggataaagggacataaaaagctctgtctttagtagtttggggaaatgtgtgtggggrgaactaggcacaactagctgcaggccataccatgattttccccatactgtagatgaggaaactgaggctcaaaataactttctcatgcttccaaagctccaagtggcagagcagccgagcccttgactcatatgctgtgtcatttttcttgttttaaccagggctgtctccacagtgcctacatggcacctgctacatatgatgatcaataagtgtttgtttgg

SEQ ID NO: 801162 - DNA, 568 bp, Homo sapiens
aaaattgaataatctaataattatttccatttactgaatttatgaaagaagctgaaagaaaatgcagtttgtcgttaaataacaactaaaatctgagattctttttactatttttgccttttaacaatgccttctgagaatttaattttaattatattattccatttaattcaacccaatccattctaacaaaaaaatattcaaattttgtttaagcacagtgcccagagttcgagcagggcctggatgatgtatcataagggtacatcctagaaacaaaacattttagtaacatgaaacattaaaagtgaaaaatgtgrctgccttaagtgatgcatacatgtggtttaaaataagattccttttaatcttgatgagttttgaacataaacacttaacaccgtaaaggacatagggggtcagtagaaactttggcctaagccttagacttgttggcaatgctacagtttatttaaaatcggaaagcattccccactagtgaaaaaaggaaaacaaaacaaaaattatactcaatatgattacccagcactagaacagtaaacttaat

SEQ ID NO: 801163 - DNA, 624 bp, Homo sapiens
agtgtcataggatattccactttaaaattaatgctatattgtacagtcagcaatccatagcatgatagccacttttgtgtaagtcggaaagttatactgcaagaaaagggcaacagctccacaagtggtctggaatggaaatcaggaatttctcttgacacattaaactaagcagtctccttcactgaccccaaatttatcaaggactcgttttatggtgagtcaaggcaaagaaasgaaacagatgaggtagatcaaggacacgaattggggcctggagaatctgtaactcatgccaacctcaacccttggtgacaaattgtctttgaactgtcaagccttctctcacaatgggttaatcgtcatctaaaatgaaaatccctctctttgactttgaaaatatttgttagaggaaaaaaagtggaataaacacacacacacacacacacacaaatagcaaagaaaattttttcattccaaacaagaagctacttttggtagaaaatgtgtcatttttaggagcagtaaaacattaaagatgaatatccttactatttgaatcctaaagttacatttaggccttttctattttattgggcacagtagaaagttcaggtcaaatgg

SEQ ID NO: 801164 - DNA, 643 bp, Homo sapiens
  misc_feature 624: n = A,T,C or G
taaaattcttgatcccagcctctacaattctgttcttcttctacttttcttctatttcaggaacagataccactgttcttccaatcgtgaggccaaatatctacagtgatgttgtttaatatgctgaccactaaacacacatggctcttgagcccttgaaatgtgtgtggttcacccgaattaagatgtgttgtaagtgtaaaacacaaaccaggtttcaaagggttagcacaaaaaaaatttaaaagaatgtagcatagcttattaatatttttattaattacatattggaataatattttgagtatgatgaataaagtacatcrttaaaattaatttctcttgttccttttacttttttaaactggctactagaaaacaaattacatatgtgccttacatctttttctattggactgtgttgatctagagctgatattaatttttctcattgcctcagataccaccccagttcccagccattggcagaccctgtttcatcattctacaatacctactgtgagcctgcctgtctccccaacagttttcacaggccaggaacctatgatctctgccctggccactgcaagagcctgctacctgatctctgtgcttctgctccancctctgtctagtgaaatct

SEQ ID NO: 801165 - DNA, 620 bp, Homo sapiens
gtggatactgccaaatgaattaaatagatgttgatctacatattctgtttatctagagtttatgagaccttcattgtgagatcagtgtaacaagaattcctaagtttttaatgcattcagatcatgatgttatgtgctatagggagtattataaggttttatgtcccttgaaatcaacagctgggtcccattctttttggatctccccatactgaatagtgcagtgttaatcatttagtatgcacttgataattatgttggatttaaaagagtataataggaaatctaaaccagamtcctacaggcaaggaaagctacagaatattgattcaggcttccagacacttatatagggagagcttagattgacaggaatggcattgaatagcagcagatattagcacctcatgtcacctttcctacagtgtgtatacgttttgaaattcattctagctgcctagctagaactagctggaaagatggtataattcataaagctaataacctttttggcacatagtgtgtgacatggcacctggattctaaacacctatatgatttgtgctgccaaaggtgactcagtggctgggaactttttattcttcttacagtaaactgga

SEQ ID NO: 801166 - DNA, 535 bp, Homo sapiens
gacatggtgacatgtaggagaacacagttgaatgccaggtaagccccacgtgggcctcatgggttcagaggcttttttcagaattacttccagtagaacggttgcccgtcacagggagcatatccaagagggcgtgtgtgtgaagctggaaaagtggcttgtactgggaatggggtgtctcatatctctatagagagaccgcagggagcygaggactgaaggagaggttagagcagctcaggctcaagccctcttccccagaatcaccaggaacttgccagggaggcttttgttgctgttgttgcaaaatccaattgcaattacaacaataagtgaggaattaaactacaagtatgaatagcatgggcagcttaattcttaataagaaagcctaaggtgctttcaactaaaccactttctgaagttttttttttaccaaaaataaattatatcccaaaatttataagaaaaggtacaagataaaaaagtgcccccttttagagctaaagttgtcaagctgcagatatttgattga

SEQ ID NO: 801167 - DNA, 535 bp, Homo sapiens
gacatggtgacatgtaggagaacacagttgaatgccaggtaagccccacgtgggcctcatgggttcagaggcttttttcagaattacttccagtagaacggttgcccgtcacagggagcatatccaagagggcgtgtgtgtgaagctggaaaagtggcttgtactgggaatggggtgtctcatatctctatagagagaccgcagggagctgaggactgaaggagaggttagagcagctcaggctcaagccctcttccccagaatcaccaggaacttgccagggaggcttttgttgctgttgttgcaaaatccaattgcaattacaacaataagtgaggaattaarctacaagtatgaatagcatgggcagcttaattcttaataagaaagcctaaggtgctttcaactaaaccactttctgaagttttttttttaccaaaaataaattatatcccaaaatttataagaaaaggtacaagataaaaaagtgcccccttttagagctaaagttgtcaagctgcagatatttgattga

SEQ ID NO: 801168 - DNA, 535 bp, Homo sapiens
gacatggtgacatgtaggagaacacagttgaatgccaggtaagccccacgtgggcctcatgggttcagaggcttttttcagaattacttccagtagaacggttgcccgtcacagggagcatatccaagagggcgtgtgtgtgaagctggaaaagtggcttgtactgggaatggggtgtctcatatctctatagagagaccgcagggagctgaggactgaaggagaggttagagcagctcaggctcaagccctcttccccagaatcaccaggaacttgccagggaggcttttgttgctgttgttgcaaaatccaattgcaattacaacaataagtgaggaattaaactacaagtatgaatagcatgggcagcttaattcttaatragaaagcctaaggtgctttcaactaaaccactttctgaagttttttttttaccaaaaataaattatatcccaaaatttataagaaaaggtacaagataaaaaagtgcccccttttagagctaaagttgtcaagctgcagatatttgattga

SEQ ID NO: 801169 - DNA, 660 bp, Homo sapiens
ataaaatgcttaatcaaacctgctgggtgatgaccctggaactttaattcttacagacttcacactattggttgtcctggaaggcgacctacaatcatgagcagcgaggtaatgagctgggaatccagctgtaaggctcaaggtggagtttcctaatgtgcacagacacaagcttgtacatttcaaactagctcctcctgagcacagacctagaggggcagaacttagcgctttggtgctcaacatggggtcctccaaccggcagcagagcatcaagtagaccccatgtctacttgatcagaacatgygctttaagaagaaccccagaaggtcatgtgcaccctaacactgagccctggagggaatgacctttggcccggtgccagcgggcccctccccaactggcagtcacaaatgcaacaggttagtaattcataaaaccaacaggaaggttatcagttagaattcatgtggaaaaaataagtctggatggacatatgctgacctgttaagcatggtgattttgtctcagtaagctgacagcagactacctctgaccaggctggccttgtccaaacaactgggtacccaccaggactgtctgtcttactggcaggcacaaaacacaagctcaagactgcgaacatggtctcaatgcac

SEQ ID NO: 801170 - DNA, 646 bp, Homo sapiens
ctgactccataccaactcttgagtagtttgtattttctggagtttatataaatggaataatgtactttgttcactctttttgtctgcctgcttttactcagcatagttattttgagatttattcatattgctgcatgtattaatacttaattcatttttatggttgagcagtgtgaatactcctttgtatgtgtttgaatatactacaatttatttatccatgcagttgttaatggacatttaagtagtttctaatttatggtgattacacataaagttgccatatatatttatgtacatattttatgcttttgtttctctaggtaaataactagaagttcaatgcctggatcatgtagcaggtttgtatttgactatgtttarcttatattccctccaccaattaaggagggttccagctattctacatcctcaccaatacttggcttggtcatcatctgtaatttgagatatcttaattagtatcaagtgatgtcttattccctaatgacatataatgttgcatatctttttctgtgcttatttgccattcatatgattgtctttgttcaaatgtctgtaaaaacttaccatttttaatggttgtttgctttcttacacttggactttaagagttctctatata

SEQ ID NO: 801171 - DNA, 626 bp, Homo sapiens
gccacagccaggttttggtgagaagaaccacacagcttcctttgactttaaggccaccagaggtatttctttttaactccaccaaattggaaattagtggagcaaaaagcaatggaggatggagggtactttgagcacagagacttccatattgccctgaaaaggagcctgaaagacaaggttgaaggagacgcaggttcagtaggggaggggagaaggaatgcatatccctagcttccgtattgcactaccgtcctttgcctgagaaagcgaaccctggtgttagaatctgagactaatgttgttccccaaggaggaaggcagctcaggactggttcccaccaagccaagtgcagtcctagattctggctccctgtgcccactgtcagcagagaaagcaccaaatctagtgagaaaaagtttcagcatatsttaaaatgacagaaaccaccttatccaacctagacttttctgccatgggaaaaagatgaaacctggaaatctgggaaacttaaaattttcaacaccatttataaatataaaaagcctctggttacttgagtgttgcacatttagatatttgattttgtatgttgattacaaatggagttgtggccttgcaaacc

SEQ ID NO: 801172 - DNA, 627 bp, Homo sapiens
tcaggtggtaagggtggatcagacctattccatatacctcttgttctccttgtccagtggtttctagggatatgttctcatgatgaaccccgcagaggctcgtgaaagtgagaggaaactaggatgcctcttaaggtcttggtcaggatggggtctcctgtcacttctgtcacaggctattgtaagtcatatgagcaagctcaataaaatataaacaagtcagataaacagtgggaggaatggcaaagtcatatggccaaggccatgagtgattaattttaacacaggaaaaaagtaaagcatcaaatgcgattatttaatatacaatgtcttattaactgaaatataaaatgtgtttactgtaaaatataatctgyttatctcaccaaagaaatattatctttaaaaaatgtcattacttctaagacatcatcagtctgcaacttctttccatagccttaatcaggatgctgtggcagctcccacattagcctcgcattctaaactggtagatgtcctaggaaaccatacatctatgtatttttcttattttatacgtttaggacaatgtatagctaattacccaactttttatttgcatacaaatctaatacaactgaacacaat

SEQ ID NO: 801173 - DNA, 669 bp, Homo sapiens
atgctaagcatgtgaattatttatatcctactgctcaaggtctgattccaaaaattcaaaaaattgcaaccttcggcataaatgggttaattcttaaacatactgtggaataaatttctcaatatgattaagttcttatttctatcctgttagcttgtttgagaaacgggcagatggtgacatgagtagtagttgtgtcagaaaggaagaaagtcacatctttagtacacagtggtgagtgcccaccagaccaggcttatatgggatatagttccttggcagggaggttctaaggaggttagcggtctagtggttccattacagaatgtttgtgatggttgggcttttcttctcttgtctcttggcttcattctatcatgtataaatgcttggcatgttgtgaacatcccaatttacatcactttggaaaggaagttcctagtaggttacatgaatagcattagtctttggagctacttgaggatttcagtgagttgatgaactgtgctagaaccattagaaccatgatttagtagccagtaaatttgatgcccaatgccaagtaatgtccatggataagacaagaartgtattctagtaagcataaaatgttactgtgggacgatagaaccctaggtttgttttgggaaatttctgtctatttcatct

SEQ ID NO: 801174 - DNA, 586 bp, Homo sapiens
ctagctcctattagggtctctttccttgatatacgtagatgaatagaatggcaaaaaaaaaaaaaaaattgagaaactgatagttatactgttttagcaggtagaggaaaacagccttccttttctcatttatttttatcaatataccagaggtttcccagcttctttgatatgaccatagagcagtgaactagatgagtagatgagggaaggaatgtcacttttggcttcacttcccttctgcctaagaatatcagcaatccttgaatggatgaaggggcaaaaggttggagaacccataagaaatgctttgagagcaagcrtaggttgtatttacagcattccaaattagaagagatcgctagaattgtgttccttgctcaacatatttggtgcatgtttacctgtgtaatgtacagagccaggtacagaccaactccataaattttggaagaaaataaagcactctaattcctaatcaccacataccttaatgatatcagtagctgtcactctctagaggactccaacatagatgagataaactaagagttatacccagttcccagtgtattggccattaagg

SEQ ID NO: 801175 - DNA, 631 bp, Homo sapiens
atgtttatgaataaagtaatttttaaaatttaaatttggcattagggtaagggaattgtacgtctttcattttttttaaaagaaagtctttttgatacatattgaatgtttaataatatgtcactgccagtatacaattaatataccattgaagtgtgtgtatgtatgtgtgttgcacatgtagtattaggattggctagcaaagaaaagccagcacattcatgcattagcctgtattgtacactaacagkttgagcatattgatttcctaaaatgtgtcctagcaaacactaatccaaaatttttactctatagaaaaaaaatgttccataatctagccacagaaaagttgcatgctttctcttggacggtcagtaacactgaggttctctcttggaaagtcagtaacactgggttcttaatggctctgaagtttatcagctaagaaaatacggatttaacaatgaatatactctttaaccattcatatcttcagctgaagactttggactttagcatgcaaaaagagcataagagcaacatgtatttctgaagtcctttttccttaatgcatctctgtttgcatttaggagaggcagcctgttgtctgagactagaagttcctgctgaa

SEQ ID NO: 801176 - DNA, 638 bp, Homo sapiens
atggaaagatcatatttaagagcagtttccataacttaccagctgcaacgtcacccagcagctttagtgttgaatgtttaaatggccagtgcaaataagaagaacaatgttgacattctcacatttgactttttaggatatatcttcatacacattatttcatgtaatcattcagtagagaaaatgtcattcacatatgtaggtagtatgtgcacatgttttaayataaacagcacaattctggtacatttctagagtgcacaccaaagaacatataaacacaacaaatttttggcatggtgtcagatgagtgattattgacccaggggcccatgactggggtctcagggggtgtgcgtatatgtgtatttttcaggaatgaagatacaaaagtttaatcagattctcaaaagaggaggaggagagcctgtgacctgagaaagattggaaaccactgtttcagagagatgctacagtaagcaattaaatacagatggttccattaaccaggagccccccaaatgcaggtttgttgcacagatctacttggatctgtagaattctgctaaaattgctcactttgtcttccatgctcccggataacagacagtaaacgtggttttttatttatttaggaa

SEQ ID NO: 801177 - DNA, 638 bp, Homo sapiens
atggaaagatcatatttaagagcagtttccataacttaccagctgcaacgtcacccagcagctttagtgttgaatgtttaaatggccagtgcaaataagaagaacaatgttgacattctcacatttgactttttaggatatatcttcatacacattatttcatgtaatcattcagtagagaaaatgtcattcacatatgtaggtagtatgtgcacatgttttaatataaacagcacaattctggtacatttytagagtgcacaccaaagaacatataaacacaacaaatttttggcatggtgtcagatgagtgattattgacccaggggcccatgactggggtctcagggggtgtgcgtatatgtgtatttttcaggaatgaagatacaaaagtttaatcagattctcaaaagaggaggaggagagcctgtgacctgagaaagattggaaaccactgtttcagagagatgctacagtaagcaattaaatacagatggttccattaaccaggagccccccaaatgcaggtttgttgcacagatctacttggatctgtagaattctgctaaaattgctcactttgtcttccatgctcccggataacagacagtaaacgtggttttttatttatttaggaa

SEQ ID NO: 801178 - DNA, 480 bp, Homo sapiens
gaatataaataatattaatataatgtaaaaatagcagatcatctatgatttatgtctatcatcccaacagatcaactgtgtttatttttctgttctctagtccttccccatacatacatatataaacatattatttacagagctgtattcaagatgggttaatgtttacattttgctattttccaatgaacacaataggtgttaagatattaaactagccaaattaattgtattctggttgaaaattacagttcatcatctctcatttttaccaaggagctgagctgctgggatgatggttttcatggkgtgccagcttggtagacaagctgtctaggtgttttgcatctcattgctttcctcaaaaagggtagttaaaggactaaagctactgaatggattttaggtgtaatctgttattggagagaaaaggttaatccagttctgcattattatgttttttatttatgttattctttc

SEQ ID NO: 801179 - DNA, 622 bp, Homo sapiens
tgggactatatgaaaagaacaaatctatgtttgtttggtgtacctgaaagtgatggagagaatggaaccaagtagaaaacactcttcaggatattatccaggagaacttccctaacctagcaaggcaggccaacattcaaattcgggaaatacagagaacaccacaaagatactcctcgagaagagcaaccccaagacacataatcatcagattcaccaaggctgaaatgaaggaaaaaatgttaagggcagccagagagaaagattgggctacccacaaagggaagcccatcagactaacagaggatctctctgcagaaaccctacaagccagaagagagtgggggccaatagtcaacattttaaagaaaataattttcaacccagaatttcatatccagccaaactaagctcataagtgaaggagaaataaaatcctttacagacaagcaaatgctgagagatttcgaaaccaccyggcctgccttacaagagctcctgaaggaagcactaaacatggaaagaaacaactggtaccagccactgcaaaaataggccaaattgtaaagaccatcgatgctatgaagaaactgcatcaattagcaggcaaaataaccagcga

SEQ ID NO: 801180 - DNA, 633 bp, Homo sapiens
aataatagataacacgtaaagagtgttttctagatggtagatattgtttaaagtgcttttcatgtattatttcatttatcttctcaacccagcaaaacatggttattattcttttgtttttaagttaacgaaacagaggtgcagagataggtgtcttttgccctagagcctagctatccatgaaccagcggcatccgtatcacctgggaacttgttagaaacgcagattctcaagccgcaccctacwccccacacccacaaaatcagaatatgcaaataacaatattcttaggtattcatacgcacattaaagttagagatacactaacctaaatcacacagctatgagactttgaaaccagaattctcaaacactacaggaggttgtcttaatctcagaatgaaaaaatatttctgaatgagagatataatatatgccaatggattatgtgaaacgtaagtaggattttgcttttataaattatacttaatgaaaatatttctcataaattacttttgtatttggtgacttaccataatctaactttattattctactctcctccttccctttttaaattcattctttaaacattcactcatttattccataggcatttgtagagtgcctaa

SEQ ID NO: 801181 - DNA, 628 bp, Homo sapiens
tacaaaaaataaaaatgagccatggtggtgtctgcctatagttctacctacctgggaggctgaggtggaaggatcacctgagctggggagattaaggctgcagtgagatgtgatcaagccactgcactgcagcctgggtgacagagaaagatactgtcaaaaaaaaaaaaagaataaaaaragaaaaatcacatattaggtcacaaaaaattaaaacaatttccaagatttaatataatctctgtctacaaagcatataaattataaacaacactaaaaagatggtaaaaaaaatagcaacctttaattggaaacaaaaaatgcactaaaaatagctcattggttaaagaagaaatgacaatgtcatgaaatatttaaaagtaaagacaacaaaagtaccacatgacaaaacttgtcagatggagcaaagtcctatagaaaggtaagtacaaccttaaatataattattttatttatttatttatttctgagacagagtcttgctctgttgcccaggttggagtgtaatggcacaatctcagctcactgcaacctccttctcccaggttcaagtgattctcctgcctcagcctcctgagtagctgggactataggcctgtgccaccac

SEQ ID NO: 801182 - DNA, 628 bp, Homo sapiens
tacaaaaaataaaaatgagccatggtggtgtctgcctatagttctacctacctgggaggctgaggtggaaggatcacctgagctggggagattaaggctgcagtgagatgtgatcaagccactgcactgcagcctgggtgacagagaaagatactgtcaaaaaaaaaaaaagaataaaaaaagaaaaatcacatattaggtcacaaaaaattaaaacaatttccaagatttaatataatctctgtctacaaagcatataaattataaacaacactaaaaagatggtaaaaaaaatagcaacctttaattggaaacaaaaaatgcactaaaaatagctyattggttaaagaagaaatgacaatgtcatgaaatatttaaaagtaaagacaacaaaagtaccacatgacaaaacttgtcagatggagcaaagtcctatagaaaggtaagtacaaccttaaatataattattttatttatttatttatttctgagacagagtcttgctctgttgcccaggttggagtgtaatggcacaatctcagctcactgcaacctccttctcccaggttcaagtgattctcctgcctcagcctcctgagtagctgggactataggcctgtgccaccac

SEQ ID NO: 801183 - DNA, 628 bp, Homo sapiens
tacaaaaaataaaaatgagccatggtggtgtctgcctatagttctacctacctgggaggctgaggtggaaggatcacctgagctggggagattaaggctgcagtgagatgtgatcaagccactgcactgcagcctgggtgacagagaaagatactgtcaaaaaaaaaaaaagaataaaaaaagaaaaatcacatattaggtcacaaaaaattaaaacaatttccaagatttaatataatctctgtctacaaagcatataaattataaacaacactaaaaagatggtaaaaaaaatagcaacctttaattggaaacaaaaaatgcactaaaaatagctcattggttaaagaagaaatgacaatgtcatgaaatatttaaaagtaaagacaacaaaagtaccacatgacaaaacttgtcrgatggagcaaagtcctatagaaaggtaagtacaaccttaaatataattattttatttatttatttatttctgagacagagtcttgctctgttgcccaggttggagtgtaatggcacaatctcagctcactgcaacctccttctcccaggttcaagtgattctcctgcctcagcctcctgagtagctgggactataggcctgtgccaccac

SEQ ID NO: 801184 - DNA, 556 bp, Homo sapiens
gatacagaactgcaaaatggataagaactcaccaagcaactatctgctgccttaggagactcacctaacacattaaggactcacataaacttaaggtaaaggggtggaaaaaggcatttcatgcaaatggacacaaaaagtgagcagggtagctattcttatatcagacaaaacaaactaaagcaacagtggttaaaagagacaaagagggacattatataacggcaaaagcccttgtccaacaggaaaatatcacaatcctaaacacatatgcacctaacactagagctctcaaatttataaaacaattactaatagatctaggaaatgagatagacagmaacataataataatgggggactttcagtactccactgacagcactagacaggtcatcaagacaaaatcaacaaagaaataatggatttaaactataccttggaacaaatggacttaacagatatatacagaacatttcatgcaacaaccacagaatacacattctattcaacagcacatggaactttctccaagatagactatatgataagccct

SEQ ID NO: 801185 - DNA, 601 bp, Homo sapiens
cttaatttactttctttataactgctttttagttaaatggtcaactggaaaataattaagttctattagtctttttacttcagatcgcttttttttctaagtggaagtggagcttaagctgaataaaatttctctatatctagcaaaatttcaaagatttcagttccaaaagcagtcactttttttttttttttttttgagataaagtttcactctgtcacccaggctggagtgcagtggcttgaccacagctcaatgcagcctcaactttctgggctcaggtgattcttccacctcagcctcacctcccacctcagccttacctcctgaaagctgggaccacaggcgcaagcatcacacctggatagttctcatattttcagtaragaagggatttcaccatgttgcccaggctggtctcaaactcctgggctcaagcaatccaccttccttggcctcacataacttttattactgtagattatcataattgttctattgtattactagctattattgctaatctcttattgtgcctaatttataaattgaccttaattatagatatgtatgtataggtaaaaacaacatagtgtacgta

SEQ ID NO: 801186 - DNA, 601 bp, Homo sapiens
cttaatttactttctttataactgctttttagttaaatggtcaactggaaaataattaagttctattagtctttttacttcagatcgcttttttttctaagtggaagtggagcttaagctgaataaaatttctctatatctagcaaaatttcaaagatttcagttccaaaagcagtcactttttttttttttttttttgagataaagtttcactctgtcacccaggctggagtgcagtggcttgaccacagctcaatgcagcctcaactttctgggctcaggtgattcttccacctcagcctcacctcccacctcagccttacctcctgaaagctgggaccacaggcgcaagcatcacacctggatagttctcatattttcagtagagaagggatttcaccatgttgcccaggctggtctcaaactcctgggctcaagcaatscaccttccttggcctcacataacttttattactgtagattatcataattgttctattgtattactagctattattgctaatctcttattgtgcctaatttataaattgaccttaattatagatatgtatgtataggtaaaaacaacatagtgtacgta

SEQ ID NO: 801187 - DNA, 602 bp, Homo sapiens
cgtgatgggtgtgaaccatgagaaatatgacaacagctcaagattatcagcaatgcctcctgcaccaccagctgcttaacgcccctggccaaggtcatccatgacaactttggtaccgtggaaggactcatgaccatcgctgccacccagaagactatggatggctcctatgggaaactgtggggtgacggccatggggctctccagaacatcctctctgcctctactggtgctgccaaggctgtgaggaaggtcatccctgagctaaacggggagctcactggcatggccttccgtgtccccactgccaacatgtcagtggtggacctgacctgccgtctggaaaaacctamcaaatatgatgacaccaagaaggtggtgaagcaggcgtcagaggaccccctcaaaggcatcctgggctactctgagcaccaggtggtctcctccaacttcaacagacacccactcttccaccttcgatgctggggctggcattgccctcaacgaccactttgtcaagctcatttcctggtatgacaatgaatttggctgcagcaacagggtggtggacctctgcccacagtgtggcttccaaggagtaa

SEQ ID NO: 801188 - DNA, 609 bp, Homo sapiens
taactacatgtctcataggtctctgctggtggttctgaagccaaacctctgatcttcacatttgtccccactgtcagaagactaccaacccatactcagttggctgacacctctaaattccttgttaaaattccagaagaatcaagtgataagagtccagaaactgtaaatagggtaggattatttttattcttttttaatttcaaacaattatattaaattttgataatgatgacttggaaatttgtgtatatttcctgtgcttaaattaaggtgwctgtgactctaagtttgactaaaaatataataatgcaacagaagcataaatgttatcaaattgcatgttctctctaatgcattatcttcaatttttttcagtttgacatcctattgtttgctattgacatgacaaattctgcctcctggcacattctctcaaatgtttcttaagaaaataaaaacaaaatttaaaaatgtttaaatttatctcaaaagaaaatataagacaaaacagtgagatattattatttacaggtaatgaattagcaacattaaaaaatgtaatacctgatgttgggaaagttgtggaaatattggcatgcttacact

SEQ ID NO: 801189 - DNA, 675 bp, Homo sapiens
attgcatgaggtgataaatatgctagcttgattgtggtgatcacttcacaatacatacatgtatcaaaacgtcaagttttttacctaaaatatatacaatttttaattgtcaattatacctcaataaagttagagaataaaaaaagtaaaacacagaaattttattctgaatttcctctttgataaagtttcatgaaaaagcaaaattttcaatttacaaatgtcaggaactttttgttttctaactttgttattaatttataaattttttgtgatcagataaatttgtgtatattgtttccatcttggcaattaataggttttcttttttagcttaatgtatagtcagtttttatgagagttccacagatattaaaaagagtaatattttgttttgtttgcaggatagagtctgaatatatataaattagatttactcgagatgatctacttttgcctattttttatytgatctatgataaactgaacaaacaagttaacaaaatattttaccaataatatattttcactttttccagatcttatctcctgcttttgccttatgaagatagaggttatattttggtttttcatattctaatgactgtattttccttgtaaatgccatcttttagcattataagggggtcttatgtgtcttgcttaaggaacttt

SEQ ID NO: 801190 - DNA, 603 bp, Homo sapiens
acctgaatataatgtcaggtttgataccgttaagatgcttcttttccctttttctctgttgactctaactgtcctgaatcttcctttctcaaagttcaagagctctaatccatgataatgtgctaattgaattatgttatttctccccctcaagactgatgtacagctaagcagaaagacaacactcaaaataagaattgggcacttagttattactgagtgctaagcttggcattgaggacatataaaattataaaatgataaagactctgtcttactcttaacctggagagtgttcttattgtttgtacataaggcactggtcaaaacaatgaatccatgttgaaaatgttagacgccaaggccatgagataaattatgacacatcatgccttccktactttgaactgcttattcttactatcgatggaacttacactgtctaagagtcggaggttgcagtgagtcacgatcgcgccactgcactccagcctggtaacagagagagactctgtctcaaaaaaaaaaaaaaaaaaaacttaccctgtctaaatatctcactaaagaccatttctaagttagtaatacgcccctcataatatc

SEQ ID NO: 801191 - DNA, 584 bp, Homo sapiens
ccataatttttgcctatttcaaaattcatgtagaaatctctgtcttttccattttttgagctcctcaattacaaagatgttctcatctactccaattcaatcattcactcccagaaagctccttaactttaccttcaccagtaaaacagaaactgtcagaaatttcaattacaaatgtcccacactcagaactctacctcctatccaccatcttcatttctctagtgctactagtgcaacatccacatcattgggacttccaaatcactgaccttcatcagctttattctggctttamctcttatctcatattatttaatattataagccattttaatactttcactttttttaatcttcctctcttcctgtgaccagttcacttacaaaaaaaaaaaaaagacctcaaccctaaattgaccttaccatccatttttctccatacttgtatctgagaagcaaaacattgttggagaaactctttcaaacaaactaattaattttattttaaattaacaattatcaatttcaaatgtgcattcagtactgcccgaaatttttcttttgtaggcccactttctgag

SEQ ID NO: 801192 - DNA, 618 bp, Homo sapiens
aataatatggatgaatttcaaatgccttctactaagtagaggctaaagtgactacagactatataattacatttatatgatattcttgaaaaggcaaaagcataagaacacatgaaaagataagtggtttctcaggacttggattggaggaaagtatatactaaaaaggagcacaaggaactttttcagttgatggaaatgttttgtttggaatgtggtagtaattatatgattggattcttttgtcaaaactcagagctgtaaactaaaaggatggagtttacagtgattaaatattacctcaataaatctgatttagaagaaaaagctatgttagcttcaacaaagaatgtaatacaggaattgaaggaaagaatagatactgaccaaaatcttgaactggaatattagatcaaggattsctcttgaaggaatcagaaaataataaatagaaaaatatgaagagtaagagacatgaaatacagaatcaaaagtgacaaaatcagtattgtgagagtcccatgtgggaataaatatttgtaaaaataatgatcaaaagttaccgaaaatgtaaggggaagaaaagattgaacacttcatgtgaaaggtcatagaagg

SEQ ID NO: 801193 - DNA, 628 bp, Homo sapiens
gcataattaaatacaatttgataatttttttaaattatgcacatagtagacaactacccgagaaccatttaccatagatttgagtcctggactcttctccattattaaagaaattgggaacacatttgcctcttgcactagaatytaaattaagcaatgtttctctaatataggtcatgtgctaaattagcaataaggttttgttaaatttttaagacataaagatttttttttttttttttttttgagactgagtctcactctgtcacccaggctggagtgcagtggcgcgatctcggctcactgcaacctccacctctcaggttcaagtgattctccttcctcagcccctggagtcgctgggattacaggcatctgccaccatacccagttaaattttttttgtattatcagtagaaacagggtttcaccatgttggccaggctggtctcgaatttctgacctcaggtgatccaccctcctcggcctcctaaagtgctgggattacaggcatgagccatcacgccctgccaagacataaagagattttaaaatattctcacctaaggaaatatctttaataagattggagtttagcaactcatgctttaaaaaattaaataggcaa

SEQ ID NO: 801194 - DNA, 546 bp, Homo sapiens
tgcgcctgtcctggccgcgaccgaaaagctgatgaggaccactaccgggagcagcaggccctgaacgagagctccgccaagaacggggccgccagcaagcgtggtgagcggccggccaggggaactggacgcgtgtgggaggrgaaggggacacattggcaggacacaatgtgagcccgcgtcccagggacagggccagtccctgaacggccccccacgcccagactcctccctgacggagcctgagagcagcccccatataagtcgcttgtcctgggccaagggcacctcagaggcctgggtggcaccgcaggtttgcccgtccctgtgggttgctcaccaccggacccacctggagaatcgattggccccaagggtggggcaggtctccctcctcccggaaggaggcctcaccctctggtcctgcctgctcaccccgcctgccctgcctggccttccagccttcaagcagagcccccctgccgtccccgcccttggtgccggtgtgaagaagcggcggcatggagacgaggacacgtactacct

SEQ ID NO: 801195 - DNA, 605 bp, Homo sapiens
tttcacacaatttctgagagttaaaagttcaggagtggcttggcttgatggttgtggctcagagtctccacagggttgcagccaagctgttggccaggaatactgtcatctgaaggcttgacaggggctggagctctttccatgctcactcacttggttgctggaaggcgttctcagtttcttgttagctattgtggcatgagacttacgccatatgcagtctgtgctcgtcacctcttcaagattttrcagacaataagagggtacttcatttagcattaattgccctgggattagggccaaagtcaggaaaaattataaaatggacaaaggttatgtattacttctttaagtctagtttgttgttgttgagtttctaatattcatctttattaattttatcagcaacgcacacatgaaacattatggatcagagacagatttcttatgaattacctcacagtaaataataagtgcattggtcttcttgcctcaggacttatccctgggacacagtgatgaaaaccaagtcaaataccctgtgtgagtagccagacactccataggttagaaatgaggcaaaaggatttttctgtgcttataaa

SEQ ID NO: 801196 - DNA, 605 bp, Homo sapiens
tttcacacaatttctgagagttaaaagttcaggagtggcttggcttgatggttgtggctcagagtctccacagggttgcagccaagctgttggccaggaatactgtcatctgaaggcttgacaggggctggagctctttccatgctcactcacttggttgctggaaggcgttctcagtttcttgttagctattgtggcatgagacttacgccatatgcagtctgtgctcgtcacctcttcaagattttgcagacaataagagggtacttcatttagcattaattgccctgggattagggccaaagtcaggaaaaattataaaatggacaaaggttatgtattacttctttaagtctagtttgtkgttgttgagtttctaatattcatctttattaattttatcagcaacgcacacatgaaacattatggatcagagacagatttcttatgaattacctcacagtaaataataagtgcattggtcttcttgcctcaggacttatccctgggacacagtgatgaaaaccaagtcaaataccctgtgtgagtagccagacactccataggttagaaatgaggcaaaaggatttttctgtgcttataaa

SEQ ID NO: 801197 - DNA, 605 bp, Homo sapiens
tttcacacaatttctgagagttaaaagttcaggagtggcttggcttgatggttgtggctcagagtctccacagggttgcagccaagctgttggccaggaatactgtcatctgaaggcttgacaggggctggagctctttccatgctcactcacttggttgctggaaggcgttctcagtttcttgttagctattgtggcatgagacttacgccatatgcagtctgtgctcgtcacctcttcaagattttgcagacaataagagggtacttcatttagcattaattgccctgggattagggccaaagtcaggaaaaattataaaatggacaaaggttatgtattacttctttaagtctagtttgttgttgttgagtttctaatattcatctttattaattttatcagcaaygcacacatgaaacattatggatcagagacagatttcttatgaattacctcacagtaaataataagtgcattggtcttcttgcctcaggacttatccctgggacacagtgatgaaaaccaagtcaaataccctgtgtgagtagccagacactccataggttagaaatgaggcaaaaggatttttctgtgcttataaa

SEQ ID NO: 801198 - DNA, 563 bp, Homo sapiens
tctacttgtttaattctattgctgagactttccagagcatttcacatttctaaaagtgtgtccaaagtttcctgaattttttattgtttttgctttaagctatatatttccataaatatttctcccttcacttcttgttttttttttttttttttatttattttttttatttccttgcattgggctttgcctttctctggcccctccctgattagcttaatgactaacctcctgaattctttttcaggtaaatcagggatttcttcttggtttgggtccattgctggtgaactagtgtgatttttgagggtgttgaacagacttattttgacatattaccagggttggttttctggttccttttcatttggctaggctctgtcagagggaaggttgagggctgaaggctgttgtttarattcttttgtcctgcaggatgtttccttgacagaatactctcccccatttcctatggatgtggcttcctgtgtgctgaactgcggtgattgttgcctctttcctgggtctagccaaccagtgggtctacctggctccagactggt

SEQ ID NO: 801199 - DNA, 646 bp, Homo sapiens
acagggctataatatgacccagaaagtctaccctactaagtatgtagccaagataattgaaaagatacatccacacaaaaatctgaacacaaatgttcacggcggcattttttgtacagccaaaatgtggaaccacctaaacgtccatcgactgatgaatgcacaaacaaaatgtggcatattcataaatggaatattagccataaaaaggaatgaaacactcatacatgttataatacgcatgaaccttgaaaaacattatgctaagggaaagaagctagtcacaaaagaccacatattgtatgattccatttacgtgaaacatccagaataggcaaatccacacagacagaaagtagattagtagctgccaggaactggaggaagggtgaaacagggagtggccactaaggggtacagagtttctttttcaatgatgaaaatgttctggaatttagacagtggtratggatgcacgactctgtaaatatactaaaaaccactgaattgtacattttaaatagcgaattttagggcatgtgaattatatctcaataaagaaatagaagagggatcatatgaggaaggaaattaaaaacagttgaatagagactacttctagatgtttcactacaaagaagggcaa

SEQ ID NO: 801200 - DNA, 646 bp, Homo sapiens
tttcttttaactgcacacataaaaaaacaaaagggactatgttaacagaaaaataaaggaagttctgccaccaaccgcttagtgctaggcttcccaaaaactgctgaaccaaaccctggaagtcctctaattcagctactttcttccttcaatcttggcagcactaatcccctgttcctgatgcaggagagggagagaacagttaaaacttccaaaaacgtcagaccccatttcagattgaggcttctgctgaaggtcttccctgccagtacaagccaacctgtggaccttcactgacagaccagacacaaaccaaagagctcataagaggactgcgggttttcagcatctcatggtttctgtagaaagggctttgcagtctctcaccccagccagtcctgcctcctggacgaccgtggtgygacaggggaggggactgctcccaggcgcacagcacccagagctcttcccatgcctgcaggtctgtgtctccaatgactatggagcactggctcagaacaagacttcccaagcttgctctatgagggagacagcagaggacaagtagggaaacagccaggcattatatgatgtgtgctttccttctgcaggaattctaccccctcttctttgttatgctcagatg

SEQ ID NO: 801201 - DNA, 646 bp, Homo sapiens
tttcttttaactgcacacataaaaaaacaaaagggactatgttaacagaaaaataaaggaagttctgccaccaaccgcttagtgctaggcttcccaaaaactgctgaaccaaaccctggaagtcctctaattcagctactttcttccttcaatcttggcagcactaatcccctgttcctgatgcaggagagggagagaacagttaaaacttccaaaaacgtcagaccccatttcagattgaggcttctgctgaaggtcttccctgccagtacaagccaacctgtggaccttcactgacagaccagacacaaaccaaagagctcataagaggactgcgggttttcagcatctcatggtttctgtagaaagggctttgcagtctctcaccccagccagtcctgcctcctggacgaccgtggtgtgacrggggaggggactgctcccaggcgcacagcacccagagctcttcccatgcctgcaggtctgtgtctccaatgactatggagcactggctcagaacaagacttcccaagcttgctctatgagggagacagcagaggacaagtagggaaacagccaggcattatatgatgtgtgctttccttctgcaggaattctaccccctcttctttgttatgctcagatg

SEQ ID NO: 801202 - DNA, 609 bp, Homo sapiens
agagccaccggctacccgaataagcccagaacacaactcccatgtttgagctgacccatcagttgtgaaaaccagagcccatgcagaggggagcgcaatgggtgacatgggccccttgtggccttggagagtcacttcaccgctcagagacatgcctgattctgacattgggatttaaatcctcttctaagattcatttggggggtgatgaaagaacaggaacgctggagcaggcagatatgaggactggagccgcccagaatgggcactgaggcactcccagaacaacagacatgagtgctgagttctctgccctccmcatttgattgattgattgataggtgaagagagatgggctcagagagacggctgggatgttgactcgtacttctgtcagtaaccagcagggtggctgcttaaagatgaccgtgtggaagcaggtaggtgtaaaccgtcacagcattgtactgcaagcaacacacacagaaactcagggttcaaggccaggccatacccttggacgtacatttcacttaaccttcctgagttctgatctgtgcagtgggtctggtgcctggctcgtcagggctgctgggttctcctgtgacg

SEQ ID NO: 801203 - DNA, 609 bp, Homo sapiens
agagccaccggctacccgaataagcccagaacacaactcccatgtttgagctgacccatcagttgtgaaaaccagagcccatgcagaggggagcgcaatgggtgacatgggccccttgtggccttggagagtcacttcaccgctcagagacatgcctgattctgacattgggatttaaatcctcttctaagattcatttggggggtgatgaaagaacaggaacgctggagcaggcagatatgaggactggagccgcccagaatgggcactgaggcactcccagaacaacagacatgagtgctgagttctctgccctccacatttgattgattgattgataggtgaagagagatgggctcagagagacggctgggatgttgactcgtacttctgtcagtaaccagcagggtggctgcttaaagatgaccgtgtggaagcaggtaggtgtaaaccgtcacagcaytgtactgcaagcaacacacacagaaactcagggttcaaggccaggccatacccttggacgtacatttcacttaaccttcctgagttctgatctgtgcagtgggtctggtgcctggctcgtcagggctgctgggttctcctgtgacg

SEQ ID NO: 801204 - DNA, 608 bp, Homo sapiens
agatttttcactgaggaggatatatagatagcaaataggcctatgaaaacatgctcaacatcattaaccattagggaaatgcaaattaaagtcacaataattgtctctatatacctattaagatggataaaataataaatacaacactcagtgctggcaaggatgtggagaaactggattactcgtacattactgatgagactgcaaatggcacaaccactttgaaaattrgtttgcactttcttttgaagctaaaaatggacttaccatacaacccagcaattgcattactgggcatttatcccagaaaaataaaaacttattttcatgaaaaacttctacaggaagatttacagcagttttattcatgcaagtaaaaactaaaaactacctaaatggccttcaataggtgaatggtagaacaaactgtgatacttctatactatggaatactactcagcaataagaaggaatacactattgactgatgcaacaagttggatcaatttcaaggaaattatgctgagtgaaaaagccaatctcaaaagaatacatactgcatcgtcccatttatacaatagtgaaatcatataattatagagatgaag

SEQ ID NO: 801205 - DNA, 616 bp, Homo sapiens
aaaaatcagccctttatgactctagtaagaactttttcattcaaccatcctcagtctcccatttgtcatgagtagcttataaactcatcatacaatcttgctacagaaaaacccaccagaattagaattaattctttcccagaaatatagagaaggaaaaycactcttcttcttccacataactagagtcttggaggacaatctcaatgtgtatttgtcagcgaaaatgggtgagtggatagaggttggagaataattagatttccctgaccctaattccttattctacatctaatattgtgtctggctaagccagagaaagtcccagcctctaggttatatggcagcctaagtaaaagcatgacctcaaggctgactctaaagagctattgcaggagatctttggcagctccaattctatccttaacatatgctggccacgtctactttcatactcacctgtcaaaactcatttccaccatcaccaaggggccatactaattattctgtagtcactttggcatattataagttttgtattattacttccaataagcatctcactggctacagcttagaatatctttttcattgttgggatttataaaagataaac

SEQ ID NO: 801206 - DNA, 654 bp, Homo sapiens
tagtgctttctttggggcattgtccccattaactttttgtaaagcattaatgatttcaccattctttcacccaagtgtcaccacaaatttggtgtttgttcttgttttactttagcagaattcatgttgctgtgacagggattcttttccaacagacgtcttatccttcagaatgcctcagactagatcctgctcagacatgttataataagttagtacaaatttatgttggtgcaaaaaaatttgaaattcatgaatttttttcataatatgcatttccatgaatgtttgaagacctctagtatttcatatcaaattctaagcagaaagatttagcaattctaagtctggttagactgggaagtcaygtcagctgctggccacagtagaacttggaatgacaacctctcttccatcccgtccaatagatttgggatgagcatcctaattaaatggacaatatctaatcaaaattgaaagtctgtcacaaacttgcccaacgattatttacatatgtgagattgctgttgtacagtggacttttctggggaacactttcaagttgaaccagacttaatgtttattagaaaagcattctggctgagttgctggctctgtttttttatcacaaatgccaaaattgctgggtaattg

SEQ ID NO: 801207 - DNA, 589 bp, Homo sapiens
gagagtacttttggaagatattaggatttaaattggaagactgagtgaagcagactgccttccctaacataggtgggcctcattcaaacagttcaagatccatatagaacaaaaatgcagaccatctctcaagtgagaggattcttccttcctgacagtctttgaacagaaacatcagctctcaagggtctccagcttgccaataaaccctcatcttgggacgtggtagcctccataattgtatgagccaattccttataatcaatctctttctctccatatatataaatcttattggttctgtttttctggagaaccccaaccaacactggtcaatttgacgggttggtaataaaagttagagatctacttgattttattttaaaattattatctacaatacaggtttcagatggytattaattaatggctccatagtggcctctgtttcaggtcaatacaaaacaaaaagctggagaggggaggaacagctgctttccctttgctggaaggctacaggccagctgcatcttttcaaggggcatggatgtcccatttgacagggtagaagggtataacaagaggatta

SEQ ID NO: 801208 - DNA, 655 bp, Homo sapiens
atcaggacttgctaaatggatggcaataacttagaataaaatctcaagagacagtggtggaacacttcattgagaactgaagcaccagataacatcagcaagatggcagaatggaggtccctggctctagtctcccatgccaaaatcctgattagtaactattcagacaagattgcctttgtgaaaatcccagaacctgagggtgaagatgaagcaccttcctggagcataaaaatcaagaaaacagagcattagaagaataagaggagtaattttactttsacaacactgcccctctcccaggctggcacatcaccacagagagggaacccgtatgcctacagtttctctggtgtgaaaaaaatccaaaggctgacattcagctttcccagcattccagggtgcttcccatgaggtgagaaggaagtgggccctgcttaaccagggagcctagccagcaaccttgccccaccaggaacacatccaatcatcgtgcctaggtaggtggggaacccagctggtgaccatgcccaactgcaaggcacagcatgtggccccacctaattatggaacccagcctgtgttcctacccaactgtgaagcatagcccacagccccactcaatcataagagcccagctagcagcaccacctgt

SEQ ID NO: 801209 - DNA, 591 bp, Homo sapiens
gtcaatttgaagtggacatttttgaatcacctacagctcacatttacttaatgatgaacaactgaatgtctttcatctaagtttaggaaaaggaaagcatgaccgcactcaccatgtttatgcaacattgtactagaggtcctaaccgatgcaataaggcaagaaaaggaaataaaaggcatacagattagaatggaagaaatwaaattgtctttatgcatagatgacacaattatctctgttgaaaatcttaaggaagctacaaaaaaaccactaaactgaataagtaaatttagcaaagttgcacgataagaaaacaatattcaaaacaaattgtatttttatgtactagcaatcaactatccgtaattgagtttttaaaataccattaaacagcatctaaaaatatgaaatacttaggggaaaaatctgacaaaggacatgcaaggcctgtacctgaaaactacagaacatctctgaaggaaatttaaaaacatgtaaataaatgaagggctgtatcatttttttagatcgaagacttgattacatgtttccccatacagatctatacattaatacaatcccacttaa

SEQ ID NO: 801210 - DNA, 611 bp, Homo sapiens
cccacaatttatcatccctttcctttgttaaaatgatatatacgtccctgagcctaatcactttgcatttcactacttttctgtgaactcctatgcacgtaaaaatataaatacatttgtattccttttctcctgttaacctgtcttgcgtcagtgaaatttacaggctccagccattcaacttatgggacagaagaaagtttttcctccctaacgtgatcaaacacatattcttctagagagcatttcatccctttccgaccaattcatttcatattacttccttctgattcctcttcacaacagaaacatttkggggttatcaactatgctaccttcaagccttgctcatgctattctacctgcttggaatgcctttccctttttcctcttctcacttaatctacccagcctttccagtcttcctcctgcctcttctgtcagaaatgaggcaggaataatacagggtggtcgcagaagaatagaaaattctaggcaggcatttcacatgactagcaaaaggaaactgttgaaatagccacaggagctaggggctgataggaccctgaaaaactagggtgtgggccaagctggctaagaccgactagacc

SEQ ID NO: 801211 - DNA, 665 bp, Homo sapiens
tgcagagtatacaattgtaagttcatcatacttatatttttagcttttgataggaattgcatgaaccagaattgtcagactttctatatttactggccaggaatctgtagcattactataaataatgaacatgtctacaaaagctcctgtatgaaaggccgtagggatttcccgaaacttgacaacaacccaaatatgtgtatgacatcattaagaatgaattgtgaagccaaaagaaacttttccaagcttcttgataataaaaaacaaattttgaccaaatatgctggagaaaaggctgcgttatatttccattctccatacttggtcttagccaaaagtctgagaagcaattatatttcttttataatttcttttgtaaattatatttacaaaattataaaataggcagctaataaacatatggaaaaagtatgatagagatgttttaagcagttatttaaagaaaaatcttaattttttggacttcaygtttgtgttatttgccattttttaaaaaattatttattgtcttgtgttcttttcttattctaaatattaacactcatatataattttatatttataatcttactttttttccttaaacaggatgcctcaaattttataagctttgggatcccacaaatcctgaatctccctgt

SEQ ID NO: 801212 - DNA, 665 bp, Homo sapiens
tgcagagtatacaattgtaagttcatcatacttatatttttagcttttgataggaattgcatgaaccagaattgtcagactttctatatttactggccaggaatctgtagcattactataaataatgaacatgtctacaaaagctcctgtatgaaaggccgtagggatttcccgaaacttgacaacaacccaaatatgtgtatgacatcattaagaatgaattgtgaagccaaaagaaacttttccaagcttcttgataataaaaaacaaattttgaccaaatatgctggagaaaaggctgcgttatatttccattctccatacttggtcttagccaaaagtctgagaagcaattatatttcttttataatttcttttgtaaattatatttacaaaattataaaataggcagctaataaacatatggaaaaagtatgatagagatgttttaagcagttatttaaagaaaaatcttaattttttggacttcacgtttgtgttatttgccatttttwaaaaaattatttattgtcttgtgttcttttcttattctaaatattaacactcatatataattttatatttataatcttactttttttccttaaacaggatgcctcaaattttataagctttgggatcccacaaatcctgaatctccctgt

SEQ ID NO: 801213 - DNA, 637 bp, Homo sapiens
aatgggaaatagaatgtgccacccccaaatatgccactttggcgtaagaattgttttgagctgaaggcaattcgctgtctgccatcccctattctgtctaaaaacaggacataaatttccatttgtaagggtgtctccctttcccataccaggaagagaaatactccagagacaacttttagcacctgaggcgactcttayctgcctaacaaacgttattaaacaacacttgtttattatacattttctcccttcaccttcccataacttacctcccatctcagaagcccaaaatcccctttcctttgtccagcctaagatggtttatataagctccaaattctaaatgcctcttcgaatcacatttcgttgtgaattcctgtgccagcatacataattgtatctgttattctctcttggtagtctgtcttgtgtgaatttaattcctggggcccccaaccactgaacacaggagagcagagaacaaatgtttttcctcccctacaagtataattaaaagtataggagatcttgcaattaagaattggcgtctgaaccaatattcccaatctctaatctcgaacctatttttttcctcctgaactgatggtatgttgacctagagatgataaagaca

SEQ ID NO: 801214 - DNA, 614 bp, Homo sapiens
tgcagatcttttttgctttcttctccccaggtcctgttcccattttccacaggtgcaatttcagatccctccctgcctccagcttcacagagaaaagagatctgcgaggctcttctttctgaatgtctacctcgcctccctcttcatactcacttgggtgtgacctttttccctttcttagactagatgggtgggagtgccactctgcaacagaagatgtgggatgtttgaggagagatactgagagtggtttggggcctacagggttggagatctctgggatacccaaraagaggtgatggctgggctactagctgtgcgaggctggagctcaggagaaaggcctagcctggaaacgtctcgccataccttgaaagattgttcaaatgtctcttttccacatacttggcctggccaacacagacacatacatgcccccttcccttgaagtcataaaactcactgcctctaacagtgagttagcacgcatcttacactgtcctaaagtcactggttcattgtgatgtgctttaatccactgagaccaacgctccttaggcctaaataggccttgtactctgcacccagcaaacacccatgaatgtagaccagca

SEQ ID NO: 801215 - DNA, 611 bp, Homo sapiens
cttttagctgtattttcttctgaactcattttatatattttttatttatttatttacttatattatcattttttttttttttttttttgagacagagcctcactctgttgcccgggctggagtacagtggcacgatctyggctcactgcaacctcctcctcccagtttccagcgattctcatgcctcagcctcccgagtagctgggattacaggcgtgcaccaccacgcccagctaatttttgtattttagtagagaccaggttttagtagagacctgttggccaggctggtctcaaactcctgacctcaggtgatccgcttgcctcggcctgcgaaagtgttgggattacaggcgtgagccactgcgcccggcctgcatataaattattattattattattattattattattttttgagatggagtcttgctctgtcgcccaggctggagcacagtggcgcgatctcggctcactgcaagctccgcctcccgggctcacgccattctcctgcctcagcctcccaagtagctgggactacaggcgcctgccaccgcgctcagctaatttttttgtattgttagtagagacggggtttcaccgtgttaatc

SEQ ID NO: 801216 - DNA, 611 bp, Homo sapiens
cttttagctgtattttcttctgaactcattttatatattttttatttatttatttacttatattatcattttttttttttttttttttgagacagagcctcactctgttgcccgggctggagtacagtggcacgatcttggctcactgcaacctcctcctcccagtttccagcgattctcatgcctcagcctcccgagtagctgggattacaggcgtgcaccaccacgcccagctaatttttgtattttagtagagaccaggttttagtagagacctgttggccaggctggtctcaaactcctgacctcaggtgatccgcttgcctcggyctgcgaaagtgttgggattacaggcgtgagccactgcgcccggcctgcatataaattattattattattattattattattattttttgagatggagtcttgctctgtcgcccaggctggagcacagtggcgcgatctcggctcactgcaagctccgcctcccgggctcacgccattctcctgcctcagcctcccaagtagctgggactacaggcgcctgccaccgcgctcagctaatttttttgtattgttagtagagacggggtttcaccgtgttaatc

SEQ ID NO: 801217 - DNA, 460 bp, Homo sapiens
gggcagcagtcccattcctacagctccactaggtagtggcccactggggactctgtgtgggagctccaacctcccatttccccttggcactgccctagtacgcagccatctatgagggctctgcccttacaaaggcttctttctggacaamcaggctttctcatatatcctctgaaatctaggcagaggctgccaagtgttcttaattcttacattctgcacacatacagggttaacatcacttggaagccgccaaggcttatgtcttgcattctccaaagtagcagcccgagctgtacctgggcttctgtgagccgtggatagaatgggaatagccaggatgtagggagcagtgtctcaaggctgcatagggcagaaggaccctggggctggcctacaaaaccattctgtcttcctaggcctctgggcctgtgatgagaggggctgtcattaaggtctc

SEQ ID NO: 801218 - DNA, 460 bp, Homo sapiens
gggcagcagtcccattcctacagctccactaggtagtggcccactggggactctgtgtgggagctccaacctcccatttccccttggcactgccctagtacgcagccatctatgagggctctgcccttacaaaggcttctttctggacaaacaggctttctcatatatcctctgaaatctaggcagaggctgccaagtgttcttaattcttacattctgcacacatacwgggttaacatcacttggaagccgccaaggcttatgtcttgcattctccaaagtagcagcccgagctgtacctgggcttctgtgagccgtggatagaatgggaatagccaggatgtagggagcagtgtctcaaggctgcatagggcagaaggaccctggggctggcctacaaaaccattctgtcttcctaggcctctgggcctgtgatgagaggggctgtcattaaggtctc

SEQ ID NO: 801219 - DNA, 591 bp, Homo sapiens
tggcaaaaaggcactgctcagagataaagaacaatttatcttctgctgtaaaaaagagcagttttggcagatagtaaaatacatcactgtataatatactctaggaacaacatcagaaaatatggattttttcttaaaattttaagagtactgattccacataccttcccaaataaaaggtaatgatagtgctaaytgcaaagtataaatattaaaaatctaaattacagtctaggagggcatatgcacatgactttatgagatgtatttttagcaatgattcagtaagaataatatttcacttaggtaactgaaatactaattaagcttccaatattccatgtattaccactattatatcaaattgcatattgccagattagaatggtgggcttcttctagatgttattttacctaccaggttatagtttatggattatagagtttatcatatccagatatttataaatatcattaaatggtaggatggttcccctctttttgagatcctgctttttacagtttctttttctatgtgtaatacttataagcaattaggttattgatggcctgatcatgtcttatttgttt

SEQ ID NO: 801220 - DNA, 568 bp, Homo sapiens
tcctgttatctgttgattataattgtcaagggcaaaagccttcccatataatttaaaatctgggatcttcttaaaattataaccacatttcaaaatcttacaacaactaggtcattgcacttcaaacttttctgcttaaaccgacagtaagaatacccttgaaatcttaacatagcacatacacacacacacgcaagtacacacaaaataraagttaatcaaagaatactttacctttattatgtaaaatgccttatattttagtacattttatttaataatacctttagcaaaaagtacattttcttcaaagtagactgtgtcctgtaatttaaataatttaaataatatttccaatgtatatctcttaaaccactaagactgcaggaattatttaaggcagggactgttgatatatggatttaaaaaaaaaaacacttaaatacattcatttcttcacttacccttccattgattcattaattcaaaaattagtagatattggcctgatacatgaaagcttctgtgctaaggccctagggatagctgaatgagcattttaccacta

SEQ ID NO: 801221 - DNA, 446 bp, Homo sapiens
aaaatcacatgaaaggatttggccaatggaaacttgacatcctcataataaagcagttttgatggatgagtatttatttggtgctgtaacataggcatggctggggggtacctgtatgataacattgcagtcaaacatatcttgtgacaggacagttttttgtggggaggagaattagaccaagttcggagatatatttaaggaactaaaasgaacgtaagatctggggtagggggatgagcagctccacaccctgctcctgtgtgagctgtgtgctcccgactgggaaatgtctaactccatcgaaaacatgagatgaggggcagggaaggggctacttccaagcctttcattataatactgtgtgtaaccttttgcatattttcagaaaagaaaccagtaaggtgggttcagttgtgggctcatcctgacttagaaaattttaa

SEQ ID NO: 801222 - DNA, 600 bp, Homo sapiens
tgcattaaacggactaggaaactttggaggcaggaagagatttagcttatgagagaatgggttttctttttttgtttctttcttttttttttctgagatggagttttgctccagtcaaccaggctggagtgcaatggcatgatcttggttcgctgcaacctacacctcttggattcaagtgattctcctggcccagcctccctagtagctggaattacaggcacctgccaccatgcctggctaattttttttgtatttttagtagagatggggtttcgccatgttggccaggctggtctagaactcctgaacctcaggtgatccgtctgcctcagcctcccaaagtactgggattacaggcgtgagccaccatgcctggcctagagaatgggttatcccaggagactatactaagatgtgagcacatagaaggwgagttccttctgttaatgcacaatgaaacaagtcaaaggggtaacataccagaaaagagatttgttggacaaaaataattaagcccctggcattaagctgatatgcagtggatcattcttgacaatttgtgtttcaatccctggggatctttaacaaaaagcaaat

SEQ ID NO: 801223 - DNA, 576 bp, Homo sapiens
tcaatgtaatcccatttatttagttttcttttttctagcttgaggttttggtgtgttattccagaataaaatttactacttaacctttattttcttttattatccagtgtgagtttaatgttcatgtggaaactatatccaattcttcatttaatctctttttctttgcaaatgccttaattgttcatttactgtggcaaaaagtcttgtcatcaagtagaactattcacttttttttttttttttaacgtaggctagatgctaaatgatgtaagggcatttcacacctgacactacagcactggaaraaaccaaatgccccttcacttccacaatcatagtccggtctttgtttcatgcaaaaactgctttagtgttttaagtggttatctaatcctttggctctgcctttgaattcaacttcttagggattatgagggtttcattttgtttggttttatttgcctgcaataccaaattaatcacactactgtattttatgaatttctggttataaacaccagagtaaagacaattttagtttattatcctacactaaaactccctaaaagtaac

SEQ ID NO: 801224 - DNA, 554 bp, Homo sapiens
agatggggaatgtgtgtgattgggtgcaataatggtagtttttggattcagggattctgggctctgttgtgagcaagtagtttatagttcaggctattacattgtgctaaacctgagattcattctttgaaataacacttgttccgcttaattcacrtgatatttgtggggaacaaattagacaatttacataaaattattgataaatgattaagtgttatacatgtgtgagtcttcccattattcccattgactaatctacacttcatactcattcttggagttttctgggtgtaaaaccccaaaacacctccccaaaaagctattatatgcagctccatcaaaaatattttgactgctatctttattacacgtaacccagtttccttgtttcccagcttggaaagcttactagggaggagctgtgatgactgacaaagtgcatgcctattcttagaaaaggtaattcacctctcttccttctttcttctttacccttttgagcacaggctgtgctattccagggtcgcatagcagtctagggtggataagag

SEQ ID NO: 801225 - DNA, 614 bp, Homo sapiens
gagaattattctagcaatgtatttaaaatgataaagaacttccaaaacaaagttgaggattgctgacttctttattttacccactgaggaattatattagttaattctgccctcttcaggtttcccaaacatatagaaaaccaggccaagacctggagatagaacaagtgctacgctgtgtggacatacgtttgaagtatcatatatttgtgtaaattttgagaaatacagtcatgcagtttaygctcaaagatctagaatggaaaatcctgagcagctcacagttagcaggtatttcacaatgagaatctgaagtggacgcctaacacagccctgccattgctggaatcaaatttgaggacaagtagaggaagaagttattccatgtataatcatcttgactgcagctgatgagagttagttgaagagaaatgtacagacctcctggacaaacagccatatgggagtaaacatgtccaatgaacagagatgtatgcacagagcagagagtagaagatatttgataagtaaatatttggaggcagctcacctgaattaaatcttccacagttctgtattaacattctcccagccccagagattgcttctgtaaa

SEQ ID NO: 801226 - DNA, 653 bp, Homo sapiens
atattaatttttgcaaatgaaggaagagggacctgagagatgaggcagatagtacagaagaatcaaagaactctcaacttcttatcctgcccaagttgaatagatgaatacctgttaacaggttaaccatctatacaatggaggggggaaaagtaagtttctgggtatgtatatctcttattcatttgaccgtagtgaatcaaatcctaatagtaagatagactgacacatacaaacctagaacataaaaaaattttcaaagagaaaattctgacccagaggccatgtcttaytaagacaaggaacagtttccatttaattcttagaaaagtacaaggaaaggctcacaataaattcctttaataatggtctttatgtacaaaatcagaactgtgcacaaggcaaaatttattttgaacatttttaggtaatgaaataatacttcaaagggaatgagtgaggtcccactgaccaaggtttaaaactcagctctgatacatagtcatgcactgcacaaggacattgaggtcaacaatggactacatataaaatggtcatcccataagatacaatattgtgtttttaccataccttttctatgcttagatatacaaatataattgtgttgcaactgcctacagtactcagtacag

SEQ ID NO: 801227 - DNA, 653 bp, Homo sapiens
atattaatttttgcaaatgaaggaagagggacctgagagatgaggcagatagtacagaagaatcaaagaactctcaacttcttatcctgcccaagttgaatagatgaatacctgttaacaggttaaccatctatacaatggaggggggaaaagtaagtttctgggtatgtatatctcttattcatttgaccgtagtgaatcaaatcctaatagtaagatagactgacacatacaaacctagaacataaaaaaattttcaaagagaaaattctgacccagaggccatgtcttactaagacaaggaacagtttccatttaattcttagaaaagtacaaggaaaggctcamaataaattcctttaataatggtctttatgtacaaaatcagaactgtgcacaaggcaaaatttattttgaacatttttaggtaatgaaataatacttcaaagggaatgagtgaggtcccactgaccaaggtttaaaactcagctctgatacatagtcatgcactgcacaaggacattgaggtcaacaatggactacatataaaatggtcatcccataagatacaatattgtgtttttaccataccttttctatgcttagatatacaaatataattgtgttgcaactgcctacagtactcagtacag

SEQ ID NO: 801228 - DNA, 621 bp, Homo sapiens
tggcacagaagaacggggcaaacttcccaccacagcgtgtgccctggcactcatcacacatctgatcatccagcacatatggctttacttcaacctggacccaaagaggaaagacagagaaaaatgatttagcaaagcttccttacatgtcttgcttttgagagtttacactatagcttcaacgtatgtctcaatcagacgctgctttcaactctgctgatactggatggtrgttgagagcatgggctttggaataagctccttgatttacatcttgcgtgatattagacaaattcttaaaatctctgtgcctctgtttgctctatcactgtatctgtaaaatgggtatgtttacacacacataaacacattacacacacacatttgtgtaatctgtaaatgggtataacagtgtttacatcaaagggtgctggggaggattaagaggggctgtgcacgtcaaagcgcatgagctgaatcctgaaagccgggcagcatctgacaatgcaggcaaagaagaacattgcagggagaggaagcagccaggacaaaggccataagcaggaggaggcaggcacatccttgggagatgctgtagctgaagccaggcccgagggcaag

SEQ ID NO: 801229 - DNA, 562 bp, Homo sapiens
ggcttcgctgccttcagcctgacttgagatcaaagccaaaggcagctgggcctggggctggggctggggctggggctggcggccaggcgagaggaggccaggtggacagaagtgtgactccccacactgccaccaggccgcagtgcagctgaggacagctctgccccctacctgggctccaagctgccctcccagggccagagagggaggcagggtatggccacgcacgggcacactagatgccatcctcagggctggaggcagcaggcgcagccctagtcccgctcactctcgttgctggcgccctcgggccgccgcagcttctccacctgctcgttgatctgcccatccccgccccggcggtcctccctctgcacccccaggcagtcctcctcrtccacatggctcacatcatcatcctcctcatcctcctcgtcctccttgtcctccctcttctcctcctcgccttgcacctccatccgcacctggcccttgacgtccaccaccccctcgccttcctcctgggggcccagcaagtggtaggtgaccgtggagccctcgg

SEQ ID NO: 801230 - DNA, 573 bp, Homo sapiens
gcagggaggtcagtgcagaagagggacccacgtgggcaccatcaacagggttacacccacatgggacccctgatctggcatggcgccagagggcggcatttagggagccctcggcttcccctggcttgggaggcctctcctgccccgccccctccctaccctggcacagcaggggtcctgggcttcccctcctcatccctgtctgcagaagggccacacaggcctctcccccggggggtggcagcccaaccagctctgggggacgtggtggctgcttcctggccagtttgggtgggaagtgaggacacgtcctggcgctaaytgaagctgaagggggaatctaggtcggcagagtgcaattagccaagttggactcgggccaagacgccagctatagctgcctctaatgagggacaggccggctcctttcccgccggctacccggcttccctggctgcgcctgtctgcacagggggagctgcctactcacagtaggggtgccaagtgccccagggctgtgcggggctgcaactccctgccctaaggagcaccttgtccttggtaccagaaggt

SEQ ID NO: 801231 - DNA, 481 bp, Homo sapiens
ctaaagcatggaggtgactgtgtcccaaggcactggcagctctgcccagcctgttcctttcccaccctctggccctcagcgactttggctgcatgtgcctctggcagggcagaaccagaagtgggggcctagtggccttccaatttggggttcttggagaaggagcctggcgtgccctccttggggagcaggtggacagactggatgttttatggagtctgggrgagtcctgcggcagctatatctgttaaatgccaagaagccaagttggtttaatatgattgtagctgctgctttgataaatcaaaataattaaaaataataaatttgattcctcaaccaacaggctgtgtgtgggcgcagggcctgggctgccgagtcagggccgaggaggtgggagtgggcacggggacacaggaaggcctgtcttgtgggatcctaaatggggagtggacggcaacagggcggaaggggagactgc

SEQ ID NO: 801232 - DNA, 552 bp, Homo sapiens
aatgtaaggctctgctctgttttgcattagattacctgatctttgtgcattttaggggcatcagaaattactttagtaaggaagagagatataaagaaagttacagatatgaagatatacttatggtaaggaagaaattttatattataaaggatcttttacggtaaattattgtcctaaagtagaatgactaattatttaggaaagagggaaatataagacaagttagaaagtccaagcatgtcatagagggtctgtgtaagttgtgatcrggttcataaaataggaaagaaaaatttacagctgctagatcttcttttgtctgtgtatttacaagtgttttttgtgtgtgatgtttatataaagaatttctaattaatcagcttaaagaaaatgaaagcacttaaatattttgacagaaaaaatctctaatgctgtttagtttatgtgactttagtaatttttttgtaaataaaatgttaaagattattggtaaaataaaaatatcttcaaaatatagacatttggtctaaattaagtcagagaataaat

SEQ ID NO: 801233 - DNA, 567 bp, Homo sapiens
ccatggccatcgtctcccctcccttcgcagcgcagcttcctgaggcacggagatcaccccgtgtgcacgtggccccacggtgggagaactgctcaggggctgcaggctcatcctccagtggcgtccgtggatggaggagctgtcctgaccctgctctgctgtgaccccgctcagcatggctgacactcatgccctgtggccgcaggaaccctacatgctggtgggtgtaaggggcactcagcttcctcaccagggagggacctcttggcaggaagtggcctgagttggtygggggtcacctgggccatcctgtggctcagccccctcctctgccatccagggtcccccatgaaaccaggtcaccattagcaccgctgttattgccctcctggggcctggggggccctcactctaactcactggcacctcttctcaccttgctgggtggccacacctgccagctctggcctttggaaaccttgagacagcagtggtgggcgccagctcacgtgtggcccaaccttcagagcacgcactgcccagcgtgcctgggaacctcatcctgtg

SEQ ID NO: 801234 - DNA, 451 bp, Homo sapiens
gacacgtgtcacagtcgtcagcgtactcaggctggggatgcgtcctcgccaccctcagcccacagagctgggtggaaaatggaacaggatctaaagacactggggaggtaggaaaaactctaagatggccccaaggatgtcaggtgctggtcccagatgtgaagacagatgtgttccctccccactgggctacgtttttgaccttaagacagggctgggtggrcgccatccaaccacatgggccttcgaaagctgaacgttctccagctggaggcaggagagaagggcatgcgggcatcctatgcaccttgctgggtgacagtggaggagacacgtgccgaggcatgcaggtgcccttcagggggtggctgtggccccccgaatagccagcaaggacatggagacctcagtcctgcaaccacaaggatccagacctgccacagccccagtg

SEQ ID NO: 801235 - DNA, 628 bp, Homo sapiens
tgcttacacgggcactagaacaccctgggctttgcagagccggggagcggagcgtgggaggagctcatggaattcatgctgtggagactgggcctcagcaccttgcagggatcagagaggactgactttccctgggaggcttactgcaaggaaaggtcggcatcaacatggtaccacgaataccktgagcactgcctcgttagactgtttgctcaatagcaaggaggacattcagaagctactccatcaagtgctcatcgcccctgtggagaagcatgacgagatcaggaatttatgaagatagcaattacaaacactccagtatcttaagtatgtatttagtggatctattcctttaacgggggtccatttccacatcgctgcaaagcagcttaattgcacactgcaaatgttgtctctgtacatgagctctgccttccatctcttgcacaaacaagttttctgcaagttattttgggggcttcgagcgtgggtgtgaggggctgggtctgcagggatcgtcgtcgagcggccgcagcctcccaggtcaatgctgccaagctcctgggcagatctgccagcctcggcccacagtgagggacaggttttccagggcccttcaggtgtc

SEQ ID NO: 801236 - DNA, 582 bp, Homo sapiens
ttgaactcctgacctcaggtgatccacctgccatggcctcccaaagtgttgggattacaggccaccacgccggctaatttttgtatttttaatagagacggggtttcaccatgttggccagtctggtcttgaactcctgacctcaggtgatccacctgccttggcctcccaaagtgctgggatgacaggcctgagccaccgcgcctggctaacaaacagtgggctctaaattaattatagactgggcagggcaaacgtttggggatctttacgtttttattatgtcatagacggtaagcgtcatgttgtcagagcagcttckgcgtgggcagttgtaggaatttcatctgtggcccagaacaccatctgctttggggaaacctttctgtctttctgttgaatcactgcctgggttatcttctgtttaaatcaattcctttaaagtgagattctgacctaggctgaggtctaagtgttgctaaacctcctttaaaatgcagtgggcatcggcgagcaggtgatgaaaccacaggggctcacgccgactagaagcagcacggaggacaccgtgatccctgcaga

SEQ ID NO: 801237 - DNA, 582 bp, Homo sapiens
ttgaactcctgacctcaggtgatccacctgccatggcctcccaaagtgttgggattacaggccaccacgccggctaatttttgtatttttaatagagacggggtttcaccatgttggccagtctggtcttgaactcctgacctcaggtgatccacctgccttggcctcccaaagtgctgggatgacaggcctgagccaccgcgcctggctaacaaacagtgggctctaaattaattatagactgggcagggcaaacgtttggggatctttacgtttttattatgtcatagacggtaagcgtcatgttgtcagagcagcttctgcgtgggcagttgtaggaatttcatctgtggcccagaacaccatctgctttggggaaacctttctgtctttctgttgaatcactrcctgggttatcttctgtttaaatcaattcctttaaagtgagattctgacctaggctgaggtctaagtgttgctaaacctcctttaaaatgcagtgggcatcggcgagcaggtgatgaaaccacaggggctcacgccgactagaagcagcacggaggacaccgtgatccctgcaga

SEQ ID NO: 801238 - DNA, 527 bp, Homo sapiens
gtttcagttctcaagggaatgtttctgccatttgcccattcagtatgatgttggttgtgggtttgtcatagagggttcttattattttgatgtgtgttccttcaataccttttttcgtaagggtttcttttttatcatgaagtgatgttagatttcatcaaaagctttttgtgmatctattgagattaatgtatgatttttaattctgtttatatggtgaatcacatttattaatttgtgtatattgaaccaaccttaaatcccaggatgaagcctacttgattgtggtgaattaactttttcagttggctaatattttgctgaggattttcgcatctatgtttatcagggatattgacctgtagttttctttttttattgtgtctttgttcagttttggtatcaggctgattctggcttcatagaatgagttacagaggtcttctccttaatttttttcaatagttaatatttaatttctttttgaattatagcttgtataaagctactactgtagcactcaaatg

SEQ ID NO: 801239 - DNA, 526 bp, Homo sapiens
tgaaaaaaacgtattccaaaagaagttaatatgtcctcaaatcacacagctttggagtccccaaaccatggattggacaggtctcatttcatatctcaaatccagccattgttctgtcatgtttgcaatatactagaaatatgctccctsgttttagttttgccactaattgacggaggacttgagtaatttgctattgttatttcagctttctcatttataaacaagagtatagttctatttaattctgacttattttgactcaactctatttttcagtaattccagatgtttagaaatgggtaaatgtgtagaaacttacttaatgtctccttaaaggagacacatgctgtttgtttaactaattagcataattccgtgaaagattgggattatgttcttctttgtccatgtattttaaatggactgacttttcggcaatggtactgacaagttgtttcagaactttatgttccacaatctccgccctctctaaataaagataataaactgaagtgacattgca

SEQ ID NO: 801240 - DNA, 597 bp, Homo sapiens
agcctggccaacatggtgaatccccgtctctactaaaaatataaaaaactagccggaagtagtggtatgcgcctgtaatcccagctacttgggaggctgagggacgagagtcgcttgaaccctgggggtggaggttgtagtgagcagaaatcatcccactggactccagcctgagtgatagagtgagaccccatcttaaaaaaaagaaatgcataagacgtatttagtgaggtcaacactgctaactgcaatgaacarcaccatatggaactaaccaactaaccattaccattactgctgcaaacattatctcctgagaaaatttctctaggcactctctttgtctttgcattaacaacttaagatcaaaatctgggtggtacacctgtttcttctagtttaaatgatacacccaatccctccgtagttgcaaggacactgggagagtgaggacctgggttttccagcttctaagagataaggctgtatttgagtaatttctcaaacagatgaatggggtcataaacagggcaacccagtgagggacagattaattggcttgatgtattgaaatgctttaatataaaacatgatgca

SEQ ID NO: 801241 - DNA, 609 bp, Homo sapiens
cttttcacgtggtttcaagacaagtgtcaaactttacatttgacttagaaaagccacaactcatattcagactccttctgcagtggcagaagactgctgggctctaagccccaggaagacggggactgtgtgtctttttccttgctactatattgctggggtctaatgtagcatctgacagagtaaggcactaaataaatgtttgttgattgaatgactaaatgattaaaaagtccctttaaagcactttttttttggtgttttttgtttttgtttttgagaaggagtctcgctctcttgccaggctggagtgcagtggcacgatcttggctcattagaacctctgcctccgaggttcaagtgattctcctgcctcatcctaccgagtagctggtattacaggcgcctgccaccacatctggctaatttttggattttttagtagagacggggttttcccrtgttggccaggctggtcttgaactcctgacctcaggtgatctgcccgcctcagcctctcaaagtgcagggattacaggcgtgagccaccgtgcccagcccaagcacttttaaaaactgttttgttactccatcttacatgtgttacac

SEQ ID NO: 801242 - DNA, 597 bp, Homo sapiens
ataaaagagcaccaacctgggctccttaaggggataaaaggaaggacaggacaggtacggtggctcacacctataatcccagcactttcggaggctgaggcagatcacttgaggtcaggagttcgagatcagcctggccaaaatggcaaaacctcatctctactaaaaatacaagaattagccgggcgtggtggtgcatgcctgaatcccagctacttgggaggctgaggcaggagaatcgcttgaacctgggagacggagtttgcagtgagccgagatggcaccactgcactccagcctggatgacagagggagactctgtctsaaaaaaaaaaaaaaaaggtaggacaggaagctcagtgagggtggcaaggagggctgggtgctggcctggctcatcctaccatgatgaggtcaagtggccccttcacctctctgagtctcggttccctcctctgtcaaatggcaggttcttcagagctccaatcagcaataatgacatttcaaatcaacgcagcttcccaaaagattccagatgacctgtccaatggcctttccaaatgtagaaggcctggatcccttgagaagacagttctc

SEQ ID NO: 801243 - DNA, 613 bp, Homo sapiens
acgttggaaattaactgtgaaggtcagagggcctttctgatggcttacaaagaggcccttatctatagcagtgagagagcaaaaaaatctgaagaccaaactcgaggacttcaatagagctcccagaggcagatctgcaatcaaggtcaggactctgcttgggaaaaccygggaccctaatacgtggaatagaaatatctgggcaggtccccccaaagattctggctttctgcactcctctgaaccctcagagccttaagacactgcagaggcctctcccctcccatgatctcctgactgtgaagatcttaatcttaaactctcatgggttaaattacagcatagtctggtagctaaggacatactaggcctaataaggaaagaaagggactataacccaaagtatcctgcaagaactggccaacgtttagtggtaagagtagggaagtacccatgggattggattttgacagtgcttaatcaaggggatgaaatataaaagtggattaagggcaagttttttaacttggggaccactttcttgggatagaatataacttcctgcccgggcaccgtggctcacacctgtaatcctagcactttgggaggccga

SEQ ID NO: 801244 - DNA, 613 bp, Homo sapiens
acgttggaaattaactgtgaaggtcagagggcctttctgatggcttacaaagaggcccttatctatagcagtgagagagcaaaaaaatctgaagaccaaactcgaggacttcaatagagctcccagaggcagatctgcaatcaaggtcaggactctgcttgggaaaacctgggaccctaatacgtggaatagaaatatctgggcaggtccccccaaagattctggctttctgcactcctctgaaccctcagagccttaagacactgcagaggcctctcccctcccatgatctcctgactgtgaagatcttaatcttaaactctcatgggttaaattacagcatagtctggtagctaaggacatactaggcytaataaggaaagaaagggactataacccaaagtatcctgcaagaactggccaacgtttagtggtaagagtagggaagtacccatgggattggattttgacagtgcttaatcaaggggatgaaatataaaagtggattaagggcaagttttttaacttggggaccactttcttgggatagaatataacttcctgcccgggcaccgtggctcacacctgtaatcctagcactttgggaggccga

SEQ ID NO: 801245 - DNA, 646 bp, Homo sapiens
gtcctatttgtggtctaaaacctttcaatgcattttgacacttccagtcattgtgatgattccttaagttctgcttgctcaagggagaattaaacaaacactatatttcccagaccccccttatatcttgggtgtggacaagtgcctacatttcttcaaacacacatggcaagacttcagttggaagggagtttgtgcagctgcattctggtggtgcrggcgtagtggctgagatcaccacatccacattgcattcatcctcctccacttaggccactttcaccctgttttcaagggagacagccacacaaggctcctcatgctctcacaatttacactctaaaaagatgtgttaacggaatgtgctggatctttagctgggaaagttgaaatactagaggtggggctggggagaactgggctctaaagttggcctttgaggcaggtaggaaattttccagaaggtgggaaaacaatctctgaccaagcagcatctctatcccagggtcctcaactgacatactatcaggtgggtggtagtgctgtggcatgggctgtgagtggtggtgagtggagggagtctgctctcttgtttgatacagttgttcagaagaagtcaggggctgtcatatatatatggggtggg

SEQ ID NO: 801246 - DNA, 635 bp, Homo sapiens
atcatacctagccttttcttttttttttttttaagcaggtcaatttgaagaaaaatattaggtagttattagcacaggagatacgtaacatggtaaaaaccatgaaggacgtgtgcaaatgactaaagtttgggaaacactgttttacactctctgtcrtttctcccaccaacagtatcctctctcagccctctcccgagcagtctcattcactgcttttttccttctgacctatacaagctgacagtgcctccgcttcatcttacatcctgacacagggtttggtaactcatttcaggtctttatttcctcaaaaacagactgaaaaaactcctccagggcagactccctatccttaagatctcacccagtccactgtaaggtacctatttcaaagtttcaaacacagcaaaaacttggcaaacaccagttactgcaccgaagcccagtcatcagaagatttcaacttctaccaatttggggtgacatccgcctaactaatcttgcctccaaaaagccaattccaaaagcacatgttgcaagggagttgggagtgacacagtaagtaacagaagcctagggaaagtacttgagggattcggtggaactgaatctcgcatgaactacagagaata

SEQ ID NO: 801247 - DNA, 635 bp, Homo sapiens
atcatacctagccttttcttttttttttttttaagcaggtcaatttgaagaaaaatattaggtagttattagcacaggagatacgtaacatggtaaaaaccatgaaggacgtgtgcaaatgactaaagtttgggaaacactgttttacactctctgtcgtttctcccaccaacagtatcctctctcagccctctcccgagcagtctcattcactgcttttttccttctgacctatacaagctgacagtgcctccgcttcatcttacatcctgacacagggtttggtaactcatttcaggtctttatttcctcaaaaacagactgaaaaaactcctccagggcagactccctatccttaagatctcacccagtccactgtaaggtacctatttcaaagtttcaaacacagcaaaaacttggcaaacaccagttactgcaccraagcccagtcatcagaagatttcaacttctaccaatttggggtgacatccgcctaactaatcttgcctccaaaaagccaattccaaaagcacatgttgcaagggagttgggagtgacacagtaagtaacagaagcctagggaaagtacttgagggattcggtggaactgaatctcgcatgaactacagagaata

SEQ ID NO: 801248 - DNA, 638 bp, Homo sapiens
tcactcttagattatcttgcaaagcttgtctttttggctttcttgtatctgtattctctcaaaaaaaaaatctttcctacagttgcaaagtaaaccatctgaatataccatagttgtctataactcaatggttcttaattgtcattctcgttacacctaaacccccactcttagttttagtctctccataacttagattcaaattctcttcaacactgttttccttacctcctggcaggaattgtcagttatacttttattatgctggctcttgtttctgtagctttatcctggtcccaaagtggaaaaaaattatcttcttctttctattcattaatttcaaggtggaatatgtctacactttctctaatacctatatcagagtctttcctctggcagggaggaccacaatctttcttcaggattctgtccattttcatcacttcccttaaatycttctgaagtcacattatggctcctttcccatggccactcttacatctctgcaacccatctttcccgtgatgacagcctaatcttttaaaatataaattgtattatattgcttcactcttcaaaaattttacttatggctatagtatagagttcaaactcttcattgtttccaaaagtctttc

SEQ ID NO: 801249 - DNA, 638 bp, Homo sapiens
tcactcttagattatcttgcaaagcttgtctttttggctttcttgtatctgtattctctcaaaaaaaaaatctttcctacagttgcaaagtaaaccatctgaatataccatagttgtctataactcaatggttcttaattgtcattctcgttacacctaaacccccactcttagttttagtctctccataacttagattcaaattctcttcaacactgttttccttacctcctggcaggaattgtcagttatacttttattatgctggctcttgtttctgtagctttatcctggtcccaaagtggaaaaaaattatcttcttctttctattcattaatttcaaggtggaatatgtctacactttctctaatacctatatcagagtctttcctctggcagggaggaccacaatctttcttcaggattctgtccattttcatcacttcccttaaatcyttctgaagtcacattatggctcctttcccatggccactcttacatctctgcaacccatctttcccgtgatgacagcctaatcttttaaaatataaattgtattatattgcttcactcttcaaaaattttacttatggctatagtatagagttcaaactcttcattgtttccaaaagtctttc

SEQ ID NO: 801250 - DNA, 587 bp, Homo sapiens
cttaggcatgagaattgcctgaacctaggaagcagaggtttcagtgagccaagattgtgccactgcactccggcctggatgatagagcaagactctgtctaacaacaacaacaacaacaaaagtcttgaaacaaatgaaaatgaaaacagaatatatcaaaatttatgggatacagcaaaagcagtgctaaaagggaagtttatagcaataaatgcctacatctaaaaagaagaaatatttcaaataaaaagcctaatgttgtacctcaaggaactagaaaaacaagaacaagccaaacccaaaattagtgaaggaaagaaataataaagatcaaagcatagtacattggctaacacctgtaatcccaacactttgggaggctgaagggggagcattgattgagyctgggagttttagatcagcctgggcaacatagtgagactccatcagtataaaaaattctaaaaaataggcaggcatggtggcacacacctatagtcccagctactcaggaggctgagatgggaggatcacctgagcccaggaggtcaaggttgcagtgagctgtgatcgtgccactgcactc

SEQ ID NO: 801251 - DNA, 594 bp, Homo sapiens
gtatatatcgaataaacgagtgtcacaaaggcggtgggatttgagctgggtactagtggaaaagaactttccaagtaagggttgggcaaacaccatgaacaaagacagcagtgaaaatggacgcagtgtgcacagaccacctagagggtgcaggttgggtacaagtgaaaagaagactgaataaagaggataaacaaacaagaaaaatgtcatttaattgtagtgggccctggaaaccrttgacttacggacgtgggagatccatgatgcaaaatttctctggcagtagtggccagatggattagatggaagagggagcactagggagataaggagaggctctgcagtgaacgggaagggagcggcgatgacacaatactcagaaaggacgacgttcgtaatctgctggaaaatgccttttagaagactttagaggattgtaactgaaaaggtgaattaaattaatgtctttatctttcaaataattgcactgccttacacaaatgattgacatgttgagaggtgcctggaaagataggggaaaagctctctgaatggtggctggaagacattttttctttcatggacctagct

SEQ ID NO: 801252 - DNA, 598 bp, Homo sapiens
ggtggatcacttgagaccaggagtttgagatcatcctgggaacatgacaaaaccctgtctctaccaaaaatacaaaaattagcagggcatggtggcaggtgcctgtagtcccaactgctcaggaggctgaggcacgagaatcgctcagacctttggggtggagcttgcagtgagccgagatcggaccactacactccagcctgggcaacagaggaagagtgtcttgaaaataaacaataaaataaataaaataaaaaataaaataaaacaaaataaaaagaaaacagtatcttggcttggaaaaaatctctagttacgggtgtctgagatgaagggcgggagtgtctgatgctcyttggtttctgaagttcgtgggggaagttcatgtgctgagattctttctcttggctgaccaaagtcctgaacacttgacaattttaatcttttaacattgaaacttgtatgatctcagcgtctgtgagctcaaggatcacagtttcttacaccgggaaaaacaccttgatgtctcttgcagagagaagaaagctgaggcaagatttaagattgtggaagaaagagcctggcttacgaattttta

SEQ ID NO: 801253 - DNA, 576 bp, Homo sapiens
aataacatttttctagtgcatttcaaatgttgatgctttatataactcactattaattaaaataaaagccctgagatatagacattaagttcccccattatagacaaggtaatgtaggtttgtagaagtggcaaaacaaggtttctagtacagacatatttgactataaagttttgactatttcactttatcaaaatattaacatccmggcagcagcttgccaaagacatcactgagtctatgggaattctgtgtcagtaagaaaactgaacctcctacaaaaaaaaatctctttcacctgtcaacatggagaggtaaccctagggagaagtaacttaaggacaacgaacctgaaaccttctgcaccatcagaaatatggttcccagaggacgtcacacacagagggtagaagccaggaataatgcaaagcctctgattttattcttgaggtagcaaagttggattgctcaggttcttgttattgattatctctttatgcctcaaattttaactcagtatttatcaatgccataccatagagtctattgtcataattatatttcaccagggatcag

SEQ ID NO: 801254 - DNA, 576 bp, Homo sapiens
aataacatttttctagtgcatttcaaatgttgatgctttatataactcactattaattaaaataaaagccctgagatatagacattaagttcccccattatagacaaggtaatgtaggtttgtagaagtggcaaaacaaggtttctagtacagacatatttgactataaagttttgactatttcactttatcaaaatattaacatccaggcagcagcttgccaaagacatcactgagtctatgggaattctgtgtcagtaagaaaactgaacctcctacaaaaaaaaatctctttcacctgtcaacatggagaggtaaccctagggagaagtaacttaaggacaacgaacctgaaaccttctgcaccatcagaaakatggttcccagaggacgtcacacacagagggtagaagccaggaataatgcaaagcctctgattttattcttgaggtagcaaagttggattgctcaggttcttgttattgattatctctttatgcctcaaattttaactcagtatttatcaatgccataccatagagtctattgtcataattatatttcaccagggatcag

SEQ ID NO: 801255 - DNA, 576 bp, Homo sapiens
aataacatttttctagtgcatttcaaatgttgatgctttatataactcactattaattaaaataaaagccctgagatatagacattaagttcccccattatagacaaggtaatgtaggtttgtagaagtggcaaaacaaggtttctagtacagacatatttgactataaagttttgactatttcactttatcaaaatattaacatccaggcagcagcttgccaaagacatcactgagtctatgggaattctgtgtcagtaagaaaactgaacctcctacaaaaaaaaatctctttcacctgtcaacatggagaggtaaccctagggagaagtaacttaaggacaacgaacctgaaaccttctgcaccatcagaaatatggttcccagaggacgtcayacacagagggtagaagccaggaataatgcaaagcctctgattttattcttgaggtagcaaagttggattgctcaggttcttgttattgattatctctttatgcctcaaattttaactcagtatttatcaatgccataccatagagtctattgtcataattatatttcaccagggatcag

SEQ ID NO: 801256 - DNA, 626 bp, Homo sapiens
ttggggaaactgacatatcgaatattgtcaataattccttctactttaatagctgtgataacatgagagaaagatgaagcttctttccttgaggaaataatatttgagtaaacatctattattttatttttctgtatttttcattgtcctgttttctttttggctaaaacaagtgccagcagtaattttcactagtagaactagggacaccaagaggaataaaaaaaatatgaatagctgccgaaagtgcttccttagactcctttccacctggaaatctggatcctgagtgttctgtctccaggtgccwtgtcttggctcttgtcatgaagtatttctgacatgagaccatttgaaacctcacatgaccaattaaaatagcctcaactgcctctttagtgagatttgctcaatatactcagaagagttaatgctggtaatacattcttttgtcatatgcaaatagacaagccaggacagagtgtgtgacactgaatattgtctgtaaaactgacttttagcttttatgtgtgaattgttcgggctctaaaagtgacattgataccacaaataggagataagtgaaattattatgaaagaatataatcaataagtgatgaacagta

SEQ ID NO: 801257 - DNA, 645 bp, Homo sapiens
cagtactttagagaacctcctgaaagtggccaccctggtcttttataatagatacaagaagaccccagagagagagagagaagacaaaggaaagaggtagaaactttaatggccaccatggaagcccacaagccccagaatctctgaggtgcacttgttaacagctacagatttggtaaatcagggcattttagggaggattgcctaggcagcatgaaaaacccatcttgaccctgttcaatctacagtgaggattactggaaggtgaacttcccccagggatkctggtcactgggcccagagccaatttcccaaatggtccagtaggaatgaggagtcgtggggcttctctccctggctctgatggtccagatcaccattaacatccaggagccctgggtaattctggaaactgaaggaaggaaagtagacctctttctggacaccggggctggtctcttggttattttctccaattctggccccctctactttcttagcatgaccatgtggggtgtctcaagaaggtctttaacctgatattttttcctaatcccttagttgttggtggggagacctcttgttcacttgtgcctttctaattatgcctgaaagcccaactcctctgtttgacagggatatttt

SEQ ID NO: 801258 - DNA, 645 bp, Homo sapiens
cagtactttagagaacctcctgaaagtggccaccctggtcttttataatagatacaagaagaccccagagagagagagagaagacaaaggaaagaggtagaaactttaatggccaccatggaagcccacaagccccagaatctctgaggtgcacttgttaacagctacagatttggtaaatcagggcattttagggaggattgcctaggcagcatgaaaaacccatcttgaccctgttcaatctacagtgaggattactggaaggtgaacttcccccagggatgctggtcactgggccyagagccaatttcccaaatggtccagtaggaatgaggagtcgtggggcttctctccctggctctgatggtccagatcaccattaacatccaggagccctgggtaattctggaaactgaaggaaggaaagtagacctctttctggacaccggggctggtctcttggttattttctccaattctggccccctctactttcttagcatgaccatgtggggtgtctcaagaaggtctttaacctgatattttttcctaatcccttagttgttggtggggagacctcttgttcacttgtgcctttctaattatgcctgaaagcccaactcctctgtttgacagggatatttt

SEQ ID NO: 801259 - DNA, 594 bp, Homo sapiens
actagtagaaaatgtataacaaatctgtgtccagattatataagaaatatatgcaaatcaataataaattttaaagttctgtaaaatataggcaaaagatttgaagaaacatttcacacacacacacacaaaaaaaacgatgtacaaagggcattcgaaaagatgctcaaggccgggtgcagtggctcatgcctgtaatcccaacactttgggaagccaaggagggcggatcaygaggtcaggagatcgagaacatcctggctaacacggtgaaaacccgtctcaacttaaaatacaaaaaaatttagctgggcatggtggcatgtgactgtagtcccagctactcaggaggctgaggcaggagtatcgcttgaacctgggaggtggaggttgcagtgagctgaaatcgtgccactgcactccagcctgagtgacagagtgagactccatctccataaaaaaaaaaaaaaaaagaaaaaaagaaaagatgctcaaaatcattaatctttgagaaagacaaattacaaaacaatttcttttcacacctactaaaatagctgaaattaaatagcctgacaatatataatatgggcc

SEQ ID NO: 801260 - DNA, 594 bp, Homo sapiens
actagtagaaaatgtataacaaatctgtgtccagattatataagaaatatatgcaaatcaataataaattttaaagttctgtaaaatataggcaaaagatttgaagaaacatttcacacacacacacacaaaaaaaacgatgtacaaagggcattcgaaaagatgctcaaggccgggtgcagtggctcatgcctgtaatcccaacactttgggaagccaaggagggcggatcacgaggtcaggagatcgagaacatcctggctaacacggtgaaaacccgtctcaacttaaaatacaaaaaaatttagctgggcatggtggcatgtgactgtagtcccagctactcaggaggctgrggcaggagtatcgcttgaacctgggaggtggaggttgcagtgagctgaaatcgtgccactgcactccagcctgagtgacagagtgagactccatctccataaaaaaaaaaaaaaaaagaaaaaaagaaaagatgctcaaaatcattaatctttgagaaagacaaattacaaaacaatttcttttcacacctactaaaatagctgaaattaaatagcctgacaatatataatatgggcc

SEQ ID NO: 801261 - DNA, 594 bp, Homo sapiens
actagtagaaaatgtataacaaatctgtgtccagattatataagaaatatatgcaaatcaataataaattttaaagttctgtaaaatataggcaaaagatttgaagaaacatttcacacacacacacacaaaaaaaacgatgtacaaagggcattcgaaaagatgctcaaggccgggtgcagtggctcatgcctgtaatcccaacactttgggaagccaaggagggcggatcacgaggtcaggagatcgagaacatcctggctaacacggtgaaaacccgtctcaacttaaaatacaaaaaaatttagctgggcatggtggcatgtgactgtagtcccagctactcaggaggctgaggcaggagtatcgcttgaacctgggaggtggaggttgcagtgagctgaaatcrtgccactgcactccagcctgagtgacagagtgagactccatctccataaaaaaaaaaaaaaaaagaaaaaaagaaaagatgctcaaaatcattaatctttgagaaagacaaattacaaaacaatttcttttcacacctactaaaatagctgaaattaaatagcctgacaatatataatatgggcc

SEQ ID NO: 801262 - DNA, 648 bp, Homo sapiens
aaagggatccattcaacaagaagagctaactatcctaaatatagatgcacccaatacaggagcacccagattcataaagcaagtccttagagacctacaaagagacttagactcccacacaataataatgggagacttcaacaccccactgtcaacattagacacatcaatgagacagaaagttaacaaggatatacaggaattgaactcagctctgcgccaagcggacctaatagacatctacagaactcaccatccaaaatcaacagaatatacattcttctcagcaccacactgcacttattccaaaaattgaccacatagttggaagtaaagcacacctcagcaaatgtaagagaacagaaattataacaaactgtctctcagaccacagtgcaatcaaactagaactcaggattaagaaactcactcagtgtgtgatgttccctttcctgtgtccatgtgttctcattgttcaattcccacctatgagygagaacatgcagtgtttggttttttgtgcttgtgatagtttgctgagaatgatggtttccagcttcatccatgtccctacaaaggacatgaactcatcattttttatggctgcataggataccattaggaggtatacctaaggctaaatgatga

SEQ ID NO: 801263 - DNA, 507 bp, Homo sapiens
gggaagaaatggatcctacattcaaaacaaagactctactcttgaaaatagtgtatggggccagacatggtggctcatgcctgtaatcccaagactttaggagacaaggtggggggtttgcttgagtccaggtgttccagaccagcctggctaacaaagccagaacccaacattataaaaaaatttaatagarcatggtagaaggaatatctttataattttagtaaaaaacaaaacctatctttcaaaatcacaatagcattcttgggtggggtgactcttgcctgtaatcccagcactttgggaggctaagggctggcagattacatggagtccaggggttccagaccagcctgggcaatatggtacaaccccatctctactaaaaatacaattagccaggcctcatggtgtgggtctgtagtcccagctactgggaaggctgaggtgagaagatcccttgaatacaggagacagaggttgcactgaggcaattatcacaccact

SEQ ID NO: 801264 - DNA, 507 bp, Homo sapiens
gggaagaaatggatcctacattcaaaacaaagactctactcttgaaaatagtgtatggggccagacatggtggctcatgcctgtaatcccaagactttaggagacaaggtggggggtttgcttgagtccaggtgttccagaccagcctggctaacaaagccagaacccaacattataaaaaaatttaatagagcatggtrgaaggaatatctttataattttagtaaaaaacaaaacctatctttcaaaatcacaatagcattcttgggtggggtgactcttgcctgtaatcccagcactttgggaggctaagggctggcagattacatggagtccaggggttccagaccagcctgggcaatatggtacaaccccatctctactaaaaatacaattagccaggcctcatggtgtgggtctgtagtcccagctactgggaaggctgaggtgagaagatcccttgaatacaggagacagaggttgcactgaggcaattatcacaccact

SEQ ID NO: 801265 - DNA, 507 bp, Homo sapiens
gggaagaaatggatcctacattcaaaacaaagactctactcttgaaaatagtgtatggggccagacatggtggctcatgcctgtaatcccaagactttaggagacaaggtggggggtttgcttgagtccaggtgttccagaccagcctggctaacaaagccagaacccaacattataaaaaaatttaatagagcatggtagaaggaatatctttataattttagtaaaaaacaaarcctatctttcaaaatcacaatagcattcttgggtggggtgactcttgcctgtaatcccagcactttgggaggctaagggctggcagattacatggagtccaggggttccagaccagcctgggcaatatggtacaaccccatctctactaaaaatacaattagccaggcctcatggtgtgggtctgtagtcccagctactgggaaggctgaggtgagaagatcccttgaatacaggagacagaggttgcactgaggcaattatcacaccact

SEQ ID NO: 801266 - DNA, 632 bp, Homo sapiens
gggagtgtccttacagagagattagtgacttaccagatctggactcagtttggagggtgctcagacctcaggaagaaataagcaggaactccaggcttgaagactttgggtctcttctgtgggtctttagaagcttttattgacctttctaatcacaactcccacccacacccctccacgtatccactgctagcttccaatcaacaagtgatatctgattgcatttctgaagctccacccagttaatcctgattggggttttggctctccccagattaatggattgaatcagatatccattcatatcagatatccatattaagttcatgaatcaagaaattgacagtgttagggatagggtgggaatcaagaatgcattcattcaagaccgggcaaggtggctcactcctgtaatcccagcactttgggargacaagttgggtgggtcacctgagttcagacattcaagacgagccaggccaacaaggtgaaaccccgtctctacaaaaatacaagaattaggcagggacgatggcacatgcctgtaatccagctactcaggaggctgaggtgggagaatcgcttgaacccaagaggcaatggttgcagtgaaccaagattgcaccattgca

SEQ ID NO: 801267 - DNA, 564 bp, Homo sapiens
taaattgaggaaattttcttaattactgctgggtctctctgcattgtggccatgttccgaagtccaggagagatgggctgatggccttgggatgcataaagtgacgccggccccatcagctcaggctgagggagaaaacagaggctcaggaatattctagagagcctaagcaagggcctcataggagctttggaatcccagtgtggattctgggagtggagaataggtcaggtcgtttcctgagatgggtttcgaaggttgctctgagcttggcagcagatgagcacctcgagaagaactggcgacagaacatggtagaaaagaccccaagtgcaggattctcactggggtsctgggggtgcgtactgcaccccttgaaatgggcaggaagagggagtcagtcagccagttctttccaatatttagcttattgaacaccttgggggttccactgagcccctcacctgaggggtttgccaatcatttgctaccagaacatgggaaggcttttcctctggccaaatctcaggtttatcgtgttagaaatggggaaaatagcaacgt

SEQ ID NO: 801268 - DNA, 564 bp, Homo sapiens
taaattgaggaaattttcttaattactgctgggtctctctgcattgtggccatgttccgaagtccaggagagatgggctgatggccttgggatgcataaagtgacgccggccccatcagctcaggctgagggagaaaacagaggctcaggaatattctagagagcctaagcaagggcctcataggagctttggaatcccagtgtggattctgggagtggagaataggtcaggtcgtttcctgagatgggtttcgaaggttgctctgagcttggcagcagatgagcacctcgagaagaactggcgacagaacatggtagaaaagaccccaagtgcaggattctcactggggtgctgggggtgcgtactgcaccccttgaaatgggcaggaagagggagtcagtyagccagttctttccaatatttagcttattgaacaccttgggggttccactgagcccctcacctgaggggtttgccaatcatttgctaccagaacatgggaaggcttttcctctggccaaatctcaggtttatcgtgttagaaatggggaaaatagcaacgt

SEQ ID NO: 801269 - DNA, 549 bp, Homo sapiens
aattttgagaaccacattccatttcttaataatatctctagagcaaaggaaatcctataaattctgttggaatttgaagagtttgggcaaagtgatttggtttgacaagtgttccgtgtacagaattctctctttatccttggtgatggccygtgccctcattgttccaccagtgaccaagactttccgagttgcatgaaaattgacttgagacttgcttatgtcccagtggtaatttttgcccacccatgacaagattatcctaacactagagactttttctctggtgtcctttatacctggctgtgaccaccttagtggcttttaattggtcattctgtgctgcctttaatttaatttattttatttatttatttatttaatttaatttatttatttatttatttatttttgaggcagagttttgctctctcactcaggctatccgggctcactacaacttcagcctctcaagtagctgcgattagaggcatgagccaccacaccaagttaatttttgtatttttagtagagacaggagttcatcgt

SEQ ID NO: 801270 - DNA, 506 bp, Homo sapiens
actgaggctacatacactttgaacctgatgggatcctgggacaagagggagtcctggccctcccgagttggcaggacagtagctccaaaggcacaactgaagctgcccaggtcgcagttccaaccaaggtcccccagtgctcttgagggctcaggaggtctccccttctcctgcagcatgggggtgtctgctcccactgtgtggtccctcctggcacctgctgtaattttggagyggagttggggtcaagcatgtatgctgtggcagcccagatgagcgtgtgcatgctcaggttcgtgctgatgcaccgtctgcctgctgtcttgaacactctgggctttgggccctgatgagcatgggagggaggctgaggacagatcagtgctggcctttggatgctccttgatgcaagtgacctgggcgccatgggtggtggtgggaggcagacagactcctggatgggaagacgagggtacctggtgaggctctaccttgtgaccaagggg

SEQ ID NO: 801271 - DNA, 591 bp, Homo sapiens
acaagagaaataggaaaatattcccataaaaataacatcatatgtttgaagattcaaaatgcaaactggagttttattagactcttctagctggcattttctaatagtaatatttccagttctgaagcatgagacagtgttttratcccattaaaaaggccctaaatggtaaagagcagagattcatgcgagtgaaggttatctaaccaccatgatggaggggtgtatgaacgtggtacactctacctgaagatgatgtaacaccttgaacataagctactgtggaaaacttggtcttcagaagtagaaggactgagcacacaaatctcttgtgcactgctgcccaatagaaatataatgaaagatcatacatataatttaagattttctggtagcaacattaaaagagtaaaaagccacatcaaaatattatttaattcaatatatccaaaatattacttcaatatatccaaaatattatttcaatatataatatatataaaattattgagatattttgcattcttttcttcatactatgtcattaaaatctggtgtgtattttatactttcagaacatcttaaatttaa

SEQ ID NO: 801272 - DNA, 651 bp, Homo sapiens
tgttttcccacctctatttctcatgctcacttatatccttcagagatatccctcttttttgtgtctctttccagagataatttatacatataaaagcttttttagattaaattttaattctgaggttgttatagatkcatactcagttgtaagaaataatacagagaaatcctgtgtaccatttacccagctccccccgatggtgacattgtgcaaaactacagtacaacatcacaaccagaatattgacatcgataagatccatcccatttattctgactcagttttacagttcacattcaaattaatttttgtatcaggtgttgaggtgtagattaaggttcctttttttgcctgtggatgtccagtcgctccagcaccatagactcctccactgaatttcttggtgcctttgttaaaaatcaattgagcagatgtatgtgggcctatttctgggttctctattctgttcaattgatctgtgttttgaacaaacacacatacagtggcatatgatccacacttttgcatgtcactatgtttgttaacatcagatcagggtttctgagcctttttttcatgccatgaaccccatcgtcagtctggtgaagccagtgaccccttcttagagtagtgatttaagtggataaa

SEQ ID NO: 801273 - DNA, 620 bp, Homo sapiens
agaagctgggagagcaaggtggggaggaggaatgcatctctgtagtccccatggagtgagggccaaagtcacttgctgaggggagtgggcaggggtttgagaggggagtgagggttgaatggaggttgggtggaacagggagatgacagttctgaacagtctggcagtgctgagaacccagtggcactcagtagcctgggtaggcatggagaaggtgaggccatcagactgtccctgggtagggtttgctgggtgggtgagaggcaaaactggggcagtgtyggggcggagtctgggcccatgaggaaaggagggtgggaggcaggacagactcacaggctataaattttgcagaatctgaagaaagtcacaaatgagactcatcccttaagtctccagacagtaactatggtgccaggatgactcaggcccaatctttttggggcttcccagtcaacagtagcctgaccctaaaagagctgctctaagcatgggccctgtacagggaactgtggaacagtgggcctgtgaggcaaggtccctggcctgcactacccacctgccttcccgggcaaggctgatgtgctgctgagagctaggtgaccctatgagggggctaa

SEQ ID NO: 801274 - DNA, 620 bp, Homo sapiens
agaagctgggagagcaaggtggggaggaggaatgcatctctgtagtccccatggagtgagggccaaagtcacttgctgaggggagtgggcaggggtttgagaggggagtgagggttgaatggaggttgggtggaacagggagatgacagttctgaacagtctggcagtgctgagaacccagtggcactcagtagcctgggtaggcatggagaaggtgaggccatcagactgtccctgggtagggtttgctgggtgggtgagaggcaaaactggggcagtgtcggggcggagtctgggcccatgaggaaaggagggtgggaggcaggacagactcacaggctataaattttgcagaatctgaagaaagtcacaaatgagactcatcccttaagtctccagacagtaactatggtgccaggatgactcaggcccaatcttttyggggcttcccagtcaacagtagcctgaccctaaaagagctgctctaagcatgggccctgtacagggaactgtggaacagtgggcctgtgaggcaaggtccctggcctgcactacccacctgccttcccgggcaaggctgatgtgctgctgagagctaggtgaccctatgagggggctaa

SEQ ID NO: 801275 - DNA, 640 bp, Homo sapiens
gcacttgaattcttttctggcaaagccaagaactttccttggctgagcccaaatttgggggctcacctgccttacatcaccaggatattgctctgctgctctgcttaaaatgtcagcttctattcttctctgtgcacctctcttttagaggagcagttaaacaaaacaaattatacttttgtattgcatggtttaattgtattgtatatgttttacgttactttagaatgtttactattgctgtttttaaatataatatgggtaagaaaggaatgatggtagcaacagcatagtctttaaatctttacagttctttcttaaaaagagatggacaactaggataaaaagaaatcttccaaaatgttgttgataaaggatttccataagcctcagagtatgagcatgcaagtccaacccaaatgtagcaagaaaaaatatgggaaaggaagctgtgtgggaacagcacaggaaaggyaaaagggcttctaacagatctaagatctgtgaaacaaattcccgacactctcatttcaataaagagaggtttcccactcttagtggaagagtcacttggtaaattgggaaagagctccaaacgctctaatttgtaggcaaaaacaaaggggattataggaaaatt

SEQ ID NO: 801276 - DNA, 459 bp, Homo sapiens
tttgagaatttgtgatatagctattagtctaccgatttagcatacataaaaaatacaatgtgaaaaaatgtttcaatatgacaataaagcaattaaattaaatgtaaccacttgctattaacacatctttcttaaataatagtaaataaaaataacaggatacctaataaaatgcacatgtgtttaagaaatgaagcacaaatgtaactgtgaaacatagtttagaaaatagaaataacgttgacatattggaattagaggcacttgaggccaggaggttcagaccagccttggcaaagagtgagatccctgtctcttcaaaawactttttaaattacctgggtttggcggtgtgcacctgtagtcccagctagtcaggaagctgagacgagaagatcgcttgagctcaggagttcaaggctgcagttggctaagatctcaccactgcactccagcctg

SEQ ID NO: 801277 - DNA, 609 bp, Homo sapiens
attagatcgtagctggaggtgtaagtaaagtccagagaaattttttgagaaggaggtaataacagcataggtgtgtgctgaggggagtagcacaggatagagtggataatgttgaaaataagagagttgttaaggaggtgtcctgagtgtgtgagagaagatgaaattaagcatcytagtgaactacatgaacagtttatagtttcaagaggaaggcagcatttgttggtacagaacagaatatgttaaatgagtgcaagtaatgatggaagcttatgaagaccctattttttttttttttttttgagacggagtcttgctctgtcgcccaggctggagggcagtggggcgatctcagctcactgcaagctccacctcccaggttcatgccattctcctgcctcagcctcctgagtagctgggactacaggcacccgccaccacgcctggctaattttttgtatttttagtagatacagggtttcaacctgttagccaggatgctctcgatctcctgacctcatgatctgcccgcctcagctttctgaagtgctggcattacaggcgtgagccaccgcactgggcctatgaagacccttttctatttga

SEQ ID NO: 801278 - DNA, 609 bp, Homo sapiens
attagatcgtagctggaggtgtaagtaaagtccagagaaattttttgagaaggaggtaataacagcataggtgtgtgctgaggggagtagcacaggatagagtggataatgttgaaaataagagagttgttaaggaggtgtcctgagtgtgtgagagaagatgaaattaagcatcttagtgaactacatgaacagtttatagtttcaagaggaaggcagcatttgttggtacagaacagaatatgttaaatgagtgcaagtaatgatggaagcttatgaagaccctattttttttttttttttttgagacggagtcttgctctgtcgcccaggctggagkgcagtggggcgatctcagctcactgcaagctccacctcccaggttcatgccattctcctgcctcagcctcctgagtagctgggactacaggcacccgccaccacgcctggctaattttttgtatttttagtagatacagggtttcaacctgttagccaggatgctctcgatctcctgacctcatgatctgcccgcctcagctttctgaagtgctggcattacaggcgtgagccaccgcactgggcctatgaagacccttttctatttga

SEQ ID NO: 801279 - DNA, 560 bp, Homo sapiens
ctaatttttgtatttttagtagagacagggtttcatcatcttggccaggctggtcttgaactcctgaccttgtgattcacccacctcggcctcccaaagtgctgggattacaggcatgagccaccgcgcccagctcatctccgttttctaggtgagggtgccgaagctggttaagcaaaccacccgaggctccacaaagaggaagaggcagagtagggctcaaagccctgccaccaagcctgcctgcctgtaggaaagccttcggggtccctgtgccccaaccatagamcccgtgccctggccgcaggaaaatagaggacatttggggaatgacagtgaaaagccggcaggcaggcggcgtcctgctgctctcccccagcccactctctcccagccgtaagatatatatagtgccaatggagaaacaacacgattcgggtgtttgtctgtagccccttctgcagatccatcacagagcagtgcttggtgcaagattttgcaaacagcttgagattactgaattaattagaataaaattaatcaaaacacccaccacaaag

SEQ ID NO: 801280 - DNA, 645 bp, Homo sapiens
tgaatcaggataatctattttgccaatttggtaaattatgctccttctctggccttggtcctgccctagggtgttaggcaaattgcttaactgccccgagccttgtgttcctcatctgtaaaatgggctcataatgatacctgcatagaggcatgctatgagggttagatgagttagatcatatgaatgggcttagaacagygtctgacccacaggaagagctccataacaataacaattattagtttctgagcaatgaggagttttgaaccagatcagggaccaaggagataagggtgcgaagggtgtaaggagacctggtgtgaggctttagggagcggagccagctgtggaacccggagacagcagcctgtgtaaacaaattcaaatgtaaattctaaaaatgctctgcaagccaaacacagtgggtctgtggagtgtgcagagctctgggaccagcagtttcaatgggctgagctttatggctccttctaccatgacaaatctctgttatttaagttcaggctctaccactcaaatatggaaccagcagtgccttagagcccttcaagtccaaccaaccccttcacccattctacaggtgaggaaactgagacccatagaggggaagtggctgttccccat

SEQ ID NO: 801281 - DNA, 563 bp, Homo sapiens
gggattacaggcgtgagccactgtgcccggcctccaatccctttaagtggtttgtgtgctcacccccagcttcagggggctttgtagctgacatgtggcattgttaccttttccagcagtttcccttgggctattggagccagctgcctcgcctgtaaggagagctggaaatgtctgagaattggcattccttcccctccaatcacttccaggcaacctgtaggcaggaaccagtaggagagtaaaaagatcagcaacggtagcttgaagcaggaccaatcccgaggtgtgatttaccttccagccatccctgtggagtcaggctgaggttgggacctcacctgcaatctccccttgcttggcttcttcctctttcytatcctgctttacccgctgtcttgccagattctcaagggggcattccagtaatatatcatatgtgaatataaatgatatatatggcagggtcagcttctggaagaacccaactggagatatgggcttctgtgctcatctgggatagacttttggaccagtgaggcataggagaaacacccaagctt

SEQ ID NO: 801282 - DNA, 599 bp, Homo sapiens
gaaacggtctctgacgaattttcactttcagtagacagaaattttgttaattttgatcattttatagtccgaatttgtggacacattgaattaatatttatattagtaatatgtctaagaagaaaagattttttatgctaacaaataatataaataatgtcacagactaataacagctaagagtcagtaataaaggaaatttgtttttaagcactttggaagttcctgtttgcatgcattatatgattatatatacataatttgtattacattattatataagctctcttagtctattcattaagtaatttgatgatcattttgaaatttttttataagtacttaagagagttaaaactatatttcttcttraaacattgtaatttggacttgttttcttattcatattagatgtcttctctgagcccagttactgagtatgtagtaacttttttgtgtgttacaataattgacagagacggtggttcaaattttcagcatcaaacctcactttggaattatttatttccattttttctcttacctactagtatatatggatccaaaattaattgcttttttattatatttaatacatc

SEQ ID NO: 801283 - DNA, 528 bp, Homo sapiens
attgtttctagattatatagctaccacactatttggcacagctgggatcctcttttcatgaaatagcagggaagattggtagataaggattaaaaagcactggcagaggagacagggagacttacacaattacttcctacccagtgccttcctggtctaggaacttcttccagcctcttttggagagagaggtaagtgggaggaaaggggatttttatctttttagtaaaagaaaggataacaaaaacactttagcactgctcaatttgatgaaatcttgatttcacatagtttaagtttctaccagactaaatayattcttgttcaaaataacatatatattcatagataacttttccagtggatacatatgtagttcattaataaaaactcttctcaatcagctattttaaaaagtgttctttcctgttttctagaaagttaatcggtaagctcctcaatagctggtttggcagtaaggtcttaaattttgcaattttagtcagcattttgctttgttgttttgca

SEQ ID NO: 801284 - DNA, 472 bp, Homo sapiens
tccttaggctaaagggggaaagagaaaaagaaaacatgcagccaaaactcagctcaagctggtcacagtggctcatgcctgtaatcgcagcactttgagaggccacggcaggcagatggcttgagctcatgagtttaagaccagcctgggaaacatggtgaaaccctgtctgtactaaaaatacaaaaattagccagcagtgatggcatatgcctgtaatcccagctactcaggaggctgaggcagragaattgcttgaacccccgagggggaggttgcagtgagttgagatggcgccactgcactctagccggggcaacagaatgagactctgtctcagaaaaagaaaaaacaaaaacaaaaaacctcagcttgatcttaccttctcaaaactacctttcattatagtttcagtaatattcagtagagtggacagcatcctctaacaacattgtgcctatgaagcacctca

SEQ ID NO: 801285 - DNA, 617 bp, Homo sapiens
gacatctctgaacctttgagtcaaggggaaacaggtgtaatgtcctattctaatataaagttacaaattaacctggcacaagggactacatcacacgtgcgaatattttctgggtatgtaaatatgaggggaaaaaagataaagaaatactagcccatagcataaatgcctgaatcttcagtcagctttttaccagtatatttacaatcttcatccccactgctccacaaggccactcaacatttcataaaataggatccctactcattcgactctggttctcttcttatttccaacaatttgtctataattaagccaaactcatctataagtctctccaaattactcaagttagaattattcttttktgactccacaacctggtggaatcacacctctaatacaagttagactgtgataattaccctaatagagtcacttgtatcattccagtaattatgaatctcatgcaccagtcctaacatcatcaaacaaaatacactccataaaagtgtgctaatttagctgaattgaatgtgaaaacttactgtttttctcagttgcattactcaagggcacttggagtccagaaaagttgtagtctctttgctaactgg

SEQ ID NO: 801286 - DNA, 659 bp, Homo sapiens
aagaatagttgaacggatgcataaaagagtgaatgaatacacgcatgcataaattaatgaatgaataataacaactgggggtaggaaattatccactttctcatgccataattcctccacctctgtactcatttagtctttcataatatgttccttagtaccagcttagagacccaagtctttgcaacattacacctgatatgtgtccaacctgagattttactcctttgtagcctcattaagtgatgcaattataacctgtccattttcacactgaggttctaaggtccwtctccctccagaagccaatgttcacaaggaatggggtccccaaagtaagttttatgatttttcaatagaagagttaaaatgccaacatttgatattaacattctattaatttacccctttttaattactcatggtggcagggggagtagaaacataggcaatacatttttatttagccttaaaatgtagaaagaagcaataaaaccaccagacttatctgtgcacttttatgcgtctgtcctcctgctgagtttggccttctatttggtgataaagccctttgcaaaagggagagcccctcagaggagattccaaagctagtgttcctttcattactgcccctgggaaatgacccaaggttataccag

SEQ ID NO: 801287 - DNA, 582 bp, Homo sapiens
ttaggttttgttctttttataatggggctagcccttgctgggaaagacaggtaaacactgtgagcttgacggtcttccacacccttctgcctcttacccttctgtccttcactgcacttttaaccttgacctctccaaccgctgaaatactcaacaccctcccactacaccgggtccctatcgtggcacctgctctggtctaccctcccacaaacaccaaaagttaaatttgacaacatgggctttgaacccagaaagaacagttctcccactttctagctcacaaaccagctccactattttctgattcgtataacaccacaaccctaggagacagattrctgttgttattagaataccgttttttcaatgaagaaactgaggccctgggtgcccaagacacacagctaattagcagtttaaacctacacagtctgcggccaaccccatacactgggccactacattattccacctgcatgcttcttaaaaacataagtgcagtaatgcatgctgtggacttagcacattgcttgacatcacataagccctcagtaaacaataatgtcttattgttattgc

SEQ ID NO: 801288 - DNA, 549 bp, Homo sapiens
ctagaccaccacaataaagcaaatattgcaataaaatgagtcacatgaaatttctgctttcttagtgcatgtaaaagttatgttgacactatactgtagtccattaagtgtgcaatagtattatatcttaaaccaatggacataccttaatttaaaatattttattgctaaaaaacactaacaatcacctgagccttcrgtgagtcataatcttcttgctggtggagggttttgcctccatgttgatggctgctgactaatcagggtgcaactctccctttcacgtgaatactcagaggccgttgttgggttattaattggcctaactgcaatattcttgtgtctcagggactagggaggctggaggagagagagagagatagaatggttagtcagtggggaagtcagatcacacacatttatcgattaagttcaggtgcagttaatgagccccaacacatctacaatagtaaatcaaagataactgatcatagatcaccataacagagataataaaaatgaaaaagtttgaaatgttgtgagaattac

SEQ ID NO: 801289 - DNA, 656 bp, Homo sapiens
aggagtcttcatttctgtaattgctcatgaggctgtagttaatatctttggcttctttcttctactacccactacctatttcccttcctcttagccagaacttcatctggccagggttcttggtctgtagtagagtgacccaaatcttcatttttgaagggtctgaatgatcagttgtccgcccttttttattttattttattttttttagcttactgtaattttccattaacttttactactggatgtagaactactaaaaggtgtcctakcaatgcctgggttctaggtgtagtccacatttttttttgttgtgtagaaacaacaacctgatttctgcttggaaattagaatcaatcactctaggagtagagttaactttcctgcctattttgtcagtagcatacagagtcccaatggccaggtagtggtctcatctaattcattctgtaactccctcggtggtagttctggtagaagccttactgtcaggaaaggcaaatctattgccagaatgtgtgtctatttcagtgagaatgaatctgtgccccctccatgatggaagcagtccaatgtaatcaatctgctactaggttgccggctagtcctccccatccctggcaatgctaccatattggggattcagtgttggtcac

SEQ ID NO: 801290 - DNA, 510 bp, Homo sapiens
attaatattattatcagtgtgaacttctaaatactactgacagtaaaggctacgaaggtttccttttaatccattaaaatatattttcactttactctttcccaaagtatcaatattgaatgttataaaaatacttttagcatttgctttcaaataaaatattcaatactcaatgctttcatggaatattttcccttaaaaatccattatacyaaaagtaaatatctgtatggaacctactagactgatgtaattaaaattaaatttacaaaaaggtaatggagattatatcagcaatagcatgcaattcaatgcagcagctgaatcaccgtagatttttttccctatttaatcttatctcggatgaacaaaaaggttaagtcccacagcaatccttagattaggctattatttttgttatggctacttagtcgttttattacaaactattaaataacgcaagaaaatcaaagaggtacaaaggtaagaagttggctacatttattttta

SEQ ID NO: 801291 - DNA, 585 bp, Homo sapiens
  misc_feature 343: n = A,T,C or G
ctatctacagtaatatatgaattttagtatactctaggaagcagatagtagtgttactttacatttttattaattttatgggtgtttcattattcttttatttgtgttttcttaatttaaactctggttgttaaatataatttgctatattcgatattagttgtatctcttcttatggaaacagttatgttatgtcatatgtctattaaatttattaatgatatttttaacaatttgaaatcaaaaatataagataataaggttttctctatttyctataaacatatttaccttagtacagttttttataactttagtcatgttatttacattaaaacaatgntttatttgcatatagatgtatgtattgatcattttctttgactaattatttcttatttcaaatatgtcaatttctattaaagattagttttacaaacacaggtatatttattaatttatttaagaaatggggttttctctattatatttcctataaacatatttactttagtacaggtctttaataacttcagtaatgtcatttacattaaaacaatgttttatttgcatatagatgtatgt

SEQ ID NO: 801292 - DNA, 662 bp, Homo sapiens
aaggaatggaatcttgggacgtgtggtgcatgttatagctctagtaaaagctgtgggtcatggaggaacgaacaactccagacgcgccatcttaagagctgtaacactcaccgcgaaggtctgcagcttcactcctgagccagccagaccaggaacgcacgagaaggaagaaactctgaacacatccaaacatcagaaggaacaaactctggacacgctgcctttaataactgtaacrctcaccacgagggtccgcggcttcattcttgaagtcagtgagaccaagaacccaccaattccagacacagtagcaaacctcgtgttctctgacctagggttcttggcctcacggattccaaggaatggaatcttgagacatgcggtgcatgttatagctctagtaaaagccgtgggtcatggaagagaaccgtggaacccagtggctggtgttcagctcgattaggacgaacccgggcacttagccatgcaggaacaatggcaagcctctaaccccatcaggagcgacaatgggcacctcactggatcaggagcacagcggacaccctgccggatccgaagggatggaagtcagtggcgggtctgcgacgtcggcaaacaacagtggtggacagcaagtaaaagctcagctcgagccgtaacaa

SEQ ID NO: 801293 - DNA, 662 bp, Homo sapiens
aaggaatggaatcttgggacgtgtggtgcatgttatagctctagtaaaagctgtgggtcatggaggaacgaacaactccagacgcgccatcttaagagctgtaacactcaccgcgaaggtctgcagcttcactcctgagccagccagaccaggaacgcacgagaaggaagaaactctgaacacatccaaacatcagaaggaacaaactctggacacgctgcctttaataactgtaacgctcaccacgagggtccgcggcttcattcttgaagtcagtgagaccaagaacccaccaattccagacacagtrgcaaacctcgtgttctctgacctagggttcttggcctcacggattccaaggaatggaatcttgagacatgcggtgcatgttatagctctagtaaaagccgtgggtcatggaagagaaccgtggaacccagtggctggtgttcagctcgattaggacgaacccgggcacttagccatgcaggaacaatggcaagcctctaaccccatcaggagcgacaatgggcacctcactggatcaggagcacagcggacaccctgccggatccgaagggatggaagtcagtggcgggtctgcgacgtcggcaaacaacagtggtggacagcaagtaaaagctcagctcgagccgtaacaa

SEQ ID NO: 801294 - DNA, 662 bp, Homo sapiens
aaggaatggaatcttgggacgtgtggtgcatgttatagctctagtaaaagctgtgggtcatggaggaacgaacaactccagacgcgccatcttaagagctgtaacactcaccgcgaaggtctgcagcttcactcctgagccagccagaccaggaacgcacgagaaggaagaaactctgaacacatccaaacatcagaaggaacaaactctggacacgctgcctttaataactgtaacgctcaccacgagggtccgcggcttcattcttgaagtcagtgagaccaagaacccaccaattccagacacagtagcaaacctcgtgttctctgacctagggttcttggcctcacggattccaaggaatggaatcttgrgacatgcggtgcatgttatagctctagtaaaagccgtgggtcatggaagagaaccgtggaacccagtggctggtgttcagctcgattaggacgaacccgggcacttagccatgcaggaacaatggcaagcctctaaccccatcaggagcgacaatgggcacctcactggatcaggagcacagcggacaccctgccggatccgaagggatggaagtcagtggcgggtctgcgacgtcggcaaacaacagtggtggacagcaagtaaaagctcagctcgagccgtaacaa

SEQ ID NO: 801295 - DNA, 620 bp, Homo sapiens
acaagcaattccgactgagttttggaggggtttttttgtatttatttatcttaattatttaaaagaatattaattattattattatttttttgagagacaggttttcctctgttgtccaggctggagtgcagtggcataatcataattcactgcagcctcaaattcgtgggctcaagcaatccacccatcgtagccttctgattacttgagactaccaggagcacaccactgtgctaggctaatttttaacttttttttgtagacatggggtctccctatgttgcccaggctggtcttgaaattctgagctcaagcaattctcctgccttgacatcccaaagtgtrgggagaacaggcatgaaccatcacgcctgaacagtattctttttgttttttttactataaaaagtagaacagtatttgattatgttacttcagaaacagagagcaataaaacctgtagaaaccaaacaatttgcctttttaaaaaataattccaagaaacttctatagatccctttataagaaaacaatttccatcaaaaatgaggccaattatattttggttgtgaagttgatgtctaattatacttttcttaccatctttgcctggttatct

SEQ ID NO: 801296 - DNA, 588 bp, Homo sapiens
ataaagatagagaagagtaaacgtgggacttgggttagcattcacacttatgccctcatggttccatacattaaatatttaggctacaaatatagctctaatctcccagacatcagatcaaaaaaggaaaacaaacargattagttacaagattcatagtgtgcataaagttagaaacaattaatgatggaaagtcagctttgcccgctaccaagacctgagagaaatttttgctaagggtctttattaaaagtatgttatattatacattggcttagtagtggtcattcaaattttatttctttgcttcttgtttctttttgcatagcttgcaaacatcagcctttcctccaggagttcttcaagtgtttgactctatcatcctgttatcaatgcctcttacaatgattgctaaaagggtaaattgccagaatattttccactttcactagcattctttcttgccaaaagatttatattaatcctactttaattaagtcattaatcaaaggccaggttgtaaaggtctgcaattttcatagttctataactgtgctgtttgctgatgatagcgtatgtaaatgcaga

SEQ ID NO: 801297 - DNA, 603 bp, Homo sapiens
ttctgtattttcaaattttctagaataaatttgtattctttttatgatcattaataagttcagtattaaaatatttcatctgaggttttcctttttgtccattttcttctcttttattctgtcatttattttgaaatgctaggttttattttgtctttaatgtttttaaatcattctggtctaaaacttgctagaaataatccatgattgatactgaaccttagattttacctggatcagagaggtttgtttcaggtatgattaaaatgctagctttcttttccrtttgcatctttaactcatttgaactctgagggcaactgtgtattctaaggccacatccctgaaccttttcttaacccttggtaaaatgctttcttactgtttgctcagcacatccccctcagccctaaagaattttgggtcttttttctttttttctatagtataaaactaatagatatattgggtattcttttgccaagtacagaaggccacaagaagattctgaattatactcctggaggtggggtgtgggcaaattcccccagttgagaattaatgtcaatatagattaaagagctcatattggcatgtgttttg

SEQ ID NO: 801298 - DNA, 614 bp, Homo sapiens
gttacgtagagagcatcatgggttatctgggtaaattactggccacactcactattctgacttgcaggtggactttttatcctaaactgagaccagagataactgtgatttcagcaaattcttctatggaaatactgttgcactcttccatcattatatctgatgtaaaaatatctactgtggatggatgtttgttgtgatttttgcgtttttcgttttgtctttttctttttggctgcaggctttaagtatcttgtgaattttttattttggcgtagggaaaaaacaagttsagaaaggggattcagaaattatatttttttctttaaaccttttaaaatcatttgtcacattaaatacttctgtgtttaatgtgtgtgtatgtgtttgtgtgtgtgtgtgagagagaatatatattaatgactaatataaaggaaattataaagccatggacttcatttagggaaatagccaagaaataacataaatggcagttatatggcctttcagaaaataagctgacattttatataaggtttttaaattgtaaaatgtacataacataaaatttactgtcttaatcatttttagctgtgcagttcggtagaattaag

SEQ ID NO: 801299 - DNA, 616 bp, Homo sapiens
taatatatcccaaattagaacattttacacccttggttcctgaaatatggtgataaaaagcctttagagcttaattttccttactgcatgctctgaccaatttgcagttctttgtgataatgtttagacaccttaattaaaatgcagcaaaatattggatgttctatatggaaaatgctgatactttggctacacatacaagaaattttgtatatattttattcatttaaaaaaatttctttccacgttgtgttgctatagttatctgatgacccaaaaccattttttaaatattaaaccattgaccaagcttttgtgatgtttacattgagcatgaagatgcatttttctttttatggaagtggaagggggattcttttcggccyattttatttgtttgtaatactgcagcacagcacgatattcttttatattctggaacccaggttagtcatcttgactgggaaactgcgtttcttctcaactgcctctttcatagaaggtcttattagccttttatattttcagatattttttctttctccacagaaataagtgagacacgttcattttaattatacgaaggacacaaaaaggctatgagttttcatcatta

SEQ ID NO: 801300 - DNA, 535 bp, Homo sapiens
tcacaaacatgtgtacatacactctatccatccttccatccattcatccatctatcatttatattaatctatctatctatctatctatctatctatctatctatctatctatcatctatcatcatttctctctctttctttccctttactgtgtgttttctacaaactgcttttttcctttaacatcaggacttggagatcttttcatgttgacacatgatgatctacataatttcatagtaactcactcactgagagatggacgatcaggttgttttcatattacgagtcaygcagcaaggctcaccgtctttcatacacagactgcacaaatgtaagtatttctttcagacagatataattgctgagttaatttttaaccactcagacaatttccacagggaacctccctgcctccctccatcctttgcctctgaccttggagctgaaccccaaatggcttctctctcaggggcgtttccccctcttttttcttgagcggtactttctgctggactcttagcgtacttttcca

SEQ ID NO: 801301 - DNA, 595 bp, Homo sapiens
gctaattcttttaaggtgagctggtagttgtattatcagttaaatgcagtaaaatgcgtaatcatatgatgataatgaaaactgaacctgtgttagcgccggggctctgcctgccacggggcatagagtgatgaaayttaagtactgtaatgttgccttggccacaatggtaccaagtctggtctttagccttacagacacattctttgcattttaaaaaactttatcaaagcaccgtggcaatatagaacatgtcaaagtgaaatgcactgtaggcaaattgagatttcattaagtttaaatttattgcttttgactgatgtattaccatgcttgttaagaaccagtaatttggaatatctgtctgcctggtaaaatagctttgtctccttgcgttttactgtgggtatactttgttggaccacaataattcaaagtgagcgtgggctgtttttttagtaatgtttggaaaattgtaaggcatctggccttgtgctctgacaaacttccacatacttcatcaaggtattggaggttaattgtagaactctcatttatgggacttctgtgaatcttgccaaactgtatgatgcgt

SEQ ID NO: 801302 - DNA, 649 bp, Homo sapiens
tcatctgtggggatcagaaaaggatcaatttcaatgagttcttgtgaggactgcatgagtttgtgcaaagcacttaggatagtacttggcagatggtgagctctcgatccatgtgaggctctattatagttgtcctygcgacagctcccttctctgcttccctctcatctctggaaatgctacttctccatgttgcccaggcctacttctcctaccctgaaacttgtgtgataaatgagtgccactcagttttgctcttttttccaattgctttatatctaaaactgctttaaaccaaactttttcttaggcacattttacttaacacagaactggacaagcaatgaatgcttaataagtacttgttagtttacaaccctgcagtatgggaacaatgatagcgtctttatcatcttcttcatggaaatgttgtgataatacatgtgatcaaatttaattttctttaatgatggaaaggtccgtaagtaaatcaggccctcttctttgcatcccagtgtgtcctagggccatgataaggcaccttttcagacaccaattattgttaaatgaatgcccctatttagattttcccttagtgttctgaattcctttggtgtattgaatttttcatacctaacaatgctgttct

SEQ ID NO: 801303 - DNA, 628 bp, Homo sapiens
ctgcaaagctgaaataatttaagcaacaaaacaaattagttgaattataacccacagtataaataaatatctatactgatgtaaatgactatgtaaatgaataagtgggggagaaatctcacatgcaatagaattycaaataatttctgtagatactctcccctcaagacggtggagcataatttctcattccttaagtatgggttgtgcatagtgacttcctgccaaagagcacagtatgaaaatgggaaaaaagatgaactttacaggggtgaagcctgacaaccacgacctcagccaggtgacccaagttaacatgtacagtaataagttctgttgatagcatgtgcccttaatatgatgaggacagcactttacctctgtgggtttttctttccaaagtccatattcccagtctaatcatgtggtaaaatatcaaataaatcccagttgaggaacatgccacaaaatgcctgaccgctatttctcaaaacagtcaaggtcattgaaaactagaagaatcagagaaacagccaagaggacctgaggagataagacgactaattgtaataaggtgtcctggttgagatcctggaagagaaaaagcacattaaggtaaaaactaagg

SEQ ID NO: 801304 - DNA, 628 bp, Homo sapiens
ctgcaaagctgaaataatttaagcaacaaaacaaattagttgaattataacccacagtataaataaatatctatactgatgtaaatgactatgtaaatgaataagtgggggagaaatctcacatgcaatagaatttcaaataatttctgtagatactctcccctcaagacggtggagcataatttctcattccttaagtatgggttgtgcatagtgacttcctgccaaagagcacagtatgaaaatgggaaaaaagatgaactttacaggggtgaarcctgacaaccacgacctcagccaggtgacccaagttaacatgtacagtaataagttctgttgatagcatgtgcccttaatatgatgaggacagcactttacctctgtgggtttttctttccaaagtccatattcccagtctaatcatgtggtaaaatatcaaataaatcccagttgaggaacatgccacaaaatgcctgaccgctatttctcaaaacagtcaaggtcattgaaaactagaagaatcagagaaacagccaagaggacctgaggagataagacgactaattgtaataaggtgtcctggttgagatcctggaagagaaaaagcacattaaggtaaaaactaagg

SEQ ID NO: 801305 - DNA, 628 bp, Homo sapiens
ctgcaaagctgaaataatttaagcaacaaaacaaattagttgaattataacccacagtataaataaatatctatactgatgtaaatgactatgtaaatgaataagtgggggagaaatctcacatgcaatagaatttcaaataatttctgtagatactctcccctcaagacggtggagcataatttctcattccttaagtatgggttgtgcatagtgacttcctgccaaagagcacagtatgaaaatgggaaaaaagatgaactttacaggggtgaagcctgacaaccacgacctcagccaggtgacccaagttaacatgtacagtaataagttctgttgatagcatgtgcccttaatatgatgaggacagcactttacctctgtgggtttttctttccaaagtccatattcccagtctaatcatgtggtaaaatatcaaataaatcccagttgaggaacatgccacaaaatgcctgaccgstatttctcaaaacagtcaaggtcattgaaaactagaagaatcagagaaacagccaagaggacctgaggagataagacgactaattgtaataaggtgtcctggttgagatcctggaagagaaaaagcacattaaggtaaaaactaagg

SEQ ID NO: 801306 - DNA, 566 bp, Homo sapiens
tgtctgttccataagactctgttggaatgaagaaatctctctgctttgctggcctaatcaaaataattagtaggaggagagaaatgggcagattcccagaattggtcatttccacatgattaacatcagaggggctggcagggagaaaatggtcccctcagtattctaattgaggactggtctttagggtggtggttcataactgggggaagtgaggtcaattttgcccctcatgggatatttggcaatgtctggagacattttttattatcttaacttgggaaggggagtgttactgatatcttgagggtaaaacccagggctgtggctaaacttcctttgatgcacaggacagcccctgcaagaaagaatggtctggctccaaatgccagtagggcccrtgtggagaaactcttcttttaacgcaaaccttcttcatttgggaacctctggagtgcagatgtggagtgagctggggcttcttgccttgacatttggattgtacataatgggaccaaataatgccaactatggagggatccatggaatttgaagtgtagagtgga

SEQ ID NO: 801307 - DNA, 566 bp, Homo sapiens
tgtctgttccataagactctgttggaatgaagaaatctctctgctttgctggcctaatcaaaataattagtaggaggagagaaatgggcagattcccagaattggtcatttccacatgattaacatcagaggggctggcagggagaaaatggtcccctcagtattctaattgaggactggtctttagggtggtggttcataactgggggaagtgaggtcaattttgcccctcatgggatatttggcaatgtctggagacattttttattatcttaacttgggaaggggagtgttactgatatcttgagggtaaaacccagggctgtggctaaacttcctttgatgcacaggacagcccctgcaagaaagaatggtctggctccaaatgccagtagggcccgtgtggagaaactcttcttttaacrcaaaccttcttcatttgggaacctctggagtgcagatgtggagtgagctggggcttcttgccttgacatttggattgtacataatgggaccaaataatgccaactatggagggatccatggaatttgaagtgtagagtgga

SEQ ID NO: 801308 - DNA, 474 bp, Homo sapiens
cccggctaattttttgtatttttagtagagacggggtttcattgtgttagccaggatggtctcgatgtcctgacctcgtgatctgcccaccttggcctcccaaagtgctgggattacaggcataagccaccggacccggccatgaaaacttttttttacacaaaaacctttatgtgagcattttagcatctttatttataattaataattgctaaaaactgaaaacaattcgaatatcctttaactggtgaatagacaaactwtagctacacaatggaatactacttagcaataaaaaggaacaatctgccaatacacgcagcaacatgcatgatcctcatatgcattaagctccttgaactaggtcagactcgaaagactagactacttgattttatttatatgactccattccagacatggcaaaactaggaggacagagaacatctcagtagtttataggggctggggagg

SEQ ID NO: 801309 - DNA, 421 bp, Homo sapiens
ttctgggccctcttcttcttttcttaggcctgtcaaaactaagttttcaaaatacaaaaaggatgccacagatttcattacggtagaggaaatgtctgacagctcttgtatttaaacttagctagccacattgggactcccaatttcatatgttgagttctagagcagagctctctctcctaaagtaatggctgagggttagaggwacgcttcttcattctaataataaaaaatgatttcttgtagagacagggtttcactgtgttgcccaggctggtctcaaacccctggcctcaagtgattcactcacgttggcctcccgctttgttgggatgacaggcaagaaccaccacacctggccttgggagctgctcctgctttgtgtgttttggctggtcttcctgcacagctgtcggtaaga

SEQ ID NO: 801310 - DNA, 577 bp, Homo sapiens
agtcttatatccggtatctataaggaacttacacaaatttacaaggaaaaaacaaccccattaaaaagtgggcaaaggagatgaatagacatttctcaaaagaagacatacatgcaacccaacaaacatgataaaaagctcaacatcattgatcattagagaaatgcaaatcaaaaccacaacaagataccatctcatactagccagaatggctattattaaaaagtcaaaaaaataacaaactattcatctgacaagggactaatatccagaatatacaaggaactcaactcracagcaaaaagaatattctaattcaaaagtaggcaaaaaatctgaaacagacatttctcataagaagacatacgaatgaccaaaaggtatacggaaaaaatgctcaacatcactaatcatcagggaagtgcacatcaaaaccaccaagtgatatgatcttattccagttagaatcgctactatcaaaagacaaaaaataacaaatgccagcaaggctgcagagaacagggaactcttagacattgttggtgggaatgtaaagtagtacagccattataaaaaa

SEQ ID NO: 801311 - DNA, 613 bp, Homo sapiens
gtgggaggattgtttgagcccaggaggttggggttctgttgaactatgattgcaccactgcactccagcctgggtaacagagcaagaacctgtctctaaaagtaaaacatgatcatagagacagttttgaaaatagagaaaacaggccaggtgcagtggctcacgcctgtaatcccagcactatggggagaccgaggcgggcggaccatttgaggtcaggagttcgagaccagcctgggcaacttggtgraaccctgtctttactaaaaatataaaattagccaggcatggtggcaggtgcctgtaataccagctactaaggcaggagaattgcttgaacccaggagatggacattgcagtgagctgagatcacaccactgcactccaccctgggtgacagagcaagattctgtctcaaaaaaaaaaaaaaagaagaagaagaagaagaaaagaaaaagaaaacataatccatgcataattacaatacctgaattacagtggctctcaaagtgcagttcctggaccagtaacatcagcatcactggtgaatttgtgagaaattctcatgtcccaacccagacttgctgaatcagaaactcctagggtgagccc

SEQ ID NO: 801312 - DNA, 490 bp, Homo sapiens
acaatacctgaattacagtggctctcaaagtgcagttcctggaccagtaacatcagcatcactggtgaatttgtgagaaattctcatgtcccaacccagacttgctgaatcagaaactcctagggtgagccccccaagggattctgatgaagggcgtttccttctagttwtttccccccctaaaagggcaagagtcaggtctctgagcacaagtccccatgccagggcctgacacagagcaggatctcagcaagcatcctttgaataagtgaatgaatgaatgatagttctcacatgagcagctgtctccccaaggcctgcccttcaccacagtcaatttgtgacagcccaagatgttgcattcacgccagttccatctctccaggggggcctaggcctctcagggggctagtcccagctgcaggcagaatgcccgttagcccctgctggcacggccccacgtgagagggtgagctgacaaaggcaggct

SEQ ID NO: 801313 - DNA, 702 bp, Homo sapiens
ctatgacggaattggcctgcagcagctggtgagctgtggggctggagatgaaagtgaccaaacaccaggaccctctgcagaaacacaagtggcagcatgtggtctgaacccagcaacagctcccagctgggaggacacrgagagaaccaaggggacatgaggctcccaaaggcaggagcaggttgcctcttgccagccaccaaggaagagacttccagagcggaagtccctcagctacctcccacccaagagtcagcccctagtgtccctggggaactctgatatgacccctacagaccatattctagcaactctacatatgccaaggctggctcaggggcggggagctggaatctgagcccacccactcccatgggactctgtactgcctgggcctcctactccacacctgtttcccacctcaaaagccacctccagcagagcgcagtggctcacacctgtaatcccagcactttgggaggccgagacggacggattacttgaggtcaggacttcaagaccagcctggtcaacatggcgaaaccgtctctataaaaatacaaaaaattagccgggcgtggtggtgcacgcctgtaatcccagctgctcaggaggctaaggcggagaattgcttgaacccaggaggtggaggttgcagtgagccaagatggcaccactatactccagccgggatgacagaat

SEQ ID NO: 801314 - DNA, 587 bp, Homo sapiens
gtttatattttacttcttaacttatcttcccttgcttcttccagttaagtaaatgttctatgaaccaggaatttatattagttccattctcagtttttcctccagattcccaaagagaaacctaggtataattctatgtttaataaaaagttgtcaactcaagaaataagtaaatgagttaacacatagtaatatttcaaaatatgtgagaacagtagagaaaaacataaatataatataacactatacattttatttctcagcttttgatagatcaaacagacccctaaaattagggagatagtaggyattctgaataagattagtactaaattattttatgtttccaatggtaaaaataatatgaaagattaataaaatctttatagctaatataaaaaaatttaaaaaataacagaagtagaattgaaacctacaaatacttgaaaacaaaacaaaaataaactcccttcctaaacaattcttagtcaatgcaaataatgatgaaacatctgattttaaacttcttaagtatgtgtctctatggatttgactaaaataataagtaaaataataaaataacttct

SEQ ID NO: 801315 - DNA, 626 bp, Homo sapiens
tatagcattctaacccccaaattctagctgccttaacagccttgaaccaaattgctgtttccttagcacagtgagaccactgctatctgtttgggttccactttcctcttgcacagtgtggaagctgcccccgggtaccttccaagcctgtcatggcaagtgtactgtttcctttcttctaaaaatcacaaccctttgctstctgttgtctatgactgaaaacagctgcttcatgcattttgtccagttttgtgcttattattttggaagtgttaagtctgatacttcttagttcatcatgaccagaaccaaaagtcagctcaggagtttttagagctacaaatcttcatgtttgggggaagaaatattacattttaatttatttgtttttataatgtggcactgaaaaaatatttctactgttttcatgcttctctcttttccccttctctatatccagctccttctttttctaattatccttaataggagtgactcaagctttgcttatatgcaaactggaattctggcaactacaaaaaagttttatacaacactaaatctgcaaatactagaattttacttctgaggaatagagagggatttacgtttataaactatataaa

SEQ ID NO: 801316 - DNA, 628 bp, Homo sapiens
aacttctaaaattgcaaccgcccacctcagggctccccagcatttcagagcccctcaccctccctctgcccagctctcttctccctccatggcacctatcatttcttttttttttcccccttttttgagatggagtctagctctgttgcccaggctggagtacaatggtgccatctmggctcactacaacctctgcctcccaggttcaagtgattctcctgcctcagcctctcgagtagttgggattacaggtgcgtgccaccatgcccagctaattcttgtatttttagtagagacagggtttcgccatgttggtcagctggtctccaactcctaacctcaggtgatccacccgcctcggcctcccaaagtgctgggattacaggcgtgtgccaccgcaccaagccagtgcctctcatttttaccctgggatatcatttatttcagtatcatgtttggtgtttattctctgtcctccagcactggtaccatggaagcggagaccttggtctcctttgttcactgacgtattcacagcctccaatatccgaaacttataacaatatttactgaatgaatcagagcatccccctttaaaaaagaaattgtctcgttaaatgttttaaaa

SEQ ID NO: 801317 - DNA, 632 bp, Homo sapiens; identical to SEQ ID NO: 790460

SEQ ID NO: 801318 - DNA, 632 bp, Homo sapiens; identical to SEQ ID NO: 790461

SEQ ID NO: 801319 - DNA, 630 bp, Homo sapiens
gctttttcttctgctactctattgtcagtttatttcagcagtctcacttcagagggaaagtttaaacttccctaccacacatacacaaacacacacacacacacacacacgaaataaaacaatactgcatacatccattttgaaataaaaataatttttggacaataaaagcaataaaaggagttagcactgaacaaatgataaggttgacaggttcaagtgaatgaaatttaagtacatacatacataccacaagatgaagaacaaaaaatgattactctcaaattagaaaaattaaaatgataaaaatacgagagtattgtaatacacataacagtaaacatttaacattatatatattagggaaattaatattatctatatggccaatttcaggtctgactggacagatggttaaagaatatgaacagatggtttgcacaaggaaaaatacaaatagtgaacaaacacttgggaaaatgtttrgcttccataataattaaagaattaaaaattaaaatggcctaatatattgcctcatgcatattaaattattaataatagtgtttttttggaattaaagctaccagagctttaagaactcatacactgtctgtagaaatagggtca

SEQ ID NO: 801320 - DNA, 634 bp, Homo sapiens
taaaccagggtataccatgttagcacacttgatctttttgtgctttttatctgtttactactgcaaaaggccttatcttcaattcagattttaagctcacatggcttgcaggagttctaaacaaatttctgctaaaaattagtatcttcagtatttttgcaaacatcaactgatacaaataacttttcmaggtattggtatagctttcttttcaaaatagacacatttttgaagttgcaagaaaagccagtaacatcctaatattttagataaatggctcccttatattcctggcaaggggttgaggagcagagactggagtcagtaatccatgataggccaacccatgcctaacatcatatgtctgtagtgtgatcaagaaaatgtaggcaagccatttcaaagaccatcattaataaaaatgtgttctcattatttatgaccactatgaatatcttgagtgcttattgtatgccacacactgggcaaagagctttacaggtattgctcattcactcatggacttattaacctatttattgtggaacaaccgtgaaccaactactctgcccacattgaccttaaattctcctggaaggcaaataaatgaacaaatacataatatcttaagtat

SEQ ID NO: 801321 - DNA, 634 bp, Homo sapiens
taaaccagggtataccatgttagcacacttgatctttttgtgctttttatctgtttactactgcaaaaggccttatcttcaattcagattttaagctcacatggcttgcaggagttctaaacaaatttctgctaaaaattagtatcttcagtatttttgcaaacatcaactgatacaaataacttttcaaggtattggtatagctttcttttcaaaatagacacatttttgaagttgcaagaaaagccagtaacatcctaatattttagataaatggctcccttatattcctggcaaggggttgaggagcagagactggagtcartaatccatgataggccaacccatgcctaacatcatatgtctgtagtgtgatcaagaaaatgtaggcaagccatttcaaagaccatcattaataaaaatgtgttctcattatttatgaccactatgaatatcttgagtgcttattgtatgccacacactgggcaaagagctttacaggtattgctcattcactcatggacttattaacctatttattgtggaacaaccgtgaaccaactactctgcccacattgaccttaaattctcctggaaggcaaataaatgaacaaatacataatatcttaagtat

SEQ ID NO: 801322 - DNA, 610 bp, Homo sapiens
tatgttctttttttcttgatcagtttagctagaagtttatgaattttattaaattttttttttttttttgagatggagtcttgctctgtcacccaggctagagggcagtggcgcgatcttggctcattgcaagcttggcgtcccagattcatgccattctcctgcctcagcctcccgagtagctgggactacaggytcccgccaccacgcccggctaatttttcttgtatttttagtacagatggggtttcaccgtgttagccaggatgatctcgatctcctgacctcgtgatccacctcccagagtgctgggattacatattaatgttttcaaagaaccaacttttagttgcatccattttatcttgtattttgatctctgttttattgattttcattctgatctttattatttcctttattctactttcagtttcatttactctttttctagtttcttaaggttattcatttgagaaccttcttttttcctagtacaggtgtttagtactaaaatttctctgtaactactgctttagttacatctacaaattttaatgttattttttcatttagttagaaacactttctaatttacctttgttatttt

SEQ ID NO: 801323 - DNA, 610 bp, Homo sapiens
tatgttctttttttcttgatcagtttagctagaagtttatgaattttattaaattttttttttttttttgagatggagtcttgctctgtcacccaggctagagggcagtggcgcgatcttggctcattgcaagcttggcgtcccagattcatgccattctcctgcctcagcctcccgagtagctgggactacaggttcccgccaccacgcccggctaatttttyttgtatttttagtacagatggggtttcaccgtgttagccaggatgatctcgatctcctgacctcgtgatccacctcccagagtgctgggattacatattaatgttttcaaagaaccaacttttagttgcatccattttatcttgtattttgatctctgttttattgattttcattctgatctttattatttcctttattctactttcagtttcatttactctttttctagtttcttaaggttattcatttgagaaccttcttttttcctagtacaggtgtttagtactaaaatttctctgtaactactgctttagttacatctacaaattttaatgttattttttcatttagttagaaacactttctaatttacctttgttatttt

SEQ ID NO: 801324 - DNA, 544 bp, Homo sapiens
cttgtaaatggcattttactgattcccaattgtgaacagactcattatattgaaacagagttatacaaaaatcagaagtattccaatcacattgcatttgtaatctatgttctaaactcataattctatctcccactcacataacagtttgtctyagatcattaatttgattgaccaatttttgatcaatacctgactgagaattccacatctgagtataatttttttgccatttatccacaaaatgaacagtttgaatagattgatgtaatgcaactccagcagtagcagcagtcacagtaacagcaatcaagcccattattactgcaattaatgtaaaaataaatcgtttactctttctaagaattttttgtagaatattattaataacatggagagaaggggaagattcccaaggcctatgtaaggctacagggagccaaataccttctctggctctgactattaaaatactatgatattgattaaaggatgagtcaatacaagcatacaagtaacaattaacacgtaattatgttggttt

SEQ ID NO: 801325 - DNA, 544 bp, Homo sapiens
cttgtaaatggcattttactgattcccaattgtgaacagactcattatattgaaacagagttatacaaaaatcagaagtattccaatcacattgcatttgtaatctatgttctaaactcataattctatctcccactcacataacagtttgtcttagatcattaatttgattgrccaatttttgatcaatacctgactgagaattccacatctgagtataatttttttgccatttatccacaaaatgaacagtttgaatagattgatgtaatgcaactccagcagtagcagcagtcacagtaacagcaatcaagcccattattactgcaattaatgtaaaaataaatcgtttactctttctaagaattttttgtagaatattattaataacatggagagaaggggaagattcccaaggcctatgtaaggctacagggagccaaataccttctctggctctgactattaaaatactatgatattgattaaaggatgagtcaatacaagcatacaagtaacaattaacacgtaattatgttggttt

SEQ ID NO: 801326 - DNA, 544 bp, Homo sapiens
cttgtaaatggcattttactgattcccaattgtgaacagactcattatattgaaacagagttatacaaaaatcagaagtattccaatcacattgcatttgtaatctatgttctaaactcataattctatctcccactcacataacagtttgtcttagatcattaatttgattgaccaatttttgatcaatacctgactgagaattccacatctgagtataatttttttgccatttatccacaaaatgaacagtttgaatagattgatgtaatgcaactccagcagtagcagcagtcacagtaacagcaatcaagcccattattactgcaattaatrtaaaaataaatcgtttactctttctaagaattttttgtagaatattattaataacatggagagaaggggaagattcccaaggcctatgtaaggctacagggagccaaataccttctctggctctgactattaaaatactatgatattgattaaaggatgagtcaatacaagcatacaagtaacaattaacacgtaattatgttggttt

SEQ ID NO: 801327 - DNA, 626 bp, Homo sapiens
tccccaaatttatttctcaccagttttccaatcatgtgtcttccaagtcccttaccatccagccaaaccactggctacagcccatgaatcagtgtataattacacatctggccatttctccttccatgcaaagtgcacaacctggtgcactgctcgaagttctgcccactgggaagatttcccttcaacactgtccttcagggatgtgctagaaaggggctattagtgctgcagctgtccactttcaggtggtgcctgcatatcgtgcagaaccatctgtgaaccaggccctagtcttcccttcctctgtcaactgatcatagggaactccccatgaggccatctgtgcaagctgggggagagaaggcagggtggcaggagtggaaattaagggcatttgagtcacttcctcatgtaactttcttgtgccttcaggacctgctcgagcccratcacatatgtacaacttccacttgatgatggaatgctgctgtgtatgacccactttatggctaatgggtcaaaaagaacccagttcatgataggcagttcaggtcacatggtgacttgacccacagtcaaacattcagtttccaccaaagcccagtaacatgccaagagctgtc

SEQ ID NO: 801328 - DNA, 634 bp, Homo sapiens
tttattcttttaaaagccaaacatctacatttctaaagacaaatcttccatattcttctccttaaaggaagacaaactagtcttctaaaggccaaatatctacatttctgaagtcaaatctccactagcccaagttctggtatggaactgagctggctggcatggaagtactaccaccctacttagcttccattacagtcttttcaccatctcaagggctattaaatgactgaaatcagatatctgagttccattaggggtctcttaggcctgagaaagttgagaggctttagcatcacaacactcttaacattcccctttctgcaaccacccgtgagctggagtgagctcaccataggagacccttgttaagtccttcatcatggcagagggttaaacaaggytcaagtttttacagctttgaattcccttgctttttacaccacttaaagaagcctgtaagtagcttgctgagactaaaacaaaacaaagcaaaagggctggggcacggaacagaacctgttaacatcgaggtggctaggggtgcaaacctgttggtagaagatcccagtgttcatcttacttcttgaggaggagagtttttagggaaagcttgtctatcatctgctacttt

SEQ ID NO: 801329 - DNA, 555 bp, Homo sapiens
gtatatataatttactaatatacgttaaagatactcagatcttcctggttatggttcacatatatgaaggggggagagagaggcctcctaaaccaggtgtccgaatattacaacatctagaaagactcttgaacttacacttcataaaagataaaaggagtgtttttttaaagagcaactgagctactaatgagaatttggcactatttatgtttttatgtayaaagaaccctaaaggacattcgatggattctggtatcggttgccagttcttcttcacttaggaactgatgctactaacccttagttggtggggctaagagaacagttctggcctagctcctgtctcctacaggtccttcaggagcaaaatgggcaaacaaaatgtggattatacatagagtgcaacactgggttattctccctcacccagcctactagtctgcccagaaaatccccatcctgcttctgttggattctttcctgtgtttcctttgccacttgctgaaagtacagtaccattctagcatcccaagttttacttgctgatttctg

SEQ ID NO: 801330 - DNA, 470 bp, Homo sapiens
tgcttattcaaacctttgcccatttttaaaaatagggtaatttgtcttatgattgagctatagaggttctttgtgtattctagatgtaaatcccttgttagatgtttgtattaaaaatattttttatcattctgtggcttgtcttttgaagaggagatgtttttaattttgattaattcaatttaccatttttttattctgtggtttgtatttagcctaggaagtttctgtttattccaatattgwaaaaattttctcttctgctttcttttagaagtttataattttagcttttatgtgtcggactattatctattttgagttaattattgtgtgtggtgtgagataggggttgaggttcattttttttcatgcagaagttttgttgatccatcacaatatgcttgtaggctatttgcatttattattttgtgggaagtgtctgttcaagtcttctgcccatttcttaa

SEQ ID NO: 801331 - DNA, 368 bp, Homo sapiens
caaaatgtagtggctcaaagcaataaacatttatcatctcacagtttctgtggtcaggaatttgggacgaggcttatctgtctgagggtctgtcatgtggttgcagtcaagatataggttgcagatacaatcatctaaagccttgactatagctggaggatccgcttccaagatggcrcactcacatgggtgttgtcaagagtcctccatactttccacagggatctcttcttacaatatggcagcagattacccccagagcatgcgagagaggagtagcaaggaggaagctccaatgactttcatgactgattctcagcagtcatgtactgttccttctaccacattccatacattagagggaagcc

SEQ ID NO: 801332 - DNA, 626 bp, Homo sapiens
gtgggctactttatttttatctaggaaaagaaaaaatgttagcataatactgatacctacatgtctacagaagaacttcatcatacttggaggttatatgctagaatttcctctcataaatagagaaatatgagagagatgttgtctaattcacttttccccacagttgttggctttgggtcattcattctgttatacgtttcttgtaggtgcagtgactacatgtatgaaataagcctgcawgagtgttatatcaagataaaagggtcatatatgtgccataattggtcatcgaatggcttgacactgatgtgttagaacagttcaacaccaattgttaaatattaggaaattttgtgagccaatcatggagcatttacccaatggaagtcagtaaatacgacacaccaggggttcccctcactcccacccaagccagtttaccagcaccctgctgacttgaggtgggaggaacagtggagggaggttgctatttaccaccttacaaatgttggaaaccacaaattgagatttctctgtaccggcagagaataccaaagattatgccaacgtctctggttactttggatttgatttataaatagaattttactaaagctgggaca

SEQ ID NO: 801333 - DNA, 470 bp, Homo sapiens
gttcgtacatgtcttttcatggcttgatagttactttttttagcactaatatttcattgtatgaatgtgccacggtgtatttatccattcacctattgaaggatgtcttggttacttccaagttttgacaattatgaataaagctgctataaatatctataatttataatgacataatttttgaattataaatatctacgtgtgagtttttgcgtggacataatttttgatttatatgaatrgtctgattgcttgttcatatggtaaaagcatgtttaattttataagaaactggcaaaccatcttccaaagtggttgtaccattttgcagttttatcagcaatgaatgagagtgtctgttgctccacatcttcatcagcatttggtgtcgtcattgtttgggattttggctgttctagtaagtgtatagtggtatctcactgttatttcaattttgcaattccctaatg

SEQ ID NO: 801334 - DNA, 470 bp, Homo sapiens
gttcgtacatgtcttttcatggcttgatagttactttttttagcactaatatttcattgtatgaatgtgccacggtgtatttatccattcacctattgaaggatgtcttggttacttccaagttttgacaattatgaataaagctgctataaatatctataatttataatgacataatttttgaattataaatatctacgtgtgagtttttgcgtggacataatttttgatttatatgaatggtctgattgcttgttcatatggtaaaagcatgtttaattttataagaaactggcaaaccatcttccaaagtggttgtaccattttgcakttttatcagcaatgaatgagagtgtctgttgctccacatcttcatcagcatttggtgtcgtcattgtttgggattttggctgttctagtaagtgtatagtggtatctcactgttatttcaattttgcaattccctaatg

SEQ ID NO: 801335 - DNA, 646 bp, Homo sapiens
ttagacttttagtattcttttataattaaagtgttacatatctatgcagaattctctttttcttttataagtttgctggtgttcttatttttggttatatattctagaagcgttattcttttttaatgcccacaccactccccatcctcctccttgcccctgccaaaaaaaaaaaaaaaagaagcattttatgtttttttgaagaaccagctcttggatttatcttctagttggttaaggctttcatctttactatttttgttttattttttcttaraattgttttggtgtttttaatttaaattttcagttcatatatttttactctttcttgtttaataataaaaaaatttaagatacacatttgctattgattactgtttggccatatttcattaatttggattatgcaatattttcattttgttatgttccaaaaaacctctaattataatttgggtttcctttgtgatccattaattatttaggacactgtgtcttaattgtcgagcagctgatgctttttggctttaaatgtttagtattaatttctagttttcttgcattttagtcagagaatatggcctatatatttcctggaattccttgagattttctgaacccatttttgtaaatgttcatgaaa

SEQ ID NO: 801336 - DNA, 645 bp, Homo sapiens
accttctgagcgacatttttctgaccatccaatcaaaagtatttatctgtgtcaatctccctcatactacccttcttgatcctcttcatagcacttattattccaagcaaccttgtataattttacggattacattttatatattgtccaccccttcccctactgtaagctcaatgaggacagtgaatttgtcttattcactgctgtatccctggttcctaggacagtgtctagcacatggaagctactgtataattatttatatgtttaaaactatatttattctttggaaatttatttgtgcagtactgtcttagttatgataactttagacaaccctacctrttgcagatgtaacccccaatccccaagtctctgtggctttaatgcaacaaaagctcatttcttgtttaggtaagagtccaggaaaggtgtcctggttggatggcttttgtctaaagtcctggattcatggatccaacttccttacatcctgctctcacaccatttgcaatacctggcttccaaggttgcttggttcatctggaatgagtcaaagaagggaagatatatgggaaggtttatgggcagactgggaagtggtatacatcacttccttcatattccattgtctggaattcagtt

SEQ ID NO: 801337 - DNA, 645 bp, Homo sapiens
accttctgagcgacatttttctgaccatccaatcaaaagtatttatctgtgtcaatctccctcatactacccttcttgatcctcttcatagcacttattattccaagcaaccttgtataattttacggattacattttatatattgtccaccccttcccctactgtaagctcaatgaggacagtgaatttgtcttattcactgctgtatccctggttcctaggacagtgtctagcacatggaagctactgtataattatttatatgtttaaaactatatttattctttggaaatttatttgtgcagtactgtcttagttatgataactttagacaaccctacctattgcagatgtaacccccaayccccaagtctctgtggctttaatgcaacaaaagctcatttcttgtttaggtaagagtccaggaaaggtgtcctggttggatggcttttgtctaaagtcctggattcatggatccaacttccttacatcctgctctcacaccatttgcaatacctggcttccaaggttgcttggttcatctggaatgagtcaaagaagggaagatatatgggaaggtttatgggcagactgggaagtggtatacatcacttccttcatattccattgtctggaattcagtt

SEQ ID NO: 801338 - DNA, 633 bp, Homo sapiens
agattctccctcagagcctccagaagcagccacatctgccattgcactgacttcatctctaagctccggagctttgggagaatacatttctgttgtttgaagctacccagtttgtggtaattttttatagcctctttaggaggctatctatgatatagattttaaaaatgaaaatgggattagatcgtataagccatattcttttgtagcttatttcttttactgaagctactttaatctcttctgtcatttaatactcttctgcaatatagtttttaatgtcataatatttccttttatgrgagtacattagtttatcagtctccttttatgattttagactttgtcataaagttgttcttagaaaaatgacttgaatgttagattctcataagaattaaatatggagggaccttggctgtcttggtccctgctatatttattaaatagtgctggacatgtaggaaaattgtccatcttattagacctattgtgtaaagtaaaattgaaaggacatgtgcatttttgcagctttgagaatgtattgccaaactatatatcagataatttttcaagtgtgaaactaagggaataatttttatttttgtttgcaaatgcatacaatatgactat

SEQ ID NO: 801339 - DNA, 597 bp, Homo sapiens
actctacttatataggattgaaagaagagaaacacattagatgagcacacattcatcttggctttgtttctgggagcacgttcttaataatggaccatggactgttccaaacagtggacagtagttctattgagttgaagaggcagagaatggaatttgatatagaggtagctgtagtatttggactagagtagtagcaagttasaagctggggaatatgtagggaaggaaaggggtaacttagatatcagagccagtcctgtgaagttagagattggggtgctcgtgcagctagattggaagcactttgctgatcacttcatgtactcagttgagatccccaaaggccacaggttagaagcaagggatatatcctatggtaaaggaaaaattcaagttatacctcttctagcaaggcataaaatcaaacctgataggatccagaactggtgatttaactgcctaccagaatcaacacctttttttttttttttaacagaatgactatgtaaaccagactccctacaaaatgtaccatttcataatgaccagcatataatccaaaacttctaaacatgtaaaaatgtcacctaaaat

SEQ ID NO: 801340 - DNA, 527 bp, Homo sapiens
aatagaaaatgagccttatttggcattttaggatttttttctctcccctaaaagggagccccaccccagaagtactccaggagttaaacacccagctgtgttctttccttctctgagatcagcaatggccctaacaggtctagcatttgaatttagctgacaattgcagtgatgatgtgttgagcagaatgcaatccagcttgttcctgtgcagttttataggctctgcaagttttaaaacttagaaaaaatgttttgtcagtaaaagaagctggcacacagggaacagttgattgtataataaggcatcatttcccmtggtctaataactataacctgttttaactattacacattataatatcaataaagctctggtcatttattatctatttaaaaaatcttctttcagtaaagatgttctgaaaaggtcagagctgctgtcagaccccagtgataaagaacaggatggtgctttgtaaaatggcagttcttgcagtgttaaggactgtaaactttttaaattg

SEQ ID NO: 801341 - DNA, 662 bp, Homo sapiens
cctgaaattcagatttgggggcatgtggggaagcttagaatgtccatgcaaggtaaaggcgatattttaacagtgaaaagcaacatgctcttcaaaagaaacatgttttgttgagaggagcctttaaaaatggatgtgtgggtgagtagatggagggaaccgatctatatccttaaaaataaaaaatagaaacagaatttcttttttttttaacttttgttttaagttcaggggtacatggcaggtttgttacatcggtaaacacgtcatgagggtttgttgtacasattatttaatcacctattaatcatcacttttttttttttttttttgagacggaatctggctctgtctcccaggctggagtgcagtggcgcgatctcggctcaccgcaagctccgcctcacgggttcacgccattctcctgcctcagcctccctagtagctgggactacaggtgcccgccaccacacccggctaattttttttgtatttttagtagagacggggtttcaccgtgttagccaggatggtctcgatctcctgaccttgtgatctgcccgcctcggcctcccaaagtgctgggattacaggtgtgagccaccgtgtctggcctcatcaccattaagcctactacccattatttatttttcctgatcctt

SEQ ID NO: 801342 - DNA, 662 bp, Homo sapiens
cctgaaattcagatttgggggcatgtggggaagcttagaatgtccatgcaaggtaaaggcgatattttaacagtgaaaagcaacatgctcttcaaaagaaacatgttttgttgagaggagcctttaaaaatggatgtgtgggtgagtagatggagggaaccgatctatatccttaaaaataaaaaatagaaacagaatttcttttttttttaacttttgttttaagttcaggggtacatggcaggtttgttacatcggtaaacacgtcatgagggtttgttgtacagattatttaatcacctattaatcatcacttttttttttttttttttgagacggaatctggctctgtctcccaggctggagtgcagtggcgcgatctcggctcaccgcaagctccgcctcacgggttcacgcyattctcctgcctcagcctccctagtagctgggactacaggtgcccgccaccacacccggctaattttttttgtatttttagtagagacggggtttcaccgtgttagccaggatggtctcgatctcctgaccttgtgatctgcccgcctcggcctcccaaagtgctgggattacaggtgtgagccaccgtgtctggcctcatcaccattaagcctactacccattatttatttttcctgatcctt

SEQ ID NO: 801343 - DNA, 662 bp, Homo sapiens
cctgaaattcagatttgggggcatgtggggaagcttagaatgtccatgcaaggtaaaggcgatattttaacagtgaaaagcaacatgctcttcaaaagaaacatgttttgttgagaggagcctttaaaaatggatgtgtgggtgagtagatggagggaaccgatctatatccttaaaaataaaaaatagaaacagaatttcttttttttttaacttttgttttaagttcaggggtacatggcaggtttgttacatcggtaaacacgtcatgagggtttgttgtacagattatttaatcacctattaatcatcacttttttttttttttttttgagacggaatctggctctgtctcccaggctggagtgcagtggcgcgatctcggctcaccgcaagctccgcctcacgggttcacgccattctcctgcctcagcctccctagtagctgggactacaggygcccgccaccacacccggctaattttttttgtatttttagtagagacggggtttcaccgtgttagccaggatggtctcgatctcctgaccttgtgatctgcccgcctcggcctcccaaagtgctgggattacaggtgtgagccaccgtgtctggcctcatcaccattaagcctactacccattatttatttttcctgatcctt

SEQ ID NO: 801344 - DNA, 610 bp, Homo sapiens
aaccgggatagtttccaagttttgatgtgggaaaatttggttatcacaacattatcactaagactgtatgctgcacaaaacattgatataaagcaacatcactgctgattaaacactattagcatattcagttggaaacacaaatgtaaacacagatttttcaatgtttgcatcaagtacaattacaatattcatctttacacaggagtgagtaaatagagactcaaagacagcagaaaagatagcatgcacatcgaaaaatgtgtaaatgaatgtttaamgtggcttagaaggtcttatttatctttaaaataaacaactagttaagtccttttgtttcgttttgttttgttttgttaacagcttgtagctattatgcgcttgtgatcttgccaaatggaatgtggctgggagcatatgtttaataaaaatgagtgtgagcacacccacaaacacacacacacacaaaacattaaagcaacactacagtttacttttaaaatgacaagatgcaaggcgctttgggaattgaggcagctctctattttaactctccacattatgttcaggcacttggagcctgagtacatctcagcaaaggaaaataagg

SEQ ID NO: 801345 - DNA, 594 bp, Homo sapiens
cagatcattcctgggaccacagagaagggaaaaaacctttcaacacacagtaagaaagttggacttccatatccgtgacaccgctcccccaaatctgttcaacagcaagaacatggaaaatttctccccaacttagggtttctacaataaaaaaaaatgagatgatgtggacaaccagcttcttaaccaccttgggtttcttggcagtaaacctgtctctgcctcaagccacaggaatcatcaggagtgcctaaagaaatatctctgaggacagagacaaagagcagagatgggaatactatctataaaactggaaacgtctctgtaactcagccaaaagagacatcaaatcagagtggctgttcaacagcaccatgttataggaggtttgtgtaacagctkccctggcacaaacccctagccagccttcccgcactcaagatatccgttttgggatatcctcccattcgagaagggaggcactctgattgcctagaaccaaggaaatcttggtcttaagctgccatctagtgaccaaaaggaggcagtgacctagctggggtgataaaaataatgacaattaacagctaaatt

SEQ ID NO: 801346 - DNA, 609 bp, Homo sapiens
atcatgtagataatacacattttaataaattgggaggataaacctttttcacactttaatgagctaggtgtagtcccttttttgccaaatggctactcctatcacacccttcatctattactccactgggattctctcacttttaaattaaccagtagaactctttacgagttagggatgttagcctttcttgtgacatttttatgagtattttcccagctttttttttgagacagagtctcattctgtcgcccagactgsagtgcagtggtgcaatctcagctcattgcaacctccacctcgtgggttcaagtgattcatgtgcctcagcttcctgagtagctgagattacaggtgcccgccactacacccagctaattttgtatttttaatagggatggagtttcaccatgttggccaggctggttgagaactcctgagctcaagtgatctgcccaccttggcctcctaaagtgctgagattacaggtgtgagctgccacgacagatttgtttttaattcagtggtttctgacgttttaaatgtgtcaatagtaaaatctatctttctctttctcttttcaatatctgctttaagaaagatctcccc

SEQ ID NO: 801347 - DNA, 574 bp, Homo sapiens
ccttctccaggtgcccaagtcagaaacctgagcatttggcatttttcctgacacctgtttttctctcttcctacatataatctctagtctttgccaattctacctcccatatatcttttattttttattttgttttattttattctcctgcctcagcctcccgagtagctgggattacaggtgcccggctaatttttgtgtttttagtagagacrgggttttgccgtgttggccaggctggtctccaactcctgacatcaggtgatctgcccgcctcggcctcccatagcgctgggactacagacgtgagtcactgagcccgcttttaaacgagtccacagctctctatccttgttattactgccttatctcaggtctcccctaagttttgcctagatcatctcaaaacctctcaattacactctgcctataattttatagccccaaatagctgagtgaacttccacaaagctatcatagcagtcttcttaacattgtatatccagttatgtcagtttactgtttaaaatgctttgatggttgtttaagaaaggctgaaattcaaattcactat

SEQ ID NO: 801348 - DNA, 643 bp, Homo sapiens
tatgccaaaatttacaatgtgtgtacttcatgtttttctaaaattatttattacaaattacctcaatgatgcatacactaaaatgggcataattataaatattgtcaatgttctctataccagaaaagaaataaataaatatttatgaaaggttaatgatgttagtaaatcaatcgttttatttggaaatgctactgaaatattttttatttagaacttataaccatcaaattataaatgtataaattttctttttatttgtcttctttcttcttctcttaactttctcttcctttcattaagaccattagtacagtgcctgcaacgtgattagcactctggcctaggcattctctgcccttgatttgytcatattagcaggacggacaaatgtataatataatgtagaggtacacaggactccactaaagcataattacaaaggaatcaaattataaacctatcaaatatatttcctttgtttctatatataaagacacaaggagcatgaataatattactataatggagctggacagacaaacaatattttatgcatggagaatggtgtctagaactaggtatatatgcaaagatcataatcttcatatggaaatcgtgaagatcagattgctaaattagt

SEQ ID NO: 801349 - DNA, 634 bp, Homo sapiens
agagacgtgatagttcaggtgggtttccagaagagatgatagctatgatgaattgtgaagagtaaatggaaattagccaggcaaagtaaaaagatttacacaaaaagctagcatgaatacatgcaccttgagacagcagagggcctgataatatataaacatgtatttctggatacttcaaggtaaagtgggaaagggtcagtgatcaaggataaaggtcaagagagtggagtaggattataaaggttcattagttttctgtcgctgctgtaacaaattattccaaatttcacagtgtagacaacacaaatttattatctcacagttcggtaggtcagaagtctggattggcttgattggcttctctgktctgggtttcataaggccatcaccaaggttttagtcatctgggctcttatcaagaagctctgggaagaatctgcttctaagctcatactggcttcttggcagaatacagtttattgtggttgtaggactgaggtcctatttccttccacctttttttctatattgttgctgcattccttctcctgctttccatgaaccttcctgcagccagggatgattgagttcctttcatgccttgagtttctctgactttctctgctaccaa

SEQ ID NO: 801350 - DNA, 601 bp, Homo sapiens
agatctgatggtcttataaagggcctctcctaccttttgctctgcacccctctctcctccctccacatgaagaaggatgtgtttgcttcttcttctgacatgactgtaagtttcctgaggcctccctagccatgcaaaactgtgagtcaattaaaactctttcctttataaattacccagcctcaagcagttcttcataccagtgtgagcattaattaatatagtaaattggtactgggtagtggggcactgctataaagatacctgaaaatgtggaagtgtctttggaactgggtaacaggcagaggctkgaatagtttggagggctcagagaagaaggtaggaaaatgtgggaaacttttgaacttcctacagacttgttgaatggctttgaccaaaatgctggtagtgatatggacaatgaagtccaggctgagttggtcttagatgaagatgaggaactttttgggaactgtagtaaaggtccctcttgctatgcaaacagcctgacagcattttgcccctgccttggagatctgcgaaactttgaactttagatagagacgatttagcgtatgtggcagaagacatttctaagcag

SEQ ID NO: 801351 - DNA, 486 bp, Homo sapiens
gtataagataaaccttaaactcttaagatgacaactttttttttttttttttttgagacagggtctcgctctgtcacccaggctggagtgcaatgatgtgatctcggctcactgcaacctccacctctggggttcaagagattctcctgcctcagcctctcaagtagctgggattacaggtgcgtaccaccacacccagctaatattcgtatttttagtagacacaaggtttcaccatgttggccaggctgatcttgatctcttgacctcgtgatctgcctgcctcggcctctcaaagtgctgggattacaggcgtggagccaccgcacccggctggagatgggktttcaccacattggccaggctggtcttgaactcctgacctcaggtgatccgcccgccttggcctcccaaagtgcagggattagaggcataagccaccgtgccctgcctaagatgataattttccctccaattccctagata

SEQ ID NO: 801352 - DNA, 604 bp, Homo sapiens
cttaggaagtgagtgtagtgagcatcatcagtaatgggacgaactgggattccacaccctgcgatgggaggcaacgagaacagtgccgcttctgcactatccctgcccaagatgcataactggaaaagtatcatgaagacacatcggataaactcacactgtgaggtgttctacaaaatagctgctcatgatcttccaaagtgtcaaggtcatgaaaatagtcaargactgagaaactgtttcatgctacaggagactgaagagacatgacaactaagcacaatgattctaagcaggagtctttcaggactgaaaaaacgttatgaggctgttggtgaaacttgaatggggtttgagaattaaataatcatattgtatagatgttaacttcctgattttgatggttgcgttatggttatataggagaatatccttgcttgtaggaaatactcactaagtattcagggatcctaagccatcagactggtaacttatttccaaatattttaaaaggaaaaaaatttctttgaattgtacttgcaactcttctttaagtttgtgaatattgcaaagtaaaatttaatttttaaatataagtacccaa

SEQ ID NO: 801353 - DNA, 638 bp, Homo sapiens
acagggttgcgacatctttgcaaccaatattagctatctaatgctacgatacaaattactccaaacctagtggcttcaaaaagcaatcattatttgtgatctcactgtgaatttgttttttaaaaaatatatttaccagtttattataaagaatattacagagaatacagatgaagagatgtacgaaagaagaggcacagagctttcctgcctttctcaggcacaccaccttccaggcatttccgcatgttcgactatcaagaagctctttaaaccttgtccttttgggtttttatggaggcttcaatatgtaggcatgactgattaaactatcggtcattggtaatcaaattaatcttcagcccccctttcctctccagaggttggagatggatagaaaattcagacaaggcctatgggaatcaatgctcactttctcatcatgtttgaagcctcaactggaagactcaaaggctggaggctggaattayctgaagactcattcactcacacattgatattgactgttgcctgggtttagctgaggctgtcagaatggtttctccacatggcttctccatgtgcactgagactcatcacaacatggtggataaatttttagaacaagcatcctcact

SEQ ID NO: 801354 - DNA, 485 bp, Homo sapiens
tatatatatatgagtcttttcctgagtaggttctcacggcctgtgcatctaaaagcactggccctaggatttgatctttgagacttgtaggtccctgtttgtgcgaagtaatgaccagagggcctgttcacagccttttaataactattaatgagcttgaaaggttcctttagaggggaaatatrctctaaactactactctattttgaattcaccctgagaacagctaaagcagtttactaataaagggtttttttttagttataaaatatagaaaagaaaggtatgaaattattagaataaatctagtggttttccagagggttttgaaacagatctcttcttttcctatactaaacttgtagtcagatgatacttgtctccacatttaatcaatatgtgggtcctagtactcatgtttggagaggttgattgtgcttaagaagatagttgagagatttctccagtataatgtttcattaaaa

SEQ ID NO: 801355 - DNA, 614 bp, Homo sapiens
ttaaaagttgtgtcattctaataaggtgtatatgtgttctttttgaagataaggattttgccttttcttccagtatagggaggctgactttcacatgggaagtttatcttctgcttttttaaaaaaagagtgaaggtcaaagtgatctttatgtacctgctgtttttcaagtctctctctctctcttttttttttttttaatagagatggggtctctccatgttgccctagctgttcttgaactcctgggtccaagtgatcctcccaccttggcctcccaagtactaggattacaggcatgagtcaccacacctagccctcaagtgtctttaactgaaatagtcaatatgccagaacagcatattttaacgtcttaraaatttcacatatacaaatctgagttggtggctgtgaagagaattgtgttagtacctgagaagttttgaaaaaaataagatttctgccagagaagaaaaaagaagaggaggagttgtaggaagagaagaggaagtctttggagaagaaagagactcagtcagctttgagacagtattttgcagtgaagtaatgcttgtgttctaaatgcattttgaaacctcaggatgacaattaaa

SEQ ID NO: 801356 - DNA, 589 bp, Homo sapiens
cattcatttcttatatcatttttttagacttccttgcattgggcttcacctttctttggtgcctgatcagcttaataatctcctgaattctttttcaggtaaatcgtggatttcttcttggtttggatcaattgctggtgaactagcgtgattttgggggtgggtgttaaagaggcttgttggttttctgattycttctcatttgggtaggctgtcagagagaaggcccaggactgaaggctgttgttcagattcttttgtcccacagcatgttcccttgatgtagcactcttccccttttcctatggatgtggcttcctgtgagcagtacggtgattgtctcttttctgggtctagccacccagcaagtctacccagctctgggctggtactgggggttctccgcacagagtcctgtgatatgaactatctatggatcgctcagccatggataccaatgcctgttctggtggaggtggcagggagtgcaatggactccatgaaggttcttagcttggtggtctaatgctctttttgtgctggttggcctcctgccaggaggtggtgctttccagacagcatcagctgt

SEQ ID NO: 801357 - DNA, 625 bp, Homo sapiens
tctccagccaattgatttttgaattttgaattaaaggcaccaagaacactcattggagaaaggatagtctctttaatatatggtgctgggaaaactggatatctatgtgcagaagaatgaaactaaactcccacctctcaccctattcaacaataagctccaaatgggacaaataaccaaatctaagacctcaaactgtaagaccactagaaaaaacaatagtagaaacacttcaggacattggtctgggaaaagattttatgaataagacttcaaacacacaggtaacaaaagcaaaaacaaatggggctatataaaactaaaaaagctctatataacaaagaaaataakcaacataaagaaaagacaacctacaaaatgggagaaaatattttcaaactattcacccaataggggattaatatccagaatacacaagaaactcaaatatctcaacagcaaaagaacaaacaattcaataaaaagggggcaaataatatgaacagacatttctcaaaagaagacatacaaatggctaataaatcaatatacaaaaacactcaacatcgctacgcatcagagaaatgcaagtcaaaaccacagtgagggctgggcgcggtggctc

SEQ ID NO: 801358 - DNA, 625 bp, Homo sapiens
tctccagccaattgatttttgaattttgaattaaaggcaccaagaacactcattggagaaaggatagtctctttaatatatggtgctgggaaaactggatatctatgtgcagaagaatgaaactaaactcccacctctcaccctattcaacaataagctccaaatgggacaaataaccaaatctaagacctcaaactgtaagaccactagaaaaaacaatagtagaaacacttcaggacattggtctgggaaaagattttatgaataagacttcaaacacacaggtaacaaaagcaaaaacaaatggggctatataaaactaaaaaagctctatataacaaagaaaataagcaacataaagaaaagacarcctacaaaatgggagaaaatattttcaaactattcacccaataggggattaatatccagaatacacaagaaactcaaatatctcaacagcaaaagaacaaacaattcaataaaaagggggcaaataatatgaacagacatttctcaaaagaagacatacaaatggctaataaatcaatatacaaaaacactcaacatcgctacgcatcagagaaatgcaagtcaaaaccacagtgagggctgggcgcggtggctc

SEQ ID NO: 801359 - DNA, 589 bp, Homo sapiens
aggttgtttactctattgatagtttcttttgctgtgcacaagctctttagtttaattagatcccatttgttaattgttgtttttgctgcaattgcttttggcatcgtcatcataaagtctttaccaggtcctacagccagaaatctatttcctaggttatcttccagcatttttatagattttgatttttgatttaagcctttactccatcatgagttattttttgtatatgatgtaaggaaagggtccaggttcaatctcctgcatatggctagccagttatcacagcaccatttatggaatagggagtcttttccacattgcttgtttttggtaaattttatgaaatatcagatggttgtgtgtggcattatttctgggctctttattctgttcctttgatctatgtgtctgttttgtaccagtactgtgctgttttgtgtaytgtagctttgtagtatagtctaataatgtgatgcctgcagctttgttatttttggttaggattctcttggctattcaggctcttttttggttccatatgaatttttaaatagtttttttatacttttgtgaaaaatgttggtac

SEQ ID NO: 801360 - DNA, 568 bp, Homo sapiens
aaaatgttggtactttgatacaaatagcattgaacctatgaattgctctgggccatatggccattttaacaatattgatttttcctatacatgagcatggaatgtttctccatttgtttgtgttgtctctaatttctttyatcagtgttttgtaattgttatagaggtctttcacttatttggttagctatattcctaaatattttattcattttgaggctattgtgaatgggactgcattcttgatttggctcttagcttggatcttgttggtgtataaaaatgctactaattttttttttctaaatgaagtctcgattttttgcccaggctggtgtgcagtggcatgatcttggttcaccacaacctccacctcctgggttcaagtgattctcttgcctcagcctcctgagtagctgggattacaggtgtgtgccaccacacttggctaactttttttgtatttttagtagagacagggtttcaccagactggccaggctggtcttgaaatcctgacctcaaatgatccgctgacctcagcctcccaaactgctgggattataggt

SEQ ID NO: 801361 - DNA, 528 bp, Homo sapiens
aaaagccaaataatgtcaagcaagtgtgtaagaagacagccctgtatggcaatactaaagaaaattttgcattctaactacaaggggaaggaagagtcagcaggggtgtaacaaatgacacatgatagtcaccccagaggatagcataaattgtacacagtacaaatagtacagaaagtataatttgctttagtaattcagtttttcatttggttttcaagacctgtcagggatcaagaaattaatatagacatatactaattttgcatatataaattayttgcaaaaccatttgtgaaaaagtttcacaaatcattcaatctagatttaacaactgttataaaactatcctgaagcacctgaaaaccagttggaccagggtcagaaaatccaaaaaattcatcaggtcttatccagaattactctatctagtagcagtattaatccacccctctatttagagttacacaggcatatttcaagataaattataagaaaggaaagactgggtgaccctcaaatcactaa

SEQ ID NO: 801362 - DNA, 565 bp, Homo sapiens
cactcataagatgaatcacttgtgggcaagttaataaaattaaatgttaaattatgttgttccaaggttatttttggctgtactttggtaacagcagaagattgtaaacaatctaaatgcccaatgatatggaactgctttagtaagatatctatacagtggaatacctaccctgcagttgtcaaaaacaatgaggaaactccatttaaataatgaacaccctctaaaagatattaattaaaaaatacagaaaatcatgtagagtatgctactctttgtgtaaaaaatttaaaaaggaaattaaagaaaaatagatatatgcatgaagatgttaattcttcctgttataaagtacaggctgtacctgggccatgttgtgcttgaaagtaaagaagtgctcaaaaaygtatagggacattccaaaagaacacaggagccagtttgaatagactccctctggctgaatttgggacgatttaggttttaaatgaataatgacagcaacagaatataacacattgaataaaaactcactaaaacagaaaaaagaatatgagtccaggct

SEQ ID NO: 801363 - DNA, 638 bp, Homo sapiens
aatcatttaagaatcacagacacttctacatgttttatttctacttttgcctgcgataaaagacatgataattagatcaaacctgaaaaactcaactctaaaataagtgaatccatcacttattaaccaaatcattgtttcctctggcgtaacttacaattttctttaaaacacgacttttacttyttaaattgtgtttgagagcacagttgaagttggcatgattaccagtgagactggaaattttgcaagcttagacatgaaatgaacttaagagttggggagaattacctcataaccttgatgacatattacagaaagatagcatatggtcctaaagatgtcagaattgaaatataaatgttaaaataactgagtttgcctatttatacaaagaggcaatttttgaaattcaattaaatttcaccggctacagaacaattctgtgattctaaattgtggtttttagatgaaagcttgaaacacagttcattcattcaacaaataactaatgggtacttattctgcataagatgcagaagattacaggatttaaaaaaaaacagattcaagattctgtcctatttgagcttatactgagtcacttctccaaatctctatatacctaagtgactata

SEQ ID NO: 801364 - DNA, 460 bp, Homo sapiens
atcattctagttaagtcttttggggaacatatgttttcatttctctttagatattacctcataggaaactgtgaaaagttctaaaaaatgttcaggtaattttgtgtccccactcacaataaatgaaaatgctagttgctctaaaatctcattaatctttggtattgtcagtatattttattttactatatctaaaaataatattacatatattatatattatatatgtatatttatatcagggtataagtggtttttggttacatggatgaactgtatagtggygaaatctgagattttagtgcacccatcacccaagtagtgtacattatacccaatatgtagtttttatcccttcccccatccgaccctcctcccttctgaatcttcaatgtctattatacgactttgtttgtctttgtgtacccatagcttagctgccacttataagtgagaacat

SEQ ID NO: 801365 - DNA, 630 bp, Homo sapiens
acttgctgggacacataacaagctgtccacatgaatagcaaacacttctgggcatagacagggtcatatgaaattcctgacaaatggccaattaacctacacctttttctgctcttcaaggatgacatcagaacttgagaatgacacaaagtcctaactgattttttaaaaagggcatattttttgccataatttggtacaaaccatcgttaataataaccacaacacactgcagtcatgtccatatttataaggtctctttctgkctgaaaattcacatggttttaagaatatgtttttttctttttttttttcaaaatgcatagttagaatgtattagctaaaatgtctccaataataccaaactactatgaaacttcttcatgattctttccagggaagagcgtaggttgtataacatcacaattttactgtaagtagttacatttggcctccaacacaaccaaattgaggcagtactgcattacaatctatatgcattctaaatgcctggtatttaccaaaggaggcaggcctttactttgaatgttgcaataaaaaatacagtgcctcatttttaagagtgatgtaaatattcatccaattaacaacatttattaatgtccactt

SEQ ID NO: 801366 - DNA, 613 bp, Homo sapiens
tctggtattagatcatataaaagaaaaatctctgtgatgtggggaaaaaatgacttatcttaaataaaacctcaagagtttaagctgtaggtaaaaagtgacaaatttgattacatctaaattaagaatttctgtataataaagggtaccatggtcaaagaacatacagatggcagaaaaagatagatatttatagtctctaaaacaaaactgtactactgaagtccatataattcatgagtatccaataaatatcaacaacacagaaatcccacaagaaaaaaactcaagcatatgaagagatgctgaaattcatgggcaatcagagaaatgcaaattaaataataagacaacaccttcatgctttaggctagcaaattcaaaagctgataatacaaagtactggtggggaagtamagtatcagaatcctcaatgttttgctggtgggagtagatggatgcaacaatctgacaatattaaatcaaatacatgtataccctctgatcaagtaatttcactcccagaaattctcacactgtttttttatttttttaagagataaggtcttgctatgttatctaggctggcctaaacttctgggctgaagtgatc

SEQ ID NO: 801367 - DNA, 653 bp, Homo sapiens
tagcagatagcctctatttagctattaaaatgcctgcattggtagtagtgggtaaggagggagctagagccgagggaacattttggtagctttatctccgtttctctatgaatttttgtcttttgctcctaggcattgggaatttttgctttccctgttgggagcaggcatggtggcttcatttggctccctctgcttcagggtgaactcatggtgaattagaaggtactctgccacagctcatacactttttgtcatgtactattccactctcaagttactgtcgtctgcagctttgaagtaggtttgcctactgacatyacacctcccagttaagaaccttgtacagaagaaaaatggccaatgagtttggccagtgagttccaccttcagtcctgccgtgctttctgatagctcacgtaaactggggatgtcagtggaggccttccggatattttctattcagagtttgcaaaacgtgctgtccttatgagctagagagttgcttgtcagcttttggcattccctcagtgtagtccaaattgttttgtattttctggagttgataacgtttttaagagataataaattttttctttcatttttgattattttttctcattttctgtgttgaaaagagggatttttgtaaa

SEQ ID NO: 801368 - DNA, 590 bp, Homo sapiens
gtgttcccgtgaagaagcaaattgtttcttttaccagaatattcatcagagatttgtaaaattttgaaaacaacacaaaaccaccagtgactttcttgtgattcttcccttggactgcatctaatttcagcttctttctttctgctctttaaaattgctaatatctgtaagagtatgcaatatcatgccagctttaattcaagtgaagcgaaaattagaggtaaacttgctgattaagtggtctcatatcacatatcacacagaagctaaatgtagacacttagrtttaaattgttacaagggctctccaaaattgcattcacaaaaccttcattggtatgcatgagcagctgtctcgttatccattccacccagtagcaagctggtgacttccttatcaaaggctatatacatcgtggactaagactgtaattgccaattgataaagcattgatgcattgaccacaaaattgcaaccagcggactcttattcattgtgctgagatcaactaatctattttgacaatcaaccgtacactcaatatttgaacttttctgtaaagcctgcccttactctgacttgatggtgt

SEQ ID NO: 801369 - DNA, 590 bp, Homo sapiens
gtgttcccgtgaagaagcaaattgtttcttttaccagaatattcatcagagatttgtaaaattttgaaaacaacacaaaaccaccagtgactttcttgtgattcttcccttggactgcatctaatttcagcttctttctttctgctctttaaaattgctaatatctgtaagagtatgcaatatcatgccagctttaattcaagtgaagcgaaaattagaggtaaacttgctgattaagtggtctcatatcacatatcacacagaagctaaatgtagacacttagatttaaattgttacaagggctctccaaaattgcattcacaaaaccttcattggtatgcatgagcagctgtctcgttatccattccacccagtagcaagctggtgamttccttatcaaaggctatatacatcgtggactaagactgtaattgccaattgataaagcattgatgcattgaccacaaaattgcaaccagcggactcttattcattgtgctgagatcaactaatctattttgacaatcaaccgtacactcaatatttgaacttttctgtaaagcctgcccttactctgacttgatggtgt

SEQ ID NO: 801370 - DNA, 590 bp, Homo sapiens
gtgttcccgtgaagaagcaaattgtttcttttaccagaatattcatcagagatttgtaaaattttgaaaacaacacaaaaccaccagtgactttcttgtgattcttcccttggactgcatctaatttcagcttctttctttctgctctttaaaattgctaatatctgtaagagtatgcaatatcatgccagctttaattcaagtgaagcgaaaattagaggtaaacttgctgattaagtggtctcatatcacatatcacacagaagctaaatgtagacacttagatttaaattgttacaagggctctccaaaattgcattcacaaaaccttcattggtatgcatgagcagctgtctcgttatccattccacccagtagcaagctggtgacttccttatcaaaggctatatacatcgtggactaagactgtaattgccaattgataaagcattgaygcattgaccacaaaattgcaaccagcggactcttattcattgtgctgagatcaactaatctattttgacaatcaaccgtacactcaatatttgaacttttctgtaaagcctgcccttactctgacttgatggtgt

SEQ ID NO: 801371 - DNA, 619 bp, Homo sapiens
catggcttatattcactgatgaaaacacagtagtctagaaacagctttactgtgcatgtatacactgtctggctggttttccttgtcttcataaatattaaatgtgactaattaaaattattgaagttctggtgtaggtatgcagagaggtttgggtagtgtcaaattctgcctctgtggtttcttagccaaatgaccttgggcttatctttgtgactcagtttctcatttaaaattatgaatctattaatacaactttcaaaagactattgcaggacccaagaatgaatacacttagggtccttttgtaaatttgttgagtaccacataaatgtaaaatattaatatatgcaagggaaatattctaatttcctgtagaaagttctgcaaaaatgggttaaaagaggtgactgctgcagtaattttgaattttgaatttagatatgtcctggggatcttctttgtaccrtgtagcctctggcttaggctgtttgattgtttttctttcgtttttcacagagttcttggcccatcccaccaatctagcacatgagcttaattcggttttgctccatgcatcagagagttttaagacagctattaaaacaccacatggaaa

SEQ ID NO: 801372 - DNA, 543 bp, Homo sapiens
attgagcatttaagttatttcaatttcttttcataataaaccatgtactttgcagtatagaagtctccatattttggataatattcttagcatagatttattaaattggattaatgtttaaaaatgttcccataaccttgtatgttcaaagtgagccctatggccacttagacctagttctccatttaaaaaaraaaaaatggctcctggtcaaatgagcatggaaatcactgtgtattagatacaactcttgaagatatttaagaacataatagctaattaaagatgaaggagttttgtgaaaaccactatatttaatattgtttaacctacggtctctcaaatttatgtgatcttatacctttgtttagcctatctcttgtcccctatgatagcttgtttatgagatagggtgatatcttgaaagagaactagaggaacactcagaaaacccagtttctcataaactacataatagagtgaattagttacaaactctgtgagtatgttttcttatctatatcctcaacaatactattctga

SEQ ID NO: 801373 - DNA, 601 bp, Homo sapiens
agtagactcaatgcatgaaggacccccacccattggcaccattaatctcgtctttacagcaatattccataacggcattgaaggatggcagagtcatggactgatttttctgtcttaccttcaccctgaatctaaggcagctactccaaaattccagaaaccccctcaatacttcctagaccaatggcaaagttccctacttcccaataatatattgtcccttcactttatgaattctgagtgccttttcctcacctgtaaaattggcttagtgatacttatgggagagggttgtaggaatttaatggaaaatatctggaagggccttggccctggcaaactgcccttccttcccctcctctgtcctgcaatcactcttcctccctrtggtcttagaatcgcctcctctaatggagctgttgctggtaagtcaaccggatctacagatgcactgtgaatgtgattgttcactgccctgggtagctcctactagaaactaagggctttgtttggctttgtttaaataaaatatcaactgagtcaatgtgcttctgcagaaagagtcgtgggtgggtttgagcacatcaggagcgggttttat

SEQ ID NO: 801374 - DNA, 601 bp, Homo sapiens
agtagactcaatgcatgaaggacccccacccattggcaccattaatctcgtctttacagcaatattccataacggcattgaaggatggcagagtcatggactgatttttctgtcttaccttcaccctgaatctaaggcagctactccaaaattccagaaaccccctcaatacttcctagaccaatggcaaagttccctacttcccaataatatattgtcccttcactttatgaattctgagtgccttttcctcacctgtaaaattggcttagtgatacttatgggagagggttgtaggaatttaatggaaaatatctggaagggccttggccctggcaaactgcccttccttcccctcctctgtcctgcaatcactcttcctccctgtggtcttagaatcgcctcctctaatggagytgttgctggtaagtcaaccggatctacagatgcactgtgaatgtgattgttcactgccctgggtagctcctactagaaactaagggctttgtttggctttgtttaaataaaatatcaactgagtcaatgtgcttctgcagaaagagtcgtgggtgggtttgagcacatcaggagcgggttttat

SEQ ID NO: 801375 - DNA, 601 bp, Homo sapiens
agtagactcaatgcatgaaggacccccacccattggcaccattaatctcgtctttacagcaatattccataacggcattgaaggatggcagagtcatggactgatttttctgtcttaccttcaccctgaatctaaggcagctactccaaaattccagaaaccccctcaatacttcctagaccaatggcaaagttccctacttcccaataatatattgtcccttcactttatgaattctgagtgccttttcctcacctgtaaaattggcttagtgatacttatgggagagggttgtaggaatttaatggaaaatatctggaagggccttggccctggcaaactgcccttccttcccctcctctgtcctgcaatcactcttcctccctgtggtcttagaatcgcctcctctaatggagctgttgctggtragtcaaccggatctacagatgcactgtgaatgtgattgttcactgccctgggtagctcctactagaaactaagggctttgtttggctttgtttaaataaaatatcaactgagtcaatgtgcttctgcagaaagagtcgtgggtgggtttgagcacatcaggagcgggttttat

SEQ ID NO: 801376 - DNA, 601 bp, Homo sapiens
agtagactcaatgcatgaaggacccccacccattggcaccattaatctcgtctttacagcaatattccataacggcattgaaggatggcagagtcatggactgatttttctgtcttaccttcaccctgaatctaaggcagctactccaaaattccagaaaccccctcaatacttcctagaccaatggcaaagttccctacttcccaataatatattgtcccttcactttatgaattctgagtgccttttcctcacctgtaaaattggcttagtgatacttatgggagagggttgtaggaatttaatggaaaatatctggaagggccttggccctggcaaactgcccttccttcccctcctctgtcctgcaatcactcttcctccctgtggtcttagaatcgcctcctctaatggagctgttgctggtaagtcaaccggatctacagatkcactgtgaatgtgattgttcactgccctgggtagctcctactagaaactaagggctttgtttggctttgtttaaataaaatatcaactgagtcaatgtgcttctgcagaaagagtcgtgggtgggtttgagcacatcaggagcgggttttat

SEQ ID NO: 801377 - DNA, 601 bp, Homo sapiens
atatttcgatacaagcatacaatgtgtaatgatcaaatcaggataactggagcatccatcgtctcaagcatttatttctttgttaggaacatctcaattccactgttttagttattttgaaatatacaatagagtactgtgaacttttattgtagcactattcaaaatgtttgttcttgattcttgttactgaaacaccaggggtttggttgaggtcccgctgcgcaccacacagaaagccaatcactgaaccgagtattaccaaggaagaaggccttaatcaggtgccgtagcccaggagacacgagctcagtctcaaatccatctcccttacagattcaggccagggatttatatagcagggaggaaatgtaacaatgtttaagaaaacaagaactagggaggggcaaggaagyagtcatggtgaatgagtgcagtgttgtggtgagtttcagtcctttttttgaggggcctgaaggttatttcctgaggaaggaactcagataaaacaaaagtttcaaactttaagaccagaagggttagtttctatgtttatcaaaaagaacagtctatgggactattgggttggtttcatttgtat

SEQ ID NO: 801378 - DNA, 641 bp, Homo sapiens
tttcaatggaagcatccaggttctcgcattgagattaatcaaggaaataacttgacccatggagaatggagaaaagcaaggcaggacgacggcacacccaggtgcaacacaaagccaacggaagctccccaccgaaagaagtggtgagtgaatgtgtggtcctgggaacccatgcttcttccatggatttttgcaacccacaggtcaggagatcccgtcatgagcccactccatcagggccttcagtctcacacacagagctatgtggagtgcyggcaggagagcggacatgcatggagaaccaggaactttagaaactctggctatccgggcatcctagcaaaagtagctgcaactccagcaaagcaggatgttagacccctgtacctaccccaggaaagagactgaatccagtgggccaagcagccatggtctgtgggccccacttccacaacacctcacaggataagacctactggcctggaattacagctagccaccagtagcagtgctgcacctacttgggacagagctccaagggggaggggcgggccgccatgtttactgtttgggtgacttagcccttccagcctttgggatttggaaagtccaaaccaactcggggcagaagggatccccca

SEQ ID NO: 801379 - DNA, 617 bp, Homo sapiens
gtggtgggggtgggatccagtgccagacagctgtatgaacacgctctcctggctacctgggccccatctgtttgcttcgggctgacagtgagataagggacaatgacttttccctcctgagccacatgttagtgaagcgrtggagataattctgctctgagtcctgacgggaagttgctggggagcaactttacagtgctcctggcttggggcactacccactcggggctttgtggcaagctattccccctcacggccaaggaacctggcttcccataccacctcctttcctccacccaccgtctccctatctgaatcctattcacttttcaggtcttggctcaaatcctgactcccctgtgaagatgtcctgaccctcccagcctagagccactactccctccttgaatctcaggatctccaactgtgacatggccatactatttgccacatccccacagacggattgtgatgaggaaggaaagagagagtccatgtagcatgctagatgcggtgtctggtgcaggcctgtggtgagttccctgcctcttcctcttcctcccctctgacccccagcatgcaggcatggcggccttgatcacctgctgccttctcta

SEQ ID NO: 801380 - DNA, 580 bp, Homo sapiens
ttaactcagtaacaaaaaaccaaatactgcatgctgtcacttataagtgtgaggtaaacactaggtacacatggacacaaagatgggaacaacagacactggagactactagatgggggaggaaaagagtggggtaagggctgaaaactacctattgggtaccacactcagtaccaggtgacaggatcattcataccccaaacctcagcatcacacaatataccaatgtaccaaacctgcacatgtatcacytaaaccagggtttctcaacctccaggccatggaccggtaccaggccattccctgttaggaaccaggccacacagcaggaggtgagcggcaggcaagcgagtgaagcttcatctgtatttacagctactcactatcactcacattactgcctgagctttgcctcctgtcagatcagtggcagcattagattctcataggagtacaaaccctattgtgagctgcatgtgcaggggatctaggttatgagaatctaatgccttatgagaatctactgcctgatgatctgtcactgtctcccatcacccccagatgggaccatatagttgca

SEQ ID NO: 801381 - DNA, 622 bp, Homo sapiens; identical to SEQ ID NO: 787415

SEQ ID NO: 801382 - DNA, 533 bp, Homo sapiens
tttttataaagtgagagatggggatctagttttattcttctaaatgtgacttgccagttttcccagcaccattggtttctatattagttagggacctttgctgtagagctggtgttatcctttgctcatgtcactacattcagattctttatggtgccagaattcttgtgctagttcttcctcatctagagaccctagcatttgtgggttgtgtatttmttttcattcatgtctaaatttttatttttatttttctttctctatttttttctttcccttcccatttgcgctcctccctgggggctgtgactctagagaattctgggtagggtctcttgggttttcttctgtagccccatgcacttctggagatgggttttatactgggctgtgcaattcaacctacaagccagtagatggtgcttatgggtaagagccagttttgaccaatgtggctgcatatatacttgatcactgtttaccaggagaagttctctgttgcctcagagaatgaactgattcatgatgtggac

SEQ ID NO: 801383 - DNA, 593 bp, Homo sapiens
aaattataatcctttttacaaaaattaatactagcctagaggcaacatcatatttcaagttattagatacactctgttcctttctagcactgcacttaaaggcattacaaaatcaggataaagtgaatcctgatcatggatttttaggacatgcgttttagtatttagtactgttcttgcaatayttacaaccaacactttaaaacaacatgcaaacactccatttttttttcccaaagcttcactatgtattgagaaaaggctatttttggcttttcaatatacaaccaatgcatgaatgattgctcagtatttgcttcatacaatttgagtgtacctttaagctaaaaaatgccctgtaatgggtgccatgctatattgccaagtaccctagtccagtggaggaacaggatggatgttacagaatgatttttgtctttgacttcttgattgccattcattaaagtgctattctacataactcctctggtggctggatgtccaaaaatcataaaattatccgttcatctgctccaaaggtgaatgtccattttaaacacaagacaaaaacatcctgtatttagctgtaccca

SEQ ID NO: 801384 - DNA, 593 bp, Homo sapiens
aaattataatcctttttacaaaaattaatactagcctagaggcaacatcatatttcaagttattagatacactctgttcctttctagcactgcacttaaaggcattacaaaatcaggataaagtgaatcctgatcatggatttttaggacatgcgttttagtatttagtactgttcttgcaatacttacaaccaacactttaaaacaacatgcaaacactccattttttttycccaaagcttcactatgtattgagaaaaggctatttttggcttttcaatatacaaccaatgcatgaatgattgctcagtatttgcttcatacaatttgagtgtacctttaagctaaaaaatgccctgtaatgggtgccatgctatattgccaagtaccctagtccagtggaggaacaggatggatgttacagaatgatttttgtctttgacttcttgattgccattcattaaagtgctattctacataactcctctggtggctggatgtccaaaaatcataaaattatccgttcatctgctccaaaggtgaatgtccattttaaacacaagacaaaaacatcctgtatttagctgtaccca

SEQ ID NO: 801385 - DNA, 487 bp, Homo sapiens
attgaaaagaattctcatataagtggacctgcacagttcaaacctaccttgttcaaggatcagctgtagttacaaaacaaagcaggcaaagacggaaaaaaaatacctatttaccacagaagcaataacattgtacagtaaatgaaacgtagtacatttagtagcgatcartctttgtatagttatgatagtataaacactgaatattgctctaataaaaattggatatgagcatatttagagaatggggcaagggaagcacctgtgtatctgtgcatatatgagtttgtgtgcatgtgtgtgcctgagacttatatgcttacctgctgtaataggatgtcaacacataatgtctaaaactgatacattatcatatatgagcatattaattagacatataaagattttaaaagccaaaaggaatagtaagttggagtggtagattatgggaaatggaaaggagaatggaaggaatagaaaacttctt

SEQ ID NO: 801386 - DNA, 423 bp, Homo sapiens
ttgattaagaatctacatgaggaaagaacttgctgaaagatgtttgagagccacagaaaggacctcagaggaaggaggaggagagaaatgtctaggtggtaaataggaccagttggaggtatgctggtgctgagccacggaaatggttgagctgtgggacaaggataggtatccaagtctgtggtcaccaatcaatgagtgtgaattttaagtcagcagttggaaaaggaraagctcctgggagtgcagttaatgaagaattggaaggatttagtctagacgtagaaaggaagtccaagataggattattagctggtagaagacaggaattatttgtaacttgctccctgtccttgtgcaaacaacaacaacaataaaaacaaccgaggtccagggatgggatttcatcccagaggtgcgtta

SEQ ID NO: 801387 - DNA, 578 bp, Homo sapiens
tgactcttaacgagcatgctgccttcaagcatctgtttaacaaagcacatcccacacagcccttaatccatttaaccctgagttgacacagcacatgtttcagagagcacggggttgggggtaaggttatagattaacagcatctcaaggcagaagaatttttcttagtacagaacaaaatggagtctcctatgtctacttctttctacacagacacagtaacaatctgatctctcttccttttcccygcagacggggtttcaccatattggtcaggctggtcccgaattcctgacctcaggtgatccacccaccttggcctcccaaagtgttgggattacaggtgtgagccactgcaccccgcttaattatgagattatttagagattattatttagagattatttttaatctctaaatatttagagattatttttaaatgttattctaggggccaagggaaatacttctttgctctcctaagattccctgaaaaatcaatttgcaaaagacaaattaattggagaaaaggcatacatattttattaacgtgtacacggggaggatcacacagtgat

SEQ ID NO: 801388 - DNA, 592 bp, Homo sapiens
gatagaaatgttgcctcagaatcacagggaaacaatcacattattccctattaaatggggcctgctaaactaatgcaaggataagaaaagaagcatttttgccataggggctggaaatcttgtctcaacccagctagagatacctatttgccaagaaactccctgaggtttgatttgtctcctccaaaactcattttgaaatttaatccctgatgtggcagtattgagaggyggagcctttaaaaggtgaatggattgatccattcatggattaatggattaataggttaatggataaatgggttatcacgggagtgggactggtagctttataagaagaggaagagagagacctgagctagcacattcagcccccttgccatgtgatgccatggtactgcttcaggaccctacagagaattcaccagcaagaaggccctcaccagatgcagcccctctaccttgaacttttcagcctccataactttaagaaataaattccttttctttataaattactcagtttcaggcattccattaaaagcaacaggaaacagactaagacatttaccaaggggtagaacatagaaac

SEQ ID NO: 801389 - DNA, 621 bp, Homo sapiens
agattaaaaatagtcaccatatgacccaacaatcccacttctgggtatatactcaaaattattgaaggcagggtcttgaagagatatttgtacacccattgtcattcacaatagccaaaaggtgaaaggaaatcaagtatccattgatggatgaatggataaacaaaatgtggtatatatgcacaayagaatattattcagcctaaaaagaagtaaattctgacacatgctacaacatggatgaaactgaagaacattatggtgatgaacataagccagttacaaaaagacaaatactgtatgattccatttacatgaggtatttagagtcatcaaatccatagggatagaaaatagaatgctggctgccaggggctggggagaagggaaaatagggagctgttgtttaatgggtacagagtttcagtatcacaagatgaaaagaattctggagatggatggtggtgatggttgcataacagtgtgaatgaatttaattccacacaactgtacacttaaaagtggttaagatggtaaattttatgtgtattttaccacaataaaaatagtaaaagaaaatataaagaatgggctttctggcatggattgcctttagaggta

SEQ ID NO: 801390 - DNA, 621 bp, Homo sapiens
agattaaaaatagtcaccatatgacccaacaatcccacttctgggtatatactcaaaattattgaaggcagggtcttgaagagatatttgtacacccattgtcattcacaatagccaaaaggtgaaaggaaatcaagtatccattgatggatgaatggataaacaaaatgtggtatatatgcacaatagaatattattcagcctaaaaagaagtaaattctgacacatgctacaacatggatgaaactgaagaacattatggtgatgaacataagccagttacaaaaagacaaatactgtatgattccatttacatgaggtatttagagtcatcaaatccatagggatagaaaatagaatgctggctgccaggggctggggagaagggaaaatagggagctgttgtttwatgggtacagagtttcagtatcacaagatgaaaagaattctggagatggatggtggtgatggttgcataacagtgtgaatgaatttaattccacacaactgtacacttaaaagtggttaagatggtaaattttatgtgtattttaccacaataaaaatagtaaaagaaaatataaagaatgggctttctggcatggattgcctttagaggta

SEQ ID NO: 801391 - DNA, 627 bp, Homo sapiens
tgatgatttgaaacaatacctctccattagctaaattttatatagaatctattgcatgttttaaatgataagtcagatttataaaaatatttttataaacagtaggaaatgagtttaggggtattcacatacagttttaatttttatttacatatttaaaacatatcatggtataaatatgatgtggatataaatttgagataaaggaagtattgtttaagaattgatgaackaatttcttaaaagatgtcatcaccagttggttttctagccttatgaaaaatggttgcaataaaaaagattgactatgataaaatgctgccctttcattttaacctagaccaagagaaaacatactgtgaatctatgatgaatgaaagaaagttgtaactgttggttttgtatatttgtaattactgtttattttcatttcttgtgaactgatactgtactttgttcattgtgagtagacaacttataatctatgtactcaaattggtttagtataaattctagggaatgaagttcatattaactgtaaaataacatgattcttctctaaaacaaaacgtcttctgggattatttttaactaaggcgcatggggatctttttttcatttttacag

SEQ ID NO: 801392 - DNA, 627 bp, Homo sapiens
tgatgatttgaaacaatacctctccattagctaaattttatatagaatctattgcatgttttaaatgataagtcagatttataaaaatatttttataaacagtaggaaatgagtttaggggtattcacatacagttttaatttttatttacatatttaaaacatatcatggtataaatatgatgtggatataaatttgagataaaggaagtattgtttaagaattgatgaacgaatttcttaaaagatgtcatcaccagttggttttctagccttatgaaaaatggttgcaataaaaaagattgactatgataaaatgctgccctttcattytaacctagaccaagagaaaacatactgtgaatctatgatgaatgaaagaaagttgtaactgttggttttgtatatttgtaattactgtttattttcatttcttgtgaactgatactgtactttgttcattgtgagtagacaacttataatctatgtactcaaattggtttagtataaattctagggaatgaagttcatattaactgtaaaataacatgattcttctctaaaacaaaacgtcttctgggattatttttaactaaggcgcatggggatctttttttcatttttacag

SEQ ID NO: 801393 - DNA, 630 bp, Homo sapiens
gcataatgaatttacctatttccctctggctgaagtataaggttttctagttttttgattataaggaattttatatgaacatcgatgtacatgttcacacagtacacagtagtcaccaaataaatagcccgtcagtgagatttgaaatgaaattgtcactggaaatgtggaatggcttatgtatgtgatctgagcttccatatagcaaggcagtactttgcttcttgtggcagaagatgtgcscctgatagcatggattggtaagagaaagcgtaacagaagagatcatcaactgtctctgcattcgaaatcaacagaaagtttgaagtgtaggaaaaagagaaaagaaggaaaagttcaaagaatatggtggaagactacagtccacatctgagaagtgaccatgatatttttaggaatggggatatcaatcatggaattttaagttacatgtgatgtgtaccttgtcattgccaatctttgagaaggtcttctattcatataaatacctcagaaattgtttcattttgttggtttgttggttgataatggtgaaaatcagaagaaaaggctgaattcaatattcaggtcaatatgatgaggaatttgaaccacacaatgtgatgatca

SEQ ID NO: 801394 - DNA, 633 bp, Homo sapiens
cagatttagcgatgatttcttctatataacaacaaaagccagacaaagaaaaaatagacaaactggacttcaaaaatatgaaagacttcagtgaatcaaaggacattaataacagagtccagagacaacccacagaatgagagtaaatacttgcaaatcacatatctaataggggattaatatccagaatatataaagaacacctaaaactcaccaccaaaaaacaaacagccaaattaaaatccggagaaagtactggaatagacatttctccaaagatatacaaatagccaataagcaaataaaaagatgctcaacatcactagtcattagggaaataacaatcaaaaacagaatgagacaacatttcacactcattagggtgactattatttaaaaaaaaaaaaaaaaaaaaaccaaaacaagtattggtgaggatgtggagaaactggaacactgtgcattgytagtgggaaggtataatggtgtagccactgtgaaaatgtctggcagttcctcaaaaagttaaacatggacttaccacatggtccagcaactgcaattctattcccaggtatgtaactaagagaactaaaaacaccaccacaaaaactttaacacaaatgttcacag

SEQ ID NO: 801395 - DNA, 658 bp, Homo sapiens
ggttagaaatgcaaattctggcctcccttggccctgctatgtctgaaactttgaagctaaggctctggcaccctagtgttagcaaggattctgacgctccctcactttgagaactgtagtttgcattagatttgttactgtctggcaccaaaagagagctgttagccaaggcattgacccttcaagggaccaggaaaacccatctagacattcttcaggtgtttcaacagtgagagaaagtcctttctttgctccctagcttagacagagtccccagcagcagcccctgagacaacaattgcactgcaagccacttatttgagaggtgatcccaggggcacctgttggggtatggggatgtgaggtagggcagggggaagccagtacaggggcagcactgcaggtgcctggctcagtccctggggagctccgggatgatgcrgggtgtgcctcagagatgtcctgcctgagggactggaagggttggaaccctccaattcccatctgtccttactgaaggatgctcttgggtgttaactctgggcattcctgccctgccatgagtaaggtccaagactgtggccagaaaaccctggtctggaaaggagtgaagagggtatctcactgtctgctccactcagctttcccaggctgcagg

SEQ ID NO: 801396 - DNA, 658 bp, Homo sapiens
ggttagaaatgcaaattctggcctcccttggccctgctatgtctgaaactttgaagctaaggctctggcaccctagtgttagcaaggattctgacgctccctcactttgagaactgtagtttgcattagatttgttactgtctggcaccaaaagagagctgttagccaaggcattgacccttcaagggaccaggaaaacccatctagacattcttcaggtgtttcaacagtgagagaaagtcctttctttgctccctagcttagacagagtccccagcagcagcccctgagacaacaattgcactgcaagccacttatttgagaggtgatcccaggggcacctgttggggtatggggatgtgaggtagggcagggggaagccagtacaggggcagcactgcaggtgcctggctcagtccctggggagctccgggatgatgcggggtgtgcctcagagatgtcctgcctgagggactggaagggttggaaccctccaattcccatctgtccttaytgaaggatgctcttgggtgttaactctgggcattcctgccctgccatgagtaaggtccaagactgtggccagaaaaccctggtctggaaaggagtgaagagggtatctcactgtctgctccactcagctttcccaggctgcagg

SEQ ID NO: 801397 - DNA, 549 bp, Homo sapiens
tttagtggttattctagagcaatagttcttaaacaggagtgattttgttacccagggaaatttgaccatgtctagagatatttttggctgtcacattttggggaaggtgctactggcatctagtgggtaggggccagggataccattaaacagcttaaaatacaaagattagccatacacaacaaagaattatccagccccaaaagtcaaaagtgacaaggttaagaaaccctgctctagaaacccttcatccttaatttattacaatcttccttacttagtaccttagcacttcataatgcaaaaaattaaacaagagtaaaggtccatttatctgctcccatcatttctactattatcatatattttacttctacatrtaactccacaaggcattgttattattgttactttaaataatacataatcttttatgtttatgtacatgtataccctttctgatgctattcatttcttcctggagtgctgttctttaatgtagtatccttttccttcagtctgaaggaaaaagtatttcttacagtgcag

SEQ ID NO: 801398 - DNA, 610 bp, Homo sapiens
gccaaagaggcataaatgaacatactcaagaagcagagcgaacccaaaaaggataagcacaaagaaatttacaaagacacataataattaaacttctgaaaaccaaaggcaaagaaaaaaacttgaaagcagtaagagaaaaatrgcatctaaccaagagagaaaagactatttaaatgacagaggatttctcatcagaaagcaggaaagcaagaaagaagtagcccaatacttttcaagtgctgaaagaaaagaactgtcaactcacagctaacgaaaatatcctccagaaaaaagagaggaaatcaaggcattgagagatgatggaaagctcagaaaatctgttgccaatagactaccgtaaaagtagtcccagctactcgggaggctgaggcaggcgaatggcgtgtaccccggaggcggagcttgcagtgagccgagatcgcgccactgcactccagcctgggcgacacagcgagactccgtctcaaaaaaaaaaaaaaaaaaaaaaaaatggctgaaggaaattattaaaacagaaaggaaagtataaaagaaggaatcttggaacctcgggaagtaaaaaacaacaaataaaagcaaaaatatg

SEQ ID NO: 801399 - DNA, 622 bp, Homo sapiens
gcaaaatctgaaaatagattcttcccttttgggagacaatcttttctatacccagactttgtctcctataaatcatgagattgcaagagatttatctcggactttccagcccatcctctgaggctccagtgccgctccagtgctcaagaaaagtcagtggggaaaaaccaaggtgagacctgacttcaagtttgagggttctccaaattctgatctttcatgtcagctcatgaggctgtcaaaagttctactacttttatctcctgagcagagtctctctgcctatggcaaaaaacaattatcagcccatacccagacttggcagatgcccatggaaggaaagtggtcattaatctccactcacatagaaagaactctctctctctctctctctctctctmtatatatatatatatatacacacacacacatatacatatatacatatattgttgttatagtaggagggaggtatgttcctatcttctatatcctgcagggttgcactccattacatcaagtagaaatgggcttatgagaattatattgattaattttattaattcattcaattaatatttattgttcacctatgtgtcaagtactgttctaagcactacag

SEQ ID NO: 801400 - DNA, 576 bp, Homo sapiens
caaaagggagctctgggacccaaagccttgagacacaagaggaatgtccttccaggttaggaatgggagcctggggactgaggataggggtctaacactagacgtgcctcctcacccacttacttccatctgttggtcactctcttagacggtgaaatcacctgtctctttcgttcagctgagtcaaaagttgtcaaattgtctcacacttctaagaagataaaagagtatgaactatctaatttgagtaaataaaatataataccattctgatcctttgacttgtggccttttatggcaaataaatgtctgtctaaaatagaaacgttttgggcaaaagcgtwgactaaattcatacatacacactcaaggacacaactggttaaaatatccaactcactagtaatcaaagaaaagcaaattagaacaataatgagattctttggcaaagatattttttattttttaataacacttaatgatgacaaagtagccaccaaacaagctgtcttaattgctgatagcagcatatgttggttaaaaacccttttagaaagcacgtgagcaatatgtatc

SEQ ID NO: 801401 - DNA, 535 bp, Homo sapiens
ccatgttggtcaggctggtcttgaactcccgacctctggtgatcttcccacctcagcctcccaaagtgctgggattacaggcatgagccaccgtgcccggcccatagtaactgttttataaatttgggagctccagtgtttagtacatatatgtttagaattgtgatatttccctgttggacaaggccttttaccattatataatgccctcttttgtctcttttagctgctgttgctttaaawtttgttttgtctgatataagaatagctacctctgctcacttttggtgtctatgtgcatgaaatgcctttctccacccctttactttatgtgagtccttatgtgttgttaggccagcatcaccctaatatcaaaaccagcaaaggacataccaaaaaagaacattacagaccaattttttgatgaacacagatgctaaaatcctcaacaaaatactagctaaccagttgtaacaacataccaaaaagataatccaccatgatcaagtaagtttcgtaccagggatgcaggaaa

SEQ ID NO: 801402 - DNA, 443 bp, Homo sapiens
tctcaccggccaaggtgttggcacggctgtagccctttctagagtctctagaagagaatctgattcccagccttttccagtgtctggagaccacccatagcccttgattcatgatcccttccccatcctcaaagccagcaacggtgcttctctctaaccattcttctctcgtcacatctccctctctgacctttctgcctccttctttcccttttaaggacacttttgattgctttggacccagctgcataatcsaagatcctctcctttaattccatttgcaaagttaatccccctttgccacgtaaggtaacatactcacaggttccagggattgtggcatagacatctctgaggaaggggcattattctgccaccacatggaagaaaggtgcatgatgagacagcgctggggcattttgagaaggaggtatcatggcatg

SEQ ID NO: 801403 - DNA, 643 bp, Homo sapiens
tccaaccgatagccagcaacaatcaccagacatgtgagtgaagacagcatgttaatgaaactgcagcaaggtgattttagccccaaccattgaatgaccctcatcctgaaagtcttcccagctgagacctcacaactgyggagcaaagaacagccattcctgcttttcccagtctgaattcctaacccaaaagattcatgagcataatataataaattttcaccaagttttgggggtagttttcaccaagtttttgggtcattgggggtagctgtatagcaactgagcactggaaaattagaataaattacatagtcaactgtatttcagtccttgactttatttagataatactaggatagtatcctctcagctaaagctatgaatcatgaatgttataaatattatgaaaactatcattgacatcaacaaaagttatcacagggttaaactgacacacgtttaatgatatgcgtagtcattgctaagtaagtaggcataagaacaaggtaatttaaataagtgattataattggtacaatattttgaagtttttaatcttactggttagtttttggtttttttgtgtgtgttgcttataatttatggtagatttctatgatacactgatgtaaatataatc

SEQ ID NO: 801404 - DNA, 609 bp, Homo sapiens
aagattgaatctaaaagattttccatgcatacatattcagtgtacatatattcacccaacaaacatcatgtccatatcactcttaaaagccaagcattgtggatacaaaaacaaagtatagtccctgctctcatgttgcttacagttcaataagaaccaaagacataagataaataattagaatgtagtayaatgtctgctgtgatagaagtaaatactcctgcagtgggccaacacagccaaatgagtcagaaagcatttcaaggattgcattcttgaaaagatattagacaataagcattaaaatagttaaaccattggcatgcaagatgatatttatctagtaatatggggcagtttatttctactagaacaaaagtgagagacgtgagtttattgagtgccattttctaggtttcagggcttatctccaaataagtacattgccagaggattagacatagcattttccagagacatagccatatgtgagttccatatataaacaaaatccaagttaaaatacctacaggaattttgcagcagactcacagaatacatgagtatttcaatacaagttgattcaatatggcatacagctggccaagc

SEQ ID NO: 801405 - DNA, 580 bp, Homo sapiens
ttcaaaactctgccctacaggaccccttcttaagatttccatggctacctattttcccaacagttaggctttattatatctggcaagttttttctggagtaattattacacactaattgttcttgtgtgtttatttatttatgcctattttctccaatttcattgtcagcatctagagcaagggtcaacaaacttttttctataaagaggcagattgtaaatattttaggctttatgagacatatggcttctgttgcatctgctcaactctacccctatagcatgaaagcagctgtcgacaatacataaaacaattggtgtggctgtgctccaatgaaacattatttacaaaaaaaamaaaaaaaaaaaaacagtcatttggctaaatttggcttgtaggccatagttttgtcagtcctctgtagggcccttatatgcttttttccctaccatatcaccctcagcacctcacacaaagcaggtgtttgggaaataccgaaagaatgaatgaatggagttccttctattttccaagcactatatacatattcacaacctttcatccctactaaatccctgg

SEQ ID NO: 801406 - DNA, 464 bp, Homo sapiens
tacttacttgcccctcagatttagaacagagtgaatgaggatcattacctatgttatgagaaagagggcacaggttgggggagggagttgacagggggagggagcttttagtctgctataaatgtggaaggctgggagaagttgkcctcatgggctgcctctgcacccatgtggcactaggcaagaggaggaacattaaagcaaactcatagatatagttaagtaggtagttgcaggatctgacttaactttcccagattctcttcaatcccacgtggcatgcatgagacactaaacttccctctctgtttcctacatagatgcacattgccacagttgtattttgtgtttgttgttatttatctgtcatctgtatgtttgattttactgacatgctagctcagtatttacatttcgaataatcctcatgacatttctaccttaataggcaaatctggagttgt

SEQ ID NO: 801407 - DNA, 644 bp, Homo sapiens
ttgacaagggtttttaacatgtatatataaatgccacaagccttacagcctttggttagcaagtgctctgaaaatttattctgaaacttcactatcagctgatacttgaaatattctctattttcagtaaaatctatagaaattaaaaaagaaagacaaagtatttcaacattttaagtgctgatttaaaaattctttggatgatttaaaacaccagcttccccatrattagtttttcactggaaagcaggtggaagttcttaaaatatcttcaccattccaacagcctcttggctgctttctgtgcttccatacttgtcctgctcctggctgttttcagtatggtagccagtgcttaatttctttaaatataagtcagattaagttaccactttactgaaaaccacctcatagcttcttatcacacttaaaatctcaaattcttaccacaacctacatggttctatagtagctcccctgacaattcaccacttatctctttgctgtacttttaacacaccgagcacactccactctcaaggcatttgtacttgctactccctctgcctagaattatctttccctagatatgggcatgctcacccccttactttatttgggtctttgtccaaaattatcatctc

SEQ ID NO: 801408 - DNA, 644 bp, Homo sapiens
ttgacaagggtttttaacatgtatatataaatgccacaagccttacagcctttggttagcaagtgctctgaaaatttattctgaaacttcactatcagctgatacttgaaatattctctattttcagtaaaatctatagaaattaaaaaagaaagacaaagtatttcaacattttaagtgctgatttaaaaattctttggatgatttaaaacaccagcttccccataattagtttttcactggaaagcaggtggaagttcttaaaatatcttcaccattccaacagcctcttggctgctttctgtgcttccatacttgtcctgctcctggctgttttcartatggtagccagtgcttaatttctttaaatataagtcagattaagttaccactttactgaaaaccacctcatagcttcttatcacacttaaaatctcaaattcttaccacaacctacatggttctatagtagctcccctgacaattcaccacttatctctttgctgtacttttaacacaccgagcacactccactctcaaggcatttgtacttgctactccctctgcctagaattatctttccctagatatgggcatgctcacccccttactttatttgggtctttgtccaaaattatcatctc

SEQ ID NO: 801409 - DNA, 616 bp, Homo sapiens
aaataatgaacaagcaaaataaagaggctgaatgaacaagtcaaaaaaagggatttcaatagtgggtactcttaaggaatgacagagttaagagaaaaattcaggttgagaaaatgagacaaaaagagaacattatagttgttgaaggatgcttgctacttaattcaaatgttttatagggtttgacacacctaggatttgaagggaaagttayaaagctagccacatgtattggcacttacaatgtcaaagtactcttctaccagcttcatatgtactaatttattttattctcataactttatgcataatacctcattcccactacaattgaggaagctaagcccagaatagctaagtaaggttatgtaaagtcacacaactagtaagaaacagagccaggacttgaaaatttgataatatataggaagcccaagaccttcaaatctatcttttattattctactttgaaaaataactagattggaagctgaatactatcaagcaaaactcaagagctaaactaaaagcatgagaataaagggagccaaaaattgctcgtacttacagccaagcattatgaaaaggagtgtgaggagatattaataaacaaaaa

SEQ ID NO: 801410 - DNA, 544 bp, Homo sapiens
aagtcaggtagcatgatgcccccagctttgttcttttggcttaggattgacttggcaatgtggactcttttttgattccatatgaactttaaagtagttttttccaattcggtgaagaaagtcattggtagcttgatggggatggcattgaatctataaattaccttgggcagtacggccattttcacgatattgattcttcctatccatgagcatggaatgttcttccatttgtctgaatccaggagctggttttttgaaaggatcaacaaaattgatagaccactagcaagactaataaagaagaaaagagagaagaatcaaatagaygcagtaaaaaatgataaacaggatatcaccaccgatcccacagaaatacaaactaccatcagagaatactatgaacacctccatgcaaataaactggaaaatctagaggaaatggatcaattccttggcaaatacaccctcccaagactaaaccaggaagaagttgaatctcttaatagaccaataatggctctgaaattgaggcaataattaa

SEQ ID NO: 801411 - DNA, 655 bp, Homo sapiens
taccaaatattgattattttttgtattgagaacattcaaaatactctcctctagctattttacaatatagaatatattatcgttaactatcgtcaccctactggacactagaacatcagaacctctttctcctccagatggaagatcaacaaggaaatatagaactgaacaatgttatagacaaaatagacccaacacacatataaggaacattccacccaacagcagcaaaaataatcattcttctcaaatgcacatggaacattctccaagatatctcatagtagaatctcatatcaagtcttaacaaatttaagaaggttgagatcaatctaagtatcttttctgatcacaactgaatgaaactagaaatcagtaataaaaagaaaatgaggaagctcacaagtgcatggaaattaaataacacgctttgaaacaattattatgtcaaagaagaaattgaagatgaaattagaaaatayattgagacaaaggaaaaccaaaacacaacacagtgaaacataacatgcagccaaatcagcactaagaaggaagtttataacaataaatggtttattaaaagaagaaaaaaaaggaaagagctccagtaaactaactttctccctcaaggaactagataaagaagaacaagcaa

SEQ ID NO: 801412 - DNA, 597 bp, Homo sapiens
ttttgctgcttgcactgagtgaagattatctctaggcaaattctttctttttttctttctttctttcttcttctttttttttaatctggaagagaaatgctgccttgagtgtttgcttatctctctccagcaggttcccagggtcttggtttcggctctagccctgaggggcctgatgggcatcagcactgacctttctgtgtggctgcaggcttggcscatctgctcaccagagcgccttgccactagcatgctgtctgggtgtgcctggcagtcagagtgtgcaggccggctttgacaaagtgacagaagctgtaaaaacagctgtttgatattccctgcttttaaaaacaaaacaaccacaaagaggttgaatgaaatagagaaaatacccttgtttcatgcgtatatttttacttacagaacatttattttctcctttcctttctctattccctgtttatctacccaatcatttgcttcccttcctccttgcctcctttctacttcatcctccttccttccttctttctttccaactaaaaaaatcttcctgcttctgtttctatgtctttttttcatctaaattttcttctc

SEQ ID NO: 801413 - DNA, 597 bp, Homo sapiens
ttttgctgcttgcactgagtgaagattatctctaggcaaattctttctttttttctttctttctttcttcttctttttttttaatctggaagagaaatgctgccttgagtgtttgcttatctctctccagcaggttcccagggtcttggtttcggctctagccctgaggggcctgatgggcatcagcactgacctttctgtgtggctgcaggcttggcccatctgctcaccagagcgccttgccactagcatgctgtctgggtgtgcctggcagtcagagtgtgcaggccggctttgacaaagtgacagaagctgtaaaaacagctgtttgatattccctgcttttraaaacaaaacaaccacaaagaggttgaatgaaatagagaaaatacccttgtttcatgcgtatatttttacttacagaacatttattttctcctttcctttctctattccctgtttatctacccaatcatttgcttcccttcctccttgcctcctttctacttcatcctccttccttccttctttctttccaactaaaaaaatcttcctgcttctgtttctatgtctttttttcatctaaattttcttctc

SEQ ID NO: 801414 - DNA, 564 bp, Homo sapiens
tcatttaacttgattttccccatcttctgtcttatgaaattccagtgtcttaagtgactaaaattttgaatttcttataaagaaatatctgtgaggcagggtgtggtggctcatccctgtaatccttgctacttgggaggctgaggcaggaggcttgcttgagcccaggtgtttgaggttacagtgagctatgatcatgccactgcactctccagcctgggcagcagaaagagaccctgtctcttaacaaaaaaaaaaaaaaaaagttaaaaaaatatatatgtaatctgctagttagaaaatactattttactgtcatgaaatttgaaccagacttaagaacgtaatgagtgctaatcattttaggatkttattgttctaaatatctgacctgataggaatgaagtgaatttaggagagatcactagggactgattgctgatttttgttcaagaatagtttctgaggccaggcttggtggctcacatctgtaaacccagcactttgggaagctgaggcgggtggatcacgaggtcaggagttcgagaccagcctggccaacat

SEQ ID NO: 801415 - DNA, 635 bp, Homo sapiens
tacaacatcccttccttataaaaaccctcaaacaactgggtatagaaggaacatacctctagctgggtgttgtggctcacacctgtaatccctacactttaggaggctaaggtgggtgaattgctttgagttcaggagttagagatcagtctgggcaatatgacaaaaccccgtctctacaaaaaatacaaaaattagctgggcatttgtgactcatgcctgtagtcccagctactcaggaggctgaggctggagaattgcttgcacctgggaagtggaggttgcagtgagctgagatcatgctcttgcactccactctgggttacagagtgagaccctgtctcaaaaaaaaaaaaaaaaaaaggaacatacctcaacataataaaaactatatatgacagacccacarctagtatcacactgaatgggagaaaactgaaagcctttcctctaagatctggaacatgacaaggatgcccactctcaccactgttattcaacaaaatactgaaattccagctacagcaatcaatcaaaagaaagaaaaaaaaagcaatcaaattggaaaggaagaagtcaaattatccctgtttgcaaatgatattatcttatacttggaaaaacctaaacactcc

SEQ ID NO: 801416 - DNA, 574 bp, Homo sapiens
tgtgccactgcactctaccctgggcaacagagcgagactctgtctcaaaaaaattagtaaataaatgagtaaaattttgttgttagaaccaggaatacctcacctccctggtttcacgttaaggctttaggctctaaacagactgcctggaagtcacagaaggttacttgtttattatgtacatcaacatagaaactagttggagagataaattggcgtgctaaagaaatgactcccaaatccaagtccatgacccaggccacagtaaaacaagaaacataagcaaaagggagagaatttttcataaactgcaataatttaaaggcactgaagtcttcattcagattatgtctcatactttgatattagaatatccttttataaaatgatagtgataataamgggtactttcaaaaaatacattatatatgataaaattagtaaatttatgttgttctactaaattaaattattcgtattgggccataaacccaagaaataaggatacatctgaaatagttataaatacaaacagccagtaaatcagccttctctacgtgaaagttagtaggta

SEQ ID NO: 801417 - DNA, 601 bp, Homo sapiens
aaaacattatagatgtcatcaattaattcacccattcaatacatatttactgcacctactatgtgccagacttttttctaggcccttgggacatagcagataagagcgaagtctcttatttacttatgttttctaatgggaatatgggatgacatgtctctatggctctaagtgtgtaatttaatatatctgggacagttagtaacttagctgattctaaccatttctagatattggttgtctaatatttctataaatgccaatcaaaccgaagttagagaaggtcactttgttatttaatgmatttcagttctttcattcaccctagataaacatttatgatgtgacattatgtgactgcgattattctaggtactaagaatacagagatgaaaaagacaagaggccattctagtaaggggagacgaaataaacaagtatataaaataatttcagggccgggtgcggtggctcatgcctgtaatcccagcagggattttgggaggccgaggcgggtggatcacgaggtcaggagattgagaccatcctggctaacacggtgaaaccccgtctctactaaaaatacaaaaaattagccggg

SEQ ID NO: 801418 - DNA, 601 bp, Homo sapiens
aaaacattatagatgtcatcaattaattcacccattcaatacatatttactgcacctactatgtgccagacttttttctaggcccttgggacatagcagataagagcgaagtctcttatttacttatgttttctaatgggaatatgggatgacatgtctctatggctctaagtgtgtaatttaatatatctgggacagttagtaacttagctgattctaaccatttctagatattggttgtctaatatttctataaatgccaatcaaaccgaagttagagaaggtcactttgttatttaatgcatttcagttctttcattcaccctagataaacatttatgatgtgacattatgtgactgcgattattctaggtactaagaatacagagatgaaaaagacaagaggccattctagtaaggggagacgaaataaacaagtatataaaataatttcagggccgggygcggtggctcatgcctgtaatcccagcagggattttgggaggccgaggcgggtggatcacgaggtcaggagattgagaccatcctggctaacacggtgaaaccccgtctctactaaaaatacaaaaaattagccggg

SEQ ID NO: 801419 - DNA, 545 bp, Homo sapiens
ctggagtgcaggtggggaaatcatagctactgaagcctcaaagccttgaactctggggccaagcagtcctcctgtctcagactcccaagtggctgggaccacaggcatgcgctgccatgcacagataattttgtggtttttgtggagatggggtctcactatgttgcccaggctagtctggarcccctggactcaagtgatcctaccctcccacttcagcctcccaaagtgctgggattacagggtgaaccactacacccggcctattagaattttcaacagcatgtaagatcaagttttctagaaagagttataaacttagtatttcttatctgtcagatatttgaagtaatctatgtagtagtcagccaaattatttctctgccaacaaaaggttaccccattttccctaagcaataatgtctaccgtctgttactatcattatggtacagctaatttgggatgctatcaatcagccaggttattagcaaccaggtcagtttggttttcttatattttctactttgtctatctagattataat

SEQ ID NO: 801420 - DNA, 606 bp, Homo sapiens
ggaacctttcaggctttttcctctacaggtggctcagtgcggggtgatgcctaagccactgcagtcatattctggcctgagggagccactgacccatggggtaaagcagaaaggaaagatgaatgaagctgcatcactaatgatattgtggccactgaattaagctactctggaactaccttatcttcacactcttggttaacagatacccaaatgtttatgccaattttgttatatttctgttacttcccgattaaagcttgctaaatgacacaactgatgaatgtattcaagaagcgtaagaccacaggaactctgaagcagttataataattgaggcaagaaatgagagtggccaggaatcaggatagcatcagtagcaatgaaggaaatggwcagatgtgagacacctttcaaagtataatcacaagagaatggtgaatgcttggagatgaaagtgaaaggaatggtaaacaactgaagttcacatttctgactttgtaactagtagatggcagcctgaaccatttactgagacaggatacacaagaatattcagtagctgattggagagcggggagaatgagttcaggttgggacatacta

SEQ ID NO: 801421 - DNA, 479 bp, Homo sapiens
cactgtgcgaggaagtggaggttggcaatgagaaagtcagttgtgatccctgccctccttcagcttacagtttggtcagaagaataaacagaaaatcgctgggcaggttactaagggctgagatgagagtagtacaaggggctgggggagcccataagagaagtatctgattctgscttggggtggggatcatggaacacctcccagaaagctgactgagccccagcatgtagggtcactgagttaggctcagggttcggggagcgggagggctggagtatcccaggtagagagaagagcagatgcaaaggccagaggtaaggggccggtggggggtgaggtgtcttgcagcgatcagtggagcaactgaaagaagtcacagtaaagagagagagctgaagctaagaattgggaggtagaggtcatgcccggttggagatgaggcagaagaaatacctaggcaccagagcacccgggcc

SEQ ID NO: 801422 - DNA, 623 bp, Homo sapiens
tcactgaggttttgcagagctggccttgggttttgaaactttatattctctgttagctaacatattgagaagagcttcagtgccttcctgaaaagcatcctcagttggggcacatagcagaatatcatcaacatactgcaagaccttaacttaaggttgagagaactcagagaggtcttgtgacagtgcctgtccaaacagatgaggactatttcaaaatccctgaggcagcaccgtcagtgttaactgggcgtctggctggaggaatatttgaaggcmaaccggtattgacagtcaggatgtaacggtgtacagaaaaaggcatcctttaaatctaggactgtaaaccatttagttccctcaggtatttgagttaacagggtatagggattagggaccactggatggattggaactacagcttcattaatgaggcgaaggtcctgaaccaggcttcattccccattgggtttctgtgctcctaatattggggtgttgcaggggctattacagggtttgaggaggccctgcatctttaggttattaataatggcttctagccctttcctagccactggccttagggataatatctctggttaggaaaagaagtgggatcctta

SEQ ID NO: 801423 - DNA, 559 bp, Homo sapiens
ccctccacccaacttctctcccgtgttccagtgatgttccaatttgatgatgaatttgcttctcttgagtatttccttgacttaattcaacactttttttgtctcaaaaatgaagaaatcagaactcttctcctatcatagaaaggtcacccattcccttccccaactttgtggaggtcttgctattggggagaygtgtgtgaaagggagaaggaggggggcagacaagaaaggaataaataaaactaaagcagcaaggaacttcccatctcggtggctaagttctgtttcaaaatgagtccaaaactctggtctcatgccttttttttttttttttaaagactgtgacagtaggagaataatgtgagctggcaagtaataaacagtttctataggcatcaggtgggaacttaaaattcagaaggcagactcctcaattctgaattaacttcctttcttcctgggcacaagagggtctatgtttctctcatcttctccctggccccacacacactctttcatgcagtcaacattcctgccccacaataggtgtgattgc

SEQ ID NO: 801424 - DNA, 635 bp, Homo sapiens
cagaaaacatggaaatatcctgataaattgtgctttttgtagtttccatgaatttgctgattacacacagtcacattgcatgcacagactgcccctgtatgtatttcaataatactgcttgtatttcagtaaagagatggagagascccaagtttgaagactggctgtgtccgtggggagcttgcaatctaccactggtgaggctggtcccagctcagacatttttagcttaataatatttaccaagtccctgcaacgtgccagcattggtgagcagagggctccccagggaggaataagggcctagtggagcaagcagaccctagaacagattaaaaatatgacaaagtaggtttgatcacagtgcagaaacagaggaccaggtgggcttcctgcaagagggtctgagtcttaaaggataaaggcacagtgaccagagaggaaggcgaaaatggcattctaggtagagggaacagtaagagcaaagggtgctgggcaccaggaaatggagggtggacagggttgcttggtatcatcaaggcatgcggcgggacaggcaagagttgaggctggtgtgggaagcagcagtcagaaaagaagagaaggccctggccaccctgccaagatcttggctt

SEQ ID NO: 801425 - DNA, 706 bp, Homo sapiens
aaacatcttatgatatatattaaaacactatgttttaatttgttgatgttctgtccaaattaactgtccaaaagaatttctcaaggacagaaacaatggcaacaatccagtcatttctgtataatgtgcctatgttgtagactatttccaatacagttggcccttcttatctatgggttcatcatccatggattaaaccaactgcagatcaaaaatatgtgaaaagaaaaatatgtgaaaagaaaaaatatacatgattgtgtctgtactgaatatgtacagactttcttgtcattattctttaaacaataaagtataaaaatatttacataacatccatgttgtgrgaggtattatgagtgatctagatatgatttaaagtatacagaagaatgtgtgtagggtatatacaaatactataccattttatgtaagggacttgagcatccaaagattttggggtctgtgggagtcaggataccgatccctcatggttacagagggatgactgttgtaatttggatgtccttttttttcagggaggtcagggatgctcaggaggatattatacttttatgaatctggagagtcagccatggtaacgatcttggtggaaggcagaacctcacttgcagctttaaaaactacaaatgcccactatttaatctccttggcccttggcaactagataatgggcatagtttgg

SEQ ID NO: 801426 - DNA, 706 bp, Homo sapiens
aaacatcttatgatatatattaaaacactatgttttaatttgttgatgttctgtccaaattaactgtccaaaagaatttctcaaggacagaaacaatggcaacaatccagtcatttctgtataatgtgcctatgttgtagactatttccaatacagttggcccttcttatctatgggttcatcatccatggattaaaccaactgcagatcaaaaatatgtgaaaagaaaaatatgtgaaaagaaaaaatatacatgattgtgtctgtactgaatatgtacagactttcttgtcattattctttaaacaataaagtataaaaatatttacataacatccatgttgtgggaggtattatgagtgatctagatatgatttaaagtatacagaagaatgtgtgtagggtatatacaaatactataccattttatgtaagggacttgagcatccaaagattttggggtctgtgggagtcaggataccgatccctcatggttacagagggatgactgttgtaatttggatgtycttttttttcagggaggtcagggatgctcaggaggatattatacttttatgaatctggagagtcagccatggtaacgatcttggtggaaggcagaacctcacttgcagctttaaaaactacaaatgcccactatttaatctccttggcccttggcaactagataatgggcatagtttgg

SEQ ID NO: 801427 - DNA, 643 bp, Homo sapiens
ctgaagatatcttttaatataaatacatgtgtaaaatagtaccttattatgaggagatttcccatcagaatgctattttcaaaattaaatataataccatgtctaatttcatttaaaaataaggaagaaaaacagaaataaaatgaaaaaatgaaattcaaataaatgtatactgaggataaaattagtttcctagaagtacgatttacatttaaatagaattgactctcagctatttaggagaaggccattagtattcttacactttatcatattttctctgtctctcagcctcaattgttgtyagtctaaactttaaaatgtctactttctggcattaaaatttctattctatgactaaaatttttatatatgtttagctttatcctatatctgtaataagtcaatgaatttattcttttttcctttttaagttttcctaaattcaactgtaattgtctaaatatgttaaattcatttttcaaaattggtttaaaagacagtacagatatacagctaagtatgtgtggcaatttaatatggtaaaggagtcattttaattcaacttagaaaatatatttaactatttggacaatatggcagacattttcaaaagaataaaattattcttttcaacatatac

SEQ ID NO: 801428 - DNA, 643 bp, Homo sapiens
ctgaagatatcttttaatataaatacatgtgtaaaatagtaccttattatgaggagatttcccatcagaatgctattttcaaaattaaatataataccatgtctaatttcatttaaaaataaggaagaaaaacagaaataaaatgaaaaaatgaaattcaaataaatgtatactgaggataaaattagtttcctagaagtacgatttacatttaaatagaattgactctcagctatttaggagaaggccattagtattcttacactttatcatattttctctgtctctcagcctcaattgttgttagtctaaactttaaaatgtctactttctggcattaaaatttctattctatgactaaaatttttatatatgtttagmtttatcctatatctgtaataagtcaatgaatttattcttttttcctttttaagttttcctaaattcaactgtaattgtctaaatatgttaaattcatttttcaaaattggtttaaaagacagtacagatatacagctaagtatgtgtggcaatttaatatggtaaaggagtcattttaattcaacttagaaaatatatttaactatttggacaatatggcagacattttcaaaagaataaaattattcttttcaacatatac

SEQ ID NO: 801429 - DNA, 643 bp, Homo sapiens
ctgaagatatcttttaatataaatacatgtgtaaaatagtaccttattatgaggagatttcccatcagaatgctattttcaaaattaaatataataccatgtctaatttcatttaaaaataaggaagaaaaacagaaataaaatgaaaaaatgaaattcaaataaatgtatactgaggataaaattagtttcctagaagtacgatttacatttaaatagaattgactctcagctatttaggagaaggccattagtattcttacactttatcatattttctctgtctctcagcctcaattgttgttagtctaaactttaaaatgtctactttctggcattaaaatttctattctatgactaaaatttttatatatgtttagctttatcctatatctgtaataagtcaatgaatttattcttttttcctttttaagttttcctaaattcaactgtaattgtctaaatatgttaaattcatttttcaaaattggtttaaaasacagtacagatatacagctaagtatgtgtggcaatttaatatggtaaaggagtcattttaattcaacttagaaaatatatttaactatttggacaatatggcagacattttcaaaagaataaaattattcttttcaacatatac

SEQ ID NO: 801430 - DNA, 567 bp, Homo sapiens
cattctgatgcccatgctaagaaattgcctaaataatattgttccatttgcatacattaaggttcactctttatgctgaatatttcaatgagctttggcaatggcatgatgttatatatctgcaataagagtttcataaagaatacttttctcctcagcattggaagcatttgtttttttttttaaattatactttaagttttaaggtacatgtgcacaatgtgcaggttagttacatatgtatacatgtgccatgttggtgtgctgcacccatgaactygttatttaacatcagatgtatctcctaatgctatccctaccccctacccccaccccacaacaggccctggtgtgtgatattccccttcctgtgtccatgtgttctcattgttcaattcccacctatgagtgagaacttgcggtgtttggtttgttgtccttgcgatagtttgctgagaatgatggtttccagcttcatccatgtccctacaaaggacatgaactcatcattttttagggctgcatagtactccatggtgtatatgtgccacattttcttaatccagt

SEQ ID NO: 801431 - DNA, 567 bp, Homo sapiens
cattctgatgcccatgctaagaaattgcctaaataatattgttccatttgcatacattaaggttcactctttatgctgaatatttcaatgagctttggcaatggcatgatgttatatatctgcaataagagtttcataaagaatacttttctcctcagcattggaagcatttgtttttttttttaaattatactttaagttttaaggtacatgtgcacaatgtgcaggttagttacatatgtatacatgtgccatgttggtgtgctgcacccatgaacttgttatttaacatcagrtgtatctcctaatgctatccctaccccctacccccaccccacaacaggccctggtgtgtgatattccccttcctgtgtccatgtgttctcattgttcaattcccacctatgagtgagaacttgcggtgtttggtttgttgtccttgcgatagtttgctgagaatgatggtttccagcttcatccatgtccctacaaaggacatgaactcatcattttttagggctgcatagtactccatggtgtatatgtgccacattttcttaatccagt

SEQ ID NO: 801432 - DNA, 466 bp, Homo sapiens
tcaacacattgatttaggccaggaccttcctctctggtgtagatggttgcaatagcttctcaggtggtctttgtacttctacttcctacctatctcttctttactgatcagctggaataatatttttgaaaacataaacaaaagtcactcctctgctcaaaatctttgcacggtttcctgctgtacttggaatacaaccccaagtcctttcctagggcactagccttgtwttggccttgatcactgctcctgcccacctcataccacttgtcatttggccattatagtccaacaacatccactcatccgctttctcgcaggccctggaatattctaagcactttcccatctcagggcgttgtgaatgctgtttcctctacctgctctcatcctcccactctttatcaactaagttctcacatacacatgtttgatctcaagctgtgtgtgtttacttgtttgttat

SEQ ID NO: 801433 - DNA, 555 bp, Homo sapiens
ataacccgccacttctactcttaggcattttacctatgagaaacaaaatcatatgcccacaaaaaaacttgtgcaagaatgtttataaaacctttattcaaggagaataagaactggcaacaacccaaatgcctaccaataggtgaataaataaactaattgtgataaattcatagagtagaatattactcagcagtaaaaaaaaacaaactatgggtatatacaacaatatggatgaatctcaaaagcatttttaagtgaaagaaaccagaaacaaaatagtagatactgtataattccatttatattaaatacaagaataggtaaacttaatctatggtgatggaaatcagaatagtgagtgcctattagmggtgggagttgatgggccaggaacaaaagaaaacttttaggatgattaaggttatgtacacaggagtgcatttgttaaacctcatcaaaatgtgcacctaaaatttgtgcattttagtttgtgtagattttactttaattaacataatgaaatcttcaaaaccctccaatagcttatcattt

SEQ ID NO: 801434 - DNA, 555 bp, Homo sapiens
ataacccgccacttctactcttaggcattttacctatgagaaacaaaatcatatgcccacaaaaaaacttgtgcaagaatgtttataaaacctttattcaaggagaataagaactggcaacaacccaaatgcctaccaataggtgaataaataaactaattgtgataaattcatagagtagaatattactcagcagtaaaaaaaaacaaactatgggtatatacaacaatatggatgaatctcaaaagcatttttaagtgaaagaaaccagaaacaaaatagtagatactgtataattccatttatattaaatacaagaataggtaaacttaatctatggtgatggaaatcagaatagtgagtgcctattagcggtgggagttgatgggycaggaacaaaagaaaacttttaggatgattaaggttatgtacacaggagtgcatttgttaaacctcatcaaaatgtgcacctaaaatttgtgcattttagtttgtgtagattttactttaattaacataatgaaatcttcaaaaccctccaatagcttatcattt

SEQ ID NO: 801435 - DNA, 538 bp, Homo sapiens; identical to SEQ ID NO: 786458

SEQ ID NO: 801436 - DNA, 706 bp, Homo sapiens
ccctacgagctagaagggattgggatcctatttttagccgccttaaacaaaactattatcagcgaagaattttgtatccagtgaaactaggcttcataaacgaaggaaagacactgtctattccagacaaacaaatgttgagagaattcgccactaccaagctagcactacaagaactgctaaaaggagctctaaatcttgaaataaatcctcaaaatacaccaaaatagaaactccttaaagcataaatctcacaggacctataaaacaaaaacacaataaataaattttaaaaaaaggtattcaagcaacaaatagacaatgaatagaatagtacctcacatcccaatactaacattgaatgtaaatgacctaaatgctgcacttaaaagatacagaatggtagaatggataagaatctaccaaccgggttcctgctgtcttcaggagacttatctaacccacaaggactcacataaacttaagaaaaagagttggaaaacgatattccatgyaaatagcaccaaaagtgagcaggagtagctattcttacatcatattaaaaaaaccttcaaggcatcagcagttaaaaaaggcaaagaaggaaatgatataatgataaaaggactaggccaacaagaaaatattaatatcacaatcctaaatatatatgcacctaacactggagctcccaaacttataaaac

SEQ ID NO: 801437 - DNA, 648 bp, Homo sapiens
  misc_feature 1, 2, 3, 4, 5, 6, 7, 8, 9, 10, 11, 12, 13, 14, 15, 16, 17,18, 19, 20, 21, 22, 23, 24, 25, 26, 27, 28, 29: n = A,T,C or G
nnnnnnnnnnnnnnnnnnnnnnnnnnnnnattagcaaaggagctaaaactagaggacaaaatttaagggaataacagaatatttacatagtgtcaaagtatctacccccaggatacatactaactgcaaaggataaaatagtaacttcataggggaaaaacctggcagacaccatyttaatcaagtttaatatatttgataatgagactaattgatagtttgtgcttcctgatataatgcagtaagaattcagcatcacatctataatattcctgccaaacgtgcataaactaaatttaatcccgagaaaacaccagacaaacccaaactgagaaacagtctactgaataaatggccttgctcttcaagagtgtcaatgtcatgaaagacaaagacttaagaagattcaaattaaaagatatttaagatatatggtaaccaaatataatacatgaccttgggtttactttgtctagcagaacattactgtataaagtctgaatgaagtctatataaagacaaatttgaataaatctcacagattatataacagataatatgtaatatactgcataaataatcatatgatactaatgttaatctcttaatattataattgcactgttgtaagacaatttcttttttttt

SEQ ID NO: 801438 - DNA, 648 bp, Homo sapiens
  misc_feature 1, 2, 3, 4, 5, 6, 7, 8, 9, 10, 11, 12, 13, 14, 15, 16, 17,18, 19, 20, 21, 22, 23, 24, 25, 26, 27, 28, 29: n = A,T,C or G
nnnnnnnnnnnnnnnnnnnnnnnnnnnnnattagcaaaggagctaaaactagaggacaaaatttaagggaataacagaatatttacatagtgtcaaagtatctacccccaggatacatactaactgcaaaggataaaatagtaacttcataggggaaaaacctggcagacaccatcttaatcaagtttaatatatttgataatgagactaattgatagtttgtgcttcctgatataatgcagtaagaattcagcatcacatctataatattcctgccaaacgtgcmtaaactaaatttaatcccgagaaaacaccagacaaacccaaactgagaaacagtctactgaataaatggccttgctcttcaagagtgtcaatgtcatgaaagacaaagacttaagaagattcaaattaaaagatatttaagatatatggtaaccaaatataatacatgaccttgggtttactttgtctagcagaacattactgtataaagtctgaatgaagtctatataaagacaaatttgaataaatctcacagattatataacagataatatgtaatatactgcataaataatcatatgatactaatgttaatctcttaatattataattgcactgttgtaagacaatttcttttttttt

SEQ ID NO: 801439 - DNA, 629 bp, Homo sapiens
atggatctcaagatggatccaagacttaaatctgtgacctgaaaacataaaatttctagaagaaaacctagaaagaactcttctggacattagcctaggcaaagaatttatgactaagaccccaaaagcaaatgcaagaaaaacaaaaataaataaatgagacctaattaaactaaaacacttgtgcacagcaaagtatgtaatcatcagagtaaacagacaatcatagaatgggagaaaatagttgtgaattatgcatcagacagaggactaatatccagaatctacaaggaactcaaacaatcagcaagaaaaaaaaaactcatcaaaaagtggacaaatgacatgaacacttctcaagtgaagttayacaaatggccaacaaatatatgaaaaaattgctcaagatcactaatcgtcagggaaataaatgttaaaatcacagtgagataccatcttaccccaaccagaattgccattattaaaaagtcacaaaacaatagacattgacattaatgtggtgaaaagggaacactgatacactgctgatgagaatgtaaattagtacaacctcagtggaaaacagtatgaagatttctcaaagaactaaaaatacatctacatttgat

SEQ ID NO: 801440 - DNA, 560 bp, Homo sapiens
tataaatattattgtttcctttcaccgaagaaaggcaccgtgaagggacagcacaaagtcttctagcaagggaaagatgagcagctgaacatgagatgctaaattctctaagcccagtgacttctccacttacttttatagtggtgttcattgkaaatggtggatgtagggtgacaaattaggtggtttagaggactgcaacgaagtaagaaaagaggacttcacctccagcttccaaggtagaactgcagaagtcccagtattaagtgacagtgactatctaggccccgaggaggcttgagcttatagcaggtcttcaatctgtcacaagttttgaagaactctcctatctaatagtcccagttaacgcatatagtggttatgatttctcaggcgacactcctagtccacagcacccatagtctcctctggcatccatgatgatgtctgatcttggtcattagttcctggaagtcatatcatagctcccctcattgcccaaatgcaaggccgttttggctctgctcaccccctcacagctactgcagagcccctcccaa

SEQ ID NO: 801441 - DNA, 560 bp, Homo sapiens
tataaatattattgtttcctttcaccgaagaaaggcaccgtgaagggacagcacaaagtcttctagcaagggaaagatgagcagctgaacatgagatgctaaattctctaagcccagtgacttctccacttacttttatagtggtgttcattgtaaatggtggatgtagggtgacaaattaggtggtttagaggactgcaacgaagtaagaaaagaggacttcacctccagcttccaaggtagaactgcagaagtcccagtattaagtgacagtgactatctaggccccgaggaggcttgagcttatagcaggtcttcaatctgtcacaagttttgaagaactctcctatctaatagtcccagttaacgcayatagtggttatgatttctcaggcgacactcctagtccacagcacccatagtctcctctggcatccatgatgatgtctgatcttggtcattagttcctggaagtcatatcatagctcccctcattgcccaaatgcaaggccgttttggctctgctcaccccctcacagctactgcagagcccctcccaa

SEQ ID NO: 801442 - DNA, 573 bp, Homo sapiens
ctttttcatcctctttgaatttgattgggaacaaaaataacaatgcttcagtttacgaagtgctttcatatgcgttatcccacctgatcatgaatcacaacaatctcacgaaatagtgtaattattcccattttacagttgtgaaagctgaaagtcaggcacagtaggtggtatgtcccaggtcttctgactttaaaccccatgcttttttcattgttttaatttattggaacgtgtagaatataaggtataagaaatgctgctaacttggaaaatctgaagcctgtgatcagggagattatattcagtgtcagatttagtcttgatrcattccagaaacaggtacaaagagatgcctaaaaatactaaggcatatgggagaagaagcaggaaggagagaggttgggaacactgctgatcagtttcaggcagaggaaaagtaacatggaaattgagaaagggtatatatcaagagacagtttaaaaagttaatttcaggagcaaaaacttgaagaatagtaagcactatataaatgtacactatgtgccagctgctttcctaagcatttatta

SEQ ID NO: 801443 - DNA, 605 bp, Homo sapiens
cctgagatctgcccctcttctccacctaggtcccgttcttctttaaagggctgctcatgtcccacctcctccatgaagctttcccagactgtgtctgtgacaaagcctttcccgaagtttaagtatttcctttctacttctcactgggctcttgggatcattraagacagtcctgccagttgatttccatacctctcatctccatccctatgatcaccatcccaatccaaatgcgtcttacttctgaacccttcaaggtaacccctaactgcagccaggcttgtcccgtgcaagttttccctccacagggaacctggaatcccacagggctgcagaggccttatctgaaatgtcactctggctaccttaatgcctgtctcctcagtttcaaatcctctgttgctctccggatacggtgtacagaaccgcatatgagttggttcctacccacctctccaacctcatcccctgcttcaaattctgtgctctggcaagactgcactgcttgtggttctctaaaatgctattgcatgtgttttcctctctgcctgggatcttgactacattccgcccagtccctttttcctaactaactcccacttata

SEQ ID NO: 801444 - DNA, 586 bp, Homo sapiens
caccactctatcttctgtcttcctccctgggctgaagtctttcttttattcatgcaatcaatcctgggcacccacttaaatccccatctccctctcaagacacatttccttctgacatcttctatcctgctttattctttttaccttggctgggtgtccaggactcatttattacctaataatttgaagcataatggtgcagtgctcaggttcttttgccttttcttcctgaaaggccatgattttacttagagcctacctcgggggtgactaccttttctctgtgacagctagctgagagttgattttacaagaaaagctaccctaaaccacagcctgttayctgagtgaggctgcatgagcccacaggctacctgaatgagtgacccttgatcctcagcccacctcagggaagaaagggacagaaaaggaaaggcccaggagaacaaaaactcacctccctcttttgtgttttcttaatgtcaattctgtataggacagacaataaaacagaggtcattaaaccaaagtaggaaccacattaacaaaatttaccaatgaggttttgcatgcaagatatacagca

SEQ ID NO: 801445 - DNA, 606 bp, Homo sapiens
gtggagaatgagccttctccacagtcagtgtgaacccctgagattaatcaaagaaagtgatgtatggactgttctgaatcaacttgacacccagaagaggacaacagaggtagaggcctgaaactcaattcaccagaaaaactctccttaatcacgctggctcaggatctcactaatactatatagagcatgtatttttggtaataaacaccagaatcagaactattatactactttggttttcttttatttaacatgtatgatttcggtatatacacatacacttacatactcaccatgctcttgagttagctacttgaaaaattctacccagttctttctatggtgyggattcagttcctatcaactcattttcttatatcccttattgtattcgattcagcataaagtgatttttcttgaaagttgttaataaatacttgaaatggactccactgacatttcctgtgaaagctctgtgccaagaatgggaaacttgggaaagttgccccctttaaagaattcttaacctaggcaagccacatgtgacatcagacaggatctagaaatgttttaaaattcagtttccaccaggatggtgcttat

SEQ ID NO: 801446 - DNA, 608 bp, Homo sapiens
cttacggatgtcattattttagcaaaagtctaacttagagagaggtgatgaggtaatcaacattaatttaatgcctttcaagcttatatgctgcaaaatatttattagatgagataaattgggaaacaaaactgaaacaaataccctagaaagtagtagcataatgtattttgtgtttatatcactagtaaagtgaagctgcaagtcttgaataagacagaaaaaatcattaaaatataagaactgatataagaagtccatttctaaacattttacgctaccttttggtctcagacacatcctratcagctcaaggcccttaataaattcctccgtgaccctggattagacacaaggttcccattaaaacctggcccctcccattgaccaaacatttccttctgtctacacgtctctggtttccatcttggccatgtaattatacatcctgatcctttgaggctgcctcaaggctcccccaggccacctttgtgcagcaggtctgtgttttgttttgttttgtttgtttgtttgttttgttttgttttttgacagtgtctcgctctgtcgccaggctggagtgcaatggcacaatctcagctcactgc

SEQ ID NO: 801447 - DNA, 652 bp, Homo sapiens
aatatacatggaatatatatcccaatgtctagccatggtaatcacttaataggcagtggcaaattatatgattattatcacttttcccttcatatccacatggattataatcaacattctaatccttttattaggaaaaaggaagcaaaaataacagaggaaaaaataagcttatgtagctcatggactgaatcaagcttcattaaatatcatatttcaatcatctaatttatattcaatccatgagctactaactctagattttagattgttatttctaaaataatatacctatgcttatcaaaatattaacaccactgtaagaggaaaattatagctaaaaggcatcttctcttaccaataatttggagaagagaaaagaaaaaaggtatcttcttcattagagaaaatttttctttaaaattaaatcaagaacmtttgtaaaagcaagctgaaattttagggtttgtggttgagtatgaaaaacggaatgcttgatttcagatgattttataagaaatctccatcttccccccaacggagaaactttccaagcattgacatcaagggcacatcccactctgcttgattacccacaaagtaggcaagaaaaaaaagatttgtctcaagatgggcatggtttaaaatatta

SEQ ID NO: 801448 - DNA, 595 bp, Homo sapiens
aagggaaacttgtgttagataacatgtagataaggattgctgcccaaagtaccccatcatgacttggagctaagggatttttttccccttctaatagttactttttcccttcaaatgagatgaatattcataggaggtttaaacactttaaaaagcaagtttctacatgtttatacttggccttttcttccctttaggatttgaagtggtaggtctagttttgatttgtttgtttttaatgcaaacttccttctcaaaaatccatatggaaagcagaccaataataagcatacaggttgatgatgtttatgaagtaaacactttctcgtactagcagtcatgaaaaaatgaaatgttaccagaamctcaatccccaccatgctccctttcagacactgcactccccacacccaaggtaaccacatctgtttatttttttctccaatggacataatgtatcctttagaacaaattcctcattttacatcatagttcagtaagagccagagatacaaaatgactcactcaaactcacttgagagttagtgaagaactagggctggaccttgacccctcgatgccctgtcatgatgta

SEQ ID NO: 801449 - DNA, 595 bp, Homo sapiens
aagggaaacttgtgttagataacatgtagataaggattgctgcccaaagtaccccatcatgacttggagctaagggatttttttccccttctaatagttactttttcccttcaaatgagatgaatattcataggaggtttaaacactttaaaaagcaagtttctacatgtttatacttggccttttcttccctttaggatttgaagtggtaggtctagttttgatttgtttgtttttaatgcaaacttccttctcaaaaatccatatggaaagcagaccaataataagcatacaggttgatgatgtttatgaagtaaacactttctcgtactagcagtcatgaaaaaatgaaatgttaccagaaactcaatccccaccatgctccctttcagacactgcactccccacacccaaggtaaccacatctgtttattttwttctccaatggacataatgtatcctttagaacaaattcctcattttacatcatagttcagtaagagccagagatacaaaatgactcactcaaactcacttgagagttagtgaagaactagggctggaccttgacccctcgatgccctgtcatgatgta

SEQ ID NO: 801450 - DNA, 656 bp, Homo sapiens
cggagtcttattcccagttttcctgtgtatgagcagtgtggccttggcccagtcacctcagctctctaagccatgttcctaatttgtaaaacaaagagaataaggttcatgttagcatttgggataatgtgtacaaatcatttacacaacatctggtatataacaagctcttaacaggcagtagctgacttcttactccacatttagctagtggtcagctttctccattcagcatttatctcatttatgacaatattatttggtattacattgctaattatagtcctttggaactacatagcaaggagcatttctcatattcaggagacatcttagctgaactttcatataagaaggaagttatatctgactacctctgaaaacactcccytcctctcacttcaggtactaggagacgtcctgtagaaggattggacttccttagcccaagggattaatacctttaatttttcctgatctcaggggtcaagatggctccagtaacaactgtatgactcaagtgagaagataactaaaatataaaataaaactgtgataaagggagagcaggatgctgtgacaacacaaaatatgctcagggctttgtatttgttcgtcaggtgtcttggagaggccaggttccaatttatgattcc

SEQ ID NO: 801451 - DNA, 656 bp, Homo sapiens
cggagtcttattcccagttttcctgtgtatgagcagtgtggccttggcccagtcacctcagctctctaagccatgttcctaatttgtaaaacaaagagaataaggttcatgttagcatttgggataatgtgtacaaatcatttacacaacatctggtatataacaagctcttaacaggcagtagctgacttcttactccacatttagctagtggtcagctttctccattcagcatttatctcatttatgacaatattatttggtattacattgctaattatagtcctttggaactacatagcaaggagcatttctcatattcaggagacatcttagctgaactttcatataagaaggaagttatatctgactacctctgaaaacactcccttcytctcacttcaggtactaggagacgtcctgtagaaggattggacttccttagcccaagggattaatacctttaatttttcctgatctcaggggtcaagatggctccagtaacaactgtatgactcaagtgagaagataactaaaatataaaataaaactgtgataaagggagagcaggatgctgtgacaacacaaaatatgctcagggctttgtatttgttcgtcaggtgtcttggagaggccaggttccaatttatgattcc

SEQ ID NO: 801452 - DNA, 625 bp, Homo sapiens
aggattggacttccttagcccaagggattaatacctttaatttttcctgatctcaggggtcaagatggctccagtaacaactgtatgactcaagtgagaagataactaaaatataaaataaaactgtgataaagggagagcaggatgctgtgacaacacaaaatatgctcagggctttgtatttgttcstcaggtgtcttggagaggccaggttccaatttatgattccaatatggcctccagcaaagctcccattaccctgggaaactgttctcatttgggaatgcagagaatttgatacttaaattctcacagagtcattaataactgactaaagtatcctatctttagtcctttctcctaacctgtctagggagttagcttgtagacatgcatttcaggtgcttatacaagagataaagagaggaatcttttagtggaggtgggagagtgctctcaacatagacacttattttaacttctgagcctgttgttcaaagacacttcctcttttgtgataatccgtgagtatacacacatgcatgtgcacagacataatgcatataggtgaacacacacacacacacacacacacacacattgcataggaaaccagggcctcagc

SEQ ID NO: 801453 - DNA, 627 bp, Homo sapiens
agactgtggctttgggcaagttatttaatatctctatgtctcagttttctcatttgaaaaatagtgatgatgctaacagtacctgtctcataggatgtcagatggattcattgagtaatgcatgtagggaacttacaaaagtgccttgttttgcattttttttaaatgtgggtgcttagaatgctatctggaatctaataagcactacatacatggtaactcattttatacataayacattttataattccatagagcctcaggcttttttttttttttgtgtgtgtgtgagacagagtctccctctgtcactcaggctggaatgcagtgacatgatctcggctcactgcaacctccgcctcccgggttcaagtgattcttctgcttcagcttcctgagtagctgggactacaggcgcgcagcaccatgcctggctaatttttgtatttttagtagagacggagtttcaccatattggccaggttggtctcaaactcctgacttcgtgatccgcccgcctcggcctcccaaagtgctgggattacaggcgtgagccactgtgcccagctgcttcaggctatttttttttaaaactctttgtgtttattagcacttgtaatattttac

SEQ ID NO: 801454 - DNA, 627 bp, Homo sapiens
agactgtggctttgggcaagttatttaatatctctatgtctcagttttctcatttgaaaaatagtgatgatgctaacagtacctgtctcataggatgtcagatggattcattgagtaatgcatgtagggaacttacaaaagtgccttgttttgcattttttttaaatgtgggtgcttagaatgctatctggaatctaataagcactacatacatggtaactcattttatacataatacattttataattccatagagcctcaggcttttttttttttytgtgtgtgtgtgagacagagtctccctctgtcactcaggctggaatgcagtgacatgatctcggctcactgcaacctccgcctcccgggttcaagtgattcttctgcttcagcttcctgagtagctgggactacaggcgcgcagcaccatgcctggctaatttttgtatttttagtagagacggagtttcaccatattggccaggttggtctcaaactcctgacttcgtgatccgcccgcctcggcctcccaaagtgctgggattacaggcgtgagccactgtgcccagctgcttcaggctatttttttttaaaactctttgtgtttattagcacttgtaatattttac

SEQ ID NO: 801455 - DNA, 627 bp, Homo sapiens
agactgtggctttgggcaagttatttaatatctctatgtctcagttttctcatttgaaaaatagtgatgatgctaacagtacctgtctcataggatgtcagatggattcattgagtaatgcatgtagggaacttacaaaagtgccttgttttgcattttttttaaatgtgggtgcttagaatgctatctggaatctaataagcactacatacatggtaactcattttatacataatacattttataattccatagagcctcaggcttttttttttttttgtgtgtgtgtgagacagagtctccctctgtcactcaggctggaatgcagtgacatgatctcggctcactgcaacctccgcctcccgggttcaagtgattcttctgcttcagcttcctgagtagctgggactacaggcgcgcascaccatgcctggctaatttttgtatttttagtagagacggagtttcaccatattggccaggttggtctcaaactcctgacttcgtgatccgcccgcctcggcctcccaaagtgctgggattacaggcgtgagccactgtgcccagctgcttcaggctatttttttttaaaactctttgtgtttattagcacttgtaatattttac

SEQ ID NO: 801456 - DNA, 576 bp, Homo sapiens
tcctatccaaagagtccttgtccagaccaatgtcatggagctttcctcatatgttttattctactaattttgtagtttctgattctacacttatgtctttttttcattttaagttagtttgtgtacatatatgagataagggcctaatttcattcttctgtatatgtatatctagttcttccaataccatttatttatgaggctctcctttytccattgtgtgtttttggcagtggtactgccatcttttgattgcctttaaaaaattcaggttgagatcttcctggttcttggtataatgaatgatttcttttgttgaaatttggacattttcatattataagatgatggatcttatttaaaacttcttagctttctctgataccaatgcagaaggagaaagttggggctattttattacagctggtcaaggtagaattctcatttcctattgcccttaattaacacacaagagaaagggagtactcttctttctaagtgggagtaggtggtcttgttaaccctgggtgctgctgcaagtctctactttccactaggcctcctgcaacactttcc

SEQ ID NO: 801457 - DNA, 475 bp, Homo sapiens
aatatgttttaatatattttctacttttttaaaatttgaaattcctgttgatttaattgttcatttatataatttgctcttttttggctttacaaattttaaatatttaatcaattcttttgtttcatttttcattttcttttctttttgcctcaaatagctaaacatattctttcaattatgatgatgttaaaacaggacacagttaattaaagttgagtggaatttcagaatactcttcctgsaataggaagagtacctatcttaggctaacaaagagtatactgtagactcagctaagcctttgctgagactaactatccctaccctaaacctgaaagtttccttgtattttctcatcctatccacataacgtacaaacaattgtttttgcacactaagtagcgtacctttttcacacacttaggtagcatacctaagggcctctagttttcaattttgaaaatataggcta

SEQ ID NO: 801458 - DNA, 649 bp, Homo sapiens
tatctacattcttgaaaaaagcaagattttaacacaagttgggcttgggatcccattgggccccaaatgagatgaaatttgtttaagctctattttccacctgaagcatgatttgttcctgcttcagtattgctcttttctgccaatgccaaaacagtacttgaatgcctgtcctttctccagctacgattatgtgacagttctggctaaggggatttcagaagcacctgaagaggactgtacttccagaataaagctggcaaagtcatgtgaagaaaatatttgcctttgtgcttttgcctcactttctttttcaaacctaaatgcagatccagtgcccagaagtacagatccctgatcaacctccttctcaactgctcattacatgcaacacatgggaaagggtagcctctgacatgtcatttcaccagtttggtagatttttctcataataygattcacatacataactgaatagatagaccacacaagttatatcagtccctactctgagcagtgaccatacaacccaatcaatttggaatggtgtttttttttttccttttacccagtccacagttatgccactgtaagatgaaagttatattgaaaagtgctaggagaaaaatgtactatacagattgttact

SEQ ID NO: 801459 - DNA, 600 bp, Homo sapiens
taagcaaagtcattcaaactcttcctttttgttttctccagacaggggagtctctccccatgaccaccacaggctcacatggagtactgccagggtaccaccagtgttaatttaaggccaaaagtctttttagtcagtttttggtgaattgtgacaggcctgggacttacccttcagagctgtggaatcccctctggccttttgtcaagcaaaaggagcctcttcttgtagccaccacagctggtaatatgctgggttacacttgaagccagcatgtctcagagtctcatccaaggcccatggtgtgtactagttcattacctctgccaattatttagggcctaatggctctttagtctgcaggtgatgaatcttgccaggactaggtccttccctttaaggcaatgggttcctttctggcccaggttgtgtctagaaatgttrtctggaagctggggctgaaatggggtcctcatgactttgcctggttccctatcctattgtggttgggctgctatccaaattgcaaaataaaatcccctttactcttcccatttctctcctcaagtagaaggaagaggtctcttttggagctgtgag

SEQ ID NO: 801460 - DNA, 517 bp, Homo sapiens
tgagctaacagcctaagagaaaattcgaatgcttgctttcatccaaatcttctaaaagtggacaaaagctctcattgttatatcaggaaaattggagagagaaaatagatctaattttctattcttgtcactgcagtgctcagaatccttgagtagcttctcacttttgctctacatatcaaaccaaaacttttagccacagcttcaaattcaaatgaatggcttgcctttcctgtctgctctcatctcctttagcaccctagcaggaaccctgtcctgcagcacaaacagcctccccacagaatcctgtggtcagatttttctatcttgttgttcactgagcacgcactmtgggccaagtgctcaccctgccctggagtcttttcccatgtgccttgcaagcatgaggtctccctatttctcagctctactcctacccaggatcagacttgcgttttggaaaaatcatcctgataatagttttgagaaaggaaggctgggaaggaggtgactaaac

SEQ ID NO: 801461 - DNA, 629 bp, Homo sapiens
agatgtggagcctaggataccagacaggagtgcagataaagtctgactctttccagcatagccaggggccttggctaactccacatgtccccatactttacctagattctaatggctccatggcaggtaagttgaactattttcaaaaatcaaagaagtagtttattaccttaaagcatttagcaaatctagtatctgatctgcctaatttagatcaaatrtctttttttaacaacaatctttacaactctttatttctcaaagcttactaaagccacatgaactaaaaggcattacagtttttatttttctgacaaaatatttgatgtaagtgcttattatttttaagataactaatcagagctctttcatatataaacattacccacttaacacatatataactacatagaagaagatccagtagttataagatttttttcatttgccagtttcacagtttcttaattggattactggcttcagggtggagttcttcaaggaatagggctaagaaaacatgcagtttctagggcctaataagcaggcacagctggaaggcaaaacagattcccccaaattcagggtttcattttcatactggatcctggatccacaaaagagaaata

SEQ ID NO: 801462 - DNA, 670 bp, Homo sapiens
cttagcaatttttatttttggtgaaaaacctggtaagtaagtaattttaattatgtactagatgtggagcctaggataccagacaggagtgcagataaagtctgactctttccagcatagccaggggccttggctaactccacatgtccccatactttacctagattctaatggctccatggcaggtaagttgaactattttcaaaaatcaaagaagtagtttattaccttaaagcatttagcaaatctagtatctgatctgcctaatttagatcaaatatctttttttaacaacaatctttacaactctttatttctcaaagcttactaaagccacatgaactaaaaggcattacagtttttatttttctgacaaaatatttgatgtaagtgcttattatttttaagataactaatcagagctctttcatatataaacattacccacttaacacatatataactacatagaaraagatccagtagttataagatttttttcatttgccagtttcacagtttcttaattggattactggcttcagggtggagttcttcaaggaatagggctaagaaaacatgcagtttctagggcctaataagcaggcacagctggaaggcaaaacagattcccccaaattcagggtttcattttcatactggatcctgg

SEQ ID NO: 801463 - DNA, 671 bp, Homo sapiens
agcaacccactcttactgccagtctcaagaattctgggcctctggaatcctggcaggaggagactcctcgcctaccacagacacttgagttggcaggaaaagctgcttagagaagtgataggggaagcactacaggcagcacagagcccataggatttgttattggatcatctatagtggagcacagcctcctaggcttgacttgctcacgtaggagattttagccctaggagaattgccacacctgaactctgcagagcggtcttgctcatcagatagagctggtctgatctgaggacgccttggtcttctggcctctcctgaggctgcagtcttgttatgcctgtttgcagtgcagcctcacctgagggcccacatcatagttcctgtgctggaggactacagctgactagcagagagctccaacagagaggccatcatggacacacatcagcccrtctactccctcccaactctgcagctttccctgagcccacagccaacccccgaccacaatattgcttcgctgatgtgtgcatacacggtggatcttgccttctttgtcctgccagcacacatgtgtgcatgcatcctgccctgccactgctgccagcatgagtacactccttacctttacccccaccttaccaccattacaactggagccttgg

SEQ ID NO: 801464 - DNA, 524 bp, Homo sapiens
gaggcggatatcattttgtacccattttatagataagtaggctgaggttcagtgacttactcaagaacacatatgcagttcatggtagagccaggatctggacccaagcaggctggctccagaggaaccacttttaacctttttgctatacctgtgctaactgtttgacagattgtggctcccactgttagggactttttctgaatataagacagacatggatggtcttgatttctccagaatctgggttttaatcagccacactgaattgatcatttgacaatggtagttaccattcattcagcatctacttattttaagccagacactttgcatacattatctcwaaaccagggtttctcaacctcaaccctattgacattgtggactggataactctttgttgtgaggagctgaatgtgcactgtaggatgtttagcagtaaccatggcttctgcccactaaatgccagtagcatccccacatccaagtcatgacaatcaaaagcgtctccagacattact

SEQ ID NO: 801465 - DNA, 581 bp, Homo sapiens
attgtcatattggttttcacagtggctgcaccagtttacattcctactagcagttcccaaggaatttaatttctccatatcgtcaccaacattgttattttctgttttgttttgttttggtttttaataatagccatcctaaggagtgtaaagtggaacaatgcccaaggattgtgttctttttgatgctgttgtgcatcaaattattttcctactttcattgttggattgttcattgctaatatatagaaatacaactaatttttgtatattggtcttgtatccttcaactttgaatagaagtagtgagaatagtaattttcttttttttcatgatactagggagaaattttcaamctttcaccattaagtataatgttagcagtgggtttttcaaagatgacctttatgagattgaagaatttcctttctttttctggtctggtgtgtttttaaatcatgaaagggtactggattttgtcaaatgctttttctgtatctattgagatgatgatttttttccctttatcctattaatattatattgattaatttttatatatcaaatcaatctttcattt

SEQ ID NO: 801466 - DNA, 567 bp, Homo sapiens
acatactctggaaattcacctaccacaactgaacttatatctcaagaaattaaggtaatgataaactcaggatgtaagatgtggttacttagatggggtagacatagaaactaaatggtgaaggatctatttggttagatatagttacatgtgggacaactgagacacagacaaccagaacagaatagagagtccagaaatagattcattatggatattttatctataaccaaggtggcactgaaaagcagtggaaaaaaaaaggatagtattttcaatgaatggtamtgggtaattaaataaccacatggaaaatgactacttcacatcacatgcaaaaaaatcaattctagtgaaagataaaacagtaatgctattagaaaataacatttaaaaattgtcataaccttagctagaaagatttcttaaacaggacacaaaaataactcattaaccataaaggaaataacttataacttggaacacattaaaattatgaatttctgtttatctaaaggcatcactgaaagggttaaagagttggcgaagatatttataatctactga

SEQ ID NO: 801467 - DNA, 629 bp, Homo sapiens
aaaaaaaagagtggaaatactggaagttgaacgcaggacctcacgcatgctaaccacgtgctctgtccctgagctatacccccgcaggagatcaggagcttgggaaaatgttttggtgatctccgttgcctgagtctgtgctctgtgtcatcaagacaatcactgtatgtttccaattccactgtttatgaattcccgacactaagcgccctctctctctctctctctctctctctctctctctctctctctctctcgsgcatggctacaccaggagaaagatatcttgtggtaaaaacaaaggcattgttcctgatgttcctgatttgtggtcagtccaagatcaactcaccccaaagtggtctccccatcatattagactttctggagcataattccattctatcccttgagtgacctccggcatacaacattctcttgcaaattttctgattataacttttttcttttgactctgggaagcatcttagtgtttcccatagtcaaaaaataaaactcaggtatgtgtgaaaataccctaaaattcagtacaaatagaggcaaattaactgcatttcaaaagaataacataaccacattgaagaggaaagaactgatataagaaaatg

SEQ ID NO: 801468 - DNA, 629 bp, Homo sapiens
aaaaaaaagagtggaaatactggaagttgaacgcaggacctcacgcatgctaaccacgtgctctgtccctgagctatacccccgcaggagatcaggagcttgggaaaatgttttggtgatctccgttgcctgagtctgtgctctgtgtcatcaagacaatcactgtatgtttccaattccactgtttatgaattcccgacactaagcgccctctctctctctctctctctctctctctctctctctctctctctctcgggcatggctacaccaggagaaagatatcttgtggtaaaaasaaaggcattgttcctgatgttcctgatttgtggtcagtccaagatcaactcaccccaaagtggtctccccatcatattagactttctggagcataattccattctatcccttgagtgacctccggcatacaacattctcttgcaaattttctgattataacttttttcttttgactctgggaagcatcttagtgtttcccatagtcaaaaaataaaactcaggtatgtgtgaaaataccctaaaattcagtacaaatagaggcaaattaactgcatttcaaaagaataacataaccacattgaagaggaaagaactgatataagaaaatg

SEQ ID NO: 801469 - DNA, 613 bp, Homo sapiens
aacttttattttagattcgggtgtacatgtgcaggtttgttacacgggtatattgtgtgatgctgagatttggggtacaaatgatcccgtcacccaggtaccaagcatagtacccaacatgcaacctagactgcatccccccattttcaacccttgctcctctcattccctcccacttctagcagttcccagtgtctattgatcctgtctttatgtccatgagtacccattgtttaactctgagactgcagtttgaccaaaagtctcacttgagctaactttcagggccaaatggggtcagtcaggagcgcaggtgctgggtaaaactggctggactgccactctggaaacgggcttaaaggctcrtgtggcccctgataaaggataaagcagtcgctctgagccttagtttccctactttacagggttttggtgaagatcatatagggtagacccccctccccctccctttttttttgagacagagtctcgctctgttgcccaggctggagtgcagtggcatgatctgtgctcactgcaaactccgcctcctgggctcaagtaattctcctgcctcagcctctcgagtagctgggtttataggtgtgcacca

SEQ ID NO: 801470 - DNA, 666 bp, Homo sapiens
gctcacttcgtcaatgaaatgcattttttaacattctttatgctaatgaactgtaccatggatgcacatttaaatagcaatatttgaagcccctgccatggatactccagaaggtggatcgtttaacaaatgctctcagagcactccctaggtgatggcatggttccaagcactttgaactttacacatcctaacccatgtcattgtcacaacaatcccataaggtatgtacaatttttatcttyatgtcacaggtgaggaaactgaggcatggagaagatgaccatggctgaggtctgttctcccctctctatccacagagccaaactggatactgggaacacaataaataaatacctgttggtaataggtaataatcaccaaaatggagattggttccactgaatggcctgagattggactgtgtggtagaggatgggtagcagctgagagctagcctgtcatgactgatggaacccatttcacacttatcatgcttcccacgtgcctacctccaattctcttgcatccttcatgggtaggagttggccttggccagggcctggttgcctaagtgtctgcagagttgcctatttgggctttcgccaacagagacagaagtatattatgcatcttaggattctgtattacccagcactcaatcaa

SEQ ID NO: 801471 - DNA, 623 bp, Homo sapiens
actctatcccttagtgctatgtgaccatggacaaattacttaatttctctctttcttggcttctcgtttgtaaagtgaggaaaacattagtcctgccaaatatgattgttatggagattaagcaagttaatatttgttggagtgtggcagtccctggcacactcctggacttagcacattggcatagatgctttttgaggaggagcccatgaaacaagccacagaagacttgccacaggtttgcattgagtgtagcctgatggtgcagctttaggagagccacagggagaggtcactgaggaggctgtgaggtgggtgcacccttgactctactgtcttctcatcaggtggagtataagagagggcatgatgaacgcatctccaggttctccacggtggyggatactcctgagctgctacggagcaaggctggggcacagcttcaaagtgatgtaagaaaggagggaggccagtccatcactgatgggcatttgggttgattcctcatctttgctcttgtgaatagtgctgcaatgaacatacacgtgcatgtatctttataatagaatgataaaaaggaacaagatcatgtcctttgcagggacacagatggagctggaggc

SEQ ID NO: 801472 - DNA, 630 bp, Homo sapiens
ttttgcttttcattccctagctgtgtgactttttgacaagtcatttaagctctctgtgctttattcttctcatccgtaaggttagaaaaatatcatctacttctccatataatcgtgaagattaaatgaaatgatccatgcctggctttgagtaagaactcaatgaatacttagctgctattaccactggtactactaatwataccatcaccagtaccaccaccaccactactacgtgcttttgtgttctgcaattatttactttaaagttattataacaaacatttccccagtttatcaggaactttgtatgaaccatttgagggctgcatacagatgtatttaatttgctttagcattcttgcttgtatcttttataaacaacaccttgatgaacctctttggacataaaacatttaaagtttttttttatttttaaaataatccataacccattccatctagtggcggtctcaattgctttaattcattgctgagttatatagattatatggatttttgttatctgaccttggaaactatattatttttatataggaaaagtaattctacatttcaattactaaagtaaacaatgcctttggaaactaattactttataaagtggtg

SEQ ID NO: 801473 - DNA, 628 bp, Homo sapiens
agaatggagaaattgtgaaagcctttcctctgagatctggaacatggcaagaatgcccactgtcaccactgttattcaacgtagaactggaagcccgagctatagaaatcagacaagagaaggatataaagggcatccaatttggaaaggaatagtcaaaatgattcttctttgctgatgatatgatcttaaattggaaaaacctaaaggcgccacaagaaagcaattagaactgataaacaaattcagtaaagctkcagaatacaaaatcaacatacaaaaatcagtagcatttctatatgccaacatggaacgatgtgaaaaagaaataaaaatataatcccatttataatagccgcacataaaattaagtacccaggaattgacttaaccatagaaatgagatctttataataaaaaaattataaaacactgataaagaaattgaagcagatatcaaaaaattgaaaatattgcatgttcatgaattggaagaatcaatactgttaaaatgtccatgataaccaaagcaatctacagattcaatgcaatccctatcaaaataccaatgacattcttaacagaaatagaaaaaaaactaccctacaacatatatagaaacacaaaa

SEQ ID NO: 801474 - DNA, 626 bp, Homo sapiens
caatccctaacaaccactaatctgttttctgtctctgtggattttcctatcctggatatttcataagaatggaaccatgtaatatgtgagttttgtgacttacttctttcacttaatgtttttaaagtttattcacatggtagactgcatcagtactccatttyttttaatggctgaataatattccattttatgtatagaccacatcatattcagaagttcatcagctaatggacatttgagttgttttcatttaatggttaatgttttcatttaatggctgttatgaagtacaaattttcatgaagacatatattttttattgtcttgtatatctatgtaggaatgagattgctgggttcctataaaaattgccagtttgtttaccaaagtggtcatcccattttaccagctcaccagcaatgtgtgagaatttcaatttctccaaatcctcaccaacactttttattatctgtctgcttgtttatagctattctagtggatgtgaaccagtatctcattgaagttttgatttgcatttttctgatgtctaatgatattgagcatcttttcatggacatgttggccatttgtatatcttctttggagaaaggtctcttcaattc

SEQ ID NO: 801475 - DNA, 486 bp, Homo sapiens
ggctgctcatccctcagcacacggtcagggtcggggatggaactcaatcccagcccaggggtactggaaagaaaagcatcctttccttcccacaagaccgaatggatgagaaagaagccctctcttcccttggatggggcagggtgtctgttgtcttattgcttgaccggaggatctagacttgtcctgggccacgtatatggatctgaaactaaagactaaaaacatgatgtaaggcagaatggaccggatgagagaagcaatatttttagtgatgttagctcatatcagttggattgggggttttgtttggtgtcactcacagcccasactttccatgcacagcaagtgcaaggctgagatgagatggaggagaggtggccaggtccttggtgagaatcctggccgaccaccccttgagtcggctctgtgagtagctccaagtactgagagggaaccatcttcctgtggttactggtacatgtg

SEQ ID NO: 801476 - DNA, 656 bp, Homo sapiens
tgctacttcggagccagttatgaggatacacacccattgctgctagagacgggcctcctggtgctgcccaggactcctgatcatgtccgttctggcagagatgacagctcctagcacctcctcttcctgccttctcgctctgctgcacactccacgctcacgggccagcagggcaggtrgcatctggaaccctttaggggagtcctgtctttgttgtgtggggtggcgttttcacagttcccaatttagaggcatatttttggactctgagcagctccgatccctgccagtagactgaagggaatgtcagtcctcacgcgattagacagcttcagactcccatcttaccgaagttatatttacatctcataaactatgttggtgtcttactttccacaacaaaagctctatgtctgtgtgtaagacggagagagagagggatgatttctcagctcatgaaaccttctacagaatgagaaggttctgcttgagaacactaccttttaaagcattcacccagcaacgggatcatgagctgttccaagaggaggtcattctccctcggggaaagacacatgagctgttccaagaggaggtcattctccctcagggaaaagacacaccatctcttttatgagcaatgggctggaaggaga

SEQ ID NO: 801477 - DNA, 625 bp, Homo sapiens
catctgaccatcatccatccgtctgtccatccatctctccctctgtctgtccatccatccatccatccatccatccatccatccatccatccatccatagtgttctgaaagaggaatcatctgtataagactgaccccttggggctgcatattcctctaggagctgtcttctctgaggtcagccttcaatgctaagctgagaaggactcctcttttgtgtgacgcaaactgatccagatggtggaaatatggagcctttcatacaaagacgcgctgtcctgggggccttgttcaggactgggtgtcctcaccatgcagcgtggatctgcccattgcctatgtgggtcctgagaggggatgcttcctaagaatggcagggcaggagttgggaggacctgcagttccccctcctccaggagagagggcagaggctyaccccagccggccgtttccctcagtccttcaagacgtgctgactgcaccccaggccagcccttctttgaatccaggcaaacatcctctgtcccttcccttgcgtctcccactccagcttttgctctgtcacttgggaaacttcagccttcattcccatgaattaaataatatttgtatatttagatataac

SEQ ID NO: 801478 - DNA, 573 bp, Homo sapiens
taaattaaaaaaaaagaaagaaaaaaaaacaagccagggatgtggtcttttttagacttatataaacatgagtccatcgtcggaggagacatcctgctcctgtgaggggtccggcactcacctgggcgggctgcctccaccgaggatgtcaggaaggctgggtgggggactcgtgttttagaaagggcttcgtttccttctgcataaagttaagtccttggatcctgactcatacagaggccaggcgggtcgtgtttatccctacgaagagaagaatcctcctgcttctgcctgggcagacttctgaaatgctggacagaaccacccggggagggggrggggcaccagcaggagagggacagagggacccatagagactcggaaggaacagccagtgtccacgtccccacccatgtactagccacgttgtcattactgcatgagttttgggagaccatgtgttcttgggcaagataactcgtttcttggaacttctgtttcctcttctgtaaaatggagataactaaagggctaactttgtggccaagctgattggctgaccaccaacgctga

SEQ ID NO: 801479 - DNA, 349 bp, Homo sapiens
tctattggtctcaattcagctgcattgccaagggtcatgtccatgtacttattaccagcaaacctcagccccagtgcgtatttgcctatggccctttgacaagccagtgatgagacagggcagggaccccttttaggggcctgctaggccccgcaacatggaaataaaggaaaatcctkagtgccttcaagggaaattccaggcacccagcgagccctgagaagtaaatgagtaacatgataaaagcgagaagggaacagtagcctaaaacaagagccccccaaggaagttagaaccacaagatgttcgttccctatggaaacccaagataacatcttgatctacatcc

SEQ ID NO: 801480 - DNA, 565 bp, Homo sapiens
caagggcagggctggagctggaaagtttgccaggcagaagggcaggtcatattctcccacatggatgaccaggccagctgtggccaaggcctccaggcacaacacttggggttcaggtcagggctcccagatgctggtgctcaggacagagtsgccccgagggggaagcccattgattcgtctcccacagactcagggctccagcgacacacattgattctcttacagttgggaggatcagaagtctgacacaggtctcactgggcgaaagtcaaggtgtgggcagggctggatccttctggagcctatggggaggtccatttcctgccttttccatcttccagaggcccctgcaaccctgagctcgtgattcctttctccagcctcaaggccaggcatctcccgatctctgtctctccgtgtgtgtgtgcatgtgtgtctctgtgtgtgtctacgtgtgcatgtgtgtctgtgtgtctgtatttgtgtgtatgtgtgtttctctgcatgtgtgtgtctctgtgcatgtgtatatgtgtgcatttgtgtccctttgtgtgtgtat

SEQ ID NO: 801481 - DNA, 615 bp, Homo sapiens
aggtggagctgtgtgggaacattcaggtccctggggttaagtctcatgcctagccctggctggagggttttgatgaatggatcttttttttttctttaatagtgtagaaattgtattttgcctcatattcttgggttatccatattagtctgcagctgttggtcttcctaaaccatgactgagtaggtcatcctctgttcaccactggtgatttcttaccatctggtgatttctggataatgctgagcccctgagcttggacatcaggctctacagcagggctgggctccatacttccygggccctgcccctggccagctgccctgaggtcactgaacacctggggtgagaatagatcttacccacccctgctccctgtgttttttcaaactcccctccttcctggctctggagtgagctcctgggtgcggggtagtggcttgagctccatgcaggtttggtgccttgctcatactgagaagctcagtaagcccacatcaaccatttgtctttctctagccaagagtcaaatagatccacgtttaaatcccagctctgccttttattagctgttggactagttgtttaaacctctctgcctcagtttcttcatct

SEQ ID NO: 801482 - DNA, 602 bp, Homo sapiens
ccatttttaatggtgtagtctcacagataattgtgaaatgaatacattttcatgttcatattatgttggtatctgattcagttttcttaaatggagacgtttaagatcttatgaaagacagagccacagataccatcactgaggtttttcccttctattacaattcactcatggactcaaacttattttagcttgtcatataattagtgcatgttttgttttatatcgtggactcatgtccatctacctgtttgtttataagtggcctcatgtccatctacctgtttgttccacaragttctagagacttgggtgctcgtctgcctgcctgggtggatctgcctgaataactgttgcatgtcctgttccttgttctctgagtcatgccttccccagctgtgtgtttttgccaagacggtgcacaaacaagttgttcattgttaaatctgtcagtggggccaggacttgaagcttccacaagcttcaggtgttattcaattctctctttctcattctttcattttaagcatttttgacctcagaaaaaaattgtttcaaatacttttctagaaggaaaactctctgtgttgaagttttccctt

SEQ ID NO: 801483 - DNA, 641 bp, Homo sapiens; identical to SEQ ID NO: 782927

SEQ ID NO: 801484 - DNA, 511 bp, Homo sapiens
agcaacttccagactcccaggggaaagaatctgtggggtttaaagaatggtccaggattggcctggtgcggtggctcacgcctgtagtcctaacactttgggaggccgaggcgggtggatcacttgaggtcaggagttcaagaccagcctggccaacatggtgaaaccccgtctttactaaaaatacaaaaattagccaggtgtggtagcaggcgcctgtaatcccagctacccaggaggctggggcaggagaatcactggaacccaggaggcggaagctgcagtgagcagagatcgccccactgtactccrgcctgggcgacagagcaagactctgtctcaaaaaaaaaaaaaaagaataaaaaaaaatggtccgggacacagaaggtgccacatgcagctgtatcttaggatattctgcacgcatgtcccaagttgaggacaaaagccttctaatcagttccatctgctgttgagtcctggatccaccatctcctaacctgggcaagtc

SEQ ID NO: 801485 - DNA, 511 bp, Homo sapiens
agcaacttccagactcccaggggaaagaatctgtggggtttaaagaatggtccaggattggcctggtgcggtggctcacgcctgtagtcctaacactttgggaggccgaggcgggtggatcacttgaggtcaggagttcaagaccagcctggccaacatggtgaaaccccgtctttactaaaaatacaaaaattagccaggtgtggtagcaggcgcctgtaatcccagctacccaggaggctggggcaggagaatcactggaacccaggaggcggaagctgcagtgagcagagatcgccccactgtactccagcctgggcgacagagcaagactcygtctcaaaaaaaaaaaaaaagaataaaaaaaaatggtccgggacacagaaggtgccacatgcagctgtatcttaggatattctgcacgcatgtcccaagttgaggacaaaagccttctaatcagttccatctgctgttgagtcctggatccaccatctcctaacctgggcaagtc

SEQ ID NO: 801486 - DNA, 660 bp, Homo sapiens
ttcacaacgtgagtgttcatcaggagatatgaaagtcacatgggttgtgggacaatttttctttctgtacaacttcctacagtgcattagaagacattaatatccttggcacccccaaataccactatccctctcaactattacaacgaacaaaatgcttcccccacaaatttccaaaccactgtctaggcggaggtgccacacctgccgagaaccactgccctaaaacagattcatggatgatatactcaaaataaccgcatttggcaattktataattgcatgctgtggtgggcagacaaatggcaccccaaagacgtccacatcctagtccccagaatctgtggctgttaaccttctatggccaaagggactttgcagctgtgattatgtgtccctaatgtaatcagaagggtttttataaaagggagggtggtcaaagtgggcggtaggagatgtgaggccagaagcaagatattggagtgacatgaggaaggggccatgagcccaggaatgcaggtggcctctagcagctaacacaagcaaggaaacagtcttctcctctgaagccttcaaaggaacgcagccctgcagacacctctcatctctagaactattagagaataagtgtacattgtttaaagccactaagtttgtgct

SEQ ID NO: 801487 - DNA, 628 bp, Homo sapiens
aatcacagtatttgctttcctttttagaagaaggaaaaatgaatgcagggagccctatggtattcactataaattcttccatcagcacaattcactcttcactctgactgatttacaaggggccttgctctaaatggtcactcaataagtatcaaatacatgaagctcagggaaagatactgtgctcccaggtcttcatccaatcaagaaactgccctttccagctatgcctgtgttcaggatgtcagttagatacaagaggtcacagattgcttccracacacacagaccacctaatatgtgctaccaaccatagtctggttaaaaagacagtttctgctcttcagaaagtatctcattcgtgactgagcatcagctataggaaggtgaactttaacaaaggagctaagctatgccagaggtgtgccaaggtgatgtgagacagggaatgctagcatgcacttggaggcagtgatctgctaagcccactgggagctgaaaacacaggggactgcctaagcacagccatctgagtagcacacggtggcatgtggggtgccctggctaggcgccctattgctaggtactcctaaaaagaatgagcaagactggcggtggggtggggaga

SEQ ID NO: 801488 - DNA, 504 bp, Homo sapiens
ctcttatctcataactcattagtggttctgtttctgtgattgaaccttgactaatgcaacaagtataaccttttaaataaaacataaacttatgaaaataatgtcaatgaaatatatttttttggttacaaggaaaagaatatccaaaccaaactgatttttttttaagtgaagtaggggcatttattggctcatggaacttagtaaaaggrcaacaataattctgagcacagcttgatctaagagctcaaaccgtgtcagcaggaccatgtctcctcatccagattctgcttccttctgtgttggttccaatcccaggaagccactcctatcatgcggacagaagagagaataaaatggccaccagcagcctcagacttacattctttacttctcaacgaaagcagaaatgaagagcttctcgcctataacaggttgaacaaaagtcctggaccttgattccattggtccaaattaggtcaaatgcctatctgtaaatcaatg

SEQ ID NO: 801489 - DNA, 504 bp, Homo sapiens
ctcttatctcataactcattagtggttctgtttctgtgattgaaccttgactaatgcaacaagtataaccttttaaataaaacataaacttatgaaaataatgtcaatgaaatatatttttttggttacaaggaaaagaatatccaaaccaaactgatttttttttaagtgaagtaggggcatttattggctcatggaacttagtaaaaggacaacaataattctgagcacagcttgatctaagagctcaaaccrtgtcagcaggaccatgtctcctcatccagattctgcttccttctgtgttggttccaatcccaggaagccactcctatcatgcggacagaagagagaataaaatggccaccagcagcctcagacttacattctttacttctcaacgaaagcagaaatgaagagcttctcgcctataacaggttgaacaaaagtcctggaccttgattccattggtccaaattaggtcaaatgcctatctgtaaatcaatg

SEQ ID NO: 801490 - DNA, 504 bp, Homo sapiens
ctcttatctcataactcattagtggttctgtttctgtgattgaaccttgactaatgcaacaagtataaccttttaaataaaacataaacttatgaaaataatgtcaatgaaatatatttttttggttacaaggaaaagaatatccaaaccaaactgatttttttttaagtgaagtaggggcatttattggctcatggaacttagtaaaaggacaacaataattctgagcacagcttgatctaagagctcaaaccgtgtcagcaggaccatgtctcctcatccagattctgcttccttctgtgttggttccaatcccaggaagccactcctatcatgsggacagaagagagaataaaatggccaccagcagcctcagacttacattctttacttctcaacgaaagcagaaatgaagagcttctcgcctataacaggttgaacaaaagtcctggaccttgattccattggtccaaattaggtcaaatgcctatctgtaaatcaatg

SEQ ID NO: 801491 - DNA, 622 bp, Homo sapiens
attaacacaggagggagtagagaatatgcgtgccactcctcattgttgtaactccttagacagccctttgttatttgatacttccctctgccttacaatcagacatgagttttacctacacagtagaaaaactttcttcgtttttgcacaccagcatgggctgtcttgttagatcatttgctaataatcctaacactctgtactctataacattatgtgacactacaatatttcatctattattttgtaacactacctatgtgacttagatcgtctaacctccatgagtaagaaaaatattttttaatayatatacatgacatatggcacagcacacactgttgtctggctaaccagcatccatcccctcaaccctccttccgaaaacaattacaatgttgcttccttatccaccctttcccgtgggtccaggtgattcaggggaggttggggctactacaaggcaaagcctcgaagccaaacttgacaattctgttcctctgcctggggttggtttaagccagtaatgtgatgcaactctgacgggaaaggagattgctgctggattgggggcatctgggagagtccccctctccctcttttcaagactcacagaaataga

SEQ ID NO: 801492 - DNA, 619 bp, Homo sapiens
atcacagtaccaccagctttcagttaaaacagagcctagctagaagtccctgaaatggagtaatccccaaattcccactaaagtatctttgaaagcaaaaacaaagacaatacacaatagcactgaaaactagaatcaactttatggaggaattttcattagttattaggccaatggatctgggttgagaaacacaggttttttcttctaattggtttagccataagaaatggaaaatttatctgcctaaaatgaggccaaaaagccattagtcctccagatattactttctagttcataaaacaaaatatttatttacctgaaaactgggtaactgttcttctgcctcaaagcagcgcttattgaggtagccccagtgagtacttgtctttctttgmatattggggaaacaaaatttgcaacaaaaaattgggctgcaaatgaaggccccagagatgggtgttgtacacttgctggcaccatccccaggcagaaggactgtcagtggaagtggaagccaaaatatctctagtgacacatggtgtatggtcttgtcaaattaagtctgatatggaaagggaagaaactatcttcatgagatagatatacatattcggtg

SEQ ID NO: 801493 - DNA, 615 bp, Homo sapiens
ctttgaaatcatgtattctgttttgttatgtggagcagaaaaatgtaaatgaaacagtgtccttgtcaaataatgtccctgactccatgaagcaggtcatgaattataggcagctatgctgtttgcctacacctgaatgaaaccatccagagcttttagtgcagaaaaatccttggttccttacataatacacactgatttgataagattmttttggatattgtaaaggctatattcaaaacagcaaaatagttttttgccaagaaaatatctgactggaaaaaaatcatgataatctttcagaggctgagccataattctaattttcctcctttgttaaagaaagcagcttcacacattactggggtttgtttcttccaatagcatcacaccctagtatcaaagactgctaatatccctaaaaaaaaatcctcatatcgatctcactgaaaatctttaatatgaacaaatacaaggcttctactacacagaagttcattgatatttaagaggatatagtgtaaagaggcaacagaactggatttctatcccaaattgctcatttactagttgggcgatcttgaacaacttctgtaactcctctgagtctagagt

SEQ ID NO: 801494 - DNA, 531 bp, Homo sapiens
tttcagtgaatcttcagagggtgaaggggaaattttccctttgccccaactatttgacactgtgaacaagatgatcaaagctctgctcttccggaagcctcagtgaagagaatccaggacccagtaagttagcataagggtaggaatttcttaccagacaggctctcaccctctctatgtaatccagctgagaggatggtgaaaatcacctttcctctgcaaaattttgattaatgagagaaaaaaaattgtgtaactagtcggtgtagcgattctgaygtactttgtggtactttgcaacgttactatttgtattgtttgatccttttcctcccagaaatactcattgtatttgtttttccgtgttgttctgtcataaagagaggtaccaaatgaggctctctctcattgtattttacattttgagagcttgacttgtgaccttgtgggagcactctctcttgatcttgccatccaagcagtgtcattttcaggtcacgttaggtggccagtctgagaatggcccagaaa

SEQ ID NO: 801495 - DNA, 650 bp, Homo sapiens
ttgtttcctcatttatagaacagggataataatggtatctcctcatatggctcttgtaaggctcgaatgagttaattcctatacagagcttagaacactgagcagcccagattcaagaggagggaaaatagattctatctcttaatgggggaagtggcaaagtcacattgcaaaagagcaggtgggatggccatctttggaaacacaatctgccacagcaagaacatataagaaatgtatagcagtggttaccagcaggagtgggtgaacagagtgtgagatgggtaaaaggaagatagaggaagaaatatgtaactttttgtatacttaaaaaaaattttttttgagctaacctaaaaaacctgttttaaataagccattttttaaaagtacaacaaatgctgattaaatggacaygtttttccttgagttcattggcttcattttttatgctccctaatctccatccccagagaaaacctcacttcaccttcaagtttacatgtctaatactataactaaaattccaccaagatattcttgtatggttggcccactcttttggaattacatcatagttcaattatcaatatcacagtgtatcttcatcctaatatacctggcacatttcctatatgttataagttgag

SEQ ID NO: 801496 - DNA, 632 bp, Homo sapiens
tatttggtagcactacagtccaaagccaaaagtactttgtcaaagtgacagatttaggtctaagatatgtaccttgaggaattgatattgtaactttcttctttatgcatgattttggagatggaagtagcatagctaggacatacggttttatttatattgtttagtggctaaggaaggttaacatgaaatcttgttcaatttattttttgtatttgcatagtaacgtaattatcarttctccttcagtatgcatgcaatgcattgattcataattaattgattcccctttccacaatatcatcttccagtgctttcagaggatagaaatgtccactaatgcttaaggtgttctacttttttttccttcattttacggttacttccccatcagcatttcacctttttctagcacttttatccaaatcatagattttctatcactgtcaatatttgtattagtctgttctcacactgctaataaagacatacccgagactggtaatttataaaggaaagaggtttaatgaacccacagttacacgtagctggggaggcctgacaattatgggggaaggtgaaggggaagcaagacacgtcttacatggtagcaagcaagagagcttgtgcag

SEQ ID NO: 801497 - DNA, 627 bp, Homo sapiens
ctgtgaaacccacgaatttgaaagtcaccccttgtacacgggtttcacatctctcaagtactgtatctgtgtgtggttgaaaaaaatctatgtatgcatgggcctgcacagttcagactcgtgttgttcaagggtcaattgtgctttactcttcaaaacaatattcttgactggcatagtactttgtggagtccagtaaaatacttgctttcaggagaaagtggtgaatttggcaaaatacttatttaacacatagtttttttaaacttaccttatcagagacattaaaaygaatgtaagccccaagaaacctaggaaataagatagagaaataaaaaatgaacgctcctttctagtttagcccgaccacgaagaaatacacattatatttgcaagcttgtctactcaagccatgttttgattacatacatttgttttttactgaactttagaataataacaaaaatatcttttttacatttttgcattcctatcccatcttgctcctttttgtctgaatcttattctttgatttttttaaagtatatttcctagttcttcttcctttccatttttccctttaatgttaggttatgttttgttttctttttaattggtgaatgatac

SEQ ID NO: 801498 - DNA, 635 bp, Homo sapiens
cattattcctccagggagggggtagagggaacctacccctccgtgaatgttacctgagcagtgagaagaatgagggaagaatacttggatctggataaaggctgcaaaagaggaaacaatatcaggggaccagagagaggggatgcaacgttagttactgatttttcttgaaccttggggattatgggagagtcctggagtttgaagtcttcttgaaaggaaactggggagggctgatgtattcaggaggcagcattcctatggacggtgatatgaacagtgccctctgagtttgtatagtacacaacctgcacagtcattcgtggctaccctgttaggggtctcaaattagcgtactcaaaatctctagcrttgtcccaaatccatttctttctgagccctgtggctttggactttggtttccagggaaaggaagtctttcttcttcagagctcttatgagactagtgggctctagatcaccctggaaaatcagacccacaaagtttgggttagaataatcaagctgataaacacagctttggtttcttaatctgaaaaatggaataagtgatgcctactttgcatgtttgttgcaaagccaaaatgatgtattcatagcccttagcacagaac

SEQ ID NO: 801499 - DNA, 635 bp, Homo sapiens
cattattcctccagggagggggtagagggaacctacccctccgtgaatgttacctgagcagtgagaagaatgagggaagaatacttggatctggataaaggctgcaaaagaggaaacaatatcaggggaccagagagaggggatgcaacgttagttactgatttttcttgaaccttggggattatgggagagtcctggagtttgaagtcttcttgaaaggaaactggggagggctgatgtattcaggaggcagcattcctatggacggtgatatgaacagtgccctctgagtttgtatagtacacaacctgcacagtcattcgtggctaccctgttaggggtctcaaattagcgtactcaaaatctctagcgttgtcccaaatccatttctttctgagccctgtggctttggactttggtttccagggaaaggaagtctttcttcttcagagctcttatgagactrgtgggctctagatcaccctggaaaatcagacccacaaagtttgggttagaataatcaagctgataaacacagctttggtttcttaatctgaaaaatggaataagtgatgcctactttgcatgtttgttgcaaagccaaaatgatgtattcatagcccttagcacagaac

SEQ ID NO: 801500 - DNA, 643 bp, Homo sapiens
gctgtgtgtgtttttaaagaaagtttttgagacatgtccaagaaggtaaatttggaaggtaggtgtgagaaaaatagagaacccaggattaccttattcagagtaaaggaacgaagaaagaaaaaataatcccactagaaaaataataagggctcttgcaaaccaataagaaaaacgagtataccaattgacaaataagccatggacatgagctgccaactcataaaagaagaaccagaaatggccaagcaacatgggagaaaatgcccagctgaataaaaaagcaaagaaacaaataaaaatrtatgatctcacttttgcctttaagattggcaaaaaatagataaagattggtgaggcagacaatgtcaattgcctacccatcagtgtccttccttgccaacaaagccctaaatttggttatccaggctttttcagtttgctttgtttttctaggtaccagcctagccccagcccagtagggaagaatcttgattagtctgaaccaaagttggtgattctattctgcttatcagtgattgacttgagaaagcgcatatgttccaattctggctaagatatgtaagagaatgcctccatggagaaagatgaagaaagtttgaagaacagttcttaggtttta

SEQ ID NO: 801501 - DNA, 627 bp, Homo sapiens
agatgttcttgtagtccagccacaggatgttctcgtcacactttttcatgtaggtgttatccagcatgattttgagagtggctcccatcttcagccccacctccatggtgctgctgcccttgatgagcccagttcggatctcaggtcctttagtatccagagccaaagcaacaggccggtagaggatggggtcagcagcaaagctttccgtggctgtgcacatgttcttgatggtctccacgtggtactcatgagttccatgagagaagttcagacaagccacattcgttccagacttaatcatctccttcaacatctccaccgattgggaagctgggctaatggtacagatgatgccagtgttccaggctgggatgggtggtgtgtgaatgtccaggtggcacatgtgctccaggaatgtgtsagccgtggctgcatgtagctgctgggtctgaatgaaggcagtcccggcttcactatggggcttcaacatggctgctgaggtcctccagtgctgaccgatttgggctacactgcaaacgcaaagaggtcaggagccccaggatgtgcagctgctgtgccccaggagagttttaaatgcagagcatctagttgtcctctcccagt

SEQ ID NO: 801502 - DNA, 541 bp, Homo sapiens
ttctcctgcctcagcctcccgagtagctgggactacaggtgcccaccaccacgcccagctaatttttcgtatttttagtagagacggggtttcactctgttagccaggacggtctagacctcctgacctcgtgatctgcctgcctcagcctcccaaagttctgggattacaggcgtgagccaccgcgcccggccagtaaagtctacttyaaaaataaatctggccacagtcctgaagggaacgctggctaggtatttatagcaggcttctttcctttagtaggactttgcctcctaagcatcatgagtctttgagagacgttattttgcttttagaagctcccagcctaccctgtcaccttctcacaccacatcagaatttagttaacggtggaaaaaccggctgtgtgcttgaattctccatgcaaatgcctggtttatctttccccaggatattccctctacctgggctgagaccaggccttagcccatgctcagccttagcaaatgcacctagggaagaaaatgatggaaaataatta

SEQ ID NO: 801503 - DNA, 641 bp, Homo sapiens
ttcaccatatattagtttctacatctcagtgtcatcttttggtacctatgcaaccatttggagaaatatttgagtaaaaatcattgagatggcacttaagtttttggggctcaattttgttatcataaaaaatacagggaacaatttctgagaattarattagactatataaaatacttagcaagtgctagttttatagtgagccctcaacaaataatagccattgttattgttgatatcccacatctgccatgagattgctgtgcaaccttgggtaagtcacttagatgctgccatagtgcctgcaggacccataaaagacatctaacaaatcattatagaacgactgattgaatgaatgaatgaatgagtgaatgaacctccatgtacttccatttctgttttgtagagtgatggagttagattaaaaaatggtagtgacaaaatatttatgacatgccatatacaagccctcttaaatgtgtgatctgttttaatcagcacgtgagcatttactcatctaactccttatcctacagatgaggaatttgaggctcagaaatggaagaggatctgcccaaggttatagagcaagtcattttgtgctattattcttcatcctaaagtaactgtgagcatga

SEQ ID NO: 801504 - DNA, 642 bp, Homo sapiens
gggaaggggtgaagcctgagagccctgtttgctttctcaatagggaggcttgtaccctggggcaagatctcacccctgcatgcgggctgcttggatataaactcagtgcggttggtgggagcatggtgggagtgagactggccctgctggctgcatgggagctaggtaaggcctgtcactgctggctttcccccacttacctggcaacctgtatgatgcagcagaggtggccataatcccctgggaacataactccattgctctgagaaccactcccctacccccaacagtggccatagcaagccccacccatggggagtctgatctcagactcacccaaccctgcccccacctgatggtttttgtctacccaccctggtagcygaagacaaaagacataaactcttgggagctcaatggccccacccatcgcttgagaaacctgagaacttatcctggccaatatagaactagcctatatctcccttctactatcacagctggtgctctcttaaaagtgccacctcctggttggaggccatcaactcaagccatcacagtaacacataacagaacgacccggctctaaaggagaaaacaacagctaattccactgcctgcaacaccctagctaaccagagg

SEQ ID NO: 801505 - DNA, 381 bp, Homo sapiens
cttcacagtgctgcccactgcagctttgaactcctgggcttaggctgtcctctcagcctcctgagtagctaagactgcaggtgtatgccactacatacgtccaattttttatttttttgtagagatgggctattgctatgttgcccaggctagtctagaagttctgggctcaagtgatcctcctgcctcagcctcccaaaacactgggattacaggtgtgaggcactgtayccagcctgctttccattttcttagtgagtagcgtctttgacatgaagttaaagccaggtactatgagtgctcacctgatttttggttcttacgaaagtgctttttttctgtagacagttgttaaattggtttccttgcaggggcgatgac

SEQ ID NO: 801506 - DNA, 607 bp, Homo sapiens
aaaaacaaatgagtccgggcgcactggctcatgcctgtaatcctaacacattgagagggtgaggcaggtggattgcctgagctcagtagttccagaccagtctgggcaacacagtgaaaccccatctctactaaaatacaaaaaattagctaggcgtggtggcgtgcgcctgtagtcccagctactcgggaggctgaggcaggagaattgcttgaacccgggaggtggaggttgcagtgagctaagattgcgccactgcactccagcctgggcgacagagtgagaccccatctcaaaaaaaaaaaaaaaaagaaagaaagaaagaaaaaacaaataacctggatccctgtcaccctcccccacacctccsccttgttagccacattcatcaaccatcgcaaacacacataaccacattgcaggctcaaatggagccattctattattatacatatgctataggggaggaaaagctttatctctctatccttctagggtctcccactggggccctgaaaattaagctaataaaagacagattaacaagagaggccagacatgatggctcatgcttgtaatcccaacactttaggaagccaagcgggcc

SEQ ID NO: 801507 - DNA, 553 bp, Homo sapiens
gatccaattttatcccgaaaccatccctccacccccggtctgtggaaaatttgtcttccacaaaactgatccctggtaccaacaaggttggggactgctgctttaactcatctggggtctactctgtcaatggctactaattgaaagaaaaaattttgagacagggtctyactctgtcacccaggctggagtgcagtggcatgatcatggttcactgcagtcttgaactcctgggctcaagcagtcctcatgcctcagccccctgagtagctaggactagaggcactaccaccatgcccaactgattttttactttttttgttgaaatgggatgtccctatgttgcccaggcttgtctggaacttctggcctcaagcaatcctctcaccttagtctcacaaagttctgggattacaagtgtgagccaccatacctggccttgaaattttcacgttctataaattcttggtgtgacttcctctctccacactcatgttttcatgcttgtttatatgggtacaggagagagattaaattatagcagaaattttag

SEQ ID NO: 801508 - DNA, 626 bp, Homo sapiens
atgctgccctttcggagcttatattctagatattgtatcctccagaaacatgcaatttggaagaacatgtgcacaaaaaactagagtacagagaagcagaagataaaaagccatctgagcatcaaaagcaagaaaatgctataggatttcaaaggacgtgcagagtgtttttggtataataaattcaggaaaatattcactgagagagaagcccttgaggtgaagtttggagggcaggtgaaatgaggatgtaagcaagaaagaaaaagagagattaagggttcgataggctgtcagttccctgaggtagagtttgttttgttttatttatctcttttaataagggcctagaatagatactggcatatagtcagtgctcattatttattgaattagcaatagatcactccaagcatagacatactatgaatgacaccctgaaggaggcaaragaaaggtttgtctatggagctattatgggaagagcaggttgtctaatgttcataacctaaagccaaacagaactatttttgtggtagagaaactatttcaactaatccttctgttttctgataatttaagcaggactcagcctagaaactgctttgcattcaacccatggtgca

SEQ ID NO: 801509 - DNA, 641 bp, Homo sapiens
ttaagacatctgatatctgggaacagacttaaaaaaaaagttctcctctcaaagcttgtagtctcctctagattctcctaaaagatatatctctaattacatgaaatgtcagaaaagtcccaaatatatctgcaaaatataggtaaacaattagtttaccatgtagaccatgagttccattccaaggatatttaaacatacaaatattattactggcttctcttggccaggcgtggtagcctgtaattccttcaattatggcactttgggaggctggggcaggcagatcacttgaggtcaggagttcgagaccagcctggtgaacatggcaaaaccctgtctctactaaaaatacaataattagtcgggcatggtggcacacgcctgtaggcccagctgaggcacaagaattgctcgaacatgggatgtggaggttgcagtgagcygagatcgcaccactgcacttagcccaggcaacaaagtgagatcctgtctcaaataaataaataaataaataaataaaaatgttactactgcttctcttaagatatatctttacttgatgatcaatgacatgaggacagagaaatataagagcaataattaaagagtgagggcctaaagaatttcactcatgactc

SEQ ID NO: 801510 - DNA, 588 bp, Homo sapiens
aaagtgttcccttttcaccacatccatgccaactctattactttttaattttttgattatggccattcttgcatgagtacagtggtattgtgtgtggttttgatttggatttccctgataattagtgaggttgtgaattttttcataggtttttggccatttatatatcttcttttgagaattgtctattcttgtccttagcccactttttgatgagattgtttgtttccttcttgctgatttgagtttcttgtaaattctatctattagtcttttgtcagatgcttagtttgtgaagattttctcccaktctgtgggttgtctgtttactctgcagattatttcttttgctgtgcagaagctttttcatttaattgagtcccatctatttatttttgtttttgttgcattgtttttgggttgttggtcatgaagtctttgcctaagccaatgtctaaaatggtttttctgatgttatcttctagaatttctatggtctcaggtcttatatttcagtctttgatccatcttgaattgatttttatataaagtgagagaggaggattcagttttattcttctagatgtg

SEQ ID NO: 801511 - DNA, 588 bp, Homo sapiens
aaagtgttcccttttcaccacatccatgccaactctattactttttaattttttgattatggccattcttgcatgagtacagtggtattgtgtgtggttttgatttggatttccctgataattagtgaggttgtgaattttttcataggtttttggccatttatatatcttcttttgagaattgtctattcttgtccttagcccactttttgatgagattgtttgtttccttcttgctgatttgagtttcttgtaaattctatctattagtcttttgtcagatgcttagtttgtgaagattttctcccagtctgtgggttgtctgtttactctgcagattatttcttttgctgtgcagaagctttttcatttaattgagtcccatctatttatttttgtttttgttgcattgtttttgggttgttggtcaygaagtctttgcctaagccaatgtctaaaatggtttttctgatgttatcttctagaatttctatggtctcaggtcttatatttcagtctttgatccatcttgaattgatttttatataaagtgagagaggaggattcagttttattcttctagatgtg

SEQ ID NO: 801512 - DNA, 473 bp, Homo sapiens
ggcaacagcgtcggggagaaatagtttccattgtgcagtatctggaattggaattggccagaaggctcttgctcgctgctttcgatacctaataggcagaatctcaaatgttattaatctaagtgaaccgtgcgagacacagggatagagtggtgaatagagttatttgattttaagaaagaaaatcaggcaaagaacattctgtgtttgtaatgtcctggatccctgtgacaggccgttagattagaaataagtctgtggtatgtggtgcaggatttaatgaaactacaagataaattgagaagctaaggccaaggtgaaaacatagaattcctractcactctctgcttggagcctcctgtgcccttggggattggtgaaatgagcattcttgatggcagaaaaggaaaacatctgatgcaattaccagtcagtgctggggctgcccacatgctagagggtcgattctgaa

SEQ ID NO: 801513 - DNA, 610 bp, Homo sapiens
atggcttggcttactgctatttcttttcagacaaatgtagtgtttatatcttgagtctagtttaaaatatttgtagtatttaaaaaatgcttgaaggttgcaacttttttttgtcagaacactggaaagttgttacaatcaacattgatgcacacccttcgtcttcccccttcacaagttttttggttttttaaaaacttgcataacagaaatttggcatctttctaggattgcaaagaagttacatcattactgaaatctagcccattattaaggttgtcactcacaaataagcttttgccaaagaaattggaattagcaaagatcttttgacagaaattggattgttgtgtttcatgttagtctaaattttcttccatttttgtcagttatgctataatctgttcccctgattaccgtagttcagagtggagggaaaaarcgtaacttctcaaattcatagcttagtgcagtgatcacttttattttttaaggaaagcagtgtagtttttttgtggcaagtatactttgaagtggaaatagggacaaaaagctttattataaaatcctattgtacattttaaaaaatgattttatctgtttttatatt

SEQ ID NO: 801514 - DNA, 643 bp, Homo sapiens
cttttcactgaattcagaaatagtattataattttgatggaggcaaatttctatttttattatttcttttccaaaggcataagagtatgtgatgttttgactttgagttttgctcttctttaaaaaaatttcactttgctgttattacaatttatcctagatccttagctctgttcagtgaaatgacttttcagtgacctgtgatctccagtctgtctgtgaaataattaatttcagtaaaatcttgcttttgtagctcagggttttcccagtcaggactcctgtgaacttaaaaaaaaaaaatcatccataaagattgttattttctggaaataatttaaatcttgccagtgacttaagaagactccaaatatcagcaacagccrcttcattttgtcttgtcttgaaggccaccagagggcacttgggagggcctccaaactgcaggaaccagcgcagtggtggttgactgggagagttctagtgcctcttccgaagttaaaggcaatgcttcagacagtttcatttcttggagatttattttgcattaaaaataaattggctcattgttacttcatttttacctcaggccaacaatgataataccgtttttttctttcaaaggttatatttttaaatatcc

SEQ ID NO: 801515 - DNA, 583 bp, Homo sapiens
ttattttatgctcaacagccctgaataccattaatgcttttaaagtcacaattgcgtttctctgacagctaagcattataaggagattgaggatgaacaagatgggaaaaacccaaaatgattattttaaaaatggggataatttagcagtccttaatacatgctagtatttctctttctagggacagcattttaataatggcctcagtctccccttctgtacaacgagaagcaggagagagagtcatcacagttctttccattctggtgggctacagttctggatctttctcaagtatccataggaatgtgagcttcttttctgccctgcgctgattctttttgtcaagggagaacttgtttgagagtcgattatatgtttttttgaactcaacagttctctggcttaactctgacaaagscctaagctttggatagcaattagagtaaataatatttgtagagctcattgtaattttcaagtcaactccatgtgcctcagctttgaacttcaaaatactcctgagggaaggttggcattacccttacacccattttcaagaggaacatgaagctcagcagg

SEQ ID NO: 801516 - DNA, 630 bp, Homo sapiens
aatgtttatggatgatttgaacttcctatggtaagtacttctgatgctctaaatgagttaaccagagagaacaaacattttcttcaaaccatttaacttggcaatagttaactcattaaggataataacaatgacattcttcaggtttgtgtttttttttttttaaaaaaagatagtcctattctgaacatttcattaatcaaaaacaagaccaaaccccccccccccccaaaaaaaaaaaaaaaacccacgaaacttcaaaaggtgaaaatactgactaggttctaaggatatggtaggaaatgrttgcttagggctatgtacctaaaatgaacttctgttctgaaagcccaacaaaaactgtgtggtacatgtatctatctacatatattttctcacgtcatgtctactctgctaattcctaggatagttaatgcaaacatttggtaagctcttattttgttatgcatgtaaaatttaaaagcatgaagctctagtaacattaaaaaatagttgcagtctaaggtggatagaaagatgatgtatggaaaaatgggacaagagtaatatggaatacgcttagaatttcatgcaatacactttaatacatagtatactttgggaacaatt

SEQ ID NO: 801517 - DNA, 626 bp, Homo sapiens
tgggctcgagggatccttctgcttcagccccccaaagtgctaggattacaagtgtgagccaccaggcctggtcagattttgttttttagagcagttttaagctcacggcaaagttaagcagaagagccagagatttcccatttactccctgcccctacatacatacctgtgtatatacagcctcccccactatccaaacccaaagatgtctcattttgatatatcttttcttggattcttaagcttagtgttgaccagaaatacctcttattatgattcatgcatctgactgtctttgggaaaactaacatttattgaacacccactatatgtcaggtattttttttttttaacatcttttcatttacaaccctgaaaggtaggggtattagcaccattaaaaaaactaacaacagaaggaaatgaaacttaggttaaaatgatttaccwctagaatacagagatgaactacgtgaaactgtaaaaaaatgattgaatatctccatttttatatggttcaacctaatagaatgtaagagggctcatatttgaaccgaggccaatttagttcaaaagcctacactttgcattgtactgtactataccctaaaattactagaatagca

SEQ ID NO: 801518 - DNA, 553 bp, Homo sapiens
ggatcccttgaggccaggagttcaagaccggcctgggcaatacagcaagatcccatctacacaaaatatttaaaaattagctgggagtgttggcacaccccatgcattcttgtctgcatgcagtgcaatgtacaggccggcaggtggcacaattgaccacttgctggtctcccgttttggcgatgccatcttagggcatatcctctgcgggtggggcctggcattggcaccccaacctctgcctctggagtcagcctcagcctccaaggcagtgtgggcctgagggtctggcttccytgcagccagcctcacctgagttctcagatggttcgagccaggagcaaatctgacggagcgggtgtggtagcaggagccggtgctgagtgtgtggactgacccccggcgtctccccgactgtcccctcttccttcacttctgccaccaccacctagttgaagccaccgtcatctcccacctgaactgcttgccctggccctcttagcagcctcaccgtgtcccctcaggccacatttcctgacccacggccatcaac

SEQ ID NO: 801519 - DNA, 632 bp, Homo sapiens
tcgctcttttggtttggtttcgtttcgttggtttaacttttattttatttattttttaattaacaaataacaactgtacatattcacagagtatgtagtgatgcttctatacatataataaatggtgacagatcagggtaatcagcatgtccatatctcaaacakttatcatttctttgtgttgggaccattcaatatcctccttctagctatttgaagctatataatgtgtattgttagctaggtcatcctacagtggtattgaacaccaaaacttattcctcctagctagctataattttgtaccttttaacaaatgtctccccatccctcttttccccctaccttttccagcctctagtatatgctgttctactttttacttctttgagatagctttatttatttattaagcttccacatatgaataaacatgtggtgttcaactttctggtcctggcttacttgacttaacgtaatgtcctgtagctccatccatgttgctgggaatgacaggatttcattcttttttatggctgaatagtattccatagggcttgttcttaacagactatgtgaaggaggtgatcatccaggctttttggtcttataaaacttaatccggctgggca

SEQ ID NO: 801520 - DNA, 433 bp, Homo sapiens
ggtgtctttccttatagtccatcgttacaatactgcacagcccttgccccaacaaaccaggggtgctggccggccctgccaagacagcaatctgctgacccggcttccaaagcagcaggtcggtccagctctcagcctgtgggatcctaggtgggagtcaggcctttctccccaattataggggtcatatatgaagctctttgggggccaaggaagcaggcaatcttccttgcctcagggaatagaggggatgggcccatagcacagcattctccasataaatcctcctcatagaatcctctctccttgccaccctcttggcactgtttttttttgttttgttttgtttttttgagacagagtctcacttcatcatgcaggctggagtgctgtggtttgatctcagctcactgcaacctctgcctcctgggtt

SEQ ID NO: 801521 - DNA, 614 bp, Homo sapiens
ttccctggaatatttgtgcagtgattgctccctacttgagagccccgtagggagcctctgcagatgagctccctcctatgggatgtagggtggtctccactacgacctgacccctccgtggtcagtcacttccccaaatgtaatctatgttgcctggtaccagcttcagagcctgcctctagtaccaggttatgtgataccagtgcctgggtgtcacctagaaaaatgtcggcrtctgcagaacccacgactgaggctcatcccaggaaaaatcaccttgtgcccttttcctccctcccatcagaaacatttttgtcgtttggcaatcaggttacaataatcattacaagcagtcattaaggaaaaaaactcataggcgcgatggtagttgattgagacggggcgtgtgtgtgtgtgtgtgtgtgtgtgtgttagggagctgttggggaaggtggagattttatttttataatgaagagggtttggaattgattgtaaaggcatgaaccacaaacacccaccagctgtctccgaatatcccacgaatgggaaaggagagctttggacccttacgtgagaaagtcatttgcctctgttttttacagggcagaaag

SEQ ID NO: 801522 - DNA, 670 bp, Homo sapiens
aggatgtgcagaataattccttcaaaaatataacccagtttaaaaattgaaggtctttgtcctagggcatttcatctacctaggatttgggtgagataaaaatatttacaagttaaggtttcctaaaatttctactggaatgaatatgattaaaagctatttaacaggtcagctctgctaacagcaacagcctgaattctaaaatgatgttaaataaaactgctgcaggcattgattttatgagctttttcttcttctaagtatgaaaaaagagaacacttaaaaaatttcaaagaaccactaaaaagattaattcatctcagaatatttacacacatagaacacccacacacagacagtagkgctgtttaacacatcaagctctgactagaacagctaatacgtgctggacgtgattaaactttgagtttagctgccagctatgattggtcccaattaaggcagttacaatttttagtcactaaagctggcctcatcaagttaataccttattccacagtgccaaaattagatttaaagcctcaagaaactttagaaaaatttaaaaggaaataagaaagtataagaaataagagcatgcaaaatcattatgaaaaacagaacacttcaaaaaaccacacacagattcaacacaattctgccaccacct

SEQ ID NO: 801523 - DNA, 576 bp, Homo sapiens
tatatatcatatatatcatatatatcatgtatatatcatatatatcatgtatatcatgtatatcatgtatatatcatatatatcatgtatatcatgtatatatcatatatatcatatatatcatgtatatatcatatatatcatstatatatcatatatatcatctatatatcatatatatcatctatatatcatatatatcatatatatcatacagcctatcatgtttgcttgttttatttccaggataatttgaaaaaatcttataaaaactgatgcagaaaaaaataaaatagattgcctttaacaaagggactgaagtcagttaaatgtttctttcatcagtactctattaccagatgatggagaaatgtttgctgagtttcaagaaaataaaggttgcaaaatcagattcctatatctagcctatttgttatttaggtgtaaggtaaacaggaagatagtcttagatgtgcaagaatctgtacattaaaaaataccaaaattctattcaactaaaaagttgggaaggatgtgtgctaacaggtttaccattgatattctttgggtggaggg

SEQ ID NO: 801524 - DNA, 667 bp, Homo sapiens
ttatgaatgtctttgaaaatctttaaccacttgttacagataatgaatattttgccttttccaagtattttcctcagactggaaaacactcttcctgtcatttcatactatctctgattttgcaggaggagccctgaaacatgtgaccttttcttatgcagtttatctccaggaagaacagaaaactgattaaccacaatcagacattaaaaaaattccctggctcttgtggtctgaaacaggcacatttccttcacacgcttcaaggaaacaattgaatgtaactatttaaaacatactcccaagcttaatgagcaagaagcaactttgccagaccacaatgtctttaagagatcaatttggccaatgaakactagagaggatacacattcctgaaacagaaagcaattcagagatacttgtgatcatcagaacgtagcccaaagccatgccatttgcttgagggcagaaagcacattctaggacatcagtatcatactttcaagaattaaccctctgatttcccataaaataccagtttttagagccagaaagcactaataaaaataatttactaatctgggcactggaatattttcactaatagttcaaatttgagtttagctatatgtcatcaatttataagaataaaaatttatccaaaact

SEQ ID NO: 801525 - DNA, 667 bp, Homo sapiens
ttatgaatgtctttgaaaatctttaaccacttgttacagataatgaatattttgccttttccaagtattttcctcagactggaaaacactcttcctgtcatttcatactatctctgattttgcaggaggagccctgaaacatgtgaccttttcttatgcagtttatctccaggaagaacagaaaactgattaaccacaatcagacattaaaaaaattccctggctcttgtggtctgaaacaggcacatttccttcacacgcttcaaggaaacaattgaatgtaactatttaaaacatactcccaagcttaatgagcaagaagcaactttgccagaccacaatgtctttaagagatcaatttggccaatgaatactagagaggatacacattcctgaaacagaaagcaattcagagatacttgtgatcatcagaacgtagcccaaagccatgccatttgcttgrgggcagaaagcacattctaggacatcagtatcatactttcaagaattaaccctctgatttcccataaaataccagtttttagagccagaaagcactaataaaaataatttactaatctgggcactggaatattttcactaatagttcaaatttgagtttagctatatgtcatcaatttataagaataaaaatttatccaaaact

SEQ ID NO: 801526 - DNA, 514 bp, Homo sapiens
ttaatgccttgctatctaaatcagctcctgtagattctgtattatttaactgagccctgtaactgatacagtgcttaatttgtgttgaataaccactaatagtcatgaaataactgaaaaactgcacacaaatttttttttttttgagacagactcttactctgtcacccaggctggagtgcagcggcatggtcttggctcactgcaacctctgcctcctaggttcaagccaagcgattctcctgcctyagtctcccgagtagctgggactacaggtgcgcaccaccatgcctatttttttggtatttttagtagagacagggtttcaccatgttgcccaggctggtattgaactcctgacctcaagtgatccgcctgcctcatcctcccaaagtacagggattacaagtgtgagccaccatgccaggcctcaatttttaactatccactttagcaactgtctgataataaaacactgaattgtgacattttgagacatctccctctgcaaagc

SEQ ID NO: 801527 - DNA, 618 bp, Homo sapiens
tgcccacctcagcccacagattctttaaaagaacaaatttctctagtgcacctatatgattcaatttataacaataaaacacaaaggcaacttttcagacacagaatttgtgtgaagtgagatgtagttggaagaggaaatgatagtcattagagacagtggctataaaagtgttgcatggcaattaaatttttagaaaattctgcatccttttaatrttctattttattaagtttttgataagaagtatatttcactaattaacatgtttatgcaactagaatacagcttatatagcaccagcaaagtccttcgatctacatcacaattcaattgcttacatttctcaacttcacacaatttaacggaaatcttttgaaactgtgatgctgaaaattcagcaactttttgttagccaacaaaaaattaggtttctctattagtataaataattatgtaataattttcatgggcatattcacgctttttattggtataatgtggtatagttcttaatcaataagaaagaattatgtctaaattacagaaagaatctttgaagagtttgattaatcacagctacaaagaacacttttataaaaatactggtccagaaag

SEQ ID NO: 801528 - DNA, 640 bp, Homo sapiens
tattagaataaccccactgagaagaactggcaaaataatcacagatagaagagatataataagcatttagaacaacatcctcctctcatctgtaaaaggaagattacttttcctttctctaattctaatacagcaaagctagaggttatgaacatcatttcactaccatttgcacgctaaagacctaatgatggtggatgtatttttatcttctagacttctaaatttgatagaatattgacattggtctcacggggctattgaatgatttcctgggtcatgtctgaaatctagctaaatgtattatctctaaaggagttaatacaaggtcatcgaaattaagattgtaaatgtctaaactgatgaaatcagtactgaagaggccccaatatttccatagacaaaakagggaactaaagtgtctaaaatgttgaatatgtgtcatcgtcttatataacatgaatagagagcaaaataatcaaaattaagaagttgggaaattgggttatcagctatttcccaaaatcatatgtggagctgcattttgatatttcgctcaggtcagttttaacatttcagtgtgaagttctggtatatacataattgatgaactgaagtagagttcacaatgattttttgt

SEQ ID NO: 801529 - DNA, 539 bp, Homo sapiens
aaaaattgtttgtgtctcctaaggctatagtgtagagtggagataataactaatacataatacagaaaaggtactaagaaggataactggcacatgatacagtctgcctctgttctcagctaacagacacacagcaaatgtaaatgtgtggatacacaaacacacacatacatgcaacaagttgcatttgggtccttaaacttataaaataatacttagtgatatttttagatttctattaatgcatattacttacaaacaatattcatacccctatgagtaagtgggtagaaawgatcaaatgaatggaatagttatgcctgagatagggttgtgtgcaggagacctccgcttttctttttttattccagatgaaaagaaaacagtaatcacaggattggcaaaaattaaaaaaaaaaaagtaagaagacattattttaaatgaattaattgctggaaaaataagtgcagtatctacctttgatgcattgacaagttggttgaataagccctgagaaaactaaatgcaaggcaacctg

SEQ ID NO: 801530 - DNA, 580 bp, Homo sapiens
aaaaaccctatctatgatctagtatcagcaattcttctagatcttgaagcttgaattcaagcaggaagggagagaaaaacagtaaaaatgaatgataagatgtacagcaaatatatagtacttcagaaggtggtatgtgcaataaaggtgacagggactataggaagtaggaaagaaatattttgatatcagaggttttaaacaaggctagctgctgaacaagaatgaagacaaacaargctgatatgtataaagaaggtagagtatggcaaactaatttctatcattaaaggcctcccatcattcatacatattttttagtaattaaaacatactcaatgtaacctctttcatactacagataaaaagtattgcaattttaatttcgaatgtcagaaataaatttacagtaaatgcaatggtcattagaatgcatctctgtgataatacatagttgtattcttttttcctagaaataataactaatagacaaccttttaaaaataattttgtgctcatgctctgaaacttttttctgccataaccttgtctagttgataaatgttaacataaaataaac

SEQ ID NO: 801531 - DNA, 603 bp, Homo sapiens
atatgtgcatagaaaaactcgtaatgtgcatactcatgagaactttattcataagagccaaaactagaaatgatgtaaaatttgtatcaacaagggggtagataaataaaatgcgttatacccacaaatagaatagtagttagcaataaaaaagcaaaaatctaccagtgcataaaaagtatataaaacaaactcagaaatattatgaaaggagaaataaatcgggaacaaaggtatacatactgtatgacttcattcataggaaattctagaaatggaaaaatctaacttatgatgtcagagaaaagattgttgcttggtatgatgttaatgtgggggtgttgtttgtaaaggaacacagatgaactttggggaagatgcaagtattctagatcttgattttggtagtgcagttatccctcagtattcatgggggattgctttcaggacctcctgtgaataccaraatccaagaatgcttaattccctgatacaaaatgacattgtatttgtgtataacctatgcacatcttcctatataatttaaattatttctacaatgtaaatgctaggtaaataattcttgtaatgtatttcttttac

SEQ ID NO: 801532 - DNA, 633 bp, Homo sapiens
ctctgtttgtctgttattggtgtataagaatgcttgtgatttttgcacattgattttgtatcctgagactttgctgaagttgcttatcagattaaggagatcttgggctgagaggatggggttttagaaatatacagtcatgtcatctgcaaacaggaacaattagacttcctcttttcctaattgaataccctttatttctttctcctgcctgatagcccttgccagaacttccaacactatgttgaataggagtggtgagagagggcatccctgtyttgtgccacttttcaaaaggattgcttccagtttttgcccattcagtgcgatattggctgtgggtttgtcataaatagctcttattatttttagatttgtcccatcaatacctaatttattgagaggttttagcatgaagggctgttgaattttatcaaaggccttttctgcatttgagataatcatgtggtttttgtctttggttgagtttatatggtagattatgtttattgatttgtgtattttgaatcagccttgcatccccgcgatgaagcccagttgatcatggtggatatgctttttgatgtgctattggatttggtttgccagtattttattgaagatttttgcatc

SEQ ID NO: 801533 - DNA, 633 bp, Homo sapiens
ctctgtttgtctgttattggtgtataagaatgcttgtgatttttgcacattgattttgtatcctgagactttgctgaagttgcttatcagattaaggagatcttgggctgagaggatggggttttagaaatatacagtcatgtcatctgcaaacaggaacaattagacttcctcttttcctaattgaataccctttatttctttctcctgcctgatagcccttgccagaacttccaacactatgttgaataggagtggtgagagagggcatccctgtcttgtgccacttttcaaaaggattgcttccagtttttgcccattcagtgcgatattggctgtgggtttgtcataaatagctcttattatttttagatttgtcccatcaatacctaatttattgagaggttttagcatgaagggctgttgaattttatcaaaggccttttytgcatttgagataatcatgtggtttttgtctttggttgagtttatatggtagattatgtttattgatttgtgtattttgaatcagccttgcatccccgcgatgaagcccagttgatcatggtggatatgctttttgatgtgctattggatttggtttgccagtattttattgaagatttttgcatc

SEQ ID NO: 801534 - DNA, 585 bp, Homo sapiens
atatctttacggtctttgtaaaactttatcaaagtctcttgtgcctggtggaacggtatagctaccaaaggtttctaactgagctgaagacatttccaaaggttgcttactgaacttcagtttttgtcactgcagaataaygttactgctgaaaatgtcctggttttaattttatttatatttaattttggcttcttgcccatctggtcattatctatttagaatcgggaaaataccttatgggaaaaataccaaaataaggaactcacgtttatgtgccttgcttctctttggtatattggtctgtaagtactagattcttttatagccccgaactccaattgttgcctcccaagtcccataagtcttcaaaaacctcagctggcttgtcttttctttagcagcaactttctatgtcgattttccagaaacagacaactacccttaggcaaaatttctttactatttttttatttccttttctctgagatcttagccctttaagtctttgctcctccagcagttaaccaaggactttattatattttgatgtctatctatatattaatgtatattcaaatttaa

SEQ ID NO: 801535 - DNA, 585 bp, Homo sapiens
atatctttacggtctttgtaaaactttatcaaagtctcttgtgcctggtggaacggtatagctaccaaaggtttctaactgagctgaagacatttccaaaggttgcttactgaacttcagtttttgtcactgcagaataacgttactgctgaaaatgtcctggttttaattttatttatatttaattttggcttcktgcccatctggtcattatctatttagaatcgggaaaataccttatgggaaaaataccaaaataaggaactcacgtttatgtgccttgcttctctttggtatattggtctgtaagtactagattcttttatagccccgaactccaattgttgcctcccaagtcccataagtcttcaaaaacctcagctggcttgtcttttctttagcagcaactttctatgtcgattttccagaaacagacaactacccttaggcaaaatttctttactatttttttatttccttttctctgagatcttagccctttaagtctttgctcctccagcagttaaccaaggactttattatattttgatgtctatctatatattaatgtatattcaaatttaa

SEQ ID NO: 801536 - DNA, 585 bp, Homo sapiens
atatctttacggtctttgtaaaactttatcaaagtctcttgtgcctggtggaacggtatagctaccaaaggtttctaactgagctgaagacatttccaaaggttgcttactgaacttcagtttttgtcactgcagaataacgttactgctgaaaatgtcctggttttaattttatttatatttaattttggcttcttgcccatctggtcattatctatttagaatcgggaaaataccttatgggaaaaataccaaaataaggaactcacgtttatgtgccttgcttctctttggtatattggtctrtaagtactagattcttttatagccccgaactccaattgttgcctcccaagtcccataagtcttcaaaaacctcagctggcttgtcttttctttagcagcaactttctatgtcgattttccagaaacagacaactacccttaggcaaaatttctttactatttttttatttccttttctctgagatcttagccctttaagtctttgctcctccagcagttaaccaaggactttattatattttgatgtctatctatatattaatgtatattcaaatttaa

SEQ ID NO: 801537 - DNA, 631 bp, Homo sapiens
ttttcttcttctttaaatgcccttccttcgtttgttttcttgtatcatcctttgatatttatctcagaaattcaggcctcctgcaaaacccccaaactcactgtgtcaggcaaacagtgcatctcctatgctcttaaagttatcattgtattaatcactttattaaagtaattcttttagacaatatgttcttcaatgaaggtgtggtgtctatctcatctttgtatattcaaagcttaacatactcctgtggcaatcagtaatgtgagttgattaaaatgattcaaggagcataaaattataatatcagtagagacttcatagcttctggagtagaaattccctaaatgacaagtaagaacatttttaccaagcttttaagaatcttttagtattatagctaaaattaaytttagggttaccacatacaaggatggtaatgtattgcatattctacagagtcaggctttatgccttgggatatacacatggtatctcacccacttgaactgcacaggtcgtatgtggtggctcagattagctggacccaaatatgcttatacattgaagcaataactttttaagttatatattttattatggttacaaatttatagaaaaatagcaatct

SEQ ID NO: 801538 - DNA, 589 bp, Homo sapiens
actttatgtctgtcttcacaatgctttgttaatctatgaaagcagtaaatatcttagatctttcggatcagtatccctagggtaatgcttgatttcactttataaacatatgtgaaagataaagggtacataaggaaacagagaagggaaggaataatcaatgactcctttcatacagaggagcttgcctttcacttgtcagagtgttgcagtaaaaaagtcaaagttaccaaagtttttttttttctatagagcattctacatgtgtaattgtattttaatgcagtaatatattcatgaactgatggtgaaatactaacatataaaagatccargaaaactgaaaatgaaattgtttcagaaaaaaattgaactaatatatttcctctgttactgcccaagactaaggaaatacatttgaaagctgtaaataaataaatgtatttaattcttcttggaaaattgagaataacttaagtatttaaccagaagctagaactggaaaattcacattattgtaaggatgctatatacacctagtgtattacatctgttatgtaatttaacctgctgctttcaaaaacatgga

SEQ ID NO: 801539 - DNA, 618 bp, Homo sapiens
gcctggctaatttttgtatttttagtagagacggggtttcaccatgttggccaggctggcctcgaactcctgacttcaggtgatccgcccatctcggcctgttgttttgatttctatttctctaatgttagtgatgtrgagctttttccccatgttttattggctgcttgtatgtcttctttgagaagtgtctgttcatgtcctgtgcccagtttttaatggagttatttcttttttcctgttgatttgtttaaattccttatagatcctgggtattagatctttgtcagggtcatggtttgcaaatattttctcccattctgtgagttgtctgtttagtctgttgagatatctatctatctatctatctatctatctatctatctatctatataaaatttttttttctgtgcagaaagtcttttatttagttaggtcccacttgtcaatttttgctttggttgcaattgattttaaggaataagcaataaattcgttgccaagaccgatgttgagaagggtttatacaaatatagatatatgcaaggtaattcctcatctttgcccctaagattatttgtaattttatcacataaattttattttattttacttttt

SEQ ID NO: 801540 - DNA, 609 bp, Homo sapiens
ctttgtgcatgtgggcttttcacaaaatagatgggtcccggagcctgggcttcgctggcaggtggtcacctggagcagccagcagcagatggcaccacaggacaagcacaagctgtgtccaagagaatggctcaagaaatctgcccaaaatccaacacaaaaatgaacaaaggaactgaatgggagatgtgaccaaaagaagcgataagacaaacagctccaggargggagctgctggctcaaagagcacttgtcttgggcgtcagttccaccggttcttggtcaggggtgagagccctatgccagaccccctttgcagaacctatgctggcttatgatgaggctcttccagggctctagcacatgaataccctgccctgggaggctatagtaggccagccactgtccactctgctggagggtcagtctgagccaacagaaccatgcggagacattccatccaatgcagcccaggagcagtcttgacatttctttccctgtaaggacagcctgtctggtccacacatagatgaagccttgggcctggttcagcatccagaggactaggccataacccccaaggtaagatattcacactcattggagccc

SEQ ID NO: 801541 - DNA, 609 bp, Homo sapiens
ctttgtgcatgtgggcttttcacaaaatagatgggtcccggagcctgggcttcgctggcaggtggtcacctggagcagccagcagcagatggcaccacaggacaagcacaagctgtgtccaagagaatggctcaagaaatctgcccaaaatccaacacaaaaatgaacaaaggaactgaatgggagatgtgaccaaaagaagcgataagacaaacagctccaggaagggagctgctggctcaaagagcacttgtcttgggcgtcagttccaccggttcttggtcaggggtgagagccctatgccagaccccctttgcagaacctatgctggcttatgatgaggctcttccagggctcyagcacatgaataccctgccctgggaggctatagtaggccagccactgtccactctgctggagggtcagtctgagccaacagaaccatgcggagacattccatccaatgcagcccaggagcagtcttgacatttctttccctgtaaggacagcctgtctggtccacacatagatgaagccttgggcctggttcagcatccagaggactaggccataacccccaaggtaagatattcacactcattggagccc

SEQ ID NO: 801542 - DNA, 619 bp, Homo sapiens
ctaagcaaaattaatcccattttaactagaatgactgactatgccttcacctctgtagattactttcttgagttttttttagcattttctgaatccaatttttagttagtgtctgaagttgatttagataagcatattaacagctgaaacttttatccaacaatcattcaacaatgatttggtgtcagacacagtgtattgatgttaaagtatgtgagcaaaacaaacaagttcctactctcatgaagctaatgagagagacaacataatatgcacacaagtagatattggatgtagtactaygaagcgtagtgatcataagagtatattggaggtaatacacgtagtacccattgtaatggagtaggagtagaggagaaggcagttggtaagattctcctgaggaaggctgatgcagagctaactagccaaagagggatgggaaagaaatagctatggaatcatatcccatatttacatttcccacagatattttatgccatgagtttcactttgttgtgtgtttgctaaccatgcctacttcattattattactaatttacttgggctgatcatagtattcgggactttttcatccattatcttaattctatttgat

SEQ ID NO: 801543 - DNA, 619 bp, Homo sapiens
ctaagcaaaattaatcccattttaactagaatgactgactatgccttcacctctgtagattactttcttgagttttttttagcattttctgaatccaatttttagttagtgtctgaagttgatttagataagcatattaacagctgaaacttttatccaacaatcattcaacaatgatttggtgtcagacacagtgtattgatgttaaagtatgtgagcaaaacaaacaagttcctactctcatgaagctaatgagagagacaacataatatgcacacaagtagatattggatgtagtactatgaagcgtagtgatcataagagtatattggaggtaatacacgtagtacccattgtaatggagtaggagtagaggagaaggcagttggtaagattctcctgaggaaggctgatgcagagctaactagccaaagagggatgggaaagaaatagctatggaatcatatcccatattyacatttcccacagatattttatgccatgagtttcactttgttgtgtgtttgctaaccatgcctacttcattattattactaatttacttgggctgatcatagtattcgggactttttcatccattatcttaattctatttgat

SEQ ID NO: 801544 - DNA, 611 bp, Homo sapiens
ttaggagggactggtggacaaggcagcgtgtggatcagatgtgccctgctcctgcaggaaaggcagccttgctctcttctggccgaacagtcagcaggagctacagtcactcagagcaagatagagagccttctgggataaatgcctgaagtcacgtttagttgctgctgcaccacgtgccaccttgaaaccttcagggttctatgcaggttcaatctctgcctctgtctggtctctaagaagttcctcctgccaattcaaatgtctgtgggggtaatgggatctcttgtctctaggatcccagagggttgtatttggggtgtggtgccttggagttcctttactcaccccttccttaggacctgttgagggccaggagctggtcttggtgctcggtgactccatgcaggcttcccagtttcctccctctttagccacaatgtctgtcacctccctatcratttttggtgttttctctcaaaatattttttcaaagtataatggtttactctacattttggtttctgttagtgagggaggcctttcccagctgcatctagtcagccatcttctagatctttttcttgattctgacactttgacctaattta

SEQ ID NO: 801545 - DNA, 571 bp, Homo sapiens
ggttttaatgtatatcttcctaattgctaatgagattgaatatgatttcattatttattgaccatttggattttcttctctgaagttcctatccaagtctcttgctcatgtttttataaagttttgtctttaaaaaaaaaacaaaaaacagaagttctccaatgaraacacatggacacatcggggggaacaacacacacttgggcctgttgggggactggcggtgggggagaatgtcaggagaaatagctaagggatgctggacttaatacccgggtgatgggttgatctgtgcagcaaaccaccacggcacactttgacctatgtaacaaacctacacatcctgcacatataccttgaaacttaagataaaagttgaagaaaaaaaagagacaaagaagacaacataaagcacagaaagtatcttaaaacacagaatttatctttgttttttccttccttaggtagataacttatggggtataagaaccttcttagtcttttatcagtactccaaagaaatcctgtttttcaaaaatagtagaacagattccagttttgcttcaaggtt

SEQ ID NO: 801546 - DNA, 571 bp, Homo sapiens
ggttttaatgtatatcttcctaattgctaatgagattgaatatgatttcattatttattgaccatttggattttcttctctgaagttcctatccaagtctcttgctcatgtttttataaagttttgtctttaaaaaaaaaacaaaaaacagaagttctccaatgagaacacatggacacatcggggggaacaacacacacttgggcctgttgggggactggcggtgggggaraatgtcaggagaaatagctaagggatgctggacttaatacccgggtgatgggttgatctgtgcagcaaaccaccacggcacactttgacctatgtaacaaacctacacatcctgcacatataccttgaaacttaagataaaagttgaagaaaaaaaagagacaaagaagacaacataaagcacagaaagtatcttaaaacacagaatttatctttgttttttccttccttaggtagataacttatggggtataagaaccttcttagtcttttatcagtactccaaagaaatcctgtttttcaaaaatagtagaacagattccagttttgcttcaaggtt

SEQ ID NO: 801547 - DNA, 642 bp, Homo sapiens
ctagtttctttcttttgcatatggatagccagctaccacaacaccatttattaaacagggagtcctttccttattgcttattattgttggctttgttgaaagtcagttggttgtaggagtgcagctttatttctgagttctctattctattccatkggtctatacgtctgtttttatgtcagtaccatgctgttttgattactgtagccttatagtatagtttgaaattaggtaatgtgatgtctgaagttgggtaatgtgatgccaactttgttctttttgtttaggatgctttggctatttgggctcttttttggttttatataaattttagattagttttttctaattctgcaaaaaatggtgttggtggtttgataggcataatgttgaatctgtatattgctttgggcagtatggccatttaaacaatattgattcttccaatctatgtgcaaggaatattttttcattttttcatttgattgtgtcatctatgatttctttcagcagtgtttggtagttctccttgtagttctctattttacaccattggttaaatgtattcctaggtattttattttatttttggctattgtaaatgggattgtatttttgatttggctatcagcttgaatgtta

SEQ ID NO: 801548 - DNA, 642 bp, Homo sapiens
ctagtttctttcttttgcatatggatagccagctaccacaacaccatttattaaacagggagtcctttccttattgcttattattgttggctttgttgaaagtcagttggttgtaggagtgcagctttatttctgagttctctattctattccatgggtctataygtctgtttttatgtcagtaccatgctgttttgattactgtagccttatagtatagtttgaaattaggtaatgtgatgtctgaagttgggtaatgtgatgccaactttgttctttttgtttaggatgctttggctatttgggctcttttttggttttatataaattttagattagttttttctaattctgcaaaaaatggtgttggtggtttgataggcataatgttgaatctgtatattgctttgggcagtatggccatttaaacaatattgattcttccaatctatgtgcaaggaatattttttcattttttcatttgattgtgtcatctatgatttctttcagcagtgtttggtagttctccttgtagttctctattttacaccattggttaaatgtattcctaggtattttattttatttttggctattgtaaatgggattgtatttttgatttggctatcagcttgaatgtta

SEQ ID NO: 801549 - DNA, 554 bp, Homo sapiens
cccacttgccccattatgttcctctctttttaaaaagaacccctggggtacatgaacagggcatgaggtatatgttcatgtatgtgtaaatgaatccctatatacatttatattcatgttcctgcgtgtacttgtgaagttgtgtactcgtgatattgtgatatataatcgtactctgtgatcattcaagcaatgattcatacagacacattgtaatggcaaacacaaatggctattgtggatttgcttaggaggccctgcctatgcatacatgtggaattgtctacatgtctggctgtatgtgttgggcgtgttgtacatgtctaaggtggatagtcacatagatgatatgggtaaagacagagaggagaaggggagattgcgggtgtttgtgtaccttctcaggttgcctggcrtagagtacttagctctattgcaaacacccattccttcctgaggggcgcatggcacccctcttaatatacctacagctgatggcactggcactgcagggttggaggaatcatttccttctactccttccctgagtgtgc

SEQ ID NO: 801550 - DNA, 603 bp, Homo sapiens
acagcactaacagaaaaacattttttttaaagagacatacacacaaatatagagtactccgtttacaaataagattctcatgacaggagtccagctccagcctggtcacatgcctggatgacagcacctgagcgcagcagatgctcaatctaaatgaaactcgacgctctggatagagccaaggaaggctcctgctattcgggggtcctcgagggagccattaaaacctcggcttcctcatttgaggaaacagcctgagccaaggagaaaattgaagtcctctcagctgcagctgctcacccacccccctcccacctccctccacagagaaaagcacccactccattgactctgaggggtcacgagaaggttcgggaaaaagggtcacagtcaagccaccmaacccagccggccttctcccatcactacttgggtgcgagcataccctctctgtctcaccccatgccatcatccgggtaaggttcgtagtcttccacacgcatattatacttcttggcggcggcggcccgttcttctggggtcctaggatagggccccgggaacatgtccttggtcatgtgggaggctagaacgcagaagaga

SEQ ID NO: 801551 - DNA, 613 bp, Homo sapiens
ctgttacaagttcattcattcccacaaccagcacttatgaagcacacaccactgtcattcatttctacttcatcagctaactttccttttgacctataccttgttcaggtctcccaatggcggttgaaaatacaggttaattttcccttatctgaaatgcttggggtcagaagatttttgaattttggatttttttcagattttggaatatttgcattataccagttgggcatccctaaccaaagatccaaaatccaaaatgctccaatgagcatttcctttgagcatcatgctggtgctcaaacagctcagattttggaacatttcagatttggaatgctcaacctgtaccctgcttgtcctcttccrctctgacatttctttcttaactgtcatggcagcttcatctgtagccctcattcttgttaaattatctgccttctagcttctccacagctccataaaaatgtaagggagcccagggaagggtaatcaagcaggacagactggatcaggataggcttcttggaggaaactgagtatcaactgaaggttttgtatatttattgcatattgaaaattttgaataggtcactttcttggcatggacctc

SEQ ID NO: 801552 - DNA, 619 bp, Homo sapiens
ttcatatatgaaagataattctgctggatacaatattcttgaatgtcagtttttttcttggagtactttgaaaatgtcattccactttctcctggcctgtatgattgccattgagaagtctattgccagacaagttggagctccttatttgtttcttgtctcttgctgcttttcagatcctctctttttcctkgacagttgagagtttgattattatatgccttggagtagtcttatttgggatgattctgttcagtgttctcagatcttcctgtacctggacatttatatctttcacaagttttgtgaagatttttgttattatttctctatttttaaaatttatttttaatttattttattttaatttttttgagatggagtcttgctcttgttgcccaggctggagtgtaatggcatgatctcggctcactgcaacctccatctcccaggttcaagcgattctcctgcctcagcctcccgagtagctggcattgcaggtgcctgccacacctggctccttttttttgtatttttagtagagacggggttttgccaggtaggccaggctggtctcgaactcctgacctcgtgatccacccacctcagcctcccaaag

SEQ ID NO: 801553 - DNA, 645 bp, Homo sapiens
aaaagaaaaaaaaaaaccttgagtaggtatttaaaagtactctgctaaacatatttgtgaagaaatatatttaaatcatattttacattttcctctagagtcatgttttcaaaagactctatggtagcacttttcagaaaatcttaaaatacattttttatcataagctagtatacacatttataggtgtgtatataagtttcaacacttagactgacttgctgattgccctatgtgctgatattgtctattccatttatttttaaattctatttttagcccactgtagtaatttcataagctactcatgggtcataacagaagtttgaaaaacactgcttcaaagcacaattacttgcaaacctattcccacgttttggaattggtataaattccttaaatgtcaagccaataaatacgtcttaatgatacttactgtgccaggtgctgtgaataagacaraaggcacaaatgatatcatctctgggcccaaaggcttggtgcagtggcctgaatacagtaaacatgtaataactgttgtctatttttattgttgttattcttattaaggagacatcaagagttcacatatttatatcatgactagtacaaaggtcttcatgaacatttcccgatttattaatc

SEQ ID NO: 801554 - DNA, 619 bp, Homo sapiens
tgcaactttggcaaatttgtttattagatttaaccgttcttttgtggagtttttggggctttctacatataagatcaaataatctataaacatagaaaattttagttctttctttccagttggattcctttatttctttttcttgcctatgctctgattaggacttccagtactgtattaaatagaagcagtgaatattagcaaccttgccttcctcctgatcttagagggaaagcttttgtttttccccattaatacagtgctatctgtgggttctaatatatatgacctttattatgttgagaaagtttccttctagtgctaaattgtagtgtattttttaaatcattaagggatgtttattttgtctgcaattatcatgcatattagtttgttttgtgttgctatraaggaatacgtgagactgagtaatttataaagaaaacaggtttatttggctcacggttatgtaggccgtacaagaagcattgcactggcatctgcttggcttctggtgagggcctcaggaagcttttacatatggcaaaaggtaaggggagctggcatgtcacatggccagaggaggggcaagaaaagggtagggatgccatgctctttt

SEQ ID NO: 801555 - DNA, 635 bp, Homo sapiens
gggacttctaagagatcctctcaagcagcataagtctggactataatttattggcagtcatgctcgattggttccccatcctctgagagaaaagtggcagggttgagggtcacacatatgtgtatttgaagcaccagtccctcaaggagtagtgcctggtatttaagcaggtggttgtttgatagccataaacttcctttggcacctagtatgccatttacatcatgagtagtccagacagtgagatccttttcttgtattattttgatagcctctgataccaagayggccactgctgcaactacccataaacagtgaggccagccttttgctactatattaatttccttacttaggtatgccactggttgtggggttgtcccacgagtctaaggatgccaagagctattcctgctctctctgtgatgtataaagataagttttgtcctgtgggaaggcttaaggctggagtttgtactagggcctgctttaaggttctgaaggctgtttctgcctctggttcccaatctactagatgagtatttgctctctgggtctccttgataagagtacacaggggcctggctatctcactgtatccagggatccatagttggccaaagccagtgattcca

SEQ ID NO: 801556 - DNA, 634 bp, Homo sapiens
caggataaaaaattaatatgcaaattcaattgtatttctataaaaaatgaacaatttgaaaatgaatttaagaaaacaattccatttacagtaacatcaaaattataaaatacttaggaataaacttaactaaggaggtaaaagtcttatacactgaaaattacaaaacctttatccaaaaaattaaagacacaaatacatggaaagatatttgtattcgttgattggaaaacttcrgagtattaaaatgcaatccctatcaataaaaaaatcccaatagcaatttttacagaaatagaaaaaacaaatctaaaatttgcatggacccaaaaacggctcaaatagccaaagcaatcttgaaaagaaggacaaaactggaggcctcacactgcctggttttaaaacatatcactaagctacagtaatcaaaacattatggtactaacttaaagacagacatatagacaatggaacagagagcccagaaataaacccaagcatatatatataatatacacacacacatatatatgatgcggaagcaatgtaaatgtccatcagtgtatgaatgaatagagaaaatttggtatacacataaaattatggagccttcaaaataaaggaaatcctgtta

SEQ ID NO: 801557 - DNA, 630 bp, Homo sapiens
agtgaggattaaatgagataatgtacataatgcatgagcaccctgcttaacaatgaacagaatagcttaaggaagcttatggtagctcctactatttttttctttcttgcatgactttaagtgagctctttaactttgctagatttttaccttttaaaactcagagttgtagaaatgaaatgagatacacgagtataactattttttggaatgggttaaactctgtacatgtaatcataaacaagccttattcattctcaccatggcctctttcaataacttctgtcaaagttttcttccccttccaaggtgraatcctgggcaaattgcatagacatacacagactttcagatgtttagaaagagcagtgctgaaggtccagtctctcaaccaatttaaatcactttttcctctgcgaattcctggtggcttcaggctggtgaactgtagaaaggtgaactgggagggatcgggctctgcatcttcaccttcttctgtcatagactttgtattagggttctctagagggacagaaccaatggaatatatatatatatatatatatatatatatattccttgtgtatatatatatatatattccttgtatatatatatatattccttgta

SEQ ID NO: 801558 - DNA, 513 bp, Homo sapiens
taatccaatttctgcccgatgataacctattctttctttttcaaaggtttcagtctgtgcccagagcaaggtcttctcctttctacattgctcacattcgggcccacacacccctccccagacccctctcggcagcaaatgccagagctcatacattagttcctcccgtttttacagatgcagaaaattttcatgctttaacacctgtcaatgctgcaggactccggaraaagttccccttacatggaaacaagctaaaaccattgttcgtcaccgtcctacttgccaagtgttaatcttacagccactttcctcaggagttaaccctagaggactttcacagaatgctctctggcaaatggacgtgactcattatcctgcttttggcaagctttcttttatacatgtaactatcgacactttttctcattttatctgggccacttgtcacgcaggggaaagtacagctcatggtaaacgacatatgcgttcctgtttctccgttatgggctg

SEQ ID NO: 801559 - DNA, 513 bp, Homo sapiens
taatccaatttctgcccgatgataacctattctttctttttcaaaggtttcagtctgtgcccagagcaaggtcttctcctttctacattgctcacattcgggcccacacacccctccccagacccctctcggcagcaaatgccagagctcatacattagttcctcccgtttttacagatgcagaaaattttcatgctttaacacctgtcaatgctgcaggactccggaaaaagttccccttacatggaaacaagctaaaaccattgtycgtcaccgtcctacttgccaagtgttaatcttacagccactttcctcaggagttaaccctagaggactttcacagaatgctctctggcaaatggacgtgactcattatcctgcttttggcaagctttcttttatacatgtaactatcgacactttttctcattttatctgggccacttgtcacgcaggggaaagtacagctcatggtaaacgacatatgcgttcctgtttctccgttatgggctg

SEQ ID NO: 801560 - DNA, 609 bp, Homo sapiens
gtacttggaaaatgcttggtacttccaaaagcaaaataatgtcctggtgagaatattaatatatgtggttttagtggaattggtattgtcattagcagattgatgacgtagggagaaagacaaggtaagacactgaggaaaaatatagttcatttatacagaaaaagcaaaattttaagtgaaagcatcatgggagaaagattatatatggaaatgcaggagagctaaaagtggcctggcgaaccacatattagctgagcatgagtcattcatgrattgatattttaaaaaactagagacacttgaatttgagaaactaggacaaggatataaaatttttttctgaacttgggtaatacgaaagaatgtaccaacatatattaccactttgtgtgtgtgtgtgtgtgtgtgtgtgtgtgtgtgtgtgtccatgcttggagtctgtctctaccataccccaattctccttgcactttggtttatcaaatgttgtcacaaattgcaaccccttagacttatactctgtgtttcttcactctgagccccttcccttggggagcgtcagattcctttgtaacttgtggagcagctgagtgagcccctttctct

SEQ ID NO: 801561 - DNA, 624 bp, Homo sapiens
cttgaccttattatcttattcagttctcctaatagtcttttgaggttggtacaaccattgtctttgtttgtagagagacactgaagctaggaaaacactagtaattgatggcaagtgctggagctgggatttggacataagtgtactggttctagtgcctaaactcttagccacaattttattatgcttactgatagctgacccccttattcatttgtttgttaatccactcatccatttatgagtgcatcgtgtgtgccaggccatgttctagctgttagttgcacaatgatcaagaatgaatgtatgaaaatatgtattttcrgccgggcgtggtggctcacgcctgtaattccagcactttaggaggctgaggcaggcggatcacctgaggtcaggagttcgagaccagcctggccaacatggtaaaaccctgtctctcctaaaaatacaaaaattagccaggtgtggtggtgcacacctgtaatcccagctactcaggaggctgaggcaggagaatcgcttgaacccaggaggcagaggttgcactgagccgagattgccactgtactccagcctgggtgacagagctagactccgtctcaaaaaaaacaaaaaaaagaa

SEQ ID NO: 801562 - DNA, 464 bp, Homo sapiens
agttatgcaaatatgacttgctatttttaatttcttgaaaaagtcttgagggcttcctgggaggtatgtttaccattttgaggtgatggctggttggtgcttattgtcctgtgtatccaatggataaggggcctgtgaggctaactgtaaatgacttggccccttggtacggtactgatattctayacaaagccagcagctcaagtggctgtgcccctgccctccaacacactgcccccggatggttttacttgagacaaacctcttttactttaaagaaggtttttatattggaactgagacttctgatagagaaatatttgctttgtttgatacgatcttggcaaagaaggttcattttaccagttgctggctaatgtcctagcttgggaagagcaataatctcattaatgaattatctcttacttacaagacaaactggactcatttgtttccttaaaaag

SEQ ID NO: 801563 - DNA, 567 bp, Homo sapiens
atggaaaacagaatgacagtttcttaaaaaattaaacagaattacaatacgatcccgaaatttcacttcagggtatatacgcaaaagaattggaagcaaggacttgcagagatgtttgtatgtgttcatagcagcattattcacaatagtcaaaggtggacataacccaaatgtccatcagtgaatgaatggataaacaaaatgtggtatacacatacaatgacatattattcagccttaaaattaaaggaatgygtaccacctgctacaacatggatggactttaaagacatcatgctaagtgaaataagccagtcacaaagggacaaatatggtattattccactcatgagatacctagagcagtcaaattcattaagacaaaaggagaatgatggtttccaggggctggaggaggtggcggggatgaggctgctgtttaatgggtgcggagtttcagttttgcaagatgaaaagagttctggagatgatggtggtgatggttgcacaacaatgtacctaatgccactgaactgtccatcaaatggttaagttggtaaactttgt

SEQ ID NO: 801564 - DNA, 567 bp, Homo sapiens
atggaaaacagaatgacagtttcttaaaaaattaaacagaattacaatacgatcccgaaatttcacttcagggtatatacgcaaaagaattggaagcaaggacttgcagagatgtttgtatgtgttcatagcagcattattcacaatagtcaaaggtggacataacccaaatgtccatcagtgaatgaatggataaacaaaatgtggtatacacatacaatgacatattattcagccttaaaattaaaggaatgcgtaccacmtgctacaacatggatggactttaaagacatcatgctaagtgaaataagccagtcacaaagggacaaatatggtattattccactcatgagatacctagagcagtcaaattcattaagacaaaaggagaatgatggtttccaggggctggaggaggtggcggggatgaggctgctgtttaatgggtgcggagtttcagttttgcaagatgaaaagagttctggagatgatggtggtgatggttgcacaacaatgtacctaatgccactgaactgtccatcaaatggttaagttggtaaactttgt

SEQ ID NO: 801565 - DNA, 362 bp, Homo sapiens
agctaaggacaatctagtgtgtgtcttttgatgaactggacccaagagtgaagtgctgagtcatagggtgtgcatgtttagcctcagagggcattgccaaagggttttcaaagtggttctatcaatgcatatcccatctcrtcggcactcagtatggtctgtcttcctcctggtgccattctgataggtgtgtactggtataacatcctggttttgatttgtgtttctctaaaggttattgatgttaagcatctttttgtaagtttaatggccacttgaacatcttatcttgtccccagtttttcctaacttcttgactctgggggaactttgctttattttttgcttcttttattttttgt

SEQ ID NO: 801566 - DNA, 580 bp, Homo sapiens
aatgggagaaatgacaaggaacaaaatttcagcatttctaaggcagaatgagaaaggactcagagacttaaaaaataagaccaaggcctgagccaatagtgaggaaatccagaaactaccatgatttaaatcacacattgcaaaaaggctcagaaattggctacttctataacctgagaagtgcagggtgcacataggkgaatacctcaaatagagtagactgttgaaagtgtgttaaaaaagaaacctgtcaccaaaatgctcttccttactttacaaagctattcaacagccctcccaacatcccagtcaaaaacttaaggtttgttctctggagaaagtgaaacagactatcttggactgaaacatattaggcaggattgaggatgcggatattgtattgaaaagaggtagattaaataaataagtgcctactgcatgctgagatgccaggaggagattggaacactttccctggagaaaatgtccatgtccatttcaagaagaaaactctaaagatattgacaccaaataatccacaaaaaagtggcccagccagatgatcttaaggcgaatccac

SEQ ID NO: 801567 - DNA, 580 bp, Homo sapiens
aatgggagaaatgacaaggaacaaaatttcagcatttctaaggcagaatgagaaaggactcagagacttaaaaaataagaccaaggcctgagccaatagtgaggaaatccagaaactaccatgatttaaatcacacattgcaaaaaggctcagaaattggctacttctataacctgagaagtgcagggtgcacataggtgaatacctcaaatagagtagactgttgaaagtrtgttaaaaaagaaacctgtcaccaaaatgctcttccttactttacaaagctattcaacagccctcccaacatcccagtcaaaaacttaaggtttgttctctggagaaagtgaaacagactatcttggactgaaacatattaggcaggattgaggatgcggatattgtattgaaaagaggtagattaaataaataagtgcctactgcatgctgagatgccaggaggagattggaacactttccctggagaaaatgtccatgtccatttcaagaagaaaactctaaagatattgacaccaaataatccacaaaaaagtggcccagccagatgatcttaaggcgaatccac

SEQ ID NO: 801568 - DNA, 592 bp, Homo sapiens
atctagtaggtacatgatgcctatttttgaaagaaagagtaagaagcaccaagtacatatgtagtctaacatccatcactttccattgggatgaggtattatagaaggaataatgtaccagcttaaggacagagattcatttattcgtctttgaatccttagggcttaggacagtatctgacacttagtaggtacaagatgcctattttgacagaaaaagtaagaagaaccaggggktagaaagggtggagagaagagtccatatcctgtccccttccagcagcataaggtccaatcagggggtcttaggtgagtgatgagaagtttctagccctcagcctccttatctgcataatgtgaagaacagcactaatgtgatgaggttgttgtgaggattacaaaagcccctgtctagtagacactcattgagtgtgtaagtggtggtgaggtgggtcatgaaggcaatttaataatgatctggcaccaaagtccaagagagagagtgaggagctccttccagcctcttttgcaagggtaagtctgggaaatgtgatttcttgtgcagcaaggaatgactctaccaacagagcag

SEQ ID NO: 801569 - DNA, 644 bp, Homo sapiens
acaaaatgctgctcaagtaaaggatccattcaaacatcaagatagatcagcagattttcatgtaacagagtgcaaacaaaaaatttataagattccagattccacatcataacttttaagaaattcaagttttgatgtaataccaagaaaaatatccacaattatattaaaaggctattaaaatactcctcctggctgggtgcactggcttttacctgtaataccagcactttgggaggccaaggtgcatgaaacacttgagaccaggagttcaagactctgttgyccaggctggagtgtgatgccagcatagctcactgcagtcccggactcctgggctcaagtgattcgcctgcttcagtctcccaactagctaggactacaggcatgtactaccatgcccagctaattaaaaaaatttttttttcatagatgaagtcttgctatgttgcccaggcttaaaatgccctccactttttaagccaattatctgtatgaggctgattttcttcatatagttcaaggaaaacaacacattgcaaaaaaactgaatgcccgttaacatccctcaggtgatcttagaactcagctatcttctattaagccagatattagaagtttgcaaaaatataaagcaatgctac

SEQ ID NO: 801570 - DNA, 644 bp, Homo sapiens
acaaaatgctgctcaagtaaaggatccattcaaacatcaagatagatcagcagattttcatgtaacagagtgcaaacaaaaaatttataagattccagattccacatcataacttttaagaaattcaagttttgatgtaataccaagaaaaatatccacaattatattaaaaggctattaaaatactcctcctggctgggtgcactggcttttacctgtaataccagcactttgggaggccaaggtgcatgaaacacttgagaccaggagttcaagactctgttgcccaggctggagtgtgatgccagcatagctcactgcagtcccggactcctgggctcaagtgattcgcctgcttcagtctcccaactagctaggactacaggcatgtactaccatgcccagctaattaaaaaaawttttttttcatagatgaagtcttgctatgttgcccaggcttaaaatgccctccactttttaagccaattatctgtatgaggctgattttcttcatatagttcaaggaaaacaacacattgcaaaaaaactgaatgcccgttaacatccctcaggtgatcttagaactcagctatcttctattaagccagatattagaagtttgcaaaaatataaagcaatgctac

SEQ ID NO: 801571 - DNA, 583 bp, Homo sapiens
aacaggaggatgaggaaaaatagacggagaaaagagagaagtgaaatgtgcttttccctcattctgtatttccaggcttaaagcaatatcaaggtgagaggtggtggcagtggtaagaataaggagcagggattattacattcttagccctgtaataagactrtgggtacacataaaagtgactggagcacttctattacctgagcataataaaaagattttgaaacctgccaagatttcattgtaacagtgaggaagaaacaggtcaagagtacatttgaagagacatagtgaaaaagaatagtttttggttttggtttttctgcttgtatttgtttcagttcagatcactcagtgtccaggtttcatctgcaacttgtgcaaggtcgtgtggtggttaattggcagaactgaaattgaaattcagagactgtttacactatatgataattgctttcttttaaaaggagtatatttggtacttatttgcataattagaaactgagtttcatctctggataatttttggcccaaaagataaacacatgctaagttctggatccacaaaatgttctctccaagg

SEQ ID NO: 801572 - DNA, 532 bp, Homo sapiens
gctccatggctccacccaccacctgatcctccctatacaatcacagctgatgcactcttgaaagcaccacctcctggctggaggccaacaaacaaaaccagctcacttaacaaaaatacaaccaaagaccctcacagagtccacctcagtctcctgctccctccaccagagcaggtgctggtatccacagctgagagacctgaagatggagcacatcacaggactctgtagacaccccacagtaccagcccagagtccagtagctcagctgggtggctagatccagaagacaaataacaatcactgcagttygactctcaggaagtcccatcactaaggggaaaggggagagcagcacatcaagggagcacccccatgggacaaaagaatctgaacagcagcccttgagtcccagatcttctctttgaacctatcagattaacagcagatttctcagcagaaatcctacaaactacaaggaattggagttctatctttagcctccttaaacaaaacaattatcagccaagaa

SEQ ID NO: 801573 - DNA, 532 bp, Homo sapiens
gctccatggctccacccaccacctgatcctccctatacaatcacagctgatgcactcttgaaagcaccacctcctggctggaggccaacaaacaaaaccagctcacttaacaaaaatacaaccaaagaccctcacagagtccacctcagtctcctgctccctccaccagagcaggtgctggtatccacagctgagagacctgaagatggagcacatcacaggactctgtagacaccccacagtaccagcccagagtccagtagctcagctgggtggctagatccagaagacaaataacaatcactgcagttcgactctcaggaagtcccatcactaaggggaaaggggagagcascacatcaagggagcacccccatgggacaaaagaatctgaacagcagcccttgagtcccagatcttctctttgaacctatcagattaacagcagatttctcagcagaaatcctacaaactacaaggaattggagttctatctttagcctccttaaacaaaacaattatcagccaagaa

SEQ ID NO: 801574 - DNA, 626 bp, Homo sapiens
aattaaacttctgaaaactaaagacaaaaaagttattaataaaacagacacctgcagatatacaagatctcaaaaatttacctcccacgcaccactttctgaaggagttaaaaatgtgcttctccaaaacaggggaattaacaaaaaaactgaaaagaaagaggcagaggagatctacacagtcagggggagtgtcccaggtgacaatggaaggcggctcagaggcagcagctgtgcggccagcctggctcacaaccaagagagattcaagtagggcacaggctccaagagcttagttaatcgggaagagaagagaaaaattaatgtgtttgaatgtcaaagagacccttagaaatacgcaaaagactagatctgcaacctgcaaaacatacacagaaaactaaacaaagaaacgagaattactaattctcgaaaacaaaatattagaaaggtaagaacagtcatagcatacaacgtggctctgctccraatattattcgcctcgtcatgttaccctgaacaccgatctcagtgaaaccagggtggaactcagccatggggacgacaggcctaggcatttatgcaggtcaaggggccaggggaggaaaacagcaccagcccctctt

SEQ ID NO: 801575 - DNA, 613 bp, Homo sapiens
caaggggccaggggaggaaaacagcaccagcccctctttctctgtgggagtccacattgatatcaccccaaattaaggaaaaacaaaaaaaagggcactttatttagagacacacaggcaaatacctacaaagcaccaacggaggagcaggacagccaaatacaatcctccagcaagatcgccccctcagccccgcaggacaccaaacttaacaactatccgcattagaaagcactccttaagaaccagcactcagaagtcatggatgctagaggggacggatgcccccagttactytgatatgattatgacgcattgtatgtctgtatcaagacagctcgtgtaccccataaatatagatgaactatgcaccataaaaatcaaaacaaaaaaagaactagtggaaaaaaattaaaagtggccgtccctactgttttttcctaatagcaggtctcagcgaatcacctgactttaagtgaatgtataaatcactgaaaaaaaaaacatttttaaaaggtaaagcatcaaagcaaagaggtcacaacagatcctcaataaggagtagctgtaatattattccaaaaatatttaatacttatctatttaaatgtgt

SEQ ID NO: 801576 - DNA, 613 bp, Homo sapiens
caaggggccaggggaggaaaacagcaccagcccctctttctctgtgggagtccacattgatatcaccccaaattaaggaaaaacaaaaaaaagggcactttatttagagacacacaggcaaatacctacaaagcaccaacggaggagcaggacagccaaatacaatcctccagcaagatcgccccctcagccccgcaggacaccaaacttaacaactatccgcattagaaagcactccttaagaaccagcactcagaagtcatggatgctagaggggacggatgcccccagttactctgatatgattatkacgcattgtatgtctgtatcaagacagctcgtgtaccccataaatatagatgaactatgcaccataaaaatcaaaacaaaaaaagaactagtggaaaaaaattaaaagtggccgtccctactgttttttcctaatagcaggtctcagcgaatcacctgactttaagtgaatgtataaatcactgaaaaaaaaaacatttttaaaaggtaaagcatcaaagcaaagaggtcacaacagatcctcaataaggagtagctgtaatattattccaaaaatatttaatacttatctatttaaatgtgt

SEQ ID NO: 801577 - DNA, 590 bp, Homo sapiens
tcagtttgcaagaaataacgaaatctatccttactctacaatcccaaatagactctttggcagcagtgactctccaaaaccaccgaggcctagacctcctcactgctgagaaaggaggactctgcaccttcttaggggaagagtgttgtttttacactaaccagtcagggatagtacgagatgctgcccggtgtttacgggaaaaggcttctgaagtcagacaatgcctttcaaactcttatacgaacctctggagttgggcaacatggcttctcccctttctaggtyccgtggcagccatcttgctattactcgccttcgggccctgtatttttaacctcctcaaatgtgtttcctctagaatcaaggctatcaagctacagatggtcttacaaatggaaccccaaatgagctcaactaacaacttctaccaagggcccctggacaaacccactggccctttcactagcctaaatagttctcctctggaggacactacaacttcagggccccttcttcatccctatccagcaggaagtagctagagcggtcactgcccaattcccaacagcagttggagtctcctattt

SEQ ID NO: 801578 - DNA, 626 bp, Homo sapiens
gaaatattagtccctaatgggaataggaattcataaaacaggctcaatatggttattgacataatcagcacacttgcgagccagaacggcatgctgtaattgctccaacgtggttattgttgggtatttcaaatatccagctactttatttatttatttatttatttatttttgagayggagtctcactctgtcacccaggctggagtgcagtggcgagatcttggctctctacaacctctgcctcccgggttcaagcgattctcctgcctcagcctccagagtagctgggactataggtgcctgccaccatgcccagctaacttttgtatttttagtagagatggggtttcaccatattggccaggctggtctccaatgtctgaccttgtgatctgccagcctctgcctcccaaagtgctgggattacaggcgtgagccaccgcacctggccccagctactttataaataactatgttttttaaggtttactagttagatatttttaatcaccttaagtcctttcactcacttttacaacttttgaatgtttcctagcaacgcgcatttacttccctcatctacacacaaggcattcctagcctctcctcttctcattccgggat

SEQ ID NO: 801579 - DNA, 626 bp, Homo sapiens
gaaatattagtccctaatgggaataggaattcataaaacaggctcaatatggttattgacataatcagcacacttgcgagccagaacggcatgctgtaattgctccaacgtggttattgttgggtatttcaaatatccagctactttatttatttatttatttatttatttttgagacggagtctcactctgtcacccaggctggagtgcagtggcgagatcttggctctctacaacctctgcctccygggttcaagcgattctcctgcctcagcctccagagtagctgggactataggtgcctgccaccatgcccagctaacttttgtatttttagtagagatggggtttcaccatattggccaggctggtctccaatgtctgaccttgtgatctgccagcctctgcctcccaaagtgctgggattacaggcgtgagccaccgcacctggccccagctactttataaataactatgttttttaaggtttactagttagatatttttaatcaccttaagtcctttcactcacttttacaacttttgaatgtttcctagcaacgcgcatttacttccctcatctacacacaaggcattcctagcctctcctcttctcattccgggat

SEQ ID NO: 801580 - DNA, 610 bp, Homo sapiens
gcagaagtggagtcaccttttcctacttctgagggagtttagtattttcttttttattttttctgagtatgatcaatggctaatgacatttttatgctaatactttatagttgaattgtggctgtcctaaagaatgttttctattttaaatttcctgtgtaaygggggtatagatctaatttttagaaatgtctccctttatattttggtcaaacaagtaacacaatattaatttcagtggaaaataataattcaaaatacagagatgagaagtaagaaaaaaagataacaaaaattcacaatccagccattgcccctctccctcttttccccttttgcatcccagtgtctgttatttccatctgtatgtccacgggtacccactgtttagctcccactagtaagtgagagcatgtggtatttgattttctgattctgcattaatcctatgggtactatgttcactattcgggtgatgagttcaagaaaagcccaaactgcagcattacacaatatatccatgcaacaaactggcacaggtaccccctgcatctaagattaaaaataaaaagtaagattctatgacccagagatgatcactgttagcatt

SEQ ID NO: 801581 - DNA, 610 bp, Homo sapiens
gcagaagtggagtcaccttttcctacttctgagggagtttagtattttcttttttattttttctgagtatgatcaatggctaatgacatttttatgctaatactttatagttgaattgtggctgtcctaaagaatgttttctattttaaatttcctgtgtaacgggggtatagatctaatttttagaaatgtctccctttatattttggtcaaacaagtaacacaatattaatttcagtggaaaataataattcaaaatacagagatgagaagtaagaaaaaaagataacaaaaattcacaatccagccattgcccctctccctcttttccccttttgcatcccagtgtctgttatttccatctgtatgyccacgggtacccactgtttagctcccactagtaagtgagagcatgtggtatttgattttctgattctgcattaatcctatgggtactatgttcactattcgggtgatgagttcaagaaaagcccaaactgcagcattacacaatatatccatgcaacaaactggcacaggtaccccctgcatctaagattaaaaataaaaagtaagattctatgacccagagatgatcactgttagcatt

SEQ ID NO: 801582 - DNA, 611 bp, Homo sapiens
tttctgagttagctactattaccaccatctctagtcatggtcaccatgaggtaggggaaagttaaataatgtgcctgtgttcacagctaatgaatggtggagtgaggatctgaaccaggacagcttgacggcaaagttgacatttctaaccaccatgacatgttgcctctctctatatattggagtctttgtccggtaaatcagatccagccagaaatcagggtgtgtgtctgggcgmggtggctcacgcctgtaatcctagcactttggaaggccgaggcgggcggattgcttgagctcaggagttcgagaccagcctgggtaacacggtgaaatcccatctccactaaaacacaaaaaattagccgggcgtgggggcgtgcgcctgtcgtcccagctattcgggaggcgggaggggaggcgaggcaggagaatcgcttgaacctgggaggcggaagttgcagtgagccaagatcgcgccactgcactccagcctgggcgacgaagaaagactccgtctcaaaaaaaaaaaaaaaaaaaattcggggtgtgtgaagaactgagtgagtgcccttctgttctgcaaggttctttgagatctaagccagatg

SEQ ID NO: 801583 - DNA, 633 bp, Homo sapiens
aagtggacattaataaatgttgttaattggatgaatatttacatcactcttaaaaatgaggcactgtattttttattgcaacattcaaagtaaaggcctgcctcctttggtaaataccaggcatttagaatgcatatagattgtaatgcagtactgcctcaatttggttgtgttggaggccaaatgtaactacttacagtaaaattgtgatgttatacaacctacgctcttccctggaaagaatcatgaagaagtttcatagtagtttggtattattggagacattttagctaatacattctaactatgcattttgaaaaaaaaaaagaaaaaaacatattcttaaaaccatgtgaattttcagmcagaaagagaccttataaatatggacatgactgcagtgtgttgtggttattattaacgatggtttgtaccaaattatggcaaaaaatatgccctttttaaaaaatcagttaggactttgtgtcattctcaagttctgatgtcatccttgaagagcagaaaaaggtgtaggttaattggccatttgtcaggaatttcatatgaccctgtctatgcccagaagtgtttgctattcatgtggacagcttgttatgtgtcccagcaagttga

SEQ ID NO: 801584 - DNA, 611 bp, Homo sapiens
ttcaaaatagctatttttagccaggcacagtggcttatgcctgtaatcccagcagtttgggaggccaagggacaggtggatcagttgagctaaggagttcaaaaccagcctgggcaacatggcaaaacctcgtctttacaaaaattagctgggtgcaatggcatgtgcctgtagtcccagctacttggaaggctgaggcaggaggatcacttgagcctaggaggtggagtttgcagtgagccgagattgtaccattgcacttcaacctgagcaatgacagtgaaacyctgtctcaaaaaaaaaaaaaaaaaaaaaaaaaaaaaagctattttgaggaaactcaaacaaattcaagaatacacagaaggaattcagaatcctatcagataaatttaacagagagagtgaaataactaaaaaaaaaaaatcaaacaaattctggagctgaaaaatgcaactgacatactgaagaaatgcatcagagtctcttaacagcagaattgatcaagcagaagaaagaattagtgagcttcaagacagtatatttaaaaagacacagaggagacaaaagaaaaagaataaaaaagaatgaaacacacctaaaagatctg

SEQ ID NO: 801585 - DNA, 620 bp, Homo sapiens
atgcatttgtgttctatccaaaagagaaattcttcatcatttctctctttagcagcaccatgatctcagaacagtgaaatcattatttactttctcctttttctcacatttcacatccatttgccaaatctcatcatttcttcttttgtagctgcattcacaatacccttctttcactttcaccacctcattgtaggcccactagaagagctcatgtgtggactattgctgttgatctcatttgttcccatttcttccaccctgcccattgctaccatgctagtcttcttcaagagcagctttatcatgtctctctcctattcagaactttcaatgatttcctttcatctgctaagtttaacctaactaccttttctgggcttagcgcccatgactcattcatttgttcattcgttttatcctgttttattcattaaacaaccatttattaartacctactatgtgccaagtactaaaagagaatctcggaatactgtaatgaacaagattaaagtgcttttgaagtttttttttgtttgtttttgtttttttttaagaagccctctccccttaaatgatgaagatgctctacattttcttccactaaatataagagctt

SEQ ID NO: 801586 - DNA, 632 bp, Homo sapiens
ttcaccatattggccaggttggtattgaactcctgaccttgtgatctgccgaccttgtgatctgcccgccttggcctcccaaagtgctgggattacaggcatgagccaacgcacccggcctgcctgttggttttaatgtcggcatactggagggtgtgggcagtattgtgctgtggctttggtatgcttttcttaggtgactgatgatgtcaagcagcttcctcrtattcgttctccatttgtatctctcctttggagaaatgtctattcagattatttgcccagttgtgagttgggttgtttgtctttctgttgttgagttttaagagttctttatgggctggacacagtggtttacgcctgttatcccagcactctgggaggccgaggcgggtggatcacctgaggtcagaagttcgagaccagcctggccaacatggtgaaaccccgtctccaataaaaatatgaaaaaaattggccaggcatggtggcgggcgcctgtaatcccagctactcgtgaggctggggcaggagaatcgcttgaactcaggagacagaggttgcagtgaggcgagatcgcgccactgcaatccagcctgggcaacaggagcgaaactccgtctcaaaaaaaa

SEQ ID NO: 801587 - DNA, 632 bp, Homo sapiens
ttcaccatattggccaggttggtattgaactcctgaccttgtgatctgccgaccttgtgatctgcccgccttggcctcccaaagtgctgggattacaggcatgagccaacgcacccggcctgcctgttggttttaatgtcggcatactggagggtgtgggcagtattgtgctgtggctttggtatgcttttcttaggtgactgatgatgtcaagcagcttcctcatattcgttctccatttgtatctctcctttggagaaatgtctattcagattatttgcccagttgtgagttgggttgtttgtctttctgttgttgagttttaagagttctttatgggctggacacagtggttyacgcctgttatcccagcactctgggaggccgaggcgggtggatcacctgaggtcagaagttcgagaccagcctggccaacatggtgaaaccccgtctccaataaaaatatgaaaaaaattggccaggcatggtggcgggcgcctgtaatcccagctactcgtgaggctggggcaggagaatcgcttgaactcaggagacagaggttgcagtgaggcgagatcgcgccactgcaatccagcctgggcaacaggagcgaaactccgtctcaaaaaaaa

SEQ ID NO: 801588 - DNA, 632 bp, Homo sapiens
ttcaccatattggccaggttggtattgaactcctgaccttgtgatctgccgaccttgtgatctgcccgccttggcctcccaaagtgctgggattacaggcatgagccaacgcacccggcctgcctgttggttttaatgtcggcatactggagggtgtgggcagtattgtgctgtggctttggtatgcttttcttaggtgactgatgatgtcaagcagcttcctcatattcgttctccatttgtatctctcctttggagaaatgtctattcagattatttgcccagttgtgagttgggttgtttgtctttctgttgttgagttttaagagttctttatgggctggacacagtggtttacgcctgttatcccagcactctgggaggccgaggcgggtggatcacctgaggtcagaagttcgagaccagcctggccaacatggtgaaaccccgtctccamtaaaaatatgaaaaaaattggccaggcatggtggcgggcgcctgtaatcccagctactcgtgaggctggggcaggagaatcgcttgaactcaggagacagaggttgcagtgaggcgagatcgcgccactgcaatccagcctgggcaacaggagcgaaactccgtctcaaaaaaaa

SEQ ID NO: 801589 - DNA, 589 bp, Homo sapiens
atcatttatctgcatgtggatgtgcagttgttccagcgccatttgttgaaaagatgatcktgtctctattttattgcctttgctcctttgtcagagatcagttgactttattcatgagggtctatttccgggcttgctattctattccattgatcaactcatctgttcttttaccaatactgcactgccttgaccacttttctttcattctttttaaaaaatgttaatataatttaatgagagccaatttaaataagaagtcgtaatcaagtattctgggaaatgcttagaattcaatgctccagggaagagaattggatgtgaaaactctcagaagcaggaaaacttacagacagtgttcaggttgccaacctccagcgtccccactcagtcctctccacccagctgggattccccaaaacacagccctgaattgtctatggtcagaggcagatcctagcttgcttttcaaaaatcccagctgctgccgttcacacccttttccttatctgcagctcaagcactaaggcaacagcggcacaggtgcccacagctcccgggcggggagacaggcagcctcgggaaccag

SEQ ID NO: 801590 - DNA, 509 bp, Homo sapiens
aaggaaaaggaaatatgttttggctaatttttcccctcagcatctagcctagcttttgtacataataggtgcctcataggtgttaagcagatagagttggcctttaataaaccctctacaaaattgtctaataacataagtagtgaaaacactcctacttaagaatgatgcttacaaaattactaacagattctacctcccttcaccccatgaaacaaaaggaaacagagacaaaaccatagagacttactaataaaacctcactcagcaaacacctrttgagcactattaccaacctaggtgagctggacatggtttccagcctccttgcctggtgaaagaaacctgtcagcactgtggtagctactataatggaagcatatttagaaaaccatgtaagacaaagaaaggtacaccgaacccagtttttttgtccatgggagatgctagaaaaagctttgagaatgaatgccagacactgaagccgaatgttcaaggacaatgcaaag

SEQ ID NO: 801591 - DNA, 630 bp, Homo sapiens
gaaatatttagcaaagaaagaagagaataaactaacaattattgcctacgtactatgaattactatttattgagtacctataataagctagacactatcctagagatgtttcttatgttatcctatttcacatttctaactgcaccatgaaaaatgcattgctttcctcattttatagatgagaaatctgagacccaacaggatgtgacttgctcagtatcatgaaactagtgaggtcaatttgaacccaggtctgtctgatactcagaccaacatttttcttactatattacttttgaaatattctaagcagagagctccctctcagtgggactaarcaagtagtaattaggtaggaatgctttaagagggatcatcatgctgggaatagagtctaagtggttggactgggtaacctttgtaatcctttctattctgagaatcaagtaattctattaccttaagtcactgtgagtagagtaataagaagcaaaatcactaatcctcccagagaagctgcaaaatatgttctctttatttctttataatgtttcctgcaattatttttctttcaagaagaataacatctctctgaaatttaggagtccataacctatttccctcaactac

SEQ ID NO: 801592 - DNA, 636 bp, Homo sapiens
aaactcaaagcctaattgagatatacatctcctgccaccagtttaagccctgatgctaacgcctgccacagaggataattagtgaggaaacctggcacttgtaacatacagctagtcttgccatgagaagaaggagggtttagtggttaggggcatctgttcagaaagcagagggactggatttgactcctggatctatcactttccagctgtatggcctctattaagttgtttggtcccactaaacctctctttctgcatctgtaaaatggggataataatcttaatagatacctcatggagattttgtgygaattaattgaggttaacaactgtaaaatatttgtcacagttcatgatctggtgttcaataaatgtcaagtagtattatggtaattgcttaatggtgtctatcttcatttcagattattaaatgaaaacaatgttactgctaggtagtaaatgtctgcgggtcagtgttaggagaaggagaaaaggggaattaccatttattcaatgccaacctaattctggattcaccacattaatatttacaatgattctgggagaaggcattagtattcccattttacagatgaggaaagagagtcacaaagtggtttaatcacattgcta

SEQ ID NO: 801593 - DNA, 591 bp, Homo sapiens
gttgccagatttagcaaataaaaatgcagatgcttggccaggcatggtggctcacgcctgtaatcccagcactttggaaggccgaggcaggtggatcttttgaggtcaggagtttgagaccagcctggacaacatggtgaaaccgcgtctctactaaaaaaaaaaaaaaaaaagaaaaaagaaaaaagaaaaaaaaaattagccaggcagtagtggcgcatgtctgtaatctcagctactcaggaggctgaggccagagaatcacttragcctgggagacagaggtggcagtgagccaagatcacgccactgcactccagtctgggtgactgagtaagaccctgtctcaaaaacaaaacaaaatgaaatgcagatgctctgttacctgtgagtttcagatagaccaaggaatagtttttagtgtaaggatgtctcaaacataggacccagcagttccacgcataggtatatatccaagggaagtgaaaacacgtgttcacatgacaacttgtgtctgaatgttgttaacagcattattcatgagagccaaaagatggaaataactcaaatgttcatcaacaaatgaatggc

SEQ ID NO: 801594 - DNA, 591 bp, Homo sapiens
gttgccagatttagcaaataaaaatgcagatgcttggccaggcatggtggctcacgcctgtaatcccagcactttggaaggccgaggcaggtggatcttttgaggtcaggagtttgagaccagcctggacaacatggtgaaaccgcgtctctactaaaaaaaaaaaaaaaaaagaaaaaagaaaaaagaaaaaaaaaattagccaggcagtagtggcgcatgtctgtaatctcagctactcaggaggctgaggccagagaatcacttgagcctgggagacagaggtggcagtgagccaagatcacgccactgcactccagtctgggtgactgagtaagaccctgtctcaaaaacaaaacaaaatgaaatgcagatgctctgttacctgtgagtttcagatagaccaaggaatagtttttagtgtaaggatgtctcaaacataggaccyagcagttccacgcataggtatatatccaagggaagtgaaaacacgtgttcacatgacaacttgtgtctgaatgttgttaacagcattattcatgagagccaaaagatggaaataactcaaatgttcatcaacaaatgaatggc

SEQ ID NO: 801595 - DNA, 414 bp, Homo sapiens; identical to SEQ ID NO: 800801

SEQ ID NO: 801596 - DNA, 619 bp, Homo sapiens
cttttatgaatataatgaagctcagatttttcttagaaaacaatctcttgatgactagaaatagatttgtctggaaaaaattgtttccttaccagttatgagaacatgtacctcgtatattttaataattaagtcatataatatatactgttctactttattcaagtggaataaaataaaagtatgaagtatattacatacatatcactggcctcgaagttaggattgctgattcaaatctagctcagtcatttagctgcatgcctttggcacttcctcctgacatcaggcttttgttttgttcgataatgtgtggttggtaatgcctacctgaaaggttattttaagaattaaataagaaaatgtgtgtggaagtgcctggtgcctggaggtgtgcagtggacagcagtctgtcttaattgaagttgrttttttttttaatttgtttttcttttcatgttaaatataaaatttctctttaggtcaatgccttgctgcccacagagacattcattcctgtgatcagagggctggtgggcaatcccctgccatctgttcgccgcaaagcgctggaccttttgaataacaagctgcagcaaaatatatcctggaagaagac

SEQ ID NO: 801597 - DNA, 534 bp, Homo sapiens
actttctgttctttttctgtatgtataatggtaaactgccagaatactgatcaggccagaatgatgtttgaatctttctctgtaacccaccaacccacacgcatcctcccattttgttttggggaaggaagaaatgtwtccacgcccctgtctgtcccttcaccagttgcatcagtgaggtggagactgtcccccctgggcagtctgctcgctgggtggacgcactgcctgtccagctattctgcactggctcgtctctaattaaagtacttgctatgaacgatttttaagtactggagcttaatgaagttagaaaaaggatttggatgcagtttgtgaagacttcaaattgtttgagttttttctctagggagaattgtaaagtctggaggcattctgaattacttacaatgtattccattttgttcttttcaaaaattctctcatagtggtgaatagctgagaaaaaaaaaaataaaagccccctgcccatcttttcccccaggagaacactgtaactcttgcttggcaaag

SEQ ID NO: 801598 - DNA, 608 bp, Homo sapiens
aaaaaataaagccaaaggggatcccaaagagaaggagaaaagagtaacagtaataggagctagcgcctcccacctttcaggcagcacacactacctctacaacgccagcccaatcgcttagctagcctttcccagtccactgaaacataatggaagagaaggacraggagtgacaatttgtttggtgtctctaagattaatttgtctccgctatttaatagagatgcacagcaccaaggtcctggtgtgcaaacaggcttgcagaacgctggctgtgcagcacgcctcatacatcgctcctgggaagggaggaacgcaccagagtggggagagggcagaagagagcacgtgcgtaccagagagaagagggaaagcgaggagagagaataaaaaaaattattgctttttaatattcaaaaacactttgcaaaatttaatcaaagcagaggaaaagctaacatttttaccactttgacatttttattagcgctttcataaatttttaaaacatgaatggaattagtttacaacaccacaaaaaactgccctgaaaacatctggaagagaccaataggaaataataaaaaaaataaataaaagccaaattc

SEQ ID NO: 801599 - DNA, 475 bp, Homo sapiens
tgctggaccatttgcaagacaggcaaacagaaagctagccaggttaggcccttattcactccttccaccatcactactaccaccgcttcagatttacaaagaggtaaactgctaacctggtgtgtgggcatgtgttggcgagagggtcaagggaatgttctacccacaatctccatgctccatttctagcctctctrgtcaaacctttttcttctctagtaatcccagtaagtcaacccccttaataaactcacccatcctgtcttgcaaagctctgccccgctccccctccgccagaacattactcagtagattaagtaagcatccagggtaagcacatgggccagcaccccaggttgcataaattctgcgcaccgcgaccctcaccccgcatgcattaaccagggcccaatcttggcggggccattcagcatcacccaccccggggtgttgcccccaactcgggcccatccaa

SEQ ID NO: 801600 - DNA, 588 bp, Homo sapiens
acggtgttttcacatatgtacactggtgatactccaaaagggaaagaaaagtgaaattgttgggtgaaagagtgatgaaacacgaggagaaatgaaacccagtgcawgggttattgaccatgaaacctggtcagtcatggtttctgctcagtcatgctcagttttgctctactgctgtatttaaaaaaatggcaaggctcagagtggtgtggagggagcaccttggacacctgggtgaggtggatgggagttcttcatggtgctgctgcctacattctgagtcactgcgattcactctctgctttgttacagtttcatcgcaaaccagaaaaggttagaaatcatcaacgaagatgatgttgaagcttatgtgggactgagaaatctgtgagtactcaggaccagggcacattatctcagagaattttcctgttgtctgctctggtcaggcaggcattcactggttcgttctaatgtgcatgaaattatgtgttttcacaggacaattgtggattctggattaaaatttgtggctcataaagcatttctgaaaaacagcaacctgcagcacatgtaagtagagattga

SEQ ID NO: 801601 - DNA, 575 bp, Homo sapiens
gtggctggggaggcctcacaatcatggcagatggtgaaaggcacgtcttacatggcggcagataagagaatgagaaccaagtgaaaggggtttccccttacaaaaccatcagaccttgtgagacttattcactaccatgagaacagtataggggaaactgyccccataattcaattatctcccaccaggtccctcctacaacacatgggaattatgggagctacaattcaaggtgagatttggtggggcacagccaaatgatatctggaagttagctgctaaacaactgaagaaaagattaggtaagcaacaagggattaaagtaactggaggatgggatacagaaggttctatgtggaagctttattttcagggccaaccagaaaaccgtaactgttgacattcaaaacgatcttgaaatttatagaaggctgaaaattgctctcacagctactgtggtgtgatcccatatgttttgccagttgtttttcttgttacttactctaatactgtcctgataattattcgctgcatgtaaccattattcactgtcaattactcaggcctcgattctc

SEQ ID NO: 801602 - DNA, 574 bp, Homo sapiens
tttagtgctataaaattccctctaaaaactgctttagttgtatcacacaaattctgatacatagtgttttacattttccttttgatttgttttaactctattcgctttaatcttttgcgtgcttctttctctggcctcaggtagctttattacctgcatgtgtcaatcagcactatgctgaatacttgagaggaaccctctgcagatgtccatagttctttctgggcaatactcttctctttgctactctgtcttgtgaactctgcactccttgatttctcttgagctagtctcctcaacttaggtagatggcytctgcctgggttccttctctctgaacgatgaccttcattgtcttatatccattgtcttaactttaatatattttgttcagtgttttggtcatatgattgagagaacaaatccgttccctattactccattttaatcagaagttggcagtattcttgcttatttttttacaactcagtattggatgttaaaatcaatgtattgagttattacatgcattcagaaatgaaatggtgtagaagagaaaaggatatattagttt

SEQ ID NO: 801603 - DNA, 574 bp, Homo sapiens
tttagtgctataaaattccctctaaaaactgctttagttgtatcacacaaattctgatacatagtgttttacattttccttttgatttgttttaactctattcgctttaatcttttgcgtgcttctttctctggcctcaggtagctttattacctgcatgtgtcaatcagcactatgctgaatacttgagaggaaccctctgcagatgtccatagttctttctgggcaatactcttctctttgctactctgtcttgtgaactctgcactccttgatttctcttgagctagtctcctcaacttaggtagatggcctctgcctgggttccttctctctgaacgatgaccttcattgtcttatatccattgtcttaactttaatatattttgttcagtgttttggtcatatgattgagaraacaaatccgttccctattactccattttaatcagaagttggcagtattcttgcttatttttttacaactcagtattggatgttaaaatcaatgtattgagttattacatgcattcagaaatgaaatggtgtagaagagaaaaggatatattagttt

SEQ ID NO: 801604 - DNA, 632 bp, Homo sapiens
gactggctttcttttggtggtaaaagcatggtcaccggcctgagccaaaagctaacttgccaaagcatggtcagagtgaaggctggtgctgactggctttcagaaatgcatagctgtcagattgggtgactttcataagcatgtgtactgaggagagattgtctgactaattgctttcaatgtctgattacttgtctcctatcaatttttgtggttacccattcatggcttgagactayggccaagaaactctcaggcttgactatggagaacctgagtattctcatcattaagagtattaaagtgttcttgttagtacgggctttatttatgtatttatttattttttctgacacccagactgaagtgcagtggcatgatcttggctcactgtaacctctgtctcccaggctcaagtaattctcctgccatggcctcctgtgtagctggttctaccacgcccagctaattttgtatttttagtagagatggggttttgccatgttggcgaggatggtctcgaactcctgacctcaagtgaaccacctgcctcagcctcccaaaatactgggattaccaacatgagccacggcacccaactggctttattcttgataacagatttgtcacag

SEQ ID NO: 801605 - DNA, 632 bp, Homo sapiens
gactggctttcttttggtggtaaaagcatggtcaccggcctgagccaaaagctaacttgccaaagcatggtcagagtgaaggctggtgctgactggctttcagaaatgcatagctgtcagattgggtgactttcataagcatgtgtactgaggagagattgtctgactaattgctttcaatgtctgattacttgtctcctatcaatttttgtggttacccattcatggcttgagactacggccaagaaactctcaggcttgactatggagaacstgagtattctcatcattaagagtattaaagtgttcttgttagtacgggctttatttatgtatttatttattttttctgacacccagactgaagtgcagtggcatgatcttggctcactgtaacctctgtctcccaggctcaagtaattctcctgccatggcctcctgtgtagctggttctaccacgcccagctaattttgtatttttagtagagatggggttttgccatgttggcgaggatggtctcgaactcctgacctcaagtgaaccacctgcctcagcctcccaaaatactgggattaccaacatgagccacggcacccaactggctttattcttgataacagatttgtcacag

SEQ ID NO: 801606 - DNA, 522 bp, Homo sapiens
ccatgtactgtgaacttgaaaacatgcagactcacgggggttcctgatgcaatgcttcagatgaagattgtggacttgaaaatacagactagaaggccgggcacagtggctcatgcctgtaatctcagcactttgggaggccaaggaaggtggatcacaaggtcaggagatcgagaccatcctggctaacacagtgaaaccccgtctctactaaaaatacaaaaaaattagccaggcttggtggtgggcgcctatagtcccagctacttgggagactgaggcaggagaatgtcgtgaacccgagaggcggagcttrcagtgagccgagatcacgccactgcactccagcctgggcgacagagtgacactccgtctcaaaaataaatatataaataaataataaataaaaaagaaaatacagactaggctagtccagtgtctatatttagacttgttcttttaataaagtttaggtaacatcttctaaaaagtttgtagcacaaaggctcagctggggatggt

SEQ ID NO: 801607 - DNA, 539 bp, Homo sapiens
tttcaatttttaaaaacatgcagcttccctctccccttttttatatttgaaagaattcatttggttgtaaagtgaaacccatattagcaagtacgtggcaatgttcattccaatcagatgcagctttctcctctctctggtctcctgtttgcaattgcttccctcctcagtagggaaaaaattgagtgggagtactgagatgtgtgggtttttgtcattggacaaagaatgaggttagaagactgtggcttggagtctctctaggttttcaactatttcttcacaatttgaatacctgatggttgtcccttttaatttatttgaagtgctattttttttaaaaaataaaggttcatccatgyaaaaaaaaattatataggtctttggaagtggttcttagggcatacagcaactaaccactacttattcaagaaaaatctactaaaagtcattaggaacagtgagagtctgtggtatttgaaccacaatcagtgccctcccgtcttcctcccaggtcaatatgacaaactctaagtggg

SEQ ID NO: 801608 - DNA, 549 bp, Homo sapiens
gaggacaataaacaccagtttacctagattaaacagttttaagtattcttccacacgttctctctctgtctttatctatgtgtaatttttccaggccagacacagtgactcatgcctataatcccaacactttgtggggcaaaggtgggaggattgcttgagcccaggagtacaagaccaccctgagtaacataatgggaccccatgttacaaaaaatttttaaaaattagctggacatggcggtgtgcacctttagtcccagctactcaagaagctgaggcagaaggatcacttgaacctgggaggtcaaggctgcagtgagctatgatcgtaccactgcactctagtgtgagtgacagaatgagctaccrtctcaaaaaacaaaacaaaatttccattttccccaaaaatgtcctctgtagctttgctgggcccaagagccaatcaaagatggttttttttattccttcataataatggacatttaaaataagtcctggtcaggagtcttgttgaacagttattcttgaatttaactgctctttaga

SEQ ID NO: 801609 - DNA, 576 bp, Homo sapiens
ggctgaggtgggaagatctcttgagctccaggagttcaaggttgcagaggttaaatgtatatcctgcattctgaaggagcacatacagaccctgcagggtatcatctccagctgatgagcatcttagtcatctcaggctgctgtagcaaattaccacagactgggtggcttaaacaaaatttatttcccacagttctggaggctgagaagtccaagagcaaggtgttggtagatcacgtgtctgctgagagcccactgccttcataggtggccttcttgctgtgacctcacatgatagaaggggcaagggagctctctggagcctctgttataaaagcactaatcccatttgtgagggctccaccttgcctcccaaagactctgtctctaaataccaaaacattggggattagtaayttagccagggttttaagaagtcattccaatcttctattatgaaagcatcttttggatgatggagccatggactcaatgttgtccctcctttgctttgaaatgggcccaatggttaagaaaatatacatgggatcccaggtcagtctatgaggtactttg

SEQ ID NO: 801610 - DNA, 587 bp, Homo sapiens
cggcctcccaaagtgctgggattacagagatgaggcagcatacccggcctgcccctttttttaatatagggtctcactctgttgcccatgctggagtttagtggagtgatcatggctcgctgcaaaattgccctcctgggctccattgatcctcccatctcagccttccaattagctggaactacaggcacgtgccaccacgcctggctagttttatttgttgtacagacagggtttcaccatgttggccaggctggtctcaactcctgaactcaagtgatctacccacatcagtctcccaaagtgctgagattacaggtatgagccaccwtgcctggccaaaattgtatatatttatagtgtacaaaatgatgttttgaaacatatatgtgtgtgtgtgtgtgtgtgtatatacacatatacatttacgtgtgtgtatatatatgtttatatatgtgcgtttacacccacacacattgtagaatggcaaaatcaaactaatatgcattgcttcacatagatattattttctggtaagaacacttaaaatctactctcttagcatttgttgagaagacaatatatta

SEQ ID NO: 801611 - DNA, 633 bp, Homo sapiens
tatctgaatctcgataatcgagggggaaaaagagaaaaggtgttcgtgtattaatattgtggaaatggggaaggattacatatagataggtaggtaggtagataaagatctccaaaatggtcaatctttgaattgccaaattcctcaatgtaagcaaaaagatgtcaaatcagatggcaaagtctgaatactgaagctcttgcatatcattcttagcaagaagagtcagttaatatgctagttctctcttaccacacagttaaaacaagtttggatacaagacgtagtaaattataagcagaggacaggtgagctatttgtgtgaacacagctgaaggcctgggggtggggggaatgtttaactatgaaaacagacaagaacataaaaggccccttggtggtgccatttagcatggggattagcagccacatagagcacaatggctyctgagctcagccctgcattttataattactgacatgtggtgtgataatcctaaaccatgaaagggaaaaaaagagacactgccacacacagaccaacttaatactgccccaaagctgcaaggaagggaatcaaaaaggactccaagcactggaaagagttattacaaacctatgcacagaacccaa

SEQ ID NO: 801612 - DNA, 640 bp, Homo sapiens
atgttctccctcccccgaccccaccaccctgcaggccccagtgtatgctggtcctcttcctgtgtctatgtgttctcattgttctgctcccacttataagtgagaacatgtggtgctcggttgtctttttttttttaagacagtgtctcactctgtcagctaggctggagtacagtggcaccatgtcagctcactgcagcctcagcctcccaggctcaagcaattttcccacctcagccttccgagtagctgggactrtaggcacacgtcatcacacccagctaatttttgtattttttgcagagatggagttttgccatgttgcccaggctggccttgaactccattttcaataataacgtcatggagctcttattagtttcagctttactgcttggttaataaaacctccctatggaaatccaccttttcgccccactcccattccatgaaatacgaaattctataaccttttaaaaacacatcgcttaggttgtcactgtggactctgggctatctagtgaaatcttggctagcagcatgtttagttggcagtgaaaagatcttagacttcccatgcttgcccatcttgattcctttcccctcactaacctttaaacaatcaggccaaaagatgaga

SEQ ID NO: 801613 - DNA, 602 bp, Homo sapiens
gaataaaagagcaattagaactctcagagagactcagggagcaaacaagaatctgatttagaacttaagtcttcagcatgctttacccctgaatcacatagatccaggacagcaagtttctattttaaaggtacagctgtcaatcaatcacttaccgtactgtcaagtttctataaggcgccattttatgtgcyagtgaaggttcaatggataagaaacaggtgataacaataagccacattctctaaaagagattgcagtctaattgggaagaggattcaaatacataaagagatacacaagacataaggatttgaacatggcgtggcatggtggctcatgcctgtaatcccagcactttgggaggccgaggcaggtggatcacctgaggtcaagagtttgagaccagcctggccaacatggcgaaaccccatctctactaaaaatacaaaaagtttagctgggtgtggtggcgcctgcctgtaatcccagctacttgggaggctgaggcaggagaatcacttgaacctgggaggtggaggttgcagtgagccgagatcgggccactgcactctagcctgggcaacagagcaaaacgctgt

SEQ ID NO: 801614 - DNA, 602 bp, Homo sapiens
gaataaaagagcaattagaactctcagagagactcagggagcaaacaagaatctgatttagaacttaagtcttcagcatgctttacccctgaatcacatagatccaggacagcaagtttctattttaaaggtacagctgtcaatcaatcacttaccgtactgtcaagtttctataaggcgccattttatgtgccagtgaaggttcaatggataagaaacaggtgataacaataagccacattcyctaaaagagattgcagtctaattgggaagaggattcaaatacataaagagatacacaagacataaggatttgaacatggcgtggcatggtggctcatgcctgtaatcccagcactttgggaggccgaggcaggtggatcacctgaggtcaagagtttgagaccagcctggccaacatggcgaaaccccatctctactaaaaatacaaaaagtttagctgggtgtggtggcgcctgcctgtaatcccagctacttgggaggctgaggcaggagaatcacttgaacctgggaggtggaggttgcagtgagccgagatcgggccactgcactctagcctgggcaacagagcaaaacgctgt

SEQ ID NO: 801615 - DNA, 619 bp, Homo sapiens
ctagatgagaggaatacattctggtgttccagaagactgcaggatggttacaattagtaataatatgttatacattttaaaatagctgtgaagaggagatattgaatattctgttcaagaaattagtgttcaagaaaacggatatgctatcgccctaatctgatcatttctatattttatgtattgaaacatcactatgtaccttataaatatgtaaaattattatgtgtcaattaaaaacaacacatagaaatgatactggcccatgcctgcaatcccaccactttaggaggccaaggtggraggatcacatgaggtcaggagttcaagaccagcttgtccaacatggtgaaaccccatctctactaaaaatacaaaaattagctggacctggtggcgcatgcctgtaatcccagctacttgggaggctgaggcaggagaactgcttgagcccaggagacggaggttgcagtgagtcaagatcatgccgctgtactccagcctggctgacagagtgagactatgtctcaaaaaaaaaaaaaaaaagatactggaccctattataaggcaggtatgtgagaaatcgatcaggactactgttttgaaaattctaatgaac

SEQ ID NO: 801616 - DNA, 619 bp, Homo sapiens
ctagatgagaggaatacattctggtgttccagaagactgcaggatggttacaattagtaataatatgttatacattttaaaatagctgtgaagaggagatattgaatattctgttcaagaaattagtgttcaagaaaacggatatgctatcgccctaatctgatcatttctatattttatgtattgaaacatcactatgtaccttataaatatgtaaaattattatgtgtcaattaaaaacaacacatagaaatgatactggcccatgcctgcaatcccaccactttaggaggccaaggtgggaggatcacatgaggtcaggagttcaagaccagyttgtccaacatggtgaaaccccatctctactaaaaatacaaaaattagctggacctggtggcgcatgcctgtaatcccagctacttgggaggctgaggcaggagaactgcttgagcccaggagacggaggttgcagtgagtcaagatcatgccgctgtactccagcctggctgacagagtgagactatgtctcaaaaaaaaaaaaaaaaagatactggaccctattataaggcaggtatgtgagaaatcgatcaggactactgttttgaaaattctaatgaac

SEQ ID NO: 801617 - DNA, 621 bp, Homo sapiens
catacacacatggatttggatacgcttatgggtgcacaaagtcatttgttcatttgtttagacaaattttgagtgtattgttttagggcaggtactgtacacatatagacatacacgctttttaggagtgatctttgcaaatggattttaaaagcacaaacgatttctttgcttccccaaggcattccatcattctctagcatcgatctctayaaatggccttgctctcttactcttagttactagctgactttaggatgggcagctgctgtccgacattatttatgtacgggagatgatcccaatatcctaaggtaatcctctccattgcctgaaattcttaaaattgccataagacatagagatgaaaacatgggtattggaatcaggaggcctgggtttaaatcttgactttgtcactcacaacgcaactttaacctccatgagctccagtttctgcatttgcaatatggtgataataaagtttccctcatgggaatggctactcaccaaattcaacaaatatctattgtaggttgattgcctgcaaaggacacagaaatagagttgattcaatttctcaactgaaggaactcactgcctagcagagaaagcaaagac

SEQ ID NO: 801618 - DNA, 696 bp, Homo sapiens
ggccatgttataagatcccttgagcattaatgtgaaactgtataataacttatagtacatgcctatcctttatattttagattctggaaataatatggttacatacctgactttatagtgttaccactctatatactattaatgtgttaaaattatatcaatacctatcaaatgctaaatcctacattctgtaaactgattagctaagatgaacatgaagacagtaggcttgcacaggctattgaaaactatatactgatattagcatttactcaaattctcaaatctcttggtaaaaattaaagtcctaatgccctccccccaaccccaccactttaagctaaattctctaataaacaaaagtaaaacaagattaaaatttgtggaagaagaaataaataaataaaattaagtggaagaaacagaaatagagtttggggcactaatatcatagtctgaatataaacactttatgcccacttagctacaaaggccaataaaktaattaccgccatatataaagttgaaacaaaattgatagttatatattgctatcacttaatctgtccacatcatagaaaaccattagcaaattcatgaattacacacctgcttacactatcttccatgagaattatcggaataaagaaataactctacataagaaaggatccattttaagtggtctaaatatat

SEQ ID NO: 801619 - DNA, 574 bp, Homo sapiens
caggggaggaatatgagaaatgcggaagtgcaatgagctgtctgggtatgttgtcagagagatttgccctgtgaactttgtgggcaggctttctggtggagtccacagttggttagtagaaactgcagccctttgctgaaatctctgtctgtgttgctatgagccctctcccctttcctctgctcttatctgtccacagactattcttcgctttgatcccctcagtgatctggatgargagagaaagaagtaggcctcctgggcagtgttctggtcactatgctctcactgtcttctgtgagaggaatcatgggccaaaggggtctctcttagcactgagctgtgcaacctcgagggaggggtgattcaggtaaagtcaaactctacatcttagcctacttaaggtgccatattctgggattttctcctccacctctgtgctgagacctctctgctacactcccgagttcccacagaggtactctcatccatgggtggttgttgaaatcaatttgtgtgtgttggtgggaagaaggggtgatgagggctgaaaactcctattctaacagcttgc

SEQ ID NO: 801620 - DNA, 613 bp, Homo sapiens
ttattttggagacccatgactacgttgcttattatttcttacatcttttttccccattcagcatatagtctgaagaatggcatagcatcattttcataagcccttcacaagctagctagcatttcacacactgtcttcctccagcattgggtagtgtgcagaaacaattcccattctagctttgtaatttttctctaatttgcatttaagattcttataaattgcatccgtactttcagattacttaagtctcatttgaataagtgtgtagcattccaaaarccatcatcaagagtttttgtttgttcattcgtttgtttgttttaatgcatacagcctcacacagggcactccattttaaagtacttaagaagaaaatggttaataaaaggaatctgaaaactgctcaagtgggaatatttagagttgcatacgttctcagtaaaagtctattttgttttagatttggtctcagcctccacaatgcctactttagtgtcagcaaagatgagaaacacagaatcaaggcaagagcaacaacattttgtaagctggaaaagagatggaaaagtttgtaaaaggagaataaatctctgaacccccaaatcactaa

SEQ ID NO: 801621 - DNA, 566 bp, Homo sapiens
ttgttttactttgttgaatctatcagttaggactttctagctgtcttacagaattttctgtctcatagagtgttctctctcaaattcccttatgagcatgttaagttagtgtaacaataaaatgacatttattgaaggtgactatgttttaggcactattttaggcatttcacatacatcaacttattcaatctctgcaacaatcccatgaggtaagtactatgtttaacattttacacatgagaacactgggttcaaaaatatcacataccttttcaaagctatgcaacttccaaattacagaaacataattcaaaattcatgcccaagcttatttgattmtaaaattggttattttaatcctttaccatattgtgacttattatataatttttcattatcttgtggaaaaatgcttaattgatatatgtaaccacagtcaaactcaaattttgataaaatatagatttattgagtataaaacagttatagcaatgtgtattcttcattcctctaaatgtcgtttttcctagatatttaaaaatattatttcctcaagatgatcc

SEQ ID NO: 801622 - DNA, 514 bp, Homo sapiens
gtgcgtgtgtctattttcccctctgtgatagtgacttgctccattttttgccctttcgtcatacctggtacagtgtccagcacagagcacaaacccaacatgagctgaatagaacaggagtctggatatagatgcatagaattgcatgttgaaatgaccttaaaagtctcccaggcctccctcctgcagctgactcttgaagacccataaaccttcttccacattggccaatcagcaccctccaagcacctccaggggaagagaactcaaagctgtgctggccgttagtcaagtatctggtattgctctggcttctgggttcctrcaacttccactcactggtcttgtctttactcactggggccatggagaatcggtccagcctgtcttccccatgacaatccttccagtatctgaacacagctctctggtgtctctgagctttctcatatccaagctaagcctcctgagctgcttcaaccattcctcaaggacatgatttagtgtccctctt

SEQ ID NO: 801623 - DNA, 637 bp, Homo sapiens
agggccctgaaggaggggattagagtagctcatcttcctataaaaggcaagtccgtggaagcagaactgattatctttaaaattgtttccaggtatgaagttcagtttttctagctacttctctactatgttaatattgacattattttgacatattgatagcaatagcatttactatgctcctccaaacaccatgcctaccaaccaggcattgttctgagccctgtacacgaaccacatcatttaaatccttacaatgaccctatgaggtgggcaccatcacccttctttttcagatgaggtaactgaagttccatgaggccacccagctggcaacaggcagacaaggcaactgcaatccagagctggacactcagtggcagtgccaggctgccgcctcgagatttctctgtgacaagcagatccttctctggataggtattttaacagcatccattcccatcacagggcaygaaagtcaggccagctgggttcctgatctagttgtgtcactaactagcttcatgttagacaagtgccttcctccgtcccttgcaccaatctacaaagagagcgggtaaacttcgtggctcctaaactccactctagccccaacattctataattctgtcgattg

SEQ ID NO: 801624 - DNA, 510 bp, Homo sapiens
tgcccagtgcaggtacatgttgccacctgaattttttaaatgttaaaaaaatgtagtccaggtgcggtggctcatgcctgtaatcccagcactttgggaggccgaggcgggcggatcacgaggtcaggagatcgagaccacgatgaaaccccatctctactaaaaatacaaaaaaaacaaaaagtagccaggcacggtggtgggcgcctatagtcccagctactcgggaggctgaggcaggagaatggcatgaacccagaaggtggagcttgcagtgagctgagattgcgccactgcactccagcctgggtgagagagcgagactccgtctcaaaaaaaaaaaaagtaaaagttttggtgcccatcctcagrgtagagacttccccagagatctggttaataatggtcagtatcccttataagctttgaaaagcagaaactgtgagcatacttcaatcatgccagtattaacaaatgtctatggataactgaggacaacttttctaagta

SEQ ID NO: 801625 - DNA, 601 bp, Homo sapiens
ttggtggtgtgccaagaagatgttaccagaccccaccacttacccaaagttagcctttgggtgatgggggacaggggtgttccccagtattgtcccttccatggtcaccaggaagatgttactggaaagggatctcaatccaaaccccaagagaggattcttggatctcttgcaagacagaattcagggcaagtccatacagcaaagtgaaagcaagtttattaagaaagtaaaggaataaaagaatgaaagaatggataaggaagtgagaggtgacagcatgctggcagccctcgctggctcttggtgccttctcggcctcagtgctctaggtgcgcttgaggagcccttcagcccacggctgcactgtaggagcccttctccgggctggctgrggctggtgctggctccctctgcttgcgggtaggtgtggagggagaggggtgggtgggaacctggctgcgaagtgcggccctcacgggccagcgcgagttcaggtaaggcgtgggctgggtcaccctgcactcagagcagcccgccggcgccactagcccgggcagtagagggcttagcacccgagccagcagctgcagagggtgca

SEQ ID NO: 801626 - DNA, 617 bp, Homo sapiens
catggatccatactgacatggaaaaagagcacattctaaaatctcacagtcctttacttttgctcatcagccctcaaaaggactgtgagtgttgcactaaataaagattgacctgaccaacatggagaaacccatctctactaaaaatacaaaattagctaggcgttgtggctcatgcttataatcccaactrctcgagaggctgaagtgggagaattgcttgaacccatgaggcggaggctgcggtgagctgagattgtgccattgcactccagcctgggaaacaagagtgaaactccgtctcaaaaaaagaaaaaaaatcgttgaggtcaaaatagctgtactttctactgtcctccttctccttcaactgcatttcttcctttaaaaagaaaaaatagcacagtgcttaccaatagggtgtagaatcagactgactgtactcaagtcttagccatgggagcctaggcaagttgtttagtctctcaaagtctcagtttcctcattcataaaatgggaatagcatcactaattttaaaggtttgttgatggaattaaataagggaatttatgcaaagtattgggcttaagctggcactgaacttaaaataacttat

SEQ ID NO: 801627 - DNA, 547 bp, Homo sapiens
gtgtcagccctcagctcactcaaaagcttctgggctatttgcctgacagtagacgtgaccagctttcctcaccggggtctgtggaaagggagggagagcatgtatcatgctccttacctctgtttggcaatacttgctgytgccttcatagagaagcaggtataggtatcaggtgtgaatctgcctgtccagattgcagtgggaaagcatcattttcctttacgtgtttcaaataaatttaattctggtcccaagctaccacttatcagagaagacgaggcacccagaatcaatcagccttggactcagcctgccatggccagctgctggcctctgtcccctcattgtgctgtcctctaggaagggtgggtgaggctggcccaggggctgtggtgaatgctctcccctcctcacactccaccaggccgtcctctctgctcaccttgtccagtctcagaactttccccatcaagaagacaggtctaggggacaagaggctgtgctgttctcaaacccagaaaggccctccagcacaccatggaagacc

SEQ ID NO: 801628 - DNA, 547 bp, Homo sapiens
gtgtcagccctcagctcactcaaaagcttctgggctatttgcctgacagtagacgtgaccagctttcctcaccggggtctgtggaaagggagggagagcatgtatcatgctccttacctctgtttggcaatacttgctgctgccttcatagagaagcaggtataggtatcaggtgtgaatctgcctgtccagattgcagtgggaaagcatcattttcctttacgtgtttcaaataaatttaattctggtcccaagctaccacttatcagagaagacgaggcacccagaatcaatcagccttggactcagcctgccatggccagctgctggcctctgycccctcattgtgctgtcctctaggaagggtgggtgaggctggcccaggggctgtggtgaatgctctcccctcctcacactccaccaggccgtcctctctgctcaccttgtccagtctcagaactttccccatcaagaagacaggtctaggggacaagaggctgtgctgttctcaaacccagaaaggccctccagcacaccatggaagacc

SEQ ID NO: 801629 - DNA, 636 bp, Homo sapiens
tgagtctttccaaaaatggacacagctgggaagtgacaaagtgaggattcggacatgagtctgtatggctccaaacctaagcctgtaaccataggacccccctgcctcccctctaggttctctataccttccccactgccctaccaggtggaggccttaggctaccctggctgctgctggcttggcctaaaggctgatgctcccagccagacctgagcaagatggccaacctccggggaggagctgaggcaagggccaagagctcaggactgtggctggcagcggtggctgtgctcagctttcccaggcagtggccaaactcaatgctgcagccagagaagctgatggggaggaggagcgaccagscttggtcagtctggaaggtcccagatgcagccacgggctacccttgtcctttccccttcccaggcacttccccaaacgtgggaccctcagcctgggtcacatgggcttgtaggccgtgaggaaacaaccattctgggcattcctgagccttgggggaggcggctttccttccgcccactatgggaaccctccagggccctgtcggtgccttcgctggggaaggaggcctgccagggaccagctcgttccagttcctcctctgagagagca

SEQ ID NO: 801630 - DNA, 612 bp, Homo sapiens
acaataataaaataaccatacattgtgataagtgctatgaaaaagagttgcatggcataataaaaacataaaataggggggaagttcttaaggaagtccagaaatgtttccctgaggaagtgacatttgaacctgaggaaagggtaggcaaagaaaggtgttactatatagaagtgaacaggatctgggggtcaatattctaggcagagaaaatagcttatgtgtagagattcagatagagcatgaagagagatgacatgtagatgggcacagaggccacactacggagggctatataggccacaatacaaatttagatctttatcctgagaacaatgggaagtctttggagtctatgagtctattagaaagtaataaaagaagagctgctcaaacaatgaaacgtatattacttttggasttcagatggacatacagatacctcacaggtagaacggcatgatatcacccaggattacttaaggggagcatactttttcaagtctatccttacatgcatgttgaaaataacaggattttttttagcatttttgagacagtacgtgatttactgaatctgtaaaagcgtggttgacagtggggaaatgtgtg

SEQ ID NO: 801631 - DNA, 601 bp, Homo sapiens
aagatcgtgccactacactccagcctgggtgactctgtctccaaaaacaaacaaacaaaacactacagtacaaaatgtgtatattagggctgaagaaatatagcatagaagagtgatctgagtggatgagagtaatcaagatttcctatgggggaaattacttttagaaactgaagggtagagagaagtctagtgtagtagtccaagcacgtagttctccactgataatactgtgtagcctctagcaagttacttaacctttctgtgtctcagactcatttccagaacagaatagtgcttactagataggggtggagtgctccctcgcaggtggtgctcactggaaggcctcagtgagttaatgggtaartggggcttagcgcttgatcaatagaattagcaacatcatctgacatcccatcttcacattcctgggagtcccctacaattgctcctacttctcttacaaagcaacatttcgttctcctaaattattttctagtccttgttcatagtcaacttgctttgttaaaattactttattctttgtagaaaatgatgcatgctcataaaaaagagctccaagcaataaagtacaaat

SEQ ID NO: 801632 - DNA, 504 bp, Homo sapiens
tttacatgcctgtgtgccaggcattgtgccagatgctggggctgtagatttaacaaattctcaacggcctacagtctattgaaagaaacaaagattggccgggcgcggtggctcacgcctgtaatcccagcattttgggaggctgaggcgggcggatcatgaggtcaggagatcaagaccatcccagctaacayggtgaaacccgtctctactaaaaatataaaaaattagcctggcacagtggcgggcgcctgtagtcccagctactcgggaggctgaggcaggagaatggcgtgaacctgggaggcagagcttgcagtgagccgagatcgcgccactgcactccagcctgggtgacagagcaagactccgtatcaaaaaaaaaaagaaaaagaaacaaagattattcagtaacaggtggcaattagggtgatggaatagggtaacagaaggcactgagccggtgctgtcgacccaggcttgtagttcagggacgcccagatg

SEQ ID NO: 801633 - DNA, 633 bp, Homo sapiens
acctcccatgtggcaaggacatgtgagccagctatcatcctcttcctacttgatttcccttcaaaggccttccttatagcttaaaaagcaatcgccagtctttcggagaatccttttttttttttgagacagggtctcattctgtcacccaggctggagtgcagttgtgcaatctcagctcactgcagcctcaacctcccgggctcaagtgatcctcccacctcacacaaagtacttgagaccacaggtgcgcatcaccatgcccagctaatttttgtgctttggtagagacagggtctccccacgttggctaggctggtctcaaactcctgggctcaagccatcygcccacctaggcctcccaaagtgcggggattacaggcgtaaaccaccataccaggcctgaaaactaccatgcctggcctgagaatcctttaatcactgatctagctttgagataatttgagatatccttgggctacactggccaatactgtggccactagccacaggtggctgctgagcacttgaaatgcggctggtctgaattgaaatgtgctgctaactgaaaaatataccctggattttgaagacagtactggagaaaaaatataaaatatctcattagtattt

SEQ ID NO: 801634 - DNA, 526 bp, Homo sapiens
gatgggaaagcataggggtctccgggacagtgagggggccagcctgttcccacatgccagatgctgagggacccaaagatgacaaagttctaggagataaaacatgaatcaaataaaatgccgagaaggaaatgtagacaacttccagggggtgctcagaagggcaagagtgccttcacctggagtccttagagaaagcttcaccttcaggtgaggttagaagtgaagtatgcaggtggcaggacctgcccacatggtggcctggagsgaggaaagtacaagtatgttcagcaaggaaaagagatctgtttcagccaggtgcactgtctcagcactgtgccaggcaagcacagagattacatgtagaatcggacgttatggaagactcttgaaagtcatgatcatttcagctatgggtgagagttcagcctggtgtaatggcaattccatcaaggccctggatcactgggcagatcaaaagatctaagactcaaagggtgtcacgcagagcagactccaggcccct

SEQ ID NO: 801635 - DNA, 559 bp, Homo sapiens
aacggatccatgttaactacctaagcggaactgtgagcagagtgcacctcaacccactgcttcttcctcccttcttctcctgctggcagccccttcagatgctcactcctcagagaaccccaatataggtcccaagcaaagaggtaacctagatcagtgccagaactctctctcccctggcacatacatgtccctgctaagaagggcctccctggggcaaggaagacaggcacagtccctgggcacarcctcctgcctctgggcagtggcagtgtgccaggcgttctggctcccttgcccctgggatctagtctcttatccacccctcataggacatgaccaaccaagtaaccctgagggggaagcaacagcaaacaggagtcacaagaggggaaaaaaaaaaaaaaaaaagagaaagaccaagggagcagggagggcattgctcacgggaagacagtgcaccatttactaatggactcatcagctattgataggaaaggcctttgtgccaccctattgcctggcctggggagctgtgctgtgatgggatctgagcaat

SEQ ID NO: 801636 - DNA, 631 bp, Homo sapiens
ggcaccaagctgtttatgagggatcctcttccatgacccaagaacctcccactagattccacctccaacattggagatacaatttcaacatgaggtttagagagacatctatccaaactatagcaccctgtaacaatacagtaccattcaccatctcctatattttattgtgatatattttaactatacatccattataaatctcacatacagtgctataaaacttatttaatcatcttttaagctagttaataaaacaatctttttttttttttttttttttttgtgagacagggtctcactctgtcactakgctgtagctcaatggcataatctaggctcactgcaacttccgcctccttggttcaagcagttctcctgcctcagcctcccaagtagctgggattacaggccaccacatccagctaatttttgtatttttagtagagacggagtttcaccattttggctaggatggtctcgatctcctgacctcgtgatctgcccgcctcagccccccaaagtgctgggattacaggcgtgagccaccgcgcccggctgccaaaacaatcttttttatttacctacacacttgctatttcagtacttttcaatttttctttagatctga

SEQ ID NO: 801637 - DNA, 631 bp, Homo sapiens
ggcaccaagctgtttatgagggatcctcttccatgacccaagaacctcccactagattccacctccaacattggagatacaatttcaacatgaggtttagagagacatctatccaaactatagcaccctgtaacaatacagtaccattcaccatctcctatattttattgtgatatattttaactatacatccattataaatctcacatacagtgctataaaacttatttaatcatcttttaagctagttaataaaacaatctttttttttttttttttttttttgtgagacagggtctcactctgtcactatgctgtagctcartggcataatctaggctcactgcaacttccgcctccttggttcaagcagttctcctgcctcagcctcccaagtagctgggattacaggccaccacatccagctaatttttgtatttttagtagagacggagtttcaccattttggctaggatggtctcgatctcctgacctcgtgatctgcccgcctcagccccccaaagtgctgggattacaggcgtgagccaccgcgcccggctgccaaaacaatcttttttatttacctacacacttgctatttcagtacttttcaatttttctttagatctga

SEQ ID NO: 801638 - DNA, 644 bp, Homo sapiens
tgtagcagcaaaggcctactggatgctgaatatcaaaatttttacttttgccaagtttttatgactgttttcaataactctttgaagcctgcaaggtgacatgggtaaaccttttgttagatctaggattagtaactggtgtggcagaaagtccaaaggagaaaaatatccagggaattaatgagtggaacactgaagtcctggtttcaagaaagacaggtagtcaagagggatcaggagactgggtaaaattggagagatcaaatatgaaacacctggaatgaggaagaagcaattcagtagctggtagaagaaaagktgtgaaaagtgatggataagttggttgtgttcagaggagggatattagaaacttaggcttttctaaaaaataaaagaatttggaaatgaggttatgtgaggaaaatcaggtctctagcaaagcaataaaaatgtcaaggatcaaagtatcacacactgggagcagggttgccaggtaatatgttggatgcccagttaagtttgagcatcagacacgcaatgaataatttgggatctgccttttctccatatcctcgccagcatttgctattgcttttcataacaacatggaatgcttcacaaatttatgtgtcatccttgtgcag

SEQ ID NO: 801639 - DNA, 598 bp, Homo sapiens
agatgctatcatggattttaggtaagggagtgacactcagttttgcattctgggaggaacattttgacagcattgtgaaggaaacgtaataggactagatgcgatgtaggggccagttgggatgttatgcagtgatccaggtgagatgtaataagtcctgatttaagtctgaagtgatagaaatggagaggaggagacctaattgtgaggtattaaagagaatggatgaatagaccttggtaatttattgagtatgactgagaaaaaggtctctgaatggcccttgrttttctgagttggatgactatgtagatatattatccatcaggatagagcagataggaaaaaggaatacatttaagaaatgtattcttaaatgatgaattaggttatgatatgttgaatttggttgatgcctagacagaattagtcaacagatggttggatatgtgtttggaattaaggagagaggtttgggttaaagatacacatttgtgagttagcagtataggtaatattaaatagttggagttgttagttgagatcaatgaatctcaaccagaggtgattttgatgtgtagaagacatttagcaatga

SEQ ID NO: 801640 - DNA, 564 bp, Homo sapiens
tttttattgtgtctatttgattcttctctctttttttctgtattagtcttgctggtggtctatcaattttgttgatcctttcagaaaccagctcctggattcattaattttttgaagggattttgtgtctctatttcyttcagttctgctccgattttagttatttcttgccttctgctagcttttgaatgtgtttgctcttgcttttctagttcttttaattgtgatgttagggtgtcaattttggatctttcctgctttctcttgtgggcatttagtgctataaatttccctctacatactgctttgaatgtgtcccagagattctggtatgttgtgtctttgttcttgttggtttcaaagaacatctttatttctaccttcatttcgttatgcacccagtagtcattcaggagcaggttgttcagtttccatgtagttgagtggttttgagtgagattcttaatcctgagttctagtttgattgcactgtggtctgagagacagtttgttataatttctgttcttttacatttgctgaggagagctttacttccaagtatg

SEQ ID NO: 801641 - DNA, 617 bp, Homo sapiens
cctattgaggagtacttaggtttattccatattttaggtcttgtgaatgatgccctgataaacgtggaagtgcagtatctgtttgatatattgattttctttattttggatatatacccagcagtcaaattgctggatcaaatggtagttctatttttagttttttaaggaagctccacactagtttccatagtggctgtgctaatttacattcctaccaacactgtaggagggtttccctttatttacatcctcacctgcatctgttacctcatgtccttttgacaaaagccattttaactggccgttttawactgtgttattgtggttttgatttgcatttctctgatcattagtgatgttgaacattttaaaaatatacttgttggcctttgtatgtcttcttttgagaaacatctattcaaatcttttgcctatttaaaaatcaggttattattattttactattgagttgtttgaactcctgctatgttctctttattaatcccttgtcagatggatagtttacaaatattttctctcattctgtgggtggtcttttctccttgttgattgtttccttagctgtgcagaagctttttagcttggtatgatcc

SEQ ID NO: 801642 - DNA, 617 bp, Homo sapiens
cctattgaggagtacttaggtttattccatattttaggtcttgtgaatgatgccctgataaacgtggaagtgcagtatctgtttgatatattgattttctttattttggatatatacccagcagtcaaattgctggatcaaatggtagttctatttttagttttttaaggaagctccacactagtttccatagtggctgtgctaatttacattcctaccaacactgtaggagggtttccctttatttacatcctcacctgcatctgttacctcatgtccttttgacaaaagccattttaactggccgttttatactgtgttattgtggttttgatttgcatttctctgatcattagtgatgttgaacattttaaaaatatacttgttggcctttrtatgtcttcttttgagaaacatctattcaaatcttttgcctatttaaaaatcaggttattattattttactattgagttgtttgaactcctgctatgttctctttattaatcccttgtcagatggatagtttacaaatattttctctcattctgtgggtggtcttttctccttgttgattgtttccttagctgtgcagaagctttttagcttggtatgatcc

SEQ ID NO: 801643 - DNA, 591 bp, Homo sapiens
aaatcttttgcctatttaaaaatcaggttattattattttactattgagttgtttgaactcctgctatgttctctttattaatcccttgtcagatggatagtttacaaatattttctctcattctgtgggtggtcttttctccttgttgattgtttccttagctgtgcagaagctttttagcttggtatgatcccattcatttgtttttgccttggttgcctgtacttttgagttcttacatttaaagatctttgcccagactaacgttctggagcatttacttaatgttttcttctagtagtttcatagttttaggtcttgcacttaaatatttaatccgttttaatttgatttttgtacatggtgagaaataggggtctaatttcattcttcctcatgtggttacctagttttcygagcgctgtttattgaggagactgtcctttccacagtgtatgttcttgggatctttgttgaaaatgagttggctgtaaaatgagtgtggatttatttatgtgttctctattctgttccattggtctatgtctgtgtttttatgccagtactatattgttttggttactgtaact

SEQ ID NO: 801644 - DNA, 409 bp, Homo sapiens
gagacttgcaaaaaaacataacaagctattttagtgagagattacaacctgggtcagatcacaaagaaataatagaaacaaataaagaattttttaaaacttctatactttacacccccccccccacattttgacttttgttgtgtcattttacgtttttattttacctgtctcttaacaggttcttatagctattactgttttcgatagatttctcttttagacgtcatgctaaagttatkagtggactacataccataattatagcattagatagagtatcctggagttatctgtgtactaatcttaccagtgggttttatacttttaaatgttttcttttgcacattagtggttttttctttcagattgaagaactccctttaggatttcttgtgtgatggatctg

SEQ ID NO: 801645 - DNA, 409 bp, Homo sapiens
gagacttgcaaaaaaacataacaagctattttagtgagagattacaacctgggtcagatcacaaagaaataatagaaacaaataaagaattttttaaaacttctatactttacacccccccccccacattttgacttttgttgtgtcattttacgtttttattttacctgtctcttaacaggttcttatagctattactgttttcgatagatttctcttttagacgtcatgctaaagttatgwgtggactacataccataattatagcattagatagagtatcctggagttatctgtgtactaatcttaccagtgggttttatacttttaaatgttttcttttgcacattagtggttttttctttcagattgaagaactccctttaggatttcttgtgtgatggatctg

SEQ ID NO: 801646 - DNA, 624 bp, Homo sapiens
agggtggggtttttccccactctagtgagcctgagagtactgcaggagaccagggcgtactttggtccttatctcaactgcataagacagacactcccagagcagccgtttatagacctcccccgaggaatgcaattcttttcctagggtcttaatattatattccttgctaggaaaagaatttagygatatctctcctacttgcaggtctgtttataggctgtctgcaagaagaaaaatatggctgtattctgcccgaccccgcaggcagtcagaccttatggttgtctttccttgttccctgaaaatcgctgttattctgttctttttcaagatgcactgatttcgtattgttcaaacgcacatgttttacagtcaatttgtacaatagtggtcctgaggtgacgtacatcctcagcttatgaagataacaggattaagagattaaagtaagacaggcataagaaattataagagcattatttgggaactgataaatgtccaggaaatcttcacaatttatgttcagaggctgaagtaaagacaggcataagatattataagagtattattagggaagtgataaatgtccatgaaatcttcacaatttgtgttcctctgctg

SEQ ID NO: 801647 - DNA, 624 bp, Homo sapiens
agggtggggtttttccccactctagtgagcctgagagtactgcaggagaccagggcgtactttggtccttatctcaactgcataagacagacactcccagagcagccgtttatagacctcccccgaggaatgcaattcttttcctagggtcttaatattatattccttgctaggaaaagaatttagcgatatctctcctacttgcaggtctgtttataggctgtctgcaagaagaaaaatatggctgtattctgcccgaccccgcaggcagtcagaccttatggttgtctttccttgttccctgaaaatcgctgttattctgttctttttcaagatgcactgatttcgtattgttcaaacgcacatgttttacartcaatttgtacaatagtggtcctgaggtgacgtacatcctcagcttatgaagataacaggattaagagattaaagtaagacaggcataagaaattataagagcattatttgggaactgataaatgtccaggaaatcttcacaatttatgttcagaggctgaagtaaagacaggcataagatattataagagtattattagggaagtgataaatgtccatgaaatcttcacaatttgtgttcctctgctg

SEQ ID NO: 801648 - DNA, 624 bp, Homo sapiens
agggtggggtttttccccactctagtgagcctgagagtactgcaggagaccagggcgtactttggtccttatctcaactgcataagacagacactcccagagcagccgtttatagacctcccccgaggaatgcaattcttttcctagggtcttaatattatattccttgctaggaaaagaatttagcgatatctctcctacttgcaggtctgtttataggctgtctgcaagaagaaaaatatggctgtattctgcccgaccccgcaggcagtcagaccttatggttgtctttccttgttccctgaaaatcgctgttattctgttctttttcaagatgcactgatttcgtattgttcaaacgcacatgttttacagtcartttgtacaatagtggtcctgaggtgacgtacatcctcagcttatgaagataacaggattaagagattaaagtaagacaggcataagaaattataagagcattatttgggaactgataaatgtccaggaaatcttcacaatttatgttcagaggctgaagtaaagacaggcataagatattataagagtattattagggaagtgataaatgtccatgaaatcttcacaatttgtgttcctctgctg

SEQ ID NO: 801649 - DNA, 603 bp, Homo sapiens
ttaattttaggtcaaatacaggggtttcatttctgttactggccaagtaaatttctgtcacatcaaagatttcagagataacagctctaaactctgaacaaattataaaaaccaactacctgcagcctgcaagcactrgagagttaccaaaaggggactcaagtcaacacttggaaggaagcactggcacctagctgcccagtttttgttttttggttttttgggtttttttgctttttgttttttgttttttaccatttctacctagctggtggaaaaacaccagacagatccctttggagtggctaaaattccaatagaaagcctgcgatccttctgctgtgagaagccagaggacagaatatagagcaaccacagcttttgtgaagtgaggaggaatcccaggcaagagagaacaagagcggagccccacattctgctttgactccctgctttttctctactatcagcatgttttctaaagcttagaaatcccaaaaatgaatgtgtgttttcctcaaaggaatggagacaacctgtagactatattgtgttccatattgggctaggacaagaatccctgatcagaaataatgagtagta

SEQ ID NO: 801650 - DNA, 490 bp, Homo sapiens
aatgaaagaataacataaataaaaaacataataatgcagaactggattaaccttttctctccaataacagattacacctaaaatccattcagtagctttagtcctttaactaccctttttgaggaaagcaatgagatgcaaaacacctagacagcttgtctaccaagctggcacmccatgaaaaccatcatcccagcagctcagctccttggtaaaaatgagagatgaactgtaattttcaaccagaatacaattaatttggctagtttaatatcttaacacctattgtgttcattggaaaatagcaaaatgtaaacattaacccatcttgaatacagctctgtaaataatatgtttatatatgtatgtatggggaaggactagagaacagaaaaataaacacagttgatctgttgggatgatagacataaaacatagatgatcggctatttttatattatattaatattatttatattcataccattgt

SEQ ID NO: 801651 - DNA, 644 bp, Homo sapiens
ttcccactgcatcccacatgaagggcacacctgcacacacaactccaatgagaggatgcggcctatagctgtgcagcattgcagccactggaatctagtctaacctttcttgaaattttacactaaaatttaaaagcaatcaacctaatccctgatctacttttgtccaagtattttattaaaaatcaactttaacattttttaattgaaagttaaattctatcttggatataaataattatgcttcttcatgacattctgacaaaaatgtagtcacatccaaaggataagaaccaaggctagtttcaatagtcattctcttcacaagttcgataaattcttagaattttagacttttagaacaagattacatattaatatgtctacacgagcacttgtacacgaatgtccatagcagcattattcatagttgccaaaatgtggaaacaattcaagtgtccaccaactggtgaatgcatagacaaagtrcagtatgcccatacaatgggctgctattcaacaataagaggaaacacaagtactacagatgactctcaaaaagattatactgtgaaagaagccagacacaaaagacttcatgattccatttttataaaatgcccagaaaaaatgtatagaaacag

SEQ ID NO: 801652 - DNA, 600 bp, Homo sapiens
tctttaaaagttattttgatatgagacaacacacttggccactcagaatcctgcaagttcaacactgaaggtgtcaaaatggtctacttgctcccaagcaaatgtctctaattaagccactagatcgggggtcatgaagatgagtaaggctcattatgcacagtactctatggaaggaactrtcaatgctatggaagagaactctaatagagaaaaacatcatgaaaatatgaatgaattacacaattgaaggtgccatcatttaaaaggcaatgaaagctgtcaggcctgaaacagtaaatttctgatggagaaaactgggttcagatcaggatgtatgacagagacaatcaagggaatcagaaagaaattgcatatatggccacaacagtgggggaagaagggtttcaagttatgaatcttggagaaattcaagagttaatagacaccacatctgaggaattaaccaactgtgacttgatggagatgagtgcttccaagccagtgccagaaaatgacgaagaagacctcccaagaagcagtgccagaaaacaaattgacattcgacaatctgacagaattgttccaatattcaagact

SEQ ID NO: 801653 - DNA, 600 bp, Homo sapiens
tctttaaaagttattttgatatgagacaacacacttggccactcagaatcctgcaagttcaacactgaaggtgtcaaaatggtctacttgctcccaagcaaatgtctctaattaagccactagatcgggggtcatgaagatgagtaaggctcattatgcacagtactctatggaaggaactatcaatgctatggaagagaactctaatagagaaaaacatcatgaaaatatgaatgaattacacaattgaaggtgccatcatttaaaaggcaatgaaagctgtcaggcctgaaacagtaaatttctgatggagaaaactgggttcagwtcaggatgtatgacagagacaatcaagggaatcagaaagaaattgcatatatggccacaacagtgggggaagaagggtttcaagttatgaatcttggagaaattcaagagttaatagacaccacatctgaggaattaaccaactgtgacttgatggagatgagtgcttccaagccagtgccagaaaatgacgaagaagacctcccaagaagcagtgccagaaaacaaattgacattcgacaatctgacagaattgttccaatattcaagact

SEQ ID NO: 801654 - DNA, 595 bp, Homo sapiens
cctaatcaccaatatttaaaatgtatccaaatgaatgatgtgatggcaaattgtgtcacagcttaacaataatatgaagcatggtttataaaataatttattttatgtatgtatataacaaccagtaagacattctacttattgctgttttcaggcacatgggctcctgattattaccctaaagtcaccagaaataattttctattttataatttgtaattcatttgtaaaatgctaatatagtctattgggtttgccactgttgccaagtttattcaaaagagttatcaaattataattaagtgaatagaaatcttcttggcctatgtaaatattatatttagttcataaatatgtaatgctattaattcatgtggagtccttggcarttttgaaataagtattgctgtctctgatgaccatcttatacataaaatatttaatttcccaagaatgaagtttgaaaagaaactcgaagtttatttaaatagaactttctgtaaatgtaaatactaggaaagtactagaaattatgaggtatcacatggatgaaaattgccatttgtttgatgagttactcaaaatagcattgtct

SEQ ID NO: 801655 - DNA, 648 bp, Homo sapiens
gggaaaatattttattttcctgtgatgttgataaatttacatacaaatctgaaaatcctctgaactaagaaagcatcactgactttgacactgctggacaaaacttatttgacattatatacatggtatagattgtcttcttactactaaaaatattcagtcattttacatatttttatatttaatttattaaaaatttwtcccaaaactccatatgaaatggcttttaagtctccccaagtgacttctgttgaaatagaagaaaactactttttttaaattctttcgattatggaaagaactcattcaatttctcagcctctcaaccttgttaatgcacatatggtaagtggaattagagaattatgtggttttgcagtttatttatatatgaagaatatatatgaagggtttatatatataaagaataaatatacacacacatttatgtacacacacgtgtggatgtgtataacaacactaataagatttttagatgcatattatttctgagactattgaattaaatactttataaacacatattattgcatttaagccttataccttcctatgatggagatgatatcactattcatatttcacagaggaaacaccttgctacaaaaattatcatgcagagaggaa

SEQ ID NO: 801656 - DNA, 648 bp, Homo sapiens
gggaaaatattttattttcctgtgatgttgataaatttacatacaaatctgaaaatcctctgaactaagaaagcatcactgactttgacactgctggacaaaacttatttgacattatatacatggtatagattgtcttcttactactaaaaatattcagtcattttacatatttttatatttaatttattaaaaatttttcccraaactccatatgaaatggcttttaagtctccccaagtgacttctgttgaaatagaagaaaactactttttttaaattctttcgattatggaaagaactcattcaatttctcagcctctcaaccttgttaatgcacatatggtaagtggaattagagaattatgtggttttgcagtttatttatatatgaagaatatatatgaagggtttatatatataaagaataaatatacacacacatttatgtacacacacgtgtggatgtgtataacaacactaataagatttttagatgcatattatttctgagactattgaattaaatactttataaacacatattattgcatttaagccttataccttcctatgatggagatgatatcactattcatatttcacagaggaaacaccttgctacaaaaattatcatgcagagaggaa

SEQ ID NO: 801657 - DNA, 648 bp, Homo sapiens
gggaaaatattttattttcctgtgatgttgataaatttacatacaaatctgaaaatcctctgaactaagaaagcatcactgactttgacactgctggacaaaacttatttgacattatatacatggtatagattgtcttcttactactaaaaatattcagtcattttacatatttttatatttaatttattaaaaatttttcccaaaactccatatgaaatggcttttaagtctccccaagtgacttctgttgaaatagaagaaaactactttttttaaattctttcgattatggaaagaactcattcaatttctcagcctctcaaccttgttaatgcacatatggtaagtggaattagagaattatgtggttttgcagtttatttatatatgaagaatatatatgaagggtttatatatataaagaataaatatacacmcacatttatgtacacacacgtgtggatgtgtataacaacactaataagatttttagatgcatattatttctgagactattgaattaaatactttataaacacatattattgcatttaagccttataccttcctatgatggagatgatatcactattcatatttcacagaggaaacaccttgctacaaaaattatcatgcagagaggaa

SEQ ID NO: 801658 - DNA, 580 bp, Homo sapiens
tcataagtagcagagatgcctttttaaaaagtccatgtattacatttttaataatttatatttaaattaaaccaaacatttatttattattttagcaattattattcaagaatttactatggggaaagcatttcactaaatttgacagttacaaaataccataaggaaggatgcaagcactcaaagtctctgagctctaattccattttaacttggtccctgggtcatttgtatctgaattaacttgtgtgtgtgtgataaatggagaatctagctccaaaaaagaggatctcacatgtaasatttacactgttttcttaaacttcaggtaagttgaatgtacatgaagttttgacttttgggcttttgaaaacattagtattgactgaaattcataagaatttagtcatgaagaactcttgtttagaaagctgacacagggcatgagctagcattttttcatataggcctgttcgttttgaatattgttacaaaggctgctaattattttaaaatatctctttccttttcttctgtgaaccaactagaccacattttctcacgactcttgtaactgatg

SEQ ID NO: 801659 - DNA, 514 bp, Homo sapiens
aatgatattgaacaacctttcatataacttcttaccatttgtatgtcttcttttgaaaaatgtgtattcaaatcttttgcccattttttgatggaattgttagattttttttgagctatttgtatattctagttatgaatcccttgtcatatgggtgatttccaaatattttcttccattctgtgggttttcttttmactttattgattgtttcctttgtttgtgtggaaggcttttaacttggtatgataccacttgttcatttttgctttggttgccagagcttgtgggatattgctcaacaaaattttgcccagaccaatgtcctggagtgtttcctcaacgttttcctgtagtggtttcatagattgagatatttgctttaagtgtttaattcattttgatttgatttttgtatttgtgagagataggggtctagctccatttttctgcatatagttatccaattttcccaatactattactaaagagagtgtcttttctccagggtatg

SEQ ID NO: 801660 - DNA, 514 bp, Homo sapiens
aatgatattgaacaacctttcatataacttcttaccatttgtatgtcttcttttgaaaaatgtgtattcaaatcttttgcccattttttgatggaattgttagattttttttgagctatttgtatattctagttatgaatcccttgtcatatgggtgatttccaaatattttcttccattctgtgggttttcttttaactttattgattgtttcctttgtttgtgtggaaggcttttaacttggtatgataccacttgttcatttttgctttggttgccagagcttgtgggatattgctcaacaaaattttgcccagaccaatgtcctggagtgtttccycaacgttttcctgtagtggtttcatagattgagatatttgctttaagtgtttaattcattttgatttgatttttgtatttgtgagagataggggtctagctccatttttctgcatatagttatccaattttcccaatactattactaaagagagtgtcttttctccagggtatg

SEQ ID NO: 801661 - DNA, 585 bp, Homo sapiens
atcatatggaaatgctaataatttttctttgttgattttgtatcctgcaactttactaaatatgtttttcagttctaattgttttttgatggagtctttaggttttttcaaatataagatcatgtcatatataagatcatgtcaaacaagaataatttgacttctttctttccagtctggatgccctttatttccttctcttgtctaatttctctagctaggactcccagaattatgttgaataacagatgtaaaagtgagcrttcttgtggtgttccacttcttagaggaaaggctttcagtttttccctattcggtatggtactagcggtgggtctgtgtagcacgtggcttttattatattgaggcatgttcattctatctccagtttttgagggtttttatcatgaaggaatgttgaattttatcaaatgatttttcaacatcaattgaaatgatattatggtttttagttttcattctgtttatatgatgtatcagattgactgatttgcatatgttaaaccatctttacatcctttgtcaaaaccccacttagtcatgatgagtgaattttataatgta

SEQ ID NO: 801662 - DNA, 646 bp, Homo sapiens
gtctatccatcatatttattttctcaaagaaccaatttttgctttcattcatcttttgtatggttttttgcgtcttcattctgtacagtttagctctgattttgggattttgttgttgttgttctgtctttgggtttgatttgctcttgtttttctagttcctctaggtgtgatgtgaggttgtttatttgagatctttctaactttttgatgtaggtgtttagcactatcaacttttctcttaacatgttgtagctgtgtcccgaagttcccagtatgttgtatctttagattttcccccaaagatttctacatataataaataacttcagcaaagtttcaggattataaatcaatgtataaaagtcagtagcatttctctaaacaaataatatccaagctgagagtcaaatcaagaatacaatcccattcataatagccacatccaaaaccagaaatagctaggaatactgctaacctggcaagttgaagatctccacaatargaactctaaaacaatactgtagaaaatcagaaattacacaaacaagtggaaaaatactctctgctcatggataagaagaatcaatattgttaatgtggccatactgctcaaagcaatttacagattcaatgcagttgttat

SEQ ID NO: 801663 - DNA, 612 bp, Homo sapiens
ctgtcagtgtagaggtgacaggaaatgaatgtgtttcctgagatcactcaatatcttgatagaatcaaaagcagaaggcattgattcgacagggaggaaaatgaaagaagcggcatctgtagaacttcgatatatctgaatgttggccatcactcctacatttatctcttttccracacagatgagccactgttactggagacattgacaatagaaaaactccataaaggaatcatctataaaatttccaaaacaaaaaataacagtagcattacatggtaaaaaatataataatgcagtgccttatgaattaaaatctattcattatcagataaagtcaaccaaataaaccaattgtaggaagcagcactatgtgtgactaatacctatgatcaagatataaagtggaaaatatgggtattttatacataacctgccactagcagccttggaaaagatgagaaagactaattcatatagaaacacacgcatatataaagagtgaagcaatttgaattgtgtcaattagtaagcaacataagatttttaaagttactagcaggcatgaaattatccagtcttaattttgagttctctttcctaagcatatgg

SEQ ID NO: 801664 - DNA, 640 bp, Homo sapiens
gttgaagttttcttttaattgaataaagtaaacaaacaaataaacttggcttgaaaatgctttttttttaatgttcctgtacttgagttttttgtttctaatttatcaagattgattgtttagtaatatggtttggctgtgtccccacccaaatttcatcttgaattgtaactcccraaattcccacatgtcataggaagaaccccatgggaggtgattgaattatgagggtgggtcttttctgtgctgttctcatgataatgaatgagtcttacaagatctgatggttttaaaaagaggagatcccctttacaagctctctctctttgcctgctgccatccaagtaagatgtgacttgcttctccttgccttccaccatgattgtgaggcctccccagccatatggaactgtaagtccattaaacctctttcttttgtaaattacccagtctcgggcatgtctttatcagcagtgtgaaaacagactaatacagttagcattaatgatctggtaatagttttcttagaattataagaataatgaacaattattattccatacataattgataatatgattagaaagaaaaataattgttccaatttagttcctactgggcagacatttttatacaacaa

SEQ ID NO: 801665 - DNA, 658 bp, Homo sapiens
ctgaagaggcaatttagtagtgtctgctgagacaaggaagctccaaatcactgagaaaaattacatttcaacacctctggatgtttctccttgacccaatcccatagccattgctcaataatttcatgaggtagatgaatgccacctagattggcagtgtgaataaacaaggcaggttggactgaatgtgggtagttactttaaaaayaagaactagacctggccaaccagtggccaggaggccattctcgggggaccattaaccgtgattgctagaagtcattcagggagaatacaattgtaaattgtattttctttccagggtcacctatgtaccctcaggaactttgctttttgtgtgaaagccaagcattaacttgcaatgtgcctttctttcaaaaaacttggtgtcttacgccatgtgaataatcacaaaagactttcaactatagaaggaaacttcattatagattatgcagttctcagatgtaggcaaaaatgtctccaaaatgagattacctttgtttatgcaggggagttaataaatgacctaaatgggaatggtcccattagaaaaggtggtatgaaatttatccctgacattagctgaagtgatcaataaaaccacctcagccccagaaggcattcaggtcagcct

SEQ ID NO: 801666 - DNA, 658 bp, Homo sapiens
ctgaagaggcaatttagtagtgtctgctgagacaaggaagctccaaatcactgagaaaaattacatttcaacacctctggatgtttctccttgacccaatcccatagccattgctcaataatttcatgaggtagatgaatgccacctagattggcagtgtgaataaacaaggcaggttggactgaatgtgggtagttactttaaaaataagaactagacctggccaaccagtggccaggaggccattctcgggggaccattaaccgtgattgctagaagtcattcagggagaatacaattgtaaattgtattttctttccagggtyacctatgtaccctcaggaactttgctttttgtgtgaaagccaagcattaacttgcaatgtgcctttctttcaaaaaacttggtgtcttacgccatgtgaataatcacaaaagactttcaactatagaaggaaacttcattatagattatgcagttctcagatgtaggcaaaaatgtctccaaaatgagattacctttgtttatgcaggggagttaataaatgacctaaatgggaatggtcccattagaaaaggtggtatgaaatttatccctgacattagctgaagtgatcaataaaaccacctcagccccagaaggcattcaggtcagcct

SEQ ID NO: 801667 - DNA, 658 bp, Homo sapiens
ctgaagaggcaatttagtagtgtctgctgagacaaggaagctccaaatcactgagaaaaattacatttcaacacctctggatgtttctccttgacccaatcccatagccattgctcaataatttcatgaggtagatgaatgccacctagattggcagtgtgaataaacaaggcaggttggactgaatgtgggtagttactttaaaaataagaactagacctggccaaccagtggccaggaggccattctcgggggaccattaaccgtgattgctagaagtcattcagggagaatacaattgtaaattgtattttctttccagggtcacctatgtaccctcaggaactttgctttttgtgtgaaagccaagcattaacttgcaatgtgcctttctttcaaaaaacttggtgtcttacgccrtgtgaataatcacaaaagactttcaactatagaaggaaacttcattatagattatgcagttctcagatgtaggcaaaaatgtctccaaaatgagattacctttgtttatgcaggggagttaataaatgacctaaatgggaatggtcccattagaaaaggtggtatgaaatttatccctgacattagctgaagtgatcaataaaaccacctcagccccagaaggcattcaggtcagcct

SEQ ID NO: 801668 - DNA, 620 bp, Homo sapiens
ctataaatctttatgcaaggcaagaagaattcaatgctgtttagtccagttacctgatactgtgtttcagatttgttagtagcctgtgatcaattctcacagtagagtttttcctttttttacgctggagatttcaccaccatcttcttacttaacatcacaaacatctagacaaactccctcctgtttcgtcaattttactaaaagaatttcattgtatgctctcaactcaagttctctcttattcaggattttgtcttatcccgtttctttattgtgtatctatttacttaatcctgatagatttaaattagccacttaggattctttaatagagtatcttttaatttctgctttttaggcagtggcaaaataaatgtaaaatttaccatttgaaccatttttaagtgtacaattcagtggcattaagtacattcatattgttgtgaaatcatcatcacyatccatctccagaactttttcatcatcccaaacaaaaatctatgcttattaaaaaataattccttatttccttctctttttaggccctcagaagccctatttctctttttgtctctacagttgacttttctaggtaatttatataaatagaatgaagc

SEQ ID NO: 801669 - DNA, 620 bp, Homo sapiens
ctataaatctttatgcaaggcaagaagaattcaatgctgtttagtccagttacctgatactgtgtttcagatttgttagtagcctgtgatcaattctcacagtagagtttttcctttttttacgctggagatttcaccaccatcttcttacttaacatcacaaacatctagacaaactccctcctgtttcgtcaattttactaaaagaatttcattgtatgctctcaactcaagttctctcttattcaggattttgtcttatcccgtttctttattgtgtatctatttacttaatcctgatagatttaaattagccacttaggattctttaatagagtatcttttaatttctgctttttaggcagtggcaaaataaatgtaaaatttaccatttgaaccatttttaagtgtacaattcagtggcattaagtacattcatattgttgtgaaatcatcatcaccatccmtctccagaactttttcatcatcccaaacaaaaatctatgcttattaaaaaataattccttatttccttctctttttaggccctcagaagccctatttctctttttgtctctacagttgacttttctaggtaatttatataaatagaatgaagc

SEQ ID NO: 801670 - DNA, 596 bp, Homo sapiens
cgaggaaaattttattgaaagaaaactataatgtgcactaggttaaattctagcagctttcaggttgtaaatgtcaagatttcagagcaactgaacacaaaactatctgccattgtgacctaaatattaggaatgtaattcattttggtcagcaggaattcacaaaaggaggattgcagtaagactgaatttcttttaggaacagtgatacaaaattcacataggatggcccttgatataattttctgaygtttaaaaaggctttcactactctttttaaataaaggattataatataatggaaaaaaagtatgccattgaagacaagccattgaatctatgaaaagatgctttcactatcaaagaaaaatgttactaatagaaatggcttggaattgaatacagtatttggagacttaaaaattccactttttaattgaataatgatctatacgatatatcgcacacaaaaaaaggtaggacatgtattctataccagccttgtacattggggcaaataaaattcagtcattcataaaatgctataatgcattaaaaattaaatgatactgtgattacacatatgaacttttcat

SEQ ID NO: 801671 - DNA, 596 bp, Homo sapiens
cgaggaaaattttattgaaagaaaactataatgtgcactaggttaaattctagcagctttcaggttgtaaatgtcaagatttcagagcaactgaacacaaaactatctgccattgtgacctaaatattaggaatgtaattcattttggtcagcaggaattcacaaaaggaggattgcagtaagactgaatttcttttaggaacagtgatacaaaattcacataggatggcccttgatataattttctgacgtttaaaaaggctttcactactctttttaaataaaggattataatataatggaaaaaaagtatgccattgaagacaagccattgaatctatgaaaagatgctttcactrtcaaagaaaaatgttactaatagaaatggcttggaattgaatacagtatttggagacttaaaaattccactttttaattgaataatgatctatacgatatatcgcacacaaaaaaaggtaggacatgtattctataccagccttgtacattggggcaaataaaattcagtcattcataaaatgctataatgcattaaaaattaaatgatactgtgattacacatatgaacttttcat

SEQ ID NO: 801672 - DNA, 613 bp, Homo sapiens
atgggcaatggagcgtataggaagtacttggaatttttgttcacatggaatcctgcaacccatatcctccctgtctccctgaaacatattctcagcagttactccactttccccaggtgcccaagactctacttggccttccctccttaccctactgccctcaagckcctgagtgcgagctttgtcagggccatatttagtttccactccttggcatctcagcctggggaatggtggcagctgtccttgccctagggtgaattgccaagacattttctatagttatttcagctggaacaagcccctggccctcccttgatccaggataaacacatccctgaatagagattgtgatcctttgggggtcacctgtctgtcactggttggggtattgagaccacggaatgggctgagtgacttccttgccctttgtaggatcatagcacatttttctggcagctggcgggagaaggaatttaatagcaaccgagccacaggcatgtgccaggccatggatgggactcccaacgcctgtcaggttcatacttgccagtgagtgttcactgtccgtgaaataacaaattaaaatagtactatcatagctcatgagaga

SEQ ID NO: 801673 - DNA, 628 bp, Homo sapiens
aaccttatcctgattgccctatttttataaaacacacatagactaaactccttttcatgtcatactccccaaggaaattatctctgtggatactaaataattaagaggcccaaataaactagaaactgttgtctctgtttagctttcaaaatgagccaactgcaaaaactcttcactctgttgtagttgataggccattaggaactggaaaacaagcaaaacccaaaacactaagtagttcactgtctctggtttgtattatgtccactttcccggatccctgcatgattgaatggaatggaattgatgtagtcagcattgatggagagagttttctgcctggggataagaagcagtcaagtcktggggaggcagaagcatggaagcaacctggacagtgggaacaaatgcaccagggaattaaatatttattcctatatttagaggaaaagaaccctaggcatgggaccaaaacttcgacagtgctgtttttccttctttgaatttgctctaagggtgtgagtgtctttcagacagatggctgaaatgattgctaccatcacttgcatattgcacaatgaatttagtttcatggatttggttttatctaaagaaacttttatattat

SEQ ID NO: 801674 - DNA, 541 bp, Homo sapiens
  misc_feature 89: n = A,T,C or G
tggagaaacccctgtccacgtcctgtttagagctggcagagtggagctatgacaaacctggaagcaggataggaaaagaaaagtgaatngagggaaaatcgcttatttacacatccgtctgcttaatcaacagtggcacatattccatgattttgttgatcccagctactgtggaaagcaaggactccttgggtcccaggactcatttgttttgtgtcattttggttttgaggcccagctctctgtctggcctttatagttccctggaacctgaggaatggaacacctggcatttgtactttgtgttgacccagcaggaaartgtgatggaaggactatgtacttgagaatcagaaagggctcacccacatgttacttaacttttctgggcttcagtaacttcatctgttgaataatgatttaatagctttctctgaggatattgtaagttttaaatggaatattatatgtaacatgaggagcacatgataatgcctaataaacgttgcgtagagttcttttgtgcctacaaagtgtttct

SEQ ID NO: 801675 - DNA, 595 bp, Homo sapiens
aaagtgacaaatggcaagtcacacagctaacaagtggcagaactaggaccctaacttgggtttttaaaattctaaatcctttatgcttcactcctcctcttcttcagtgaagaaaaaaatttctggctgtaaggggaagttttgatctagtttagtttaattcagctaatgctttcagtgtgctaacagtgatccatcttggggttgtggagacctaatgcagaccctgcagctgcagggaacttgcagtgttgaaaagacaaggcatgaggtgccttggtcattatgaatagaatgccatgaaatcagggagcagtaatgaatgatatttggggctatgatattcttatagattcataaagtattctaagctaagaaggccctaaaatccacttccacatattatgtatgctaggtctatgttgggataagagagggtagcattagctatgtgtgrggacgcaaggacatgcaacctgaagaaataagacattaaatgaataaaatgttaataaagatttaaatagctagtcaagatagaagacatcacaagatgatatatatttatatgcttaatgaatttaatacattttta

SEQ ID NO: 801676 - DNA, 477 bp, Homo sapiens
actcagagccacatgagggctatttagaatgcataatagatgcttattattaattgcatagctagactctttttgctagataccaatttgttttccagaatagctctgaatttactagagatctgtctggatttactactttgccttctgaacttttgctaacctcttttgctgtccttctgagatcaggtaaagtctgaacaattttttaggaacagggtagagatgcagagaatgatggggttgtggatcacacaatcatggcctattcaagtccatgctgggaagctttatttkgtatattgggtggtaccgggcaatccagaggagaggtacatcatcgtgcttgagaaagtaccagctggaggccaacaaaccaaggtgtgaattcaggctctgccacttattataatagttgtgagttactggctaggcacggtggctcaatgcctgtaatcccagcgctttgggaggccg

SEQ ID NO: 801677 - DNA, 590 bp, Homo sapiens
catcattagagcatttcatcccctgaagagagtaacatgttgttcagattagattacctgctgacgcatagctcccgcttgaggtagcaaggttttaaggaaatggtttctgcttgttaataatgacaccaactgggatgagagctaacatgttttgaaaggtttctatgcacccagctctctgctaagcactaggcatacrtacttcacttaattattacaaatctgagggcaggaatttctatccctttatgtaagtaggagaggttagataattttcttgagacaacaagtggaaagcaaagccagaactgaaacccaggcagaaaagaagagatggggactagaaaaatgcccagcagaggcccatgagagccacagggagccaggaagaaaagccatgcctacatccaatgaaatattaacagaaacttcacctaacttcacaatcagaaaattgacaatggtacccccattttaaacaaattcagtcatcaaacgataaaaatccatgctgaaatcctaaagctgtgtatttaaacgagactaatttctatccatgaggccagcagtcttgaacattaacctga

SEQ ID NO: 801678 - DNA, 669 bp, Homo sapiens
gacttcagagcttgtgctttgccttccacatcaaatttctcattttaggacgagtttctcaaagccaagtaatatgtaaaaatctccactgtcctcaggatgatatactagagaagttaaaaacccaggtttgagagatgggccttgattcaaattcttctccattatttccttatagttcaagaatggaccaacacagaacctctgaaagtttctatttactcaactctatatgtgctcatgatttttcttgttccacattgttatcataagcataaaataactgaaataaaatgtrtttcacaaatactatcacaaaattaagtgagcacttaactgttttgaataatagttgttgtttgaggtcttgtttttttttacggaaggacagtctctacttttgcaattagaaataggtaaacggcttgtaacagagaaaatataggtgactgacataatcaaattagttgatttttaaatttatgataaaattctggcaggtagcacattttcatttaatattatttaactttgtctggctatttcagtggatttcatatctttcgaccatccaatccattcagtctcttttttccaggattattcttccatcttcttccttgggaaacagacaagggagagacgattgctgccttgttattataccag

SEQ ID NO: 801679 - DNA, 549 bp, Homo sapiens
aagatatcacagtggcgcagtagtggtgcagtgaattatccctacctgtgaaactgtgatggatacagctaattatcctttgagggagaagtaaagtcctaccatgtcctcaacatcaatatcaatagctccctcataaaatattaaacttctaagatcccgacaaaaaagaattcttgcaagcctagcttgagggtaggagttgtctgcttttctggaagaaatctgggaccttaacttctgttctttgttgcttttcatttgaaagcatcttggatctcttyagtaggacaatcccagaacccgccacaggcataaattaacttcttcttgtaccctgttgagagtagagcccattaatgactactaacgtccattactagacagaagaggattttctcgagtaaaccaacaatcaaaaaatggaagattttcacagcaaatcagtgtcactgctgggaaggagagacagtatttgaatggccgagattggtgttataataactgaagttgttgctgtctttcaatgtttcttctttgtttcttttc

SEQ ID NO: 801680 - DNA, 626 bp, Homo sapiens
aagcttagaaagatccaataagttcattaaggtcatccttattaaaatggtagagtcaggattcagagcaaaactgagattccaaaccctctatggtcttttggcctagttacgattgataattttctccttcatgtgaaaaatctaaattccgattaggataaagaaaaaaagtctgagagggagggagaatatggaactaagaaagaaataaaaggaccatgaccagatarggattgtgagcaggctagagaggagccaactaccataagaggggtgggagggctgtacagggtttgcttgtcatatttgcctaaagctgttccatcaatgccccagggaagaaattgtgacctgacacagtgcatttgtttgttccagacactgtcctgtgtaccattgatgtgtcctctctccctctacattcactggtttaaggtattacaacaaaataaaggtggatatagtccaagggaaatatgcaccagacacaggtaaacaggcaaggaaggtttatttttacttttttaagatttatgttttacttaacaaataataatcgtatatatttatgggatacattgtgatggtacatgtggctcatgttattacatgcataggttgtg

SEQ ID NO: 801681 - DNA, 643 bp, Homo sapiens
gcctttgctacatccccgctagttctttccactttctgtcttaaattaatgcacatagtttgcacatttgtgtctgaaggccaggccagagagaatgttcaaagctatgtttcaaaggagaatattaggaatctaagtctgcttctaagagaacacttattgggaaataaagttctgatatgtttatatgaaaacaagtcatattaatcactttatgtttacacctcatgtgtgaagacacacctgctttagattccctgcaggcacatcacacttcgacttctgaaatttttccaaaacagtatattctgcctggaatgctttttcttcaggcagccaaatggtctttcccatcatttaaacagcttctggaattctatcaatcctccagtattctaagattsattggccaactgacacattatttttggctcagtctggacatggaacacccacagctattcttcgcttcctgatcatgtatttagtcctcactacctaacccctactaaagtacatttaccctttctttacattggcagatataatttgtttccatcacaaattaaacagagcataatgtctgctgctaaaggaatagtttgtaaacccaagactcagaattctacacataatgttattg

SEQ ID NO: 801682 - DNA, 613 bp, Homo sapiens
aaaaatattagacacgcaaagtagctggaaaatataggcataactatgagaataatcagtccataaaaacagacctagaaataacagatatgatggaattagaagagaataaatataaaacagctattataaatatgctctgtggtttagagaaacatgtcaacataatgaaaaagtaaatggaattattaaataggaaacaaatggaaactctattgctgaaatatgcaatatctgaaaagttaaatagatgggtaatagcagattaggtaccacaaaagaaaaataacaaacccaaagacatagcaataaaaacttttttaaatgaagcatggrgcaaaaaaagactgcaatagaatgaatcaagggaagttcatagccgattagtttgaaggagatgtgtaaacaaagggtagagtggctttgattatgagaaaaagttcaatgtgattagaacatagagtgaaaaaaagtggtggatgatgaggttgtaaaattagcttagggtgtaccagaaaaaccttgtatgctatgctaaggattttgaaacttatactatggacaatggaaaaacgacctaaccttttggagcgagtgcttgacataatcagtt

SEQ ID NO: 801683 - DNA, 587 bp, Homo sapiens
taaatgcatggatttatttctggtctctctattctgttctattggtcagtgtgtctatttttatgccagtaccatactgttttaaatattatagctttgtaataaaatttgaaatgaagaagtatgatgtcttcagctttcttcttgctcaagattgctttagctattcaggctcttttatgtttctatgcaaattttaggattttcagaaatttctgtgaaagatgccatggaatttttatacagatcgcattaaatctatagattgttttgggtarcatggacattttgataatattggttgttttgatcaacaatcatggaatgtattttcattgatttgtgtgttcataaatttctctcattaatattttgtagctttcaatttacagattttttacctcctggtataaatttattactaagtattttattctttttgttgtattataaatgggatttctgttcttaattgcttttgtgggcagttaattattagtaaatagaaaggccattaatatttatgtgttgattttgtatcccaaaacttcagcatatttgtttattaattctaacaatttttattg

SEQ ID NO: 801684 - DNA, 622 bp, Homo sapiens
tctgcaaacagagacaggtttgcttcttttctaatttggatgtcttttatctctttttcttatctaattgctctagctaggacttccactactatgttgactagaggtggcaaaatgggcattcttttcttattcctgatcttaaaggagaagctttcaattttttatcattgagtataaggtttgatgtgggctagtttatgacctttattgcattgaggtacatttcttttatacctaacttgagagattttatcatgaaaggatgttaaatttcatcaaatactttttctgcktctaatgagatgatcatatggttattggtttttgttctgttaatatgatgtattgcatttgttgatttgcatatgttggaccatcttggcatccccaggacaaatcccacttgattgtgatgaaatatacttttaatgtgctgttgaacttggtttgatagtattttgttgaggatttttgtatctatggttgtcaaggatatttccctgtattttttattccttgtagtatccctatttgactttggggtaagggtaacactagcctcataagatgaatatagaagtgttccttcctcttaaattttttcagaagagtttgagaa

SEQ ID NO: 801685 - DNA, 619 bp, Homo sapiens
gagaaagtaaaaaagaaaaaaagattttcctgtacttgctttatcacattatctatattatctattcattcatccattcctctatctacctatcaatccatcttacttcttggtgcatttcaaggtaaattgtgacacctgtacacttccccctaaatatttcagcactcatatcattaactagagttcaatatttcttaatagttttctcttttaatgtaaaatacaatratgtttacaaatctgggtgtacattcactcagtttgacaaatgcatacacctgtgtaacccaagcctctatcacaataattattcagcattgccattaccccactaacttacctcatgtcccttcccagtccttttctgctcctacccaccccccttcttccaggaaacaattcttctatcttttccccctatattagttatgcctgtcctagaactgaatataaatggaatcaaataatatgtgctttcttgagtaaagcttctttcattcagtataatttttaaatattttctgaaaagttgagtgaacagtttcttaggaaaaatgtataatcaaaaattttaaaaattttcaaatatttaccttaaaaaggcatggagtctaga

SEQ ID NO: 801686 - DNA, 617 bp, Homo sapiens
actggatccaatcagcataacatcatcaatgtaatggaccagtgtgatatcttgcggaagcaaaaaagcaatcacggtctctccgaataagattatgacacaaagcgggaaagttgacatacccctgaggtaggacaataaaagcatattcctggccttgctggctgaaggcaaattgcttctggtgggccttatggacaggaatggagaaaggcatttgccaagtcaatggctgcatrccaggtaccaggagatatgttaatttgctcaagtaatgaaaccacatctggtacagcagctgcaattggagacaccacttggttaagtttaatccactgtcattctccaagatccacctgtcttctgcacaggccaaatgggaaaaccgaatggggatgtgttgggaatccccacccctgtgtctttcaagtccttgatggtggcactaatctccgcaatccctctagggatgcaatattgttttttatttgctatttttctaggtagaggctgctctaatggcttcaatttggcctttcccaccataatagccctcaccctaccagtcaggaagccagtgtgggggttctgccagctgctaagtatgtctctgccaa

SEQ ID NO: 801687 - DNA, 617 bp, Homo sapiens
actggatccaatcagcataacatcatcaatgtaatggaccagtgtgatatcttgcggaagcaaaaaagcaatcacggtctctccgaataagattatgacacaaagcgggaaagttgacatacccctgaggtaggacaataaaagcatattcctggccttgctggctgaaggcaaattgcttctggtgggccttatggacaggaatggagaaaggcatttgccaagtcaatggctgcatgccaggtaccaggagatatgttaatttgctcaagtaatgaaaccacatctggtacagcagctgyaattggagacaccacttggttaagtttaatccactgtcattctccaagatccacctgtcttctgcacaggccaaatgggaaaaccgaatggggatgtgttgggaatccccacccctgtgtctttcaagtccttgatggtggcactaatctccgcaatccctctagggatgcaatattgttttttatttgctatttttctaggtagaggctgctctaatggcttcaatttggcctttcccaccataatagccctcaccctaccagtcaggaagccagtgtgggggttctgccagctgctaagtatgtctctgccaa

SEQ ID NO: 801688 - DNA, 511 bp, Homo sapiens
tgcggctagctggcctacagttctggggctcggactccttcacctcaagtatgcagctaccaagtggcagtcccagaggcgctgggaaggccctctgccccccacaagggacccctcctacccactagatcaggagtcggaaaactccctctaaagggtcagatagtaaataattttggctttgtgggccactcagtctctataacaacaactctattgctataacccaaaggcagccatacttaagcgaatggccgtggctacgttccaataaaaygttatttacaaaaacaggcagcggccttcagagccatagctgccaacccctacacaagatggtgcctgtaatttcatagttagggttttatcccattaggtatggaaaggcaattagcataattccccttaaacatgaatgaatcttagattttttaaataaataggttttggaagtaaagagggcagagacatcaggagcagggcaagggaataggcctgagaggacaaggga

SEQ ID NO: 801689 - DNA, 511 bp, Homo sapiens
tgcggctagctggcctacagttctggggctcggactccttcacctcaagtatgcagctaccaagtggcagtcccagaggcgctgggaaggccctctgccccccacaagggacccctcctacccactagatcaggagtcggaaaactccctctaaagggtcagatagtaaataattttggctttgtgggccactcagtctctataacaacaactctattgctataacccaaaggcagccatacttaagcgaatggccgtggctacgttccaataaaatgttatttacaaaaacaggcagcggccttcrgagccatagctgccaacccctacacaagatggtgcctgtaatttcatagttagggttttatcccattaggtatggaaaggcaattagcataattccccttaaacatgaatgaatcttagattttttaaataaataggttttggaagtaaagagggcagagacatcaggagcagggcaagggaataggcctgagaggacaaggga

SEQ ID NO: 801690 - DNA, 511 bp, Homo sapiens
tgcggctagctggcctacagttctggggctcggactccttcacctcaagtatgcagctaccaagtggcagtcccagaggcgctgggaaggccctctgccccccacaagggacccctcctacccactagatcaggagtcggaaaactccctctaaagggtcagatagtaaataattttggctttgtgggccactcagtctctataacaacaactctattgctataacccaaaggcagccatacttaagcgaatggccgtggctacgttccaataaaatgttatttacaaaaacaggcagcggccttcagagccatagctgccaacccctacacaagatggtgcctgtaatttcayagttagggttttatcccattaggtatggaaaggcaattagcataattccccttaaacatgaatgaatcttagattttttaaataaataggttttggaagtaaagagggcagagacatcaggagcagggcaagggaataggcctgagaggacaaggga

SEQ ID NO: 801691 - DNA, 598 bp, Homo sapiens
catacaccacgtagaaccgagccaggttcctgccatgtggacgctgttcctgcctgagagtctcttagaggaaggctgggaacactgtggaaagactgggcatctctgcaggcggagctgaatggatgtgaaacccctgtgggcatgtgcttccgagttcctcagcaggcatttgtgttttttggtagaaagtttgctttttkttttttttttttttaagacaaggtctcattctgtcacccaggctagagtacagtggtgtgatcatagctcactgccgtccttgaactctcagactcacgtgagcctcctacctcagcctcctgagtagctgagactacaggcgcttgccgccacccctggctaatatttttattttttgcagagacaggggtctcactacattgcccaggctggtctcaaactcctggcctcgagcaatcctctcacagcctcccaaagtgctggtattacaggcgtgagccaccacacctaacaaaagtttgctttttatctaaaatgacccaggcattgtcactgtactgctatttttttaaaaaaattttgttgttttgttgttgttgtcgtcgttatatag

SEQ ID NO: 801692 - DNA, 442 bp, Homo sapiens
cagttcagtaggaagaacaaatacatgtgattatattctaaactgtgacaatgctatgaaggaaatgagtggggtgacagagaaaaacaaggtggggaggtggctgctaagaagggtcagaaaagacctctttaggaagggaacatgtgactaagttgggaagaatgagagtgagccacactccaggtaacagcgtgccttgctggtgagaaggcctcatgcaggaaagaaccggctctttgagagactgaaaggaggccatgacggcagggcctrgtgggccacaaaagagagaaaatatttaggcagcatgttttcttttagatgaagacatggaggcacagagaggttaaatggctcgttcaaggtcaccagcaggttagcaagaagaagaacccaagtgctctgagtctgggctagggcgcttcctgcagcccttgct

SEQ ID NO: 801693 - DNA, 442 bp, Homo sapiens
ctcggccgcctcccggtccttcgccagcttggccgcgatgcccgccatgctgcggtcccggcggccgtactgcgcagagaaaggtcggggcgactccgcgctgcgctcggctggggcgcggccagggcccggcgcgctgctgcggccactgcgggcgccgccgctgcgagcgatgattcaccggagggaagcggcccggcccgcggggtgtggcctcagccgctcccggcctgctgggctcccggcccgggaccaggccakcctgcggcctgccgagcgccgggaacgccgcgacccggggccggtgctgccatctgcggacagctcccgggatggcgcggcccggcgccggggaggctcgcgaatcgcggtccagagttggggctcccaccggaacccgaggccacctttgcagcccatagggaagaaggctaggatagtt

SEQ ID NO: 801694 - DNA, 627 bp, Homo sapiens
gttactcgggaggctgagacaggagaaacgcttgaacccaggagggagaagttgcagtgagacgagatcgcgccactgcgctccagcctgggtgacaaagcgaaactccatatcaaaaataaaataaaataaaatgatttggccaataaaacaacaaccctcccaaatgtttaatttgaatttcagataaacaacagatacttttaaagtatatgtagggcccaaatattgcatgggcatacatacttattctaaaagaaaatatgattcattgtttacctgaaactcatatttaactggcaggattagttgggttactatagggagagagcatttagaatactgcctgtgttggctactgtgaccactctgttgtggagctagggtgtgattctcatctcacacacagagacatgggtgcgtgccaagaaatgcagatgggmagaaattacctcctcttcttctctacagtagtagggaagaatttgggtttcactggaaaactgtgcatggtctacagcagtggttctcaactgggggcagttttgtcccctacccaccccaggagacatttgggaatgtctggagatagtttttatggtcacagctaggagatgaggtgctact

SEQ ID NO: 801695 - DNA, 645 bp, Homo sapiens
gtttgggttccccccacaacctgccttctctttaaggaaaggcaactgaaatctagcacctcttgctacttatatgagcaactctgtttctggaaaggaggttgtacggcttttggcaaacagctacggtctacctgcagctccttatagaggcgatcaagctcagccactgcagactgattgtcatggtggctgtcgatcctgccgttcttgagcatctctagctgcctggtcagttcttctacttttgacacagccaggacgagctccctctgtttttgctggaacaaattattcatctgttcaatttcctccactagatgagacagagaacagcaacaacagttgaaaagaaaaataagaatggactacttcccaggcaaccgggctttacaatgaactttctaataaacagtagaaaaatttttcagaatgtcctggaagcaaccracttcttttagaagcaagtgaaatcaacagagacatctctaaatctctgtgcttcaatatcaatgtatatttatcagaatttgcattaaaaatattattaaactccaaattttagaaacaataaaaatttctttagaactttcaattttataacattaggtggatctattaaaccacaaacattctgaataaaat

SEQ ID NO: 801696 - DNA, 608 bp, Homo sapiens
aaaattacttgaaacaattggatccttggcattcagcttcctcaatctttattttcctaaaatatgtcttcaagaaaagccagctcctgggctctaagtaagcataagctctgatggtagccaagagactcatacatttaggatgaaaatctggcttagcaaggacagtagggaggaagggacaacacacagcccaccctgacagaagcagccagactttggacstgctggcaaatagcctaacacacccaatatgaagtgcgaacaaggagatccactgccatgtgttttataagagtgcaagagaaaataactcaaatgtccatcctttggaggcaggataaatccgacagagtgtaacacttggaatggttcacagagaacgaagttctttatagactgttatggaaagatcccccaaatactttattaagtgaaatgacaccaaataatggcaaggtgccaaacagtgttgatagtgtgctgccttcaatacaagaagggatattcagaatatgtacttagatttgcttgaatttgcacaaagaaacacggagggaatttttcgcatggctgcaaggcagtgagcaacggagtcagtggcgtca

SEQ ID NO: 801697 - DNA, 498 bp, Homo sapiens
gaggcagaaggctgtatggaaggccttgcagaatcctcctagtgtttggcctaggatgctttgactgatggtgttctaggacttctctagaagaagcacacttttatgttactctaagcgaattttctagatcataaaataatcctcagcacacgtgagtttgtattctgtatacctttcaacccagacatccatcaagctcatcctaactgctgagtgtttacaacaatcctgtgtaggtggtattgttattatttcattttacacatgaggaaactgagttcatagaggttaattatcttgtccaggatcatattgctwttaaggagcagaaccacgttctgtcaaaagctaatgcattgtctaatagtttagaatacaacattaatattaatattttgagcttctgttatgggtttatctcctgtgttcagccctaagaatttaatattcagcaaaaataaacatgattcttaccatcatgcagcatagaggtca

SEQ ID NO: 801698 - DNA, 623 bp, Homo sapiens
gttacagaaaaatctatgaatggatgctaaaattagtgggcacaagctcaagggaaaataagatactcatgtacttttaaagcatcttcccctttattcatttcatatgtaaaaataactttacagttgaaatgcagcaggtaacatctaaaccaagtaatctaaattaacatcaccaataataggacatctcactccctgatatgatgcactgaagaggacacagcatcacctatggtattctcaccagcattcccataaaaaatgcacaacctcaatctaatcatgggaaaacgccagacaagcccaaattttgagatagtctataaaaataactaagtggtactcatcaaaagtatcaagatcatgagacacaggaataatgtggaactatcacagtaggggaagactaacgagataagactaagttcaagggaagtcctagatagaatcttggaacagaaaaaggctgttrggggaaaaggaaaaaagaaaatgagtgaaatttgagcaaggcctgtagctgagttaatagaattgtaccaatgttaattccttttttttttttttgatggttcaaggaacatgttattatgtcttattttattagctttgaccattgg

SEQ ID NO: 801699 - DNA, 539 bp, Homo sapiens
aatctctattctgttacactgattgatttgtctatctatgtagcaatagcacactgtcataatattactttatggttagttttgaatgaagtagtatacatcctttaattttgttcttcctcagcttgtcaatttcttcataagcagtctgctgggatttgtttgagaacgtattaaagagatcaacttgggtcaaatggacaaaagagtgttgagtccttcgatttatgaacatgaggtatcttttcacttatttaaatgctctttaatatctcttagaaattttgtagtttccgtgtaaaggtcttgtgcgtcttttgctagaatcattccaatgtgttcarcgtttagtgttgctattatatgtggtatgttttaaaattacactttataattgttttttgttaacatatagaaatacaattgatttctgtatattgacctaaattctgcagccttactaaattcacttgccagttctaatagaatttgtttttgtaaattccattggaatttcttttgatttttccttttttttt

SEQ ID NO: 801700 - DNA, 554 bp, Homo sapiens
aattagatataattcaatacatgatttaatatttcaataattgaaaaagagagcagtatatatatatacatgttatatcagaaatacataaaatatcttaaaatatttagtaataattcatcagaaggaatattttaagtcgaataacatttaatacctaatagatgctcagtgtgttactagatatctttgcatacaatatcttctttaattattgcaaaaccacaaatagtagctattatttccattttacacctaccgcacytgaggcctggagtttatgccccaagtcactccttctgaattatgtttagagcccaggttgtgttgatgctcttaaatctatataaaagatttctaaagcatgtgttgaagaaggagtgtgaagaaaaatggtaacttctatttacatttattttgataattcatcttattttgtattgtttattgcagcttatattgcatgcatatttgtgtttttatatgcacatacatatacaaatatatgtactcaaagcttttttacaaatgagatatacaatcaaaaaagttca

SEQ ID NO: 801701 - DNA, 637 bp, Homo sapiens
cctataaaacaggtgcccttgtttgtaaccactcaactttctgtttctaagacctatctatcttctgcactggccaaaatgaaagagttaagtaggtgatatgtctgtttaccatcgtttatcttttaaatttttgatgatgatgttaatctctgcaatttcccccagaggagtgtttggtttttagtttttaaagtcttgaatttactgttttggtaagaaggaggaagaacagacttctacttggccttttcttccatcttctcttgtatcgccttgggctagtgagccaatgcagagagccagccttctaattcctcaggatacccaattcaactatcggytcatggttgggagaaacaacttcagactgtgttaggaaatttactggagttaccatgtgtgagctccatttattgtttgccccatcagatgtctgtctacctggtttgaaacatttttcattaaaaaatcaaatagagtctcagtaacctgcgcgtatattctgtcctaaagacttcctggtccctgccaaaaaactgaaccattttgatttcttgccttggctgttataaaagcaaccctactttgctgctggagattaaggcctttgccagaatccttcagatccaattga

SEQ ID NO: 801702 - DNA, 617 bp, Homo sapiens
tcctcaccaatatctgttattttttgattttttaaaataataatcattctggatggtatgagatggtaactcattgtggtttaaatttgcatttctctgaccgttagtgacatttagcatgtttttcatgcatttgttgaccacttgtgtgtcttttctttttatctccactgcttgaattagcagtgtgtgtcttcttttgagaagtgtctgttcatatcctttgcccactttttaatggagttacttgtttttatcttgttgatttrttctagttccttatagattctggatattagacctctgccagatgcataacttgcaaatattttctcccatactgtaggttgtccatttactctgttgattgtttcttcgctgtgcaggagcactttcatttaattaagtcccatttgtctattttcggttttgttgcatttgcttttgaggtctcagtcaaaaattatttgcctaggccaatgtccagaagagttttccctaagttttcttctaagatttctgtagtttcagatgttacatttaggtctttaatctatctagagttaacttttgatatggtgagagatatggctagccagttttccctgcccaattta

SEQ ID NO: 801703 - DNA, 617 bp, Homo sapiens
tcctcaccaatatctgttattttttgattttttaaaataataatcattctggatggtatgagatggtaactcattgtggtttaaatttgcatttctctgaccgttagtgacatttagcatgtttttcatgcatttgttgaccacttgtgtgtcttttctttttatctccactgcttgaattagcagtgtgtgtcttcttttgagaagtgtctgttcatatcctttgcccactttttaatggagttacttgtttttatcttgttgatttattctagttccttatagattctggatattagacctctgccagatgcataacttgcaaatattttctcccatactgtaggttgtccatttactctgttgattgtttcttcrctgtgcaggagcactttcatttaattaagtcccatttgtctattttcggttttgttgcatttgcttttgaggtctcagtcaaaaattatttgcctaggccaatgtccagaagagttttccctaagttttcttctaagatttctgtagtttcagatgttacatttaggtctttaatctatctagagttaacttttgatatggtgagagatatggctagccagttttccctgcccaattta

SEQ ID NO: 801704 - DNA, 617 bp, Homo sapiens
tcctcaccaatatctgttattttttgattttttaaaataataatcattctggatggtatgagatggtaactcattgtggtttaaatttgcatttctctgaccgttagtgacatttagcatgtttttcatgcatttgttgaccacttgtgtgtcttttctttttatctccactgcttgaattagcagtgtgtgtcttcttttgagaagtgtctgttcatatcctttgcccactttttaatggagttacttgtttttatcttgttgatttattctagttccttatagattctggatattagacctctgccagatgcataacttgcaaatattttctcccatactgtaggttgtccatttactctgttgattgtttcttcgctgtgcaggagcactttcatttaattaagtcccatttgtctattttcrgttttgttgcatttgcttttgaggtctcagtcaaaaattatttgcctaggccaatgtccagaagagttttccctaagttttcttctaagatttctgtagtttcagatgttacatttaggtctttaatctatctagagttaacttttgatatggtgagagatatggctagccagttttccctgcccaattta

SEQ ID NO: 801705 - DNA, 625 bp, Homo sapiens
ctgtagtttcagatgttacatttaggtctttaatctatctagagttaacttttgatatggtgagagatatggctagccagttttccctgcccaatttattggatagggagtcctttcctcattgtctatttttattgactttgttaaagatcagttggttgtaggtatgtagctttatttgtgtattctctatttagttccactgwtctatgtgtctatttttgtaccagtaccatgatgttttggttactatagacttatagtatagtttgaagttgggtaatgggatgcttctagctttgtactttgtgcttaggattgcttgggctatttgggctcttttttggtttcatatgacttttagaattgtttttgtgagttctgtgaaaaaagacattggcattttatagaaattgcattgaatctgtagattgttttgggcactatggtaattttaaccatattgattcttccaacatgtgagcatggaatgtttttccatttattcatgccatctgtgatttctttcatcagtgttttgtagttctccttgtagagatctttcaccttgttggttagatatattcccagatattttgttttatttttcggtattgtaagtggg

SEQ ID NO: 801706 - DNA, 603 bp, Homo sapiens
tgatcgtacacacttcatccctgtgggttactctggtaattgtactcaccttgtgttatgcaatttgtgttcccccaaaatccgtaagttgaaaccctaaccgccaatgggatggtattaggaagtggggtctttgggaaataattaggtatagatgagctcatgagggtggagctcctgctataggattagtgtccttagagaagagaaagagaagagctctcactctctttgccatgtgagaagacagccatctgtgaaccaggaggcaagcctttacygcaaaccagccatgctggcaccctaatctcaggacttccagtctccagaacttgagcaataaatgttcgttgtttaagtacccatctatggtattctgactgactaaacccaaactgactaagacaccttgtcactgcaagctaaggattgcaactggcctctaccactcctggatcctttattccagctgagatcaggaaattcaattccatggcaacatcctttgccaccatctcctgctggcaaagaacagctgcaacacagttttataagaatgctcaagtctccttactgttgcatctgtaatgcctgggtataggg

SEQ ID NO: 801707 - DNA, 630 bp, Homo sapiens
ctggatcctttattccagctgagatcaggaaattcaattccatggcaacatcctttgccaccatctcctgctggcaaagaacagctgcaacacagttttataagaatgctcaagtctccttactgttgcatctgtaatgcctgggtataggggacgtcctccaggctcttccagggatgactgtctttcagagtggcagggcaggctgttcrtaacagattcatgcatcattcttgtttccctgggcctttagactccttcctctacttgtatacaatgttcataacagcattattcataatagtcaaaaagtggaaacaacccaacatgtgttcattggcaccatcctaaggcttagtgttcatctgccctttatttaagatgaagaggttttccttgcacatccatttattcgccctgttaccgaaatgccaggggttctgtctaggtactgctgcttgatcactgagacaatgggtattgccagggaagaaggctttagttgggtgctgcagctgaggagatgggagatgagttctagatcagtcccaaatccatctccctgactgattaaaattaagggtttgtataacagaaaagaaatgtaaccatttttgggaaaacaagaat

SEQ ID NO: 801708 - DNA, 589 bp, Homo sapiens
ctccttcctctacttgtatacaatgttcataacagcattattcataatagtcaaaaagtggaaacaacccaacatgtgttcattggcaccatcctaaggcttagtgttcatctgccctttatttaagatgaagaggttttccttgcacatccatttattcrccctgttaccgaaatgccaggggttctgtctaggtactgctgcttgatcactgagacaatgggtattgccagggaagaaggctttagttgggtgctgcagctgaggagatgggagatgagttctagatcagtcccaaatccatctccctgactgattaaaattaagggtttgtataacagaaaagaaatgtaaccatttttgggaaaacaagaattagggaggggtaaaggggaggagttggtcaacaagaagcaggtggttgcttaggcaatcatgatgggtgaggggtctggctcctcattgtccagatgcagtgatctggtaagtttcagttccttgataatatctgggaggcctgatggttggcttcatgaggaaggaactcagattaagacaaatgtaactttctcaagttttaagactggga

SEQ ID NO: 801709 - DNA, 572 bp, Homo sapiens
caggcatgagccaccacacccggccccattccctagcttttattacccttctacttctgaccttcattcacttatttttagctttattgtcttccttgagtgtgatgcccaaaaacacaccacagttttctgagtgaaagataactgtgctttctttcatgagtctaataactttcctaacagtagccaatatttcacttgtcttgtactaaattaatacattgaaaaactaaaagaaaatttctatctttgaatttaaattgacgtcctttactcttttaccttgaaatcatactttctatcattcataactggatgctgaccactgcatttgcccatgctgaatattatttgccacttccttgttcatttctattattaggagraattttcttagttccttccctcctactattacttaagtgaaaactatgtttcccagaacaaaccagcccaggggaaaaaataataatcacaatgacaatcaggcttgcggatttttccttttctgtcccagcatgcccggtggaaaactgaacctcccaaaaattaggagtgtgttcttctgaata

SEQ ID NO: 801710 - DNA, 574 bp, Homo sapiens
aatgtttcttcattaaacacatgatcattttctccaggattattttgtaatcactgaatcacttaataggtattacaagttattgcatgcaaatcacttcaaagaaaataaattactaacacataactttttttatatatactcactgtacttggattactttcaattttcttatgttaaaatgcatttaaaccacttaatactttcctraaaatgtatttttaaattatttttacatttgctaaagttaacaaaatgcttataaaataaattaagttgattacctaagaaaaatgtttcttttactataaactagtaatagaaatgcttggcacatgttaatctgtggatatgcctgttatctctggttaggtataaatgccttctctaagcgttgttatgtactaaattgacaggcaggaatatgaattcaccttccattttctcatcaatagagtgagataaaatcataatagagtagagagaactctgttttattccatttctactccgtagaactaaggattcttccatttccctttttctatttcatcaatttaaccttcatctactc

SEQ ID NO: 801711 - DNA, 624 bp, Homo sapiens
ttaggtagaaaaggcggcagcaattaccgtctcctacggagaaaatgccccttttccagcactgggcccaacatggatgcccttggggcgagggcaggatgcccttggctcgattttgcttataggtagattttcaccaagatggacgcaggagactcgcctgtcacctgctggagaaatcacagcatgcaaatcactttgtgccttctgcctttttattaggttaatacagacattggtaggttttatatttacagctaggcctggatgcctgcctgtgaccttttgaagggtacacactgtttgtttgttcatttgtttgtttttccaaaaaaacctctgtattacttttttttaaaagaagaaaaattgcgtgaaagggagatgcctctgaagcctctcagctcccctcayagtgccaccccagatagttggtgtgacttatctagccttttttttggctagtggggagcccctggtggcctgtgtctgagtgagccactgcataggcccctctagtcctgagtgctccactctctcccagtgacctcacggcagtaactagggagattttatcaactaacatctcagagcaaaaagggaaaattcctcacttttcttagg

SEQ ID NO: 801712 - DNA, 609 bp, Homo sapiens
ttgttctttgttatgccatttaaaagttattcttccatcatgatgtgattttataattcttttttttttttgagacagagttttgctctgtcacctaggctggagtgcagtggcgcaatctcggctcactgcagtctccgcctctcaggttcaagcgattctcctgtctcagcctcccaaatagctggrattataggcatgcaccaccatgcctggctaatttttgtatttttagtagagacaaggtttcaccatgttggccaggctggtctcgaactcctggcctcaggtgatccacccacttcggcctcccaaagtgctgggaggtgtgagcatgagctaccatgcctggcctgctgctgttttataattcttatactcaaagccaaatacgactacaaagtcaaatattttcttcaggaaatttcctagattaaaaaaaaaaatggtccttgactatataaactttgaggagtcagcctttaatgaaactaaaaattctctttgtgccctttgcagaaaggaaaatttaactttggaaaagaaatagccaaagggcccaaccttgtaagtaaggacttggaaatgaccttgcctgtaaatcaactg

SEQ ID NO: 801713 - DNA, 503 bp, Homo sapiens
tggtagctcatgcctgtaatcccagcactttgagagactgaggcaggaggatcctttgaaggcaggggttcaagaccagcctgggcaacatagcaagaccccatatccacacacacagaaaaaatttttttaagtctcctgttaaaaaaaaaggggtggggccaggcgtggtgactcacgtctgtaatcccagcacttccgaggcaggcggatcatgaggtcaggagatcgagaccattctggctaacacagtgaaactccgtctctactaaaaaatacaaaaaattagcctgtcgtagtggcgggcacctgtagtcccagctactcggaaggctgaggcaggagaatggcrtgaacccgggaggcggagcttgcagtgagccgaaattgtgccattgcactccagcctgggtgacagagcgaagactccatctcaaaaaaaaaaaaagaaaaaaaaagggggtggggaatcatatgttctgtgagaactaaatgagatgata

SEQ ID NO: 801714 - DNA, 614 bp, Homo sapiens
agtgtctttatctcagagcttatattcacgtgtgaccagttagttaaattgtccagaaatgcaaaacagtaatcacagggacccatcctgagtcttccacggaggttaactctggtctatgacccagacttcttcccttttccctcagaatcagccaccttcttgcctcataaaaacagggaggggttatcatgcctccctcccctctcacatgaccttgcaaggcttcagttacagtgtcttaccatgagcccacgtgtcacagcactagcagagccagcctcacttaactgccttttgttgccaacattaactgctgggcttcctgggtgcttcaaaccagaagccttcctgggggcttaacatcagaagcatctcaacacgtagcaccagggccacaggctatgactggaactcttgtggttgtgccctgtggtcattttgccagttatgagtgaacctcaaasaatcgacaactggggctctgtcccaataacctccctgatagcttgcatgtttctcttaacctcatgagtctgcagaagcaggctggcaagtgttcaagaacaggccatctcatgaggtttcctgtacttcctgccactgctgtcgct

SEQ ID NO: 801715 - DNA, 621 bp, Homo sapiens
ccttcctccagcaaactggagcatcccaggtcgactttagactgctgtgctggcagtgagaatttcaagtcagtggatcttagcttgctgggctccatgggagtgggatccgctgagctagaccacttggcttcctggcttcagacccctttccaggggagtgaacagtgctcactggcattccaggtgccactggagtgtgaaaaacaaaaacaaaaacaaaaaaacaactcctgcagctagcttggtgtctgcccaaacagctgcccagttttgtgcttgaaacccagggccctgrtggcgtaggcacccaagggaatctcctggtctgcggattgcaaagaccataggagaagcatagtatctgggctggaatgtaccattcctcagggcacagtccctcatggcttcccttggctaggggagagagttccccaaacccttgcacttcccaggtgaggtgatgccccaccttgcttctttttgccttccgtgggctgcacccactgcctaaccagtccgaatgagatgagccaggtacctcagttggaaatgcagaaatcacccgccttctgcattgatctcactgggagctgcataccagagctgttcgtattcttc

SEQ ID NO: 801716 - DNA, 621 bp, Homo sapiens
ccttcctccagcaaactggagcatcccaggtcgactttagactgctgtgctggcagtgagaatttcaagtcagtggatcttagcttgctgggctccatgggagtgggatccgctgagctagaccacttggcttcctggcttcagacccctttccaggggagtgaacagtgctcactggcattccaggtgccactggagtgtgaaaaacaaaaacaaaaacaaaaaaacaactcctgcagctagcttggtgtctgcccaaacagctgcccagttttgtgcttgaaacccagggccctgatggcgtaggcaccyaagggaatctcctggtctgcggattgcaaagaccataggagaagcatagtatctgggctggaatgtaccattcctcagggcacagtccctcatggcttcccttggctaggggagagagttccccaaacccttgcacttcccaggtgaggtgatgccccaccttgcttctttttgccttccgtgggctgcacccactgcctaaccagtccgaatgagatgagccaggtacctcagttggaaatgcagaaatcacccgccttctgcattgatctcactgggagctgcataccagagctgttcgtattcttc

SEQ ID NO: 801717 - DNA, 621 bp, Homo sapiens
ccttcctccagcaaactggagcatcccaggtcgactttagactgctgtgctggcagtgagaatttcaagtcagtggatcttagcttgctgggctccatgggagtgggatccgctgagctagaccacttggcttcctggcttcagacccctttccaggggagtgaacagtgctcactggcattccaggtgccactggagtgtgaaaaacaaaaacaaaaacaaaaaaacaactcctgcagctagcttggtgtctgcccaaacagctgcccagttttgtgcttgaaacccagggccctgatggcgtaggcacccaagggaatctcctggtctgcggattgcaaagaccayaggagaagcatagtatctgggctggaatgtaccattcctcagggcacagtccctcatggcttcccttggctaggggagagagttccccaaacccttgcacttcccaggtgaggtgatgccccaccttgcttctttttgccttccgtgggctgcacccactgcctaaccagtccgaatgagatgagccaggtacctcagttggaaatgcagaaatcacccgccttctgcattgatctcactgggagctgcataccagagctgttcgtattcttc

SEQ ID NO: 801718 - DNA, 629 bp, Homo sapiens
agcttgatgaatgtcacaatatgtatgtgaaatatattgagcggatataattagttccatttcaagttggaaactgaggcactgagaggttaactaaaactacattagtttttagtaataagttgtaagcatcttcaggtcaaaggtgatatcttagtatagcctgcctttctacacaagcatatcttcatgtggtctgcacccagtaaacgattgtgggcttggaatgtctggaagtggtcctagattttattacctcctgcctagtgttctttccatggcactattttgcttcataaagagggcattaccaattggaagtgggcgctttattaaatttgacctgctacctgtagccgtgggcaatacaagattgaacaattcactttctaaataggtggagggttagaatgggaaggtactttgcaccaatcaaatctccctgatttttgtttatgggacaagcyactccagttgactttgggctcttgtaattcttaacagaatccaagttgtaaccaaggtatggattataaccaacactgctgatctccagccaaatttgtaccagctaatgactttttgctgccaccacatattagttttagcaacgaatcatggccaagttt

SEQ ID NO: 801719 - DNA, 514 bp, Homo sapiens
ttcatttagaaagtttcagaatgggaagatctgttgttttgcattcatatttaatgtaattaattacttgagtaaaagaacaaaaaatgatttagtgtctcagtggatgaagagaggaacagtggtttccaatccatgctaccataatccctggagagccccaaaagtaataattggyatctcagacccagatgaaatatttcaaaaatgtaaatgatattttaccagaagctaaataatataccaaatttctttgcttttgcttgatgcaaaaccacgattacttttgcacgaacctaataatgctaactcatttgtgagttagtatctgtgagttagtatgggttagtttttgctcaattggcagttagttttatatgccttgaaaaattaaaattggaaattatatttactgcttaaaagatgaagttcctttggcagaaacagttctttcataagatgaagcctgcataagaaaaataattgaagtagccctttagtattatttattccc

SEQ ID NO: 801720 - DNA, 514 bp, Homo sapiens
ttcatttagaaagtttcagaatgggaagatctgttgttttgcattcatatttaatgtaattaattacttgagtaaaagaacaaaaaatgatttagtgtctcagtggatgaagagaggaacagtggtttccaatccatgctaccataatccctggagagccccaaaagtaataattggtatctcagacccagatgaaatatttcaaaaatgtaaatgatattttaccagaagctaaataatataccaaatttctttgcttttgcttgatgcaaaaccacgattacttttgcacgaacctaataatgctaactcatttgtgagttagtatytgtgagttagtatgggttagtttttgctcaattggcagttagttttatatgccttgaaaaattaaaattggaaattatatttactgcttaaaagatgaagttcctttggcagaaacagttctttcataagatgaagcctgcataagaaaaataattgaagtagccctttagtattatttattccc

SEQ ID NO: 801721 - DNA, 588 bp, Homo sapiens
caactaaaatgtaatgaatatattaaagtatcagttttatattgtcacaataatgctatgtaccagaaaaaaaaaaaaaaggaaaactactcagctttaaggccacacaataattacataagtcatgagttctagagtcaatgagttggactaacctcaaatgggcagttttcagagtctcccctgactgtcagttgaccaagagatgtttgacttggctggaataaactggtgggtttggctctgctccttgtgctcattccccagcaagctcatgtgtccctattcttgtgacaaggacagaggagcaaaagggcaagaagaaacatacaggcactttttcaagcctctgcttgtgccattttgctaacatggccaaagccagccstgtggctactcctagatttaagtggcagaacactctgcccaggggaaggaaactgggaagttaaaaggcgaagtgtgaggacagagggaggggtaaaactcagggacttgagtacaataaatccactacatcaagaataagatggcataagccataaataacagggaagaacacaagagcaacttgtgatccaactactg

SEQ ID NO: 801722 - DNA, 607 bp, Homo sapiens; identical to SEQ ID NO: 750996

SEQ ID NO: 801723 - DNA, 565 bp, Homo sapiens
gcatgcaagcctgaagcctggggctgtatggtccacttatgctagggtgggtctagaggttcagtccatgagtactggcctggactgttatgctctgagggtctccccagttgtgtgttttactgtggtgagcctggtgttggggcttaacattctgtgcacrcttctctctctttcccccaaattggacaatatctttctccatgctttgctacctggggattaggcacatgtgatgtgagtaatacaaaaccatcctttctaccctcttcgatgtgtcttttcttattactgtgctacaactaggtactgtgagctgccacctggtttcgttagttcttatgaaggtattttcatgagtggatagttgtttgatttggtgtttttttcagacggataatcactgggagtactacttcaccattttgttctgtccctcattgagtcattattcttaattggaagggtaagcaattcaatcagtaagaaataaaaaggtaaatagtccagtttaattctgaatatttagcatatatatcagatattaagaatattaagaacatta

SEQ ID NO: 801724 - DNA, 605 bp, Homo sapiens
atgagttggtctcattttgtatatattttattgagtgtttgccatatttaggttacctctgggatggggtgcaattctcatacacaatatacagaccgtttacttattagaaggatgtctgtgtttgtatcaggagtgggaggacagtggtgaactcattaatgtgattcagtagaacatcaaaatgagatcttcattgtggctttggaatacatttttgacacttttaaaattaaaattattttagttcatattatgaaatatattgtacacaaaatccatctaattaatatttacaaatttaaaataaaataacctgtaattactacacatagaagaaatatatatcaacaatttatttgagctcctggtgttctcctcccatcttctctggagarccacaacattcttaattttgttttgtaaatcatttatctttacacttttatcataaatgcccatatcttcaaatatttgtgtgcatgtctcttgagaatcatatcaaaagcattttgtttgtttgcacttaacattttgcttgggagattcattcatgcaagtactgatggttaagacattttaaaaatatataactgttacatagc

SEQ ID NO: 801725 - DNA, 563 bp, Homo sapiens
aatatattctgtattttcaaacagctagaaggaggatattgaatgttcccagcacgaagaaacgataaatgtttgagatgatggatattctaatcacacttatctgatcactatacattatgtgcttccaaacatcactgtttaccccagaaatatgttcaattattatatgtccactaaaagctaaaataaaaaaattttcaaacattcaagatctgaagaaaaacttcaatctgaatactaaaaactttccctaacctcttgaaaagactaattaaaaatctctggagtttgratgcactgtaattttcatctgccagttcatggctttgtttaagctcagtagtcaagttggtagaacctccagagaaagcaatgaggaagtggcagtaggaccctctgggacccgttaccccaaatatctgtcatcttcttgacctcaaggctgggtgtcaactcaggacaggagtgcaggtcctcatcagtttatgtggggatagcagacaacgcagaccctcccagaaccatgaggacagcactgtgctttgccctgaccatccatc

SEQ ID NO: 801726 - DNA, 642 bp, Homo sapiens
cagcccctgtttggcacagaggagaatgatgaccataactcacactctcctccaactgccttaaatgctcaggctgattggtcatgtgctcacccaactgctccctaaatgcttaacagaaaatgaagacatcctctccagaacccaaggaaatacacttgaaatgtgatttgtacctcagattggcatccaagaactgaaagaaacaccagrcattccacacaatttctggctccacatccagtagaactattggaatcctccaacataaccatcttgaggcagtaaatcctgaaagaaagtgaaagaagacctttctaaatagagggaagtcccatcttacttggatttaagttatagtaaatgaagaggaaaatgctaacatgccatattggacaccacttgtctttcgatgccaggtcccttttcagccgaatatgtcagaattttctaggctccatcttttcttttattcctcttgcagcaaccataggctttgatggcttctcacaggacagaaaacctggatcatcccaaacctgctctgtgaaccctctacttcatgtatgggtttcctcccatgctgcacactgtgagggtcatgcatcaccacagcatgcacagctgagaaatgtggagagt

SEQ ID NO: 801727 - DNA, 639 bp, Homo sapiens
atgattaaacctgtaggaaacctaggcgtcccagtctgcagggatccccttcttctctcctttggcaccctgagtcatatgtggcagaagggggtactgtcttttaccttttccgccccagatgtcggggacaccgcagagcattcatgtccttattccactctgctcattacttgtcagctcactcaagtgtttctatgtaggcatcctctgcttttttaggtcactgcttgctgtctggtaaccagttcccccttcttgctgtttttctatttctgttacacagcaagggtgggtttaggccctacttaggccatagataagatcaggctgtaacactgagaaaaatattactgcaacacataagaattgtgctttagcacaagggaattctagcatagaagatactacrgtgcatcattgccctgagtccagtagccatggccttctacagtggggaatttttctcatgtctctccccttagctcttgcctaccaccagcctacctcccgacagtgggaaggccttggacaggccagtctctgcacatcttgctaacatgtaaagtgaaagagaatgagtcagttttaaagctgtacttaattttttctaagatgccattacttgtaagatgcggc

SEQ ID NO: 801728 - DNA, 511 bp, Homo sapiens
aactcttccaattattgtgactggcatatttgctctaggtctatactcaacctgctctagatgtcaagagttttggagtccaaggaggaaagtccagttaataaagctcattctttttacctcatgtgcagcactgccccagccagtctcagctgctacccattagtgacacagctctcagttcccaatgacagcctgacattgagcaatttgtaggctgccatttctaatayctcttcttgccatctcttcaagccttgtccttttttttcaggtaccgggggaagtttgaagtgaattgataatgtcaggcatggctataggttggttccacaaagattatataaaataaaattcttaaactacatcattcaggtctgcgagagcctaaaattgactatcagctttttaaggacagaagtagggtttgtttatctcccttcttccttccttatgtaggatttgagaaaatttctattaacttattctaagccttcctaagttgcatgat

SEQ ID NO: 801729 - DNA, 658 bp, Homo sapiens
gagaatcgcttgaaccctggaggctgaagttgcagtgagctcagatcacgccattgcactccagcctgggctacaagagggaaactccctctcaaaaataaataaataataaaaaaccaataccatgctatcttgattactgtagctttgcgatgggttttacgttctccaacttcattctctttcaaaataattttggccattctgagtcctttttacaattccatgtaaattattgaaatagtgtatcaatttctatcaaaaatgcctgctggggttttgattgggattgctttgaatttgttgatcaatttgacttctgaataatattgtcttcttatttatttaagtcttcctttcagtaatgttttatagtgttcagagctcagtttttgcacatattttgctaaatctatygttaaagtgtttcatgtttttgatactattgttcatatttaaaaatttcattttccaattgttcatcgctattatagtttagagaaatactattgctttctgtatattgacttttctaaacacagttattaactgtagtagcttttttgttttgtagagcacttaggatttttattttttattttatttttggagataaggcctcactatgtggcccaagctggactgcaggtgccattca

SEQ ID NO: 801730 - DNA, 607 bp, Homo sapiens
gctcgcggggcgcgctcccgagcgccctcgcgaccggaagtgcgcgctcgggggtaggcgggaaggccgcggcgggattaattaaagacccgatcaagcggcccgcagaggggcgtgaccttgtttcctcaggagtgtggcggtggtcttactactatgttcgttatagcgcggtacgttctagacccttctataggaaatttaaaacctttaaaatrtgtatttccttcctccagtcagtgaccacgggggcgtctccatgagattaagacaaagattataatagagttccagactatcctgggcaacatagcaagacctcgtctctacaaaaaatcaaaaataggccaggcttgttggcctgcccctgtggtcccagctactcgggaggctgaggaggaagattcacttgagcctgggaggtggaggctgtagtgagccagagatcgcaccactacactgcagcctgggcaacagagcgagatgccgtctcaaaaaaaaaaaaaaaaaaaaaggaaaaggataatacaagctttaaataaaactagtgtttaagaagcttcacagtaggttgttattcaaaacaaaagactgaagggagtctggg

SEQ ID NO: 801731 - DNA, 646 bp, Homo sapiens
aatcttctacctccacagcggatcccctgatgccactccaaacttctgtaattgcactcacatatgtgtattccagattcgatgtggaaggaaaaggcagttaccgagtgctcagtctgccatcttgaaatagaaatcagagataccatttcatgaggactgtccaggcatacttttgcttgagttccttagaggcctggagcactgactgcaggttgccatccacctgcatcgtggtgaccttgaccgtatggtgagaggccagcagagttgcatggacagcttctgtattgctcatgttcctgcatggcaaacacaggtgaagctcatcatcttccaccagcagctgctgcagaaggataggtcaatgccaccgggagggcagttcagacacagaatgtgcattatctggatggcatcaggtagaggcatttctctctggttcagaaaactgattttgactgctttggttccaagcaggagcccaaggaaagattttttaaagmcttaaaaatcttttttttttttaaaaaaaaggtaaaggaaagagggaactcacactctaatagccgcttacttagtgtactgtcaacaatgagagctgtacttttccattgctcattgctctattgagattattctgagg

SEQ ID NO: 801732 - DNA, 622 bp, Homo sapiens
ataccagtttaaattttcaagcagtcacaataaaaaaataaaaacaggtgaagttaatttgagtaatatactttaactcaatgtatctagaatattatcacttaaacatctaattaatgttcaaagtactaatgagatattttatgttcttttttgtattaagtctttgaaatctggtattttacactgacatctcaattgtagctacatttcaagtgccacgtgtgaatggtggctaccaaattggtcagtgcagtctacagttcaactggtatttggggtgatagggagtttttgatttagttaagtatgaaggcaaatagagaaaggagactaagagaaaccatacaacttaacttaagggaggagaccacccctcatattgtcttatgcccaatttctgcctscaaagaaagaagtaaaaactaaaaggcagaaatgaaatccacaagcagacagcccgacgccacaccctgggcctggtagttaaagatcgacctctgacctaatcggttatgttatctatagattacagacattgtatagaaaagcactgtgaaaatccatgtcctgttctgttccgatctaattaccggtgcctgcagcctccactcacataccc

SEQ ID NO: 801733 - DNA, 622 bp, Homo sapiens
ccaccttttccctctctttttttaagatagtttgagtcttactttttagagatacatgcgtataataatctactaaatggtagtgcattttttttctttctgcaaacatatattgagtcttctctgtaccaagaactgtgctctaccaaaagtacaattactaggggacctcatggagttttttttttttttttttttttttgagagagagtcttgctctgtcgtccaggctggagtgcagtggcacgatcttggctcactgcaacctccgcctcctgggttcaagcgattctcctgcctcagcctccttagtagctgatactacaggcrtgcactaccatgcccaatttttgtatttttagtagtgacgggggtttcactgtgttggttaggctggtctcaaacacctgaccttgtgatccacccgccttggcctcccagagtgctaggattataggcgtgaatgaccgcgcccagccaagggagtcttaccagtttgtagtttatatgtatttgttactttggtgaactcctgttttctcatagtgatgaacagcaacaccctaaaaaaatgcaccttgtacatactttgagatatcacattgaagggaagggtgaggac

SEQ ID NO: 801734 - DNA, 582 bp, Homo sapiens
agtttggatacctttaaaaaaatgttccagttggcaatttcacaattattttggaacttactgatattaaacttaaaagcattttaaataaattcattttgcctcaattaagtatgttttaataataaaaggtacatgttctccatttctgtaactgatttggtaaagtgaccttgatcaaagctgggtcatgccagagtrgggtcagatttttctttcttttttttttttttccttcctggaatcacctccaagggtcagatttcttcaggatccactgggtgcttttgtcctgtcatggttgtatttcctagttctttatttggatcaaactgttagctctattcacaaatattccaatagtactattcttgaaaaaaaattactttaggccaggtacagtgactcatgcctgtaatcccagcactttggaaggccgaagcaggccgattacttgagctcaggagtttgagaccagcctgggcaacatagtgacacctcgtctctataaaaaaaatacaaaaatttgccaggtgcagtggtgtgtgcctgtggtttcagttactcaggaggctgaggtgg

SEQ ID NO: 801735 - DNA, 576 bp, Homo sapiens
ataaataaactttttcattacatatctaccctaaaatctagccaaagaacattttaaatcagaacagaaataaaatagaatgaaccctgtggtcgggcaccatggctcatgcctgtaatcccagaagtttggaaggctgaggtgggtggataacctgaggtcagcagttttagagcaccccatctctamcaaaactacaaaaaaaaaataggtttggtggcagacatctgtaatcccagctactcaggaggctgaggcaggagaattgcttgaaccttggaggcagaggctgcagtgagctgagatcatgccattgcactctagcctgggtgacagagtaaaactaaaaaaaaaaaaaagaaccatgtaacactgacaaagaagaaataacaacagaagaaacaaaaatataggtaaatataacagatttatcttctcttctgttgtttttaaaattatgtttgatagttgaaacaaaaattttaatgctgtgtcatatgattatcaatgagtatagggtaagtatttaaggaattgtattttaaataaagaagtacaaaatgacataaaatgtgt

SEQ ID NO: 801736 - DNA, 649 bp, Homo sapiens
ctcctcacacagttagttacttctagggaaaatggaggttccctgctcatgagaatttccttctgccatccctaggtagtaagattctatttaaaccatttttattttattatagaactctttggggcaccactgtttccattagcataagggtagcttcaattaacatttcatagcaaggcagtaaattctcctcaggtggatattctctagtccagaagttgtcattgggaagtgcttacagtcttttgtcatcagtcccaataaatgttccacaaagggctataaagtggaggatttttcctgattagcactccaacttttgcccyatattctgtgggctcaggcaatcttactagttcctatttatttaccatgtccatattctctttgggaaatgcacaaggggagaggaaaagacacacacacaatacctttaaaagtaaacaaactttatcccatgtatatggcaatgcagatgtaataagcaaattatataataataaggaaatgatataataagcagattgacataataagcaaatcacaatgggaaggggagaagggaaaaggtttttacactcaccagactgtggaggattcaccaccagactggatagcaacagcctgggcttcagagtcagctact

SEQ ID NO: 801737 - DNA, 611 bp, Homo sapiens
catataggaatagattgaaatagagatttgtccgaaacagtgctggataaatgcctcaaggggctcacacaaccttttccgtgacttggtgaccagtgtttgtgtccatgttcaattgagttcaaatttaatatttaacttttcctccacagtccaatgaacagttctcataggatacatttacatgccttcggttttatggtactacctaggggaaycatcccccgtcagatacaatacctattttcgtagccatttatgtgaaggagtcacaactaacttacatgaaatctgtttaaacatctcaaatttcataactctattaacttatacatttttatgctttggtcccaggaccttttttttttctacccccagtccattttaccttttcccttgaaagaggatctggatccccagcagtgggttgagccagggaacttggtctcttttgtcaatctttatcataatttgccttagccttgcttcatgcaatattagcttattattataacctttgccttttgatatttcttaaatttccccaatttggggtaaatgcagaaaatgggtgtggggccttttaatgttagagaatgaacagggtgggt

SEQ ID NO: 801738 - DNA, 611 bp, Homo sapiens
catataggaatagattgaaatagagatttgtccgaaacagtgctggataaatgcctcaaggggctcacacaaccttttccgtgacttggtgaccagtgtttgtgtccatgttcaattgagttcaaatttaatatttaacttttcctccacagtccaatgaacagttctcataggatacatttacatgccttcggttttatggtactacctaggggaatcatcccccgtcagatacaatacctattttcgtagccatttatgtraaggagtcacaactaacttacatgaaatctgtttaaacatctcaaatttcataactctattaacttatacatttttatgctttggtcccaggaccttttttttttctacccccagtccattttaccttttcccttgaaagaggatctggatccccagcagtgggttgagccagggaacttggtctcttttgtcaatctttatcataatttgccttagccttgcttcatgcaatattagcttattattataacctttgccttttgatatttcttaaatttccccaatttggggtaaatgcagaaaatgggtgtggggccttttaatgttagagaatgaacagggtgggt

SEQ ID NO: 801739 - DNA, 612 bp, Homo sapiens
tatattattcatttttaaggatatacctctaaatttttattttcagtttaaacaagcagatctagatttttaagtcatggaggctagaaattgtatgctttaatctttatatcccctctgccttagtaagagctagcagtgtttaaaggtttgctttaactgtattaccttgtgaaatgttataaaaatgatakgaagaattattttctgcatattattttctgcattttaaatatgaagaaaataggacagatataaaataatttgctcaaggttataaatttaataagcagtggaacagagaaatatagggagtcttatctgagagtactcactcgtaactactatacactagtgaagtagtgctatgtgatttacatacattaaatttatatgtactacacacacaggcacacgtgtgcaaatatatttagcagatggcaaataaaatgtcccacttgctacctagtgaatgctatactatcttttggagagtcctttaaaatacaatttcacttccataacccagagaaatatttcagtcctcttgattttgtgactatacagaattgctttgtggttatacaggcagaatggtacagaattcaattt

SEQ ID NO: 801740 - DNA, 625 bp, Homo sapiens
gatttttcttcattatattcactgaagtatctcaagtgtctacaccagtgcctggcatacagtaagtatttgataagtgtcaactaagttgtatgaaaggatgaatggattatttgtttggtcatcatattacagtcatactcaccttctttctgtttttaataggctgagtcccttcggggttcatgagctttggaaatgttctttcttcttcttggagttttctttgtccagatgccccttactcattgcgtaggtcccacattgaaagacactttctcactgaagccttccctgagcacagaagggaaaccagargcttccttcactggtcttttttagtatatactccactgtagtccttcagagtatatatcacttttaccgtactgaatttcaagtgtgttgagggtaaagattacacttttcctcctcaccatactacattacttagaagagagtccagtggaaattagatgttcaaaatctagttacaggttgctaactgaccactgtgttcctggcactatgctcactgttgattgtgcattggtgaacaacttgctctatgaaactgatataaagaaaatgagcaaaataacattttccccaaatgattatagga

SEQ ID NO: 801741 - DNA, 600 bp, Homo sapiens
ttcccaattttaaaacttactaaaaatctatggtaatcagtcagtgtggaatagaaattggatttcatggataaacacatatttatggccaagtgatttttgacaagtgtgttgagatacttcaataaagaaaagcttcttcaataaatggtgctggggcatctggatatccgcttgcaaaaamataatgttagattatttaaataaaaaattatatcaaaatttatcatagatattaacctgagacctaaagctataaaattccagaagaaaacataggaataaatcttcataatcaggttaggaaatagttttttagatattactccataaacataagcagcagaagagaaatagacaaatagaaattcatcaaaattaaattgtggttcaaacacaacatcaagaaaatgaaaaaacaatttactgaatgggagaaaagatttccaagttacatatatgataagggacttctatctgcaacatataaacaatacttacaactaattactaaaagacaaataacccaatttaaaaacaggcagatttgaatagtctttactccaaagaagatatacaaataccctagaactacatgaa

SEQ ID NO: 801742 - DNA, 638 bp, Homo sapiens
aacaaaggaacactatttataatatacaaagaacacttaaaacacacacacacacacacacacacacacaaaacccaaaaaccaaacaacgcaattagcaaatgggcaaaagacatgaagagacatctcaccaaaaaggatagacagatggcaaataaaaagatgttcaacataacaggccactagggaaaaacaaattaaaaccacaatgagatatcacaacacacctatcagaatggctaaaataaaaaaaaatagcaacaccaccaaacactgatgagaatgcagaaaaaccgaatcacttgtaagttgttggtggaaatgtaaaatggtacagtgaactggaaaacagattcagagtgtcttaaaaaactaaacatacaactaacaaatgacttagcaattgcactcctgggcattcaggaaaattaaaactgaacacataaacctsttgaaagcagctttattcataattcatattcagctaaaaactggaagtcattcagatgtccttcagtgggtgaacagttaaactgtagtgtacattcataccatggaatactactcaacaataaaaaaacatgcaattgataacacacaacagcaccatgcaacttaaaatctccagagaattatgc

SEQ ID NO: 801743 - DNA, 626 bp, Homo sapiens; identical to SEQ ID NO: 790833

SEQ ID NO: 801744 - DNA, 624 bp, Homo sapiens
catgtttgcgccactgcactccagcctgggtgacagagtgagactctatctcaaaaaaagaaaagaaaaaattttgaataaaaatgggcacaagatttaaacagacactttaacaattaagatggtgaatggcaaataagcacatgaaaatatgctcaacaccattcacagttgtggaaatggaaattaaaatcataatgggataccaccacacacctagtagatggctaaaattaaaaagaccaaccatatcaaatcttggcaaagatgttgagctacaggaactcttatatactgctgatggtaatgtgaaacagtgacagaggcaggcggcagacaaatgcctaggcagatcaggaagggtccctggagaatctctgacccaccccacaagtgtttataccagatgtttttgtgcagataagggaacctgcacagggtcttscctgggcatgctcacagtggactggaggcccaaatgcactgtgggaatggggtagagctaccaggaattcaggccctatgcagtggaggagcctggtctcttcagctcatgtgtggtggcctggtattcagtctgtgaggtgagagcctgctggtggaaccccctctttttgctgacag

SEQ ID NO: 801745 - DNA, 637 bp, Homo sapiens
atgtcacatgaagactaaggcagagattggagtgatgcttctacaagccaaggaataccaaggattgccagcgaacatcagaagccaggagagaggaatggaacagattctctctcatagtcctcagaagggaccagccctgctgacactttaatattagacttttagcctccaggaatgtgagacaagatatttttgttgtttaagctactcaatttatggtactttgttatggcagtcctagcaaactaatacatagagtcatatagtatatgctattattatgcttcctttcttaaactrcttttttttttgtttttctggatattaatcattctttctctctctgtctcttcccttacttttctatagatctattaccaatgcaccccaaactcccaccttaagtgtatatctcttttcaatttattagaaaaagattagatcaccattcaatgtcctcttcttcccttggatctgtcccttctggggttctttatctttgtgctccaccttgaaccttattgatttctagaactgtcactcggctgatgttctggaatctccccttttaaactcatcttggggatcccctttccctgtctcttgtgttggctcccatgttttcataattcca

SEQ ID NO: 801746 - DNA, 637 bp, Homo sapiens
atgtcacatgaagactaaggcagagattggagtgatgcttctacaagccaaggaataccaaggattgccagcgaacatcagaagccaggagagaggaatggaacagattctctctcatagtcctcagaagggaccagccctgctgacactttaatattagacttttagcctccaggaatgtgagacaagatatttttgttgtttaagctactcaatttatggtactttgttatggcagtcctagcaaactaatacatagagtcatatagtatatgctattattatgcttcctttcttaaactgcttttttttttgtttttctggatattaatcattctttctctctctgtctcttcccttacttttctatagatctattaccaatgcaccccaaactcccaccttaagtgtatatctcttttcaatttatkagaaaaagattagatcaccattcaatgtcctcttcttcccttggatctgtcccttctggggttctttatctttgtgctccaccttgaaccttattgatttctagaactgtcactcggctgatgttctggaatctccccttttaaactcatcttggggatcccctttccctgtctcttgtgttggctcccatgttttcataattcca

SEQ ID NO: 801747 - DNA, 688 bp, Homo sapiens
tctttctctagagcataagcactataaatgtagagatgcctcatgttttattcactgctgtatctccagtgtctagaacaatgcctggcatgtaataggtctaaatatgtttctgttgaatgaatgagtgaagtgggtgcaaaaaaataactatggattttttkgctgattttttaataaactaatcttatgttcttgttctgctaaagggagaatagaacagacatgtactgtaatcagatgcgtttgacaagattctgaaaaaagagcaatttcactcaccatttggaatagaccattttttgttgatactatgtttataacacataataatattaatattaataaaataagagaatataaactgccaagaacatcttggacagtaaacgagacaggattggatttattgtctgtccattaagtctattttaatttgtgactaaagcattggagagggcctgggtaacctgatattttcaccaacaaggcatggtaaaagcaaccacaaccgctgactacatgatccaaatccagatccaactctgctgttaagaagctgggtaaatcattgtgcaactcacttttctggacctctcttttgttatctgtgaaataagcagactggactaacatattttgaaggtaccttctgtatttaacgtaccataattcccacagttctgga

SEQ ID NO: 801748 - DNA, 620 bp, Homo sapiens
agccacatgtccctagatagctaatggatcaaggaagaaattaaaagaaaaatttaaaataatgtattgggacaaatgagaataaaaatacatcataccaaaacatacaggacagcaaagcaggaaaatttataagaataaatgcctatatcaaaaatgaaawaaaaaaagatttcaaataaacaacctaacaatgtacttcaaggaactggaaaagcaaaaacaaactaaacccaaattggtaaaggcaagaaaataatgcaactcagggcaaaaataaaccaaacagaggttaggaaaactatctaaaatatcaacaaaacctggagtttgttttgggaaaagataaacaaagttgacaaatctttagctagacttactaaaaaaataagtaaagcatacacaaataaaatcagaaatgaaaggatacgaggaagatttatcatctgcaaatcaataaatgtaatccaccacattaacaagaataaagacaaaaaccctatgatcatttcaatagatgcagaaaaagcatgtgacacaacaagcatgtacatcccttcgtgataaaaactctcaacaaattaggtatagaaggtaatacctccatacgaaaaaggcca

SEQ ID NO: 801749 - DNA, 448 bp, Homo sapiens
aaatctaatagtatgtttgttcttccatctctcagtgtctttaaaattcctaaaattatataaagtaataactacaacattaaattttggggattatgatgcatatatgtaatatgtatgacaaagttttcaaaaaaggggrgaaaagaaaatagagatatataaagtaaaacatctatgtcttttgtggaattgagttagtataaatctttagctaattctgaagaactgctttatatgttaagccctataataactactaataaaataactaaaaatatagttaaaaaaattaaagaaataaaatatgtcgtcataaaatactcaggcaaaaaaatcagtgaagaagaaatggaggaacgaaaaaagccgtgacataatagaagcaaatagtaaaatgacaaatgcaaataaatcaattacaacataaaacgtgaatggagaaaac

SEQ ID NO: 801750 - DNA, 448 bp, Homo sapiens
aaatctaatagtatgtttgttcttccatctctcagtgtctttaaaattcctaaaattatataaagtaataactacaacattaaattttggggattatgatgcatatatgtaatatgtatgacaaagttttcaaaaaaggggagaaaagaaaatagagatatataaagtaaaacatctatgtcttttgtggaattgagttagtataaatctttagctaattctgaagaactgctttatatgttaagccctataataactactaataaaataactaaaaatatagttwaaaaaattaaagaaataaaatatgtcgtcataaaatactcaggcaaaaaaatcagtgaagaagaaatggaggaacgaaaaaagccgtgacataatagaagcaaatagtaaaatgacaaatgcaaataaatcaattacaacataaaacgtgaatggagaaaac

SEQ ID NO: 801751 - DNA, 636 bp, Homo sapiens
aactgtagaatttttttaaaatttgcttaagatcctagagtggtggttttcaaccttggctgcacattggaatcaccttgagagattaaaaaaaaaaatctcaatgcccaggtggcttccaggccaattatatcaagtctccacagatgattccaacktgcagccaaagttggaaaccactggcttggcaggagggagaggtgactttgacttaagttggtagggaagtgtttatggagaaagtagtttctgagtaggatttgaaagatgggctgaattttgataagaaaaaacttagaagcatttaaagtgatataataataccggtttcagagactaaagagtagttaatacagagggagagcgaatcagaagtataggatgacattacaaatcagaaataaatttaaatttcaaattctggccctatcatctactacctgcataaaggtggccaagttacctcatctctaaatctttttatttccatctataaaatgagaaataaaagcacccactgataaggtttaataaaggtcaaatgaaaaaattcatagaaagcacttccatcaatgtcaggtaatagaaagtgctcaatacatggctaataccaaaacatttttaccagctgagtat

SEQ ID NO: 801752 - DNA, 623 bp, Homo sapiens
catcttggctgctccttactgtacattggctggcaaaaaagaagagaagatgaagccgccattttgaacacgaatggcacaactgctggcatctatgcctgcagctcgaattcacaggctgatttttgttagaaaagaaaatgatttggggctgcttttcattaaaagcaaaaccttaccaaagactccagtaccctcactatttgcctmagtgatttcttaactcctatatcagaaccactcttgattcttcctagaaaacgtctcttcttgtttaagttagagccagtttttagtacctgttagcaaaggtgggagaccatgctggtaaaggaggtaaagagatgaagtggttacttttttttcctgatggttcgcagatgtgcttttctgaggagtccaatgaaagacaggctattttatcattatgcttttgaagagctcaccctcgcagttggaataacatgaaaattgtccaggtatcacaatctactttttaatattttctagctgcctatgacaaaatttaggccagtttccttctctgtgccaccacagctgagcatattactctagaaagcgaatgtgagcaacgcagagctgcttaaaatgaggtggtgaag

SEQ ID NO: 801753 - DNA, 609 bp, Homo sapiens
tgtagaaagttgttacttaaaactggagacttggtttttgggactccatcactgatgttatgtccttggtggataatcttagttctcttggggtctctttcagtcgttgcattaggctttgtaatctatctatcatatgtaattgcctgtatttcactgaaatagacttctttgaatacctcaaaattttaatagccttattctcatatcaagttggtctttttattttgataaatatccaatatttctgttcattaattttctgctactgaattcatctatggacaggcatgaatggtctttcccttcrtattttaaaaatgagatctgcaagaatcactataaacacataatttgtgctgagcttggttgttttaatctggggtgttactttatggtaacttaagttaataaaactttgttttaaaaagtattaatatcagatttcctccaaattataaaatcattattaatatcttactggcaatatataatgatatcttgttgacagatttggaatagaaaatgactggaaatctagactcaaagataccaacaaaatatctatgatagcaagctgtctttggtacttaccctgattttcaatgt

SEQ ID NO: 801754 - DNA, 550 bp, Homo sapiens
gttgttacttaaaactggagacttggtttttgggactccatcactgatgttatgtccttggtggataatcttagttctcttggggtctctttcagtcgttgcattaggctttgtaatctatctatcatatgtaattgcctgtatttcactgaaatagacttctttgaatacctcaaaattttaatagccttattctcatatcaagttggtctttttattttgataaatatccaatatttctgttcattaattttctgctactgaattcatctatggacaggcatgaatggtctttcccttcgtattttaaaaatgagatctgcaagaatcactataaacacataatttgtgctgagcttggttgttttaatctggggtgttactttatggtaacttaagttaataaaactttgttttaaaaagtattaatatmagatttcctccaaattataaaatcattattaatatcttactggcaatatataatgatatcttgttgacagatttggaatagaaaatgactggaaatctagactcaaagataccaaca

SEQ ID NO: 801755 - DNA, 560 bp, Homo sapiens
ttaatgctgcctccatttgtcattgtataatgagttcctacagaggaaaaaaggaaagatgaatatgttttagaagagacaatagtgagctatgtgacctgagaagttcattaagtcatacagaaataacatcacttgaaatcatttcaattagagaaaaatgttaaaaaaaattatccaaaacttggaaataaggccaaaagattatgacatgtccctttaaagtaaaacccaaatatcaacaattagcctgcataatagtcacctaatgctctggaaaattttaaatgactatttactactgattaggaaatagattctgtatagaaaatgatttgtaaaagataaattgaaaatagtaacttttatctgctaaaatgcmaatgaattctgtccagtagaaaaaataacccttagagttgtggttttgtttgtttttgccctgtaagaatttgctttctttcactgatgatatacacttagtctcatacatgctcctctgaatcagccttgtcatcaggctggttccctcactagagtaaaataaatcttggctcatg

SEQ ID NO: 801756 - DNA, 622 bp, Homo sapiens
taattagggggaactgtattgatgcctttagtttactttgaaatatattgactaatagaatgacaaagaaaatgagtattataaaaatgttacagatagaattcagatggtaaggtatatggatgttcactgtagaattcttcaaatatttatgtatgtttgaacattttcataataaaatgttgaaaaactaatgagaatggcataaacaacatttaagcaatatattttgaaatttaattsaaatggtcaaattcctggaaaacacaaactcccttcactaacagaattgatagaaaatctgagtagttcaccattgttaaagaaatggaatgtgccatttaaaaccctccaattgaaaatactacatatagttacaatagggaattttcccaagcacttaaacaataaacaatgccctcttatacaaacctttcccagtaatagaaaagtagggaaaacgtcccaatttgttttacaaggcttgcataacattgatacctgacaaagctatcagagaaaggacagttataggccactttctctcatgaatttagatgcagaagtttgaggtcagggatgtattaaaaagtccagtcttatgggttccatctcacatctg

SEQ ID NO: 801757 - DNA, 627 bp, Homo sapiens
actccaagcagaggaagttctttgcttctaagagtttatgtgattaacttgagcccctcctgccccagataatccaggataatctcccttaattacactgcaaagtcccttttccatgtaatgtgacattcacaggttccagaaattagggaatgaacatytttgggaagtcattctgcctagtacgtgtgcatactgactttttttccaattttaagttcatgtttcttagaatttatctctgggaattctttgataccttgatttaaagtgtgcttcttttttttttttagacacagtctcactctgtcgcccaggctggagtgcagtggcaccatctcggctcactgcaacctccacctccgagttctagcgattctcctgcctcagcctcctgagtagctgggattataggcacacgccaccatccccagctaagttttgtatttttagtagagatgggatttcaccacattggtcaggctgatctcaaactcctgacctgatgatctctccgcctcggcctcccaaagtgcttggattacaggcatgagccactgcaaccagcctaaagtgtgtttctttagaaagtttatttctcaaggcatgttggtcactgctaatgcc

SEQ ID NO: 801758 - DNA, 566 bp, Homo sapiens
cctgcatgttttaaaatttttggtatttttcatttgagttggaagaactcttaaaataatcaatgtgggaacttggaggaagggcactctagccccgagccggtctgtccaattggtgaacaattgatttctgaagactgctgctgaaacacaaatacattagaagttcwttcaggcccttgatgctcctcgagtcccctccaggaaaagaagctggatccattgctgacacaattgcagagaaaaggtcaatgtgctgccagaagccagacaccaaatcctcatggggtctttgtgaggaggtgtagagtagccttgggaaggagacttgaggcaaactgggccctgcgtctccagggctgctggcgcctggccctcaggaaagaaactctccctgtcaaggaagcaggagctgcagctatttgataagcttttaaaatcaccattcttcttaatcatatattctaatatcctgtatctgtagttacttccctgtacttccaagtctggaacactaatgttctcatttctgactcataaaaccatcattttcagctagaaagaat

SEQ ID NO: 801759 - DNA, 669 bp, Homo sapiens
ctggaacacttatgcattgctagtgttaatgaaaaatgataaagcttctgtggaaaacagcttggcagtttttccaggagttaaacatataattatcatatgatccactaattccacttttggttatatgtcataaataattgaaagcagggactcaaacacattcttatataccaagattcagaacagcattatgcacaatagtcaaaaggtagaaaaaacctaaatatgcaacaacagatagaaggataaataaaatgtatcatatatactagtattcaggcataaaaaatgaagattctgatacatgctacaacatgaatgaaacttgaatatattattctaactaaaataagccagatgcaaaggccaaatattgtatgattctacttatataaggtagactataaggtaaaagggaaaattcataggcaggaagtagtatataagttactggggactagggkttatgtgagagttattctttaatgggtacagaacttctgtttaataatttaaaaattgtgaaaatagatagtagtgatggtagcacaccattgggaatgtacttaatgtcaataaattgtacacttataacaaaatggtaaattttgttatatatatatataaccataataaagaaatctccaaaaaagccaccctataaat

SEQ ID NO: 801760 - DNA, 636 bp, Homo sapiens
ttttataacttaaattactgtggatgtatatggcaagggctaataaagtttacttttagtatttaatttactccacagacaaattcaatgtgtgtattttactggtataaatggagttaacttctctatacatgatcattagcatcttaatgggttattctattaaagtgggttattytattaaaaaacaaatttcacattaagtatttaagtagtatggttagttaaaatgaaaggttgtttacagttttttttttttttttttttgcaaaattagtaacttctgaaagggagaaatacctatagaattttttttaaaaatccaaacattttcatggcccataaagtaatgcccctcatctttaaaaaaaaaaaaagtaataattcattgccaaagtggacctcctctgcttcctttatttttcactttctctttattgaggtagcttttacatagtgacaatttctattctctaaaatagggctcattatttccaatattctcccagaagatttaaaaatattcttgatttcagaaaaagagatcagagatcacctcccaaagtattccccagaacagtaatttaactagaacacatttctcccctaaaatagctggaaggcagtatgctttag

SEQ ID NO: 801761 - DNA, 627 bp, Homo sapiens
tgtggaaacaactttagaattgggtaacaggcagagattggaacagtttagagggctcagaagataataggaaaaagtgggaaagtttgaaactttctagagacttggagggctcagaagacaggaagatgtgggaaagtttgtaacttcttagagacttgttgaatggctttcaccaaaatgctgatagtgatatggacaataaagtccaggctgagatggtctcagatggagatgmggaacttattgggaactggagtaaaggtcattctttttatgcaaagagactggtggcattttgcctctgctttagaaatttgtggaactttgaacttgagagagataatttagggtatctgctggaagaaatttcaaaatggcaaagttttcaaaaggaggcagagcataaaagtttgaaaaatttgcaacctgacttgtggaataaaagaaaaacccattttctggggagaaattcaaggctgctgcagaaatttgcataagtaatgaggagccaaatgctaatcatcacgacaatagggaaaatgtctccagggcatatccgagtccttcatgacagtcgctcctatcacaggcctaggagggaaaaatgatttatgggccaggccc

SEQ ID NO: 801762 - DNA, 643 bp, Homo sapiens
aacccacctcttgccatcagtgtgacctggatgtgtgacatgaagtcaaaggagctcattttggaactataatgactgccttataggattttggacttgcatggactctgcagcccctttgttttggtcagtttctcccacttggaacaggtgtaattacccaatgcctgtactcttattgtatctaggaagtaactaactcgcttttgattttacaggctyataggtggaaggaccttgccttgtctcagctgaaattttggtctgcagacttttgagttaatgctgaagtgaattaagactttggggaactgttgggaaggcatgatttgttttgcaatgtgaagacataagatttgggaggggccagaggtggcatgatatggtttggctctgtgtcctcacccaaatctcatcttgaattctacctcccataatccccacgtgtcatggaaaggatgtggtgggaggtaattaaatcatgagagcaggtttttcctgtgctgttctcatgatagtgaataagtctcatgagatctgatggttgtataaagggctgttcccctgcacacactctcttgcctactgccatggaagatctgtctttgctccttctttgccttctgctgtgattgtgaggcct

SEQ ID NO: 801763 - DNA, 643 bp, Homo sapiens
aacccacctcttgccatcagtgtgacctggatgtgtgacatgaagtcaaaggagctcattttggaactataatgactgccttataggattttggacttgcatggactctgcagcccctttgttttggtcagtttctcccacttggaacaggtgtaattacccaatgcctgtactcttattgtatctaggaagtaactaactcgcttttgattttacaggctcataggtggaaggaccttgccttgtctcagctgaaattttggtctgcagacttttgagttaatgctgaagtgaattaagactttggggaactgttgggaaggcatgatttgttttgcaatgtgargacataagatttgggaggggccagaggtggcatgatatggtttggctctgtgtcctcacccaaatctcatcttgaattctacctcccataatccccacgtgtcatggaaaggatgtggtgggaggtaattaaatcatgagagcaggtttttcctgtgctgttctcatgatagtgaataagtctcatgagatctgatggttgtataaagggctgttcccctgcacacactctcttgcctactgccatggaagatctgtctttgctccttctttgccttctgctgtgattgtgaggcct

SEQ ID NO: 801764 - DNA, 532 bp, Homo sapiens
acctatgtacaataatgttaaattttcacacactttctatattttctcatctttcctgcttttctctttctctcttactacctttacaaaacataagtcacaaatttaacatatttgttatcagtaaggatactaacagggaagaaattctagaaaaggataataaaataactacagttccagtaattcatcaagtaaaataaatagttctctataggtaattaagaatgatcagctggatcctccatctgctctgggagcatgaattccctgctctccaagaaaatagttgtttttcttttacccctccagraacctacattttatcaaatgtaaggtaaaattagcagaatttgaaaatccctgataaattttacatattcatcttccatcattcacattctgtgatcataactaattaaatatctgcttatattggcacttaattaccttgtgtaacatacagatacacaataacagtttgtcagcacatgaatgtatgttacatgagcatttttccatttttcaaaat

SEQ ID NO: 801765 - DNA, 613 bp, Homo sapiens
ataaacaaatgggattacatcaaactaaaaacttctgcacagcaaagaaaacaattaacaaaatcaagagacaactcttagagtggtcgaaaatatttcaaactatctgatgaggaatacataaaagattcaaacaacctagtaaccagaaaataaataatctgatttcaaaataagagaaagatataargaggatgtacaaatggccaatgtgttcatgaacaagtgctcaacatcactaatcatcagggaattgcaaattaaaaccagaatgagatataattcataactcttgttatctgatttttaaatgtgcacttactttagttatcgttatctgcattgtacatgattatattttaagtctaaagtataaaatctgatatattttaaagtctaggctgcagaatttgtatctgatttatcctctaattttctacaataccattctcatgccttttatggttaaggtccttaacatatgacaggagctaagatggcttgtactgatgttcttaaatttgaaatgtgccatgaactatgtattatttataagaattttcttaaactttgacttccttgttaatgcataatttaaaataacaatattaat

SEQ ID NO: 801766 - DNA, 641 bp, Homo sapiens
atttgaatggcaaaattccaactttttaaacagaccctcactttgagtaaatcttttccaaaagttgaatgtaataagtcatcttcctcttaactgagtaatgggaataaacccaagagtatgaacttgggtttgagattaaggaatatgtgttaaatattagcatagtaattattcacgaaattgaaaatccattaaaataaaatgattgtgccaagagaagaatgaataagaaaggtggttgcattcatgaaaaaattggaaaggtatttttcaagcagaaaaaggtagatgatagtgcrgaatttcagctattttagagtgtaacagagttaaaatgtatttgcccttctttgacttaactcttggctatacagctctgctacgtaaataatatatatcttatagtaaagtctagcatgatttggggtaatctcttaagggtaggaacaaactcatcaagatggattattaaagcagtttgaacctattcataaaatatgttttatagacagaaaacattaagggtatttccctttggcaatctttgtggagctggttctgtgctgcttgtggaaactgtgaaatgaagaaaccatctatgctagttgtgggggatgggcatcttggctcatttaatc

SEQ ID NO: 801767 - DNA, 629 bp, Homo sapiens
cctctctgtgccttagcttcttcttatggaagtgaattagtatatgtattaaatataaaatatatggctcaaaaacagtgtctcagccaggcatggtggtgtgagactgtaatccctgctacccggcaggctgaagtgagaggattgcttgagtcaaaggggttaagtccaccctaggccacatagcaaaactccacctcttaaaaaaaaaaaaaagtaaataaatagtatttagygcataaataaatattactctagtattagctatttttacgttctctagatattatttttttaagtctacaaataggtacatatttttaaaatcattagaatgagaataggaatcacttggtgattcttggcttgccagcttaaatataatacatgagagggcactgtgacaagccatcagattatcaatttatgattccctagaataagaaagtttccaagcagcatattattggagagagacttactatgagcccaattgatattcgtctgtgataggatgactttgtatctggatagagaaacaccaaaatataaccaataaaatcttccattttatattgagattttatcttctatcatattttcataaatggttaagagcatacagttga

SEQ ID NO: 801768 - DNA, 629 bp, Homo sapiens
cctctctgtgccttagcttcttcttatggaagtgaattagtatatgtattaaatataaaatatatggctcaaaaacagtgtctcagccaggcatggtggtgtgagactgtaatccctgctacccggcaggctgaagtgagaggattgcttgagtcaaaggggttaagtccaccctaggccacatagcaaaactccacctcttaaaaaaaaaaaaaagtaaataaatagtatttagtgcataaataaatattactctagtattagctatttttacgttctctagatattatttttttaagtctacaaataggtacatatttttaaaatcattagaatgagaataggaatcacttggtgattcttggcttgccagcttaaatataatacatgagagggcactgtgacaagccatcagattatcaatttatgattccctagaataagaaagtttccaagcagcayattattggagagagacttactatgagcccaattgatattcgtctgtgataggatgactttgtatctggatagagaaacaccaaaatataaccaataaaatcttccattttatattgagattttatcttctatcatattttcataaatggttaagagcatacagttga

SEQ ID NO: 801769 - DNA, 521 bp, Homo sapiens; identical to SEQ ID NO: 790905

SEQ ID NO: 801770 - DNA, 617 bp, Homo sapiens
gccatatgtggaaatgtggaaaagttaaattaaaagaactggaggatttggaagcacaaataaacaaggcaaagcagcttactgggtgaatcaaattaatgataaacatcctacctgtgaaataactattcagggaaagaaatttaaaggtttggtagatacaggagtggccatttcaatcatttctctacagcactggycatccgtgtggccaattcaacccactcaatttaacatagttggagttggtaaagccactgaagtatatcaaagtagttatattttgcattgtgaaggacctgatggacaacctgggagtattcaaccaattacaacttctgtacctataaatttatgggggagagatttattacaacaatggggagcacacgttctaattccagagcaattatacagccctcacagtcaacatatgatgcatgaaatagggtatgtccctggtatgtgactaggaaaaaatttgcaaggtttgaaggaaccacttcaaacggaaagacaaagttcccgccaaggcttaggatatcatttttgattgttgccattgttaagcctccagaacctatacctttaaaatggttaactatcgggggaaattc

SEQ ID NO: 801771 - DNA, 617 bp, Homo sapiens
gccatatgtggaaatgtggaaaagttaaattaaaagaactggaggatttggaagcacaaataaacaaggcaaagcagcttactgggtgaatcaaattaatgataaacatcctacctgtgaaataactattcagggaaagaaatttaaaggtttggtagatacaggagtggccatttcaatcatttctctacagcactggccatccgtgtggccaattcaacccactcaatttaacatagttggagttggtaaagccactgaagtatatcaaagtagttatattttgcattgtgaaggacctgatggacaacctgggagtattcaaccaattacaacttctgtacctataaatttatgggggagagatttattacaacaatggggagcacacgttctaattccagagcaattatacagccctcacagtcaacatatgatgcatgaaatagggtatktccctggtatgtgactaggaaaaaatttgcaaggtttgaaggaaccacttcaaacggaaagacaaagttcccgccaaggcttaggatatcatttttgattgttgccattgttaagcctccagaacctatacctttaaaatggttaactatcgggggaaattc

SEQ ID NO: 801772 - DNA, 558 bp, Homo sapiens
tcacattagcgtgcaaccattaccaccatcaatctgcagaattattttatcttccacaactgaaatgctataccaattaaaaactaattccacatttctttccctgcagccccaagaaactatcattctactttctgtctctatgaatattactactctagatgcctcacatctggggaatcatacaacatttgtacttttgtgactggctaatttaactaagtataatgtcctcaaagtttagccatgctgtagcatattgaaattttattctatttaaggctaaataatattcctgtgtgtgtgtaccacatctcattcktccatcagtccaaaaaacaaacgagttcctttcgatgtttgggtgttgtgaataatgttgaaattaacatggcattacaaatacttgttcaagtcacagcagctttcaactcttttgggtatacactcagaagtaatattgctagattaatgttcattctaatatggggaggaaagacagaaaaaaactcttccacagaggttgtaccattttacatttccagaagcaatgaacaa

SEQ ID NO: 801773 - DNA, 591 bp, Homo sapiens
ctttggaaccatgtggtttcaaatttcagttgtgctttttaactatcgctatgactttaagcaaattctttagcctttacatatcccatttttcctcatctgtacaatggggatgataacactaactacattacaaagttgtagtgaggagttatgagtatgtataaaactttcagacttgtgcctggcacagagtaagcactcaataattgtgagatctaatattaaatgtagtcycaaacatttgatggataaaccaaagatgtgaatattttaaatattaatatattctgccagattatttttcaaaaaggtgtttcagttcacacgtggaatatatcaaaattacgtgtttcctcatatcctgactctaactgcatgttattagtcctttaaactcttgccaatctgattgacaaatggtattctattgttttattgacattttcctattaataaggctaatctcatgtttagagcctatttgaatttccacaggatgcctatttatatgttttatccaattttctaatttttctattaagtaaaacaccacttaataggaattatttgtatattagagattaacct

SEQ ID NO: 801774 - DNA, 591 bp, Homo sapiens
ctttggaaccatgtggtttcaaatttcagttgtgctttttaactatcgctatgactttaagcaaattctttagcctttacatatcccatttttcctcatctgtacaatggggatgataacactaactacattacaaagttgtagtgaggagttatgagtatgtataaaactttcagacttgtgcctggcacagagtaagcactcaataattgtgagatctaatattaaatgtagtctcaaacatttgatggataaaccaaagatgtgaatattttaaatattaatatattctgccagattatttttcaaaaaggtgtttcagttcacacgtgraatatatcaaaattacgtgtttcctcatatcctgactctaactgcatgttattagtcctttaaactcttgccaatctgattgacaaatggtattctattgttttattgacattttcctattaataaggctaatctcatgtttagagcctatttgaatttccacaggatgcctatttatatgttttatccaattttctaatttttctattaagtaaaacaccacttaataggaattatttgtatattagagattaacct

SEQ ID NO: 801775 - DNA, 654 bp, Homo sapiens
ctatgttaaaatgcttcatgactgagcgttgttattcagtaatttctacctcctctttagaccaagtaatatcactatgattagcttttccccagaggtcttattttatcaaacaataattttcagtaaatctcatactcaatttstaatgataaaaatcctttttatcattagatgagaagatctttccagaggtctttttatgcatgtttaaaatttgtattggcatcacaccagcttttaatgacagcttcatgtgccctccatatccaagtgccttgttattatagcacaaaggcataaaagttgacttggcaaatgcacaagatacagaaagaggtaaaaagaagggtgtttacctttgtcctgggtatgaaggggtgctttacaaaagacatgaccttcagcttcagcttcaagaacgagaaagagttttccaacagaagaaagagagttacttttagaggaaatatatgaatggaatcccagaagagatgcaaggtgtttcatgcaagtcagcaatgctgacacatagggtagggaataaagtgaggaaaggaggaatgtaagatgtattgagcattgtctatgtgttagatccatcatatatatgatttcatttcatcttcattatggttgcatatgctgactcac

SEQ ID NO: 801776 - DNA, 573 bp, Homo sapiens
ttatagttaaaaataatttattgtatttttcaaaataactagaagagaagatttgaaatgttttcaacacaaataaataattaatgtttgagatgatggatatcccaatagattatttcacactgtatacttgtatcaaaatatcacatgtaccccataaatgcgtacaactatcatgtatcaatacataaataaagtcagatgttccaaaagggtacttaagattacatattgtttctatgcagatgaacagaaatggaatatgggaaaataaaattatttgaaatgcttaagaaatcagagagtccaaaagatagggaacaaggagaactggcaaaataataagatttgtttcatcacattgagatacttggaaaaataaatgtaaagtttaggtaaaayagaaatattgacttcatgagtatagagttgataatgggaatgttaagaaattttgactcatttgtatgagacagggagacataggatatgcctatctatgttttagggagtttcttaatgcttaagaaataaatgaaaggtgagaaagagaggacagtaagtaaaattact

SEQ ID NO: 801777 - DNA, 577 bp, Homo sapiens
aattatcctagctgctttacatatatttgagcaagataggtagcactattattctttgaagagcctcacagaagttaataattggccaaaggtagaatagcaagtagcaatacagggatttaaatgtggacatgggtaaatccaaagcctgtgatctttccctgctacactctttccctatctgtaaaatgaatacttgagactagatgttctctaagattccttccaactctaacattccttccacctctgttgcgccagtactctattgggcaagttatcctactctttcattaccaatgaagcagggttccaaaatgagccctttgactagtactaacaatgcctgctcttccccaactttctcttcttcttcttgaactcctaattgcccccattctcatacttgtctaatttaaaagagcatccttaatttastaaatatgtcatatttagttttgaaaaaaaaaattccatgtctgaatctttgcctattttctgaaaagcattagcagagtttagatgttaaacaagaaataaaccagatagcagtaaatatgtgttgggaaattcaggt

SEQ ID NO: 801778 - DNA, 591 bp, Homo sapiens
catctctataaaaaatagaaataaaaaaattagccaggcctggtggctgggaggtcaagggtgcagtaagccgtgatcatgctactgcactccagcctgggtgacaaagcgagaccctgtctcaaagaaaaagttcatgttttaattatcaggagctcttcttgttctctgactgttcttgggtcacaacaacttgttcttattttaggaatgtaatgtcatccatatcatcctaaattgttccgagaacactaaaaaaaggggtttttttttttttagttatttttagttccctgagttatatctattttcttcagaatctgttgttctgtttgttcatattaatccttcccttttctgaaattggcataatcaaatatctagtgttatatstgtatcagtccattctcacactgctataaagagctacctgagactgggtaatttatgaagaaaagaggtttgactcacagttctgcggtctgtacaggaagcatgactgggaggcctcaggaaacttacagtcgtggcagacggcaaaggggaagccagcaccttcttcacacacagcagaagagagacagcgtgaag

SEQ ID NO: 801779 - DNA, 604 bp, Homo sapiens
ctaaaaaaaggggtttttttttttttagttatttttagttccctgagttatatctattttcttcagaatctgttgttctgtttgttcatattaatccttcccttttctgaaattggcataatcaaatatctagtgttatatctgtatcagtccattctcacactgctataaagagctacctgagactgggtaatttatgaagaaaagaggtttgactcacagttctgcggtctgtacaggaagcatgactgggaggcctcaggaaacttacagtcgtggcagacggcaaaggggaagccagcaccttcttcacacacagcagaagagagacagcgtgaaggggaaagtgccacacacttttaaaaccaccagatctcatgagaactcattaactatcacaagaacagcaagggggawatctgcctccatgatccagtcacctcccaccaggtccctcccctataatccccagggattacaattcaacatgagatttgggagagccaaacagagccaaaccatgtcaatacctatggctcaaggacaaagctgattagcacagatagcatgggtttctcgggactctttcttaagtgagggagtt

SEQ ID NO: 801780 - DNA, 642 bp, Homo sapiens
attcttttggataaatacccagaagtagaatttctggatcatatagtcgttctatttttgatttttgtggaattgctatatgttttccatagtggctatgccattctgcattctcaccaacagtctacaagggttccaatttcttcacattcttggtaacacatttttggtaacacttgttgtctttttaaaaataataccttaggtcctaacagatgtgaggtggtgtcttaacccattgtggtttctatttgtatttttttgatgaatagtgacattgaacatcttttcatatacatgttggrcatttctaggtcttctttggagaaatttctactcaaatctctagctcacttttataactggggtatttattgttttgctatttgagttttatgagctccttacatagtttggaaattaaactcttatttgatatatgctttgcaaatatcttctccccttctgtaggttgccttttcactcttgtttcctctgctctacagaaactttttagtttgatgaagtgccacttgtttatttttgttttcattacctgttctttttgagtcatatccaaaaaaatctttactaagatcagtctcatgaagctttatccctaagttttctttttagagtttc

SEQ ID NO: 801781 - DNA, 634 bp, Homo sapiens
aaaaataactcttaaatttgttgattattttctattgttttatattttctatttcatttatctctgctgttatctttatttccctccttctgataacgttgggcttaacttttttcctttctgtagttccttcaggtataacattagactgtttaatatatttcttctttttcaacatagatgttttttgctataaagttctgctatggtctgaatgtttgggtccctccaaaatttayatgctgaaatcctaagccccaaagtgatggtattaggacataggacattggagaggtaattaggtaatgagggtggtacctttattaatggaattagtgtccatatgaaacacaacctggagtgctcatccccttcccacccaacatgggagtctgcagcaaaaagacagccatgtaggaagtggcccttgccagacactgaatatgccagtgcctggatgctggaatttccagcctttagaactgtgagaaatttttgtttataagcaacacagttttttgctattgttgttacagcagcctgaatggactaagacaacttcctggttagtaatgactttgttgtacccaaaagttttggtatgttgtattttcattttcatttgtctcaaagt

SEQ ID NO: 801782 - DNA, 634 bp, Homo sapiens
aaaaataactcttaaatttgttgattattttctattgttttatattttctatttcatttatctctgctgttatctttatttccctccttctgataacgttgggcttaacttttttcctttctgtagttccttcaggtataacattagactgtttaatatatttcttctttttcaacatagatgttttttgctataaagttctgctatggtctgaatgtttgggtccctccaaaatttacatgctgaaatcctaagccccaaagtgatggtattaggacataggacattggagaggtaattaggtaaygagggtggtacctttattaatggaattagtgtccatatgaaacacaacctggagtgctcatccccttcccacccaacatgggagtctgcagcaaaaagacagccatgtaggaagtggcccttgccagacactgaatatgccagtgcctggatgctggaatttccagcctttagaactgtgagaaatttttgtttataagcaacacagttttttgctattgttgttacagcagcctgaatggactaagacaacttcctggttagtaatgactttgttgtacccaaaagttttggtatgttgtattttcattttcatttgtctcaaagt

SEQ ID NO: 801783 - DNA, 627 bp, Homo sapiens
ctatagtgataaaacttcaacaggcttagagattttgttcctttttcattttttttttctcatcaaattgtgctagattatgctgcagtaactgcaaaacctcaaaatcttagctgcaggtagggtcatgcccagagtagtaacctagggatctgygctaatgggagctgtgtctcaagccctgcttaaactgctgctgaagatgcaggaaatacgaaaaaggcaaagtgaacaccagttattaagtttttatctatgaagtaacacatgtcctttctgctcatattttgttggtcaaagtaagtcacgtagcctcaacaaaacacaaaggggtaaggatgtacaatcaagtcctaccatgtagcagaaggaagagaaacagtatttgtgaacgatcctaaagactgtagagttttgcactggggagtagttcttaaagagaccatcagtatatccccacctaagaaagaagcaaacagcacttcagttgaattattttgtttataagcaactttgaggaatagtatttatttttatagtgagaaatgcctaacatattgagaaatatctggaaaaaaattatcaagttcattattataattgcctttttgaaagaataggtaggtc

SEQ ID NO: 801784 - DNA, 629 bp, Homo sapiens
accactattaagtaaagtaatagttacttgaacacaagcactgcaaaagtccatctgataatccagacgtctactaagtgactatcaggagggtagtgtatacggtttggatatgctggacaaagggacaattcacattccaggctggatggagtaggwcaatacaggattctatcatgctactcagaattgcatgtaatttaaaacttatgaattgtttgtttctggaattttccacttaatattttcagaccatggttgactgtgggttactgaaggcaaaatcatggataagagggaactactgtattatattctattgttaacatatatttgcctgattcaatatgtccacctctgaaagagatatattgatctctcttaccataatcaaacttttaatcaatttcttctttaatcaatcatatcttcaatcaatttatagcaaacttttgcataataaatttgtcttttctgatgtaaagaactatatgactaatatcttttctgtaaattccattttttattttaataaatcatgccctttactatgcttaatgcttttatatttaaaggctactttctattgttttaataatgttactgttacttattgtggcattgtcctg

SEQ ID NO: 801785 - DNA, 623 bp, Homo sapiens
ggtttaaaacaataactgaacaccaaaactatacaaaaataacattgattcattaaccaatttgttagttgagggggttgagacttcagtggaatagaacacaaaacacacagtaagatttaatggtgggaatgtaagagggatatgtcacataaaaggtctggagactttagagatgtttttgatttctctatttctctcacactctatgtctaactcatcaggaaatattgttggtctaccttcaaaatacatccataatctggccacttttcaccgcatccatagcraccaccctggtccttgccaccaccatctgtaatagcctctcaactggtatttctgctttcctccttttttccctatagtctattttcaactaagactccagagtgatcttttaaaaatgaaaatcagaccacatcagtcttttgctcaaatccctgtgaaacatgttcatttcgaccaatgttaaagccaacatgcttacaatagccaattagctccttatatgatttagtccctgtgatttctttgacctctttttatcctattctcccactcattccctcagctccagtcacactggcttcttttcaatccttcacacatgagcatgctat

SEQ ID NO: 801786 - DNA, 511 bp, Homo sapiens
cgccttcaagaatttatcattcttttggatgcaactccattcatagattgggccatgtaaggccctgtcatttattagggctacacagaggcacaaaaaagttatgtccttcatcctaaggaaacaacagtaattgcmgaatactgaagtacaaaattagatcttactgcacaacttggaaagaagtagaaattgatgggaactcttttttcgggtccatagcttttgcaccctgagccttcagataaagaacaaaagcagaataactcagagactcctctccaagcttgaagcagaccctaatgcttatgttgaagaggcagctcatatggccggaagctgcttggctatcccctcacaactgatgttcaaatatattaatgaaagatactggctggagtgtacactggtctaattatccttcttttttttttctgtagccatctaattacattccatttaaaagaatgttttttaccatgccatgtatacccagtattcttaaaaatag

SEQ ID NO: 801787 - DNA, 592 bp, Homo sapiens
tctggggactttgtaggaggtcaaaaataaaacaaatcggggtacaatgaaaatgctgttaaaaaacgcagtcatacaaactcaggtaggagcatttgttacgactggagattgttagtatgagaattttcacccagcttcaggatgtcacacaaagctgaaagcaacatcaaaatgcaaagcaccaacaaaataaggctttacaaaggatagtaagtgcttgagctgtgatcatataggtttataggttacagagcttggaaytgatttctgtgccactctctgcttgtcttcaggtaactttttaaaaatatattttttaaagtgataaaatatatgtaacataaaatttatcattttaagacttcgattctatggcccattaagtacattcacactgttatgcaaccatcaccatcatccaactccagaaccttttcatctttcctgactgaaactctatacctgttcaacactactctttaattcatagagacagtagaatggtggttgccagggaatggagtgagggtagaatggggagttcacataagatcaaatgatattacacatctctctctctctctctctc

SEQ ID NO: 801788 - DNA, 602 bp, Homo sapiens
aacagtaattagtttgacaaccacctgatcatcgctatgtgatagagtctatcagagataagaaaagatattctagacatgaaaaatttctcaacagaccaacagaatctagggctaaataaaatggctgttgttttaatccactaaattttgggctagtttgttatgctgcacaatctaactgatgcaaactggaaaagagacaacagatacctggagattagaaatgggacaaaatttgataggtctcataatctgcatagaccacaaacatagtctatggtaacaccccaaaatgatagtgcacatagtgaagcacagaagcagataatttctttatgtccaagggattatagaggtcttggacaatatagatgataaccaaacttacaaggaattaaattctagtcccccccaccccggcttttctagcattatgcatctgaatgctggtataaytctaggggtagtgtaaaatatccaattattagtgaaattgattttctcactactttggtggaatctttgatataaactcaaatatagatttgagtttattaaaaaatttttaacttctgattttgcacaaggattgcattgaa

SEQ ID NO: 801789 - DNA, 656 bp, Homo sapiens
aggccattcctgcctggcaccacagggatccatcagaaggttgaccagaggagcagggagtaaaactccacagggaaaaggaaatctccagctgaactttgtaacaatttaaatggggcaagaagcctcctggccagaacttgggggagagggcaaatctaatgtgtagactccacaggtggggcaagaaccaagctcttttctctcccagctgggaggcrggtagcccagggcaagttttcaagcccatctggccttccacctggaaacagactcagggctgttgcagggcggtgggagtgagactggccctttggtttgcatgggacctgggtgaggcctgtgactgccactttcccccacttccctgacagcctgcatgactcagcagaggcagccataatcctcctaggcacacaactccagtgacctaggaatctaactcccattccccacagcagctgcagcaaaaactgacccaggagagtctgagctcagactcgcctatccccacccccacctgatggtccttccctacctcaatacaaaggacatataatcttgggagttctagggccccacccactgccagtccctctccacactactacagctgaggttttccggaaagcgccacctcctggcaggaggcccaa

SEQ ID NO: 801790 - DNA, 546 bp, Homo sapiens
tcttttcctcttgattactaggtcctgctgtcctgatctttcagctcctaaagcaagctccttctcacatcagagtccttccacatacaattccccttgtaagaatactctttccctagctgttggtatggctaactcctcatctttcaagtttccattttctagttaccaccccagggagtcttcctcattcagcagatctgaagatacattcctctagttatctttgcttttatgcttattacaaattttaattatacacattttttgtttgtccctctcagggtcttgtaagagccattaaggcaagactatgtgatttttgtttaccacagtaccccagaatctagaactgtagctggcacattgatgtgctcaakaaacatgtacagaatgaatggatggatgagttgtagtgacaaaaggaaaagctcgggccaatctggctctgagttcttgctcttattctcagtgaacttgggtaaattatgtaacatctctgactcacagtttctgtttttaaaattaaaatttaatatctgtgta

SEQ ID NO: 801791 - DNA, 479 bp, Homo sapiens
taaaaactctcaataaactaggtattgatgggacctatctcaaaataataagagctatttatgacagacccgcagccaatatcatactgaatggacaaaaactggaagcattccctttcaaaactggcacaagacagggatgccctctctcaccactcctattcaacatagtgttggaagttctggtcagggcaatcaggcaagagaaagaaataaagtgtattcaattaggaaaagaggaagtcaaattgtccctctttgcagatgacatgattgtatatttagaaaacyccatcgtctcagccccaaatctccttaagctgataagcaacttcaacaaagtctcagaatacaaaatcaatgtgcaaaaatcacaaggatccctatacaccaataacagacaaacagagagccaaatcatgagtgaactcccattcacaattgcttcaaagagaataaaatacctagaaatctaactt

SEQ ID NO: 801792 - DNA, 610 bp, Homo sapiens
gctagaagggatcctggagctcgatctgtccaatgccttcatttagcaaatgtctacactaagacctgggctggttacaacagtttacccaacattcacaccaggccaggcaagactaagacctggatggctgacttgtagcctagtgcactgtgcattgcatactgatgacgtcaaaggcctcgttttgtgttaggctgatctgccagtcatattctctgtggctggagtgccttcattaactctgacagagaggctgttaattagtcccagaagccacgccctgctcagcacctccaagagccrcactctgcatggaggtgctgggactgagcccatacacagcttctcagtcaacacagtgtggccagaaatcaaatgagccaagggaaaacggacaatcagtctagtctctgcagggccagccttgtaatcatattactatgtagatgcctctgaagactgatagacttatcacctcacctccttccctctaccactcctctcctcagcactgtagcctggacaaacgtgaagataattcacatattgaaaggtaaaagcaagtatcaatacacttggccaacttcccagaagctcttcttgaatg

SEQ ID NO: 801793 - DNA, 610 bp, Homo sapiens
gctagaagggatcctggagctcgatctgtccaatgccttcatttagcaaatgtctacactaagacctgggctggttacaacagtttacccaacattcacaccaggccaggcaagactaagacctggatggctgacttgtagcctagtgcactgtgcattgcatactgatgacgtcaaaggcctcgttttgtgttaggctgatctgccagtcatattctctgtggctggagtgccttcattaactctgacagagaggctgttaattagtcccagaagccacgccctgctcagcacctccaagagccacactctgcatggaggtgctgggactgagcccatacacagcttcycagtcaacacagtgtggccagaaatcaaatgagccaagggaaaacggacaatcagtctagtctctgcagggccagccttgtaatcatattactatgtagatgcctctgaagactgatagacttatcacctcacctccttccctctaccactcctctcctcagcactgtagcctggacaaacgtgaagataattcacatattgaaaggtaaaagcaagtatcaatacacttggccaacttcccagaagctcttcttgaatg

SEQ ID NO: 801794 - DNA, 610 bp, Homo sapiens
gctagaagggatcctggagctcgatctgtccaatgccttcatttagcaaatgtctacactaagacctgggctggttacaacagtttacccaacattcacaccaggccaggcaagactaagacctggatggctgacttgtagcctagtgcactgtgcattgcatactgatgacgtcaaaggcctcgttttgtgttaggctgatctgccagtcatattctctgtggctggagtgccttcattaactctgacagagaggctgttaattagtcccagaagccacgccctgctcagcacctccaagagccacactctgcatggaggtgctgggactgagcccatacacagcttctcagtcaacacagtgtggccagaaatcaaatgagccaagggaaaayggacaatcagtctagtctctgcagggccagccttgtaatcatattactatgtagatgcctctgaagactgatagacttatcacctcacctccttccctctaccactcctctcctcagcactgtagcctggacaaacgtgaagataattcacatattgaaaggtaaaagcaagtatcaatacacttggccaacttcccagaagctcttcttgaatg

SEQ ID NO: 801795 - DNA, 644 bp, Homo sapiens
accgagggctatgacggtaaccttagaaataactaaaacagaaccggttctaagagctcacctctgggaggagatggggacattgctgcgtttttaaaagttcattattacactgtaattttcgactatgtatttgtaatactttttaaagagtgtaaaattaggccagatgccatggcttacacctgtaatcccagcactttgggtgggcctagtcaggaggatcttttgagcccaggagttcaaaaccagcctgggcaacatagtgagactccatttgtaaaaaagaaaaaaaaaagtttaaaaaaattagctgagcatagtggcacgcatctgtagttccagctactcaggaggctgaggcaggagtatcacttgagcccaggagtttgaggctgaagtgaggtgtgatttcaccgctggccaacagagggacaccctgtctcagaaaaaaaaggtgtaaaattaactttgttccaaggattgaagttgaattgttggataaatgtaaatgactgcctgaacccactgtgattccacaatcattccaggacagtgggcttgcctttgtgrgcactgacactggctcctcctagattaagtgaaggcagcagaatatgaccccccagaatacgccactttgg

SEQ ID NO: 801796 - DNA, 560 bp, Homo sapiens
caccgctggccaacagagggacaccctgtctcagaaaaaaaaggtgtaaaattaactttgttccaaggattgaagttgaattgttggataaatgtaaatgactgcctgaacccactgtgattccacaatcattccaggacagtgggcttgcctttgtgggcactgacactggstcctcctagattaagtgaaggcagcagaatatgaccccccagaatacgccactttggcaggattgctttgagctgcaggcacctgtgaagcagacacaaaaaaagctgtttgtcctccccactatttgcttaaaggtgggacataactttaaagatttcccttctcccctcttatcatagaaggacaaagactgatcactcaccagaaacctgacacccttatcagtctgagggcagcatccaaggactctcagtaacaaagtttactaagtggtatttatctaccttgagtttcccatcacttgcctcccttacacccttctttttttgttttagttgaagatgctgtataagccagagatctaggctacctctttgagatttact

SEQ ID NO: 801797 - DNA, 586 bp, Homo sapiens
tcatgtgtttgcacagtagaattaaattggcacgtacttcctcagctttgcacgataatggcaaaattattttctaaaaagaaaacactcctaccacagtgtatacgagttccagttactctatattcttcctaacacattgtgttgtcagaattttaaattttgtcaacctgagggtggtamaattttacctcattttgttttttattttccttgccttgattattaatgaggttgatcatttttcatgtttattggtcattcatgttttggtgtttccatatagtttgctccccttctactgagctatttttttactgattattaggaataatctcacactcctcagatgatgatatacattacaaataatctttattactcttgtggctgggattttcattcttcttaagatatcttttgataaactgaggttcttaggtttcaatgacatcaaccacttttttatgattttacttttttttggtcttatttaagatatccttctatcaaaaagacatcacattcttttttaaaaagtgttaagccctcaatcagtctgaaactgtttttttgcctatgatgt

SEQ ID NO: 801798 - DNA, 614 bp, Homo sapiens
aagagtgctgcctggttacagtgactttaaggtacctttgactctaagatgcacttctattttgaagacattaagaatgaaaaaggtgcatgttcgtagtgagaaacatggcatggagttttaaaacatttttacttgaattaattacagatatatctgcttatatgaatctatcaacgtattgctcaaattagcattatttgcaatcttgttattctctttagagttggcaagaggattaacacttgtatatttttctatttttccttctgtatattgatatcacagttagggttctaattctgaaccttccaagaaatatgatctacaatcaccaacaccatttactgaatattttccagttcttgatggagctagttcacyacaaattcatttggactttcctcatctgggccactgatgctgcttgagaacatcattttttcctgtcatacatgggattcatatcttactctttgcttctctaaatcttttctacacgaggacccaactgattcctccacctctatcaagtttcccagaaataacacagctcaaggtgatcctcattcaccactatcctctctcatcccagatactactgtcttttaaac

SEQ ID NO: 801799 - DNA, 649 bp, Homo sapiens
cgccttcatcttgccatggctcttctaggcctctttagggttaagacatactcccttctgagaatttctggtctaaccagttgtctagcttcacgtcctgtttctatggattgtttgtaaccagcttttgctgcaactgttactgctgataaatatcttgctaatcataggttatggaaagactgtgtttcagttttaaggytctgttagaaattactgatacacacactatattgtaaattcttatctctgtatactgtacttctgcatacagatgttatgttagagaattacttcatccccatgtgaccatctcacatcataatcaaatgaccctaaatctctcactaacctacccccaccctcactaaacttaataataaatgctggtatatccagtgcattggcagcatcgtgggaccagaaggcggtgacccccctggacccagctttcactatcttgtgtgtgtctattatttcttgacctgccgatctgtctgggaacaaagaaagagccccgttgcattgcgggctgctggcccgatcctgcaataacccagcagtgggattgctggattttatggtagctcaattttcagttttctgaggaacctccaaactgttctccatagtggttgtgctgatttac

SEQ ID NO: 801800 - DNA, 581 bp, Homo sapiens
gtcacactaaggagcactctatatcctccttatttgcaaaatggttctcacagtatagcttgtgcattcaaactcagaattctacaatatttcccgacacaaaccccaagtctctcccttatattattcccactttccactttaattccccccgttccccattcttattattattggccttgcaatgctctcatcaactcacaatggcgttttcatwttatatcctgtcttgttacaatagggtccctgcttttctcacagtaaaatctccccttgtccctgtcttctcacattgaagaatccctgtctcctctcaaaagagattccactaatacttgtcagtcttgtcacttcgacactgtaattccatcgccagcacccttaaacttgtggcctacaatgttccctattcatctagtttggggctccaatatgtttatactcctctcacagtaggactcctgacccattggacatcccctcactcccaagtccttctgagacttctttattttttcataccaaactcttctcaccttaaaaatgatggtaaggatgctgcttttttgaactccgggacc

SEQ ID NO: 801801 - DNA, 591 bp, Homo sapiens
ataatcaagtggataggacgacctgttctgtggacatcactcagcctctttccccagccacccctgtcatcgcccaatgggcccatgaacaaagtggctgtggtggcaaggatggaggttatgcatgggctcagtgayatggacctccactcaccacggtcgacctggctatggccactgctgagtgcccaattttgccagcagcagagaccaacactcagcattcaaactggcaccatttcttggggtgatcagccagctacctggtggcaggttgattatactggacttcatttattaggaatgggcagaggtttttcctcactggaatagatactgactccgaatacaggtttacctatcctgcacacaatgcttctgtcaatacaatacatggactcatggaatcccttatccaccatcacggtaatccacacagcactgcctctaaccaatgcactcactttacggctaaagacgtgaggcagtgggctcatgctcatggaattcccatgttccctatcatcccgaagcagctggattgatagaacagtggaatagccttttgaaatcacaattacatgtcaacta

SEQ ID NO: 801802 - DNA, 627 bp, Homo sapiens
gattatactggacttcatttattaggaatgggcagaggtttttcctcactggaatagatactgactccgaatacaggtttacctatcctgcacacaatgcttctgtcaatacaatacatggactcatggaatcccttatccaccatcacggtaatccacacagcactgcctctaaccaatgcactcactttacggctaaagacgtgaggcagtgggctcatgctcatggaattcccatgttccctatcatcccgaagcagctggattgatagaacagtggaatagccttttgaaatcacaattacatgtcaactaggtgacaatactttgcagagctggggcatagttcyccagaaggccgtgtatgctttcaatcagcatccaatatatggtactctttcttgcataggcaggattcatgtgtctagaaatcaagtggtggaagtggaagtggcactactcactatcacccctagtgatccactagcaaaatttttgcttcctgttcccacaacattatgttctgcttgcccagaggtctttgttccagatggaggaacattgccaccaggagacacaacgattccattaaactggaagttaagattgccacctggacagtttggg

SEQ ID NO: 801803 - DNA, 627 bp, Homo sapiens
gattatactggacttcatttattaggaatgggcagaggtttttcctcactggaatagatactgactccgaatacaggtttacctatcctgcacacaatgcttctgtcaatacaatacatggactcatggaatcccttatccaccatcacggtaatccacacagcactgcctctaaccaatgcactcactttacggctaaagacgtgaggcagtgggctcatgctcatggaattcccatgttccctatcatcccgaagcagctggattgatagaacagtggaatagccttttgaaatcacaattacatgtcaactaggtgacaatactttgcagagctggggcatagttctccagaaggccrtgtatgctttcaatcagcatccaatatatggtactctttcttgcataggcaggattcatgtgtctagaaatcaagtggtggaagtggaagtggcactactcactatcacccctagtgatccactagcaaaatttttgcttcctgttcccacaacattatgttctgcttgcccagaggtctttgttccagatggaggaacattgccaccaggagacacaacgattccattaaactggaagttaagattgccacctggacagtttggg

SEQ ID NO: 801804 - DNA, 595 bp, Homo sapiens
acgcctggctaattttgtattttttagcagagacaaggtttctccatgttggccaggctggtctcgaactcccaacctcaggtgatctgcctgccttggcctcccaaagtgctgggattacaggtgtgagccaccacgcccagctctgagctgcagcttttctgtgtgtgcagtggrgggttggccacagtggtgatccctgaggtcccttccagctctggcagcctggcagctcctctgatgatccatccttcagggagccaaggactccccgtggaggtcctgcagggatgcccaagagttgggtggctgggaaacagctcaccgtgtgttaggctgtagacctgagtacctggccagggacccaatcgtccccagcagtcttgtcattgtgaccggccttcatctcacaggaacccaggctgggctacgtaaatgaactgagctgaactgccaggtgctggggttcaggcagagactggaggctagaagttgaggggggccaagtactgcagttgggctgggggacagtacttggggcagggttgagcttgggtccccacaccaagagctccacagtcatctcagggaccct

SEQ ID NO: 801805 - DNA, 614 bp, Homo sapiens
caggagagttggggatactggaaagaatgttgagtgtcagagcccctctcagtggctcacgcctgaaatcccagccctttgggaggctgaggcaggtggattgcttgaggccaagagttcaagaccagcctggccaacgcgacgaaaccctgactctactaaaaatacaaaaattagctgggcgtggtggcacacacctgtaatcccagcagctcgggaggctgaggcaggagaattgtttgaacctgagaggtggaggttgcagtgagctgagatcacaacactgcactcaaaaagtagttaattaatttagtttaattaaaaaagaatattgagtgtcaggcaatctgggtagaacccattgtgtttctacaggatagaatctgctgtgttctctagcggaacttccrgatcaccttcaccgtatgactctagacaatccctgtccactcttcagttttagatgccccattcaaagaatgaaagaattgtcctagatgatcctttagggtcttccaggctgatgacaagggggacctggcccctctgctgctggccaaagaggactttacttcccattccgtgtggttgaacaagaattgctgggctccagt

SEQ ID NO: 801806 - DNA, 594 bp, Homo sapiens
catatgaatttgggtggggagacaattcaactcataacagtgtgtgagatcagaaaattcctcccgctccccccgccaccccatttacaggtctcctatagagagaagcgttgactggggacactcgctgcttgcgttttgctggtagctgggctggaaggtccacaaaggttcacttcatgtgagtggcacctcagggctcttccacaggcccttctctccatgcagctctcttgggcttcctcacagcatggcggggtttttcacggtggctggcttccaagaggaagcacttcaagctgggtgagagcagatgcctcaaatctctgcagcttcagcctcggaagtsacacagcgtcgcttctgctgcatcctgttgatgaaagccagtcctggagtcagcccagatccaaggggaggaggaaaagactccaggtcttgctgagagtaatgactaagaatctgcagccatctccaatccaccacgcccatgcaagagacgggagtgatatttgcaaccaagatggtgaacggcagcagattggtcactgtttccagttattcaccatcccctcagtgagaggattatccatc

SEQ ID NO: 801807 - DNA, 582 bp, Homo sapiens
aggctcagagagggccggcaacttctccaaggtcacacagctcccacaggctagatctgggacaccagccccggcccctcggtctgactccagagtttggcacctttgcctgtgtccccaccctgagcatctccccctgaaggtgatggcagggcagaaagtgccatcagcactcgcctctaaggcagctttggaggttcatgcagccattcagttaacaaatatgcatccactccctctctgggttaggcctctcccctcctycttggggctccctggtgcgggctgctgtagggactgatctcagctggcaaagccctgcttcacccaggctcaaaaaagagtcctgctgccgtccagcctgaaagagtgggggccacaggctcccagaaccgaggctggggaggcaggaggcagagctgtcagctcagagcagactcctctcatcagcatggggccccagcctcccagcttaaagatcgcctcgggcgctctcttaaagatgctaacgttgcagctgacatttgggagatcctggcagccgatcaaacccaagctgaaaatcggagctgccgggtgggt

SEQ ID NO: 801808 - DNA, 499 bp, Homo sapiens
ttttaataccaacccccttctttcatgaacaaaacacaaaaacttgacttcagtgaatcagtgattggtcttttgaagccaggtagattattatactaccatgacctacaggtattagaaatccttcttcaattattacaatgacatgattcaaaattaaaaatagattaaaaatcatcttagatcaactccaatgtttagatgtttcagtattaataagacacttgtcataattgtttacatgtttgcctccccctaggactacagatttgaaaaataggagtagcgtgaatttatcttattttcactttcccatcggctcataccctattacttagcmggagtcattttgattagctattaaatgcccacatgggctgcatcctcattaccactcatataagcatttaaaagctttccatacattattttattgaattcttataaaaataccctctaaatatattccctctgtgaccttgggtaagtttcttagccc

SEQ ID NO: 801809 - DNA, 612 bp, Homo sapiens
acccaacagtaagaagcagtgcaggagcttgcaaccaggtctgggatgaactcaacttgtgctctttcagaaaaattttatagcttgattttatttttaattaacatataataattgtatgcatttgtgggttataatatgrtattttgatacatctatatacattgcagaatgataaaatcagactaattagcatgtccatcacctcaaacttctaccatttctttgtggtaagaacattaaaaatcctctcttttagctactttgaaatatacacttttattaactatagtcaccatactgtgcaatagaacagagtttattccacctgtctgactggaactttgtacttgttgacccttttccctgtccattttctgtcctcatcccccagcctctgctaaccaccattctacattctattctgtacttctacgagtttgactgttttagattctacatatacagaaacgagatcatacagtatttgtctctctgtgcctgacttattccacttaacataatgtcctctaggttcaaccatgttgtctcaaatgacagaatgtcctgttttcgaaaggctgtgtcatactccactgtgcatatactaca

SEQ ID NO: 801810 - DNA, 612 bp, Homo sapiens
acccaacagtaagaagcagtgcaggagcttgcaaccaggtctgggatgaactcaacttgtgctctttcagaaaaattttatagcttgattttatttttaattaacatataataattgtatgcatttgtgggttataatatgatattttgatacatctatatacattgcagaatgataaaatcagactaattagcatgtccatcacctcaaacwtctaccatttctttgtggtaagaacattaaaaatcctctcttttagctactttgaaatatacacttttattaactatagtcaccatactgtgcaatagaacagagtttattccacctgtctgactggaactttgtacttgttgacccttttccctgtccattttctgtcctcatcccccagcctctgctaaccaccattctacattctattctgtacttctacgagtttgactgttttagattctacatatacagaaacgagatcatacagtatttgtctctctgtgcctgacttattccacttaacataatgtcctctaggttcaaccatgttgtctcaaatgacagaatgtcctgttttcgaaaggctgtgtcatactccactgtgcatatactaca

SEQ ID NO: 801811 - DNA, 613 bp, Homo sapiens
tctatgggaaaaagtgcttttaagtaccaaacaactgacttacaaataaatgattaaactcaactgcccttaagcaatgagcttcctgtaatgttttgcacagttcagtgccaaaggctaatgtgtgtgtgtatgtatgtgtgtgtgttttaacatttctaaatatgggcgccaggtgttgcattttcagactgaccgagtgtaacttttttcttcttaaagcaacagagtcgtttttttttagtgaacatgtatctgtttaaaagaaaaggtgaaagaaatggcaggggccacaaaagaaaagcaacactgaaactttagtggagaaagatatatttgcaccatataagaaaagaggttaacttatttttaaaactttattattacagattaaggcaagcctgcaaccatagggaaagttcaaagatcaaaacctcckgcacagcttggttttactttgagtccagcgacccaaagagatctccacgatgaggtttctagtctctttcaaagcaagcccagatgaacaaaaattttaaaagcatgctgtgaagatagtacataaactgtgtccccgataaatcagtatcagggtgaccccatcagaaggagt

SEQ ID NO: 801812 - DNA, 643 bp, Homo sapiens
aaatattttatccctcatttctattattttcagtgagatagtatatccaaataacctcatcacaattatcagaaaactaaatctcctgagtttttttctttcattttataattctttgtcatttatacataacgtttaattaatctttggatttgatatatctttatcaactatgatacatttttaaatgttttgtctattagtaataatggattgactataaaataaaatcattatcatctatgagtaayaacaatattatttcttcctttccattcttattttttgttcctgtcttactacacagtcctgatcttcaggacagtgctgagtattagtgacagcacacaatcttatcttgacatcagtctcaaagggaatgttcggcacctcatcattaagcaaggtgtttgttgcagagtttaggatttcttttggttttgtatgtgtgtgtatttatgtttgtgtagtggaggggaggtaggtgtttttagataccttttataaatttaagaaagtcaatttttaaagtaattttgttaaaagtttttaattttaaatttcattcagtgcattttgatatattaagataatcttacatatttaatctatcaatgaattaaatcacatttaatgattttta

SEQ ID NO: 801813 - DNA, 529 bp, Homo sapiens
tttatttatttatttatttgacggagttttgctctttcgccgaggctggcatgcagtggcatgatctcagctcactgcaacctccaccttccagattcaagccattctcctgcctcagcctcccgagtagctgggttacaggcgcccgtcaccacgcccrgctaatttttgtatttttttttagtagagacggggtttcaccatgttggccaggctgatctcgaactcctgacctggtgatctacccgtctcagcctcccaaagtgttgggattacaggcttgagccaccacacccggccaattattgagtcttaaagaactactctgtttatcaggagtgaatgatgaatttgagtgtttcccagccctttatcagtatcacactgacaaaatatctcatagagtaagacacatctatgaataaataatcttattcattttatctagaattttaaaaaaattaaattaactcttagaatgtgacatttgccagtcctcatttccaaattcttgagaatccttcctgtt

SEQ ID NO: 801814 - DNA, 492 bp, Homo sapiens
ttaccacaaacttcgtgccttagcaacgcaaatttattattttacagttctgaaggtcagaagtatacattcaggttgttggctaggctacatttcttcttaagggctcagggagagaatttgtttccttgtgtttgtcagcttctaaagtcacctgcattccttacctcctttcttgcatcgtgcaacttcttgcttttgtcatcacatctgctactttccactcttatcycctgcttcattcttataagggcccatatgattagataagaaccacctggctaatccaggataatcaccccatttcgagatgtttgatttaatcacaacttcaaagtcatctttgccctataaggtgcatggacatatttggggcctattattcagtctaccaaagtgtccattaagaatttagctgagtcctgattagcacctgcatgtacaaaactgcccaaggataggtaccatctgagcagtgcctggcattcacac

SEQ ID NO: 801815 - DNA, 576 bp, Homo sapiens
  misc_feature 67: n = A,T,C or G
tcaacctcccaaggtgctgggattacaggcatgagccactgcacccggccatatttctcattacatntataagagaccttatcttaccttattctcagagaccaattgcatattttaatggaagatgataactgttatgctcccaggcagttatttcatttacttctcctagtaagctttattttcccctatttaacaaatgaagaaacagattcaaagaggataagtacattttctagtcaacttgtaattataagaaccagaattagtagcctgtaatctttctaatatgttcctcttttctcttttaaactgttraactgtattatttttcaaatgtagtttctcagtttgaacaccagctggtttaaagtaattactttaaagtaattaggtgaccagactagaaaatgggatgcagaatctggttctagttttagttctgacattagcccgcagaatatgatctttcagaaaacagaatctttgtaggactttaattatttaatctcttcaatggaaggctccttctagatatgaaaaactgtatattgatagaaggagtacgaatttcat

SEQ ID NO: 801816 - DNA, 563 bp, Homo sapiens
aatattatgcctcccgctttgttctttttgcttaggattgcttttcctattcgggctcttttttggttccatatgaattttagaatggtttttttttctaattctgtgaaaaatgacgttggcattttgataggcattgccttgaatctgcagagtgctttggacartatggtcattttaatgacattgagccttctaatccgtgagtttgggatgtttttccacttgtttatctacaatttctttcatcagtgttttgcagttctccttgtagagacctttcagttctttagttaaatttattcccagatattttatttattttctgtagccattgtaaatgggattggcttctggatttttttctcagctagctcgttgttgatgtataaaaatatcactaattatttttatttatttatttattcttattttttgagatggagtcttgctctgttgcccaggctggagtgcagtgatgcaatctcggctcactgaaagctctgcctctcgggttcatgccattctcctgcctcagcctcctgagtagctgggactacagg

SEQ ID NO: 801817 - DNA, 523 bp, Homo sapiens
agagctggaggtcattatccttagcaaactaacacaggaacagaaaaccaaatactgcatattcttacttataagtaggagctaaatagaatacatgagcccatggcagggagcaacacacaacagggcctactgaaaggtgaaggatgggaggaggaagagaattaggaaaaaataactaatgggtaytaggcacaatacctgggtgatgaaataatttatacaacaaaccccatgacataagtttacctatgtaacaaatctgcacatgtacccccgaacttgaaataaaagttattaaaaagtgtaatattggtgaaagaatagatacataggtcaatggaacaaagtgcaaaacagaacttgcatatatatagttcattgatttttgacaaagactcaaaggcaattcaatgctaaatgataaccttttcaacagagtgctgaaacaactagacatccatatttaaaaaggaacttcaaatcataccttgcagcattttaaaatttaaatggatcctaa

SEQ ID NO: 801818 - DNA, 534 bp, Homo sapiens
gcaggggcttccccctgcatatttattcattcagacattgttctagggactggtggcacagcagcaaacaaaacatgaaaaaagaaattcctgctttcatggagtttagattctaccaggggtcagggagggagacacaataaataacataaataaataaagaaatagtatgtgagttgatgataagtgatgtattagtccatttgtgttgctatcaagtaatacctgaggctgtgtcatttatccagaaaagaggtttatttggctcacagttctgcaggttgtacaagaagcatggtgccagcatctgcctctggtgagggtctcaggctgcttccactcctggcagaaagtagcgcctgcatgtgcagagatcacatgaygagagaggaagtgagagtgagcgagggggaggtgccaggctctttctaacaatcagctctttaggaaactgatagagtgagaactcatgcaccctacaggaacagcaccaagccatccatgagggattcgcccgcatgatccaagcacctc

SEQ ID NO: 801819 - DNA, 529 bp, Homo sapiens
tgtttttatttgctcttttttgttgtttattagatttcatggtggttgtttcattgtttcaaaaaaccaattttagaaaagatgatatgtgagtaaaaagctaaagtaaagaaggcaaaggagactcttgaggggaagtgcattccaggcagaggaatgggcaagagcaaaggctctgaggcagaaacgtgtgggaagctgrgcttgaccctctctgttcctgtgaagccatcacttgggtcccagcccttgtggtccctcctaacattttacgcctagaatctttctggttgtaggaaactgatccaggcagaaccttccagactgagggcctggaagagatttgtagggacaggctccgggagaggtctctgcagttcagctgcataaatcagggttttgtcaagcttgttgcaaatgcacattcctggattatgtcccaggcctgctaaatcagaatctctggggtctgtgcccagaagtccgcatttctaaaagcctccaggcacgtttgagcatcttcactgta

SEQ ID NO: 801820 - DNA, 529 bp, Homo sapiens
tgtttttatttgctcttttttgttgtttattagatttcatggtggttgtttcattgtttcaaaaaaccaattttagaaaagatgatatgtgagtaaaaagctaaagtaaagaaggcaaaggagactcttgaggggaagtgcattccaggcagaggaatgggcaagagcaaaggctctgaggcagaaacgtgtgggaagctgagcttgaccctctctgttcctgtgaagccatcacttgggtcccagcccttgtggtccctcctarcattttacgcctagaatctttctggttgtaggaaactgatccaggcagaaccttccagactgagggcctggaagagatttgtagggacaggctccgggagaggtctctgcagttcagctgcataaatcagggttttgtcaagcttgttgcaaatgcacattcctggattatgtcccaggcctgctaaatcagaatctctggggtctgtgcccagaagtccgcatttctaaaagcctccaggcacgtttgagcatcttcactgta

SEQ ID NO: 801821 - DNA, 609 bp, Homo sapiens
aatgtaaaaacaaaaactacagactcagatacatttagattcgaatcctgatgctgctgcccagtttgtagtaagtccctttcattctgtaggcctcagtttcccgatatatggaatagggacattaatatgaactttgaggggttgttgtgaagattgaatcagacatgcacgtaaagctctgagctctctgcttggcatatagtgggggttagaagttgtgtttcatgattttggtagagaagcttattttgtttttattaaatttttwaaattatgtaggtagttcaggaaaaacattctcactgtaaataaaaccgatactaaagataaggctaaggacatgtcaaatgttgatgttcttcctttagaggaaagactgtcgggtgtgtaactttccaaaatttttctattcacttgcataccaaatgttcatctcaaaagagttttatcttataaaatagtagcatgatgtaatactagtttgcttttcccaagcgttttgctatgttggcacacacagaaccaccatgtggccctgtggcgatgtaaatatatctctcctgttctcttccaggcagagctgttggaagcgctcctcaactatta

SEQ ID NO: 801822 - DNA, 609 bp, Homo sapiens
aatgtaaaaacaaaaactacagactcagatacatttagattcgaatcctgatgctgctgcccagtttgtagtaagtccctttcattctgtaggcctcagtttcccgatatatggaatagggacattaatatgaactttgaggggttgttgtgaagattgaatcagacatgcacgtaaagctctgagctctctgcttggcatatagtgggggttagaagttgtgtttcatgattttggtagagaagcttattttgtttttattaaattttttaaattatgtaggtagttcargaaaaacattctcactgtaaataaaaccgatactaaagataaggctaaggacatgtcaaatgttgatgttcttcctttagaggaaagactgtcgggtgtgtaactttccaaaatttttctattcacttgcataccaaatgttcatctcaaaagagttttatcttataaaatagtagcatgatgtaatactagtttgcttttcccaagcgttttgctatgttggcacacacagaaccaccatgtggccctgtggcgatgtaaatatatctctcctgttctcttccaggcagagctgttggaagcgctcctcaactatta

SEQ ID NO: 801823 - DNA, 613 bp, Homo sapiens
agttcaatggtaagaatcactgtggatttttccaagtcaaaagtgaacactgctgtctggaggaaagagagttggacttggaaaacagggctctcctgggggctgtatgaccgtgggcaagtcacttctctctgagcttagtgacctgcctgtgacatgggatygttgaagttggcctcatctccctccagggctctaatgagggttgggggctgggacagctctttggagcacgggaaacctccttataagcgggacagagggacacatggaagtgccccacatcctgaagaggcaggtcaaagactgaggaccaagttaatatagaaggcacaaggcagccgcctctgaactcacatctcccagtcaattgcccaactgcctagtcaaaaaagaaagcaaaaaacttaaatcctgtttccatgaagctttgcttcttttggctgcaacagagaacaggacgggcaaagggcagggagtggaacgccctgttctttatcttatcatgaatgtgtgcttcctccagacagcaccatgcctgatagcttaggctcccaagtcagcctccctgggtttaaatcccctttctgacacttcctgtgtgacctagaac

SEQ ID NO: 801824 - DNA, 634 bp, Homo sapiens
attcttcatcccccaagatggcaattgctcaaacttttttggttgtttgtttttgagacagagtcttgctctgtcacccaggctggagtgcagtggcacgatctcagctcactgcaacctctgactcccaagttcaagcgattctcctgcctcagcctcctgagtagctgggactacaggcatgtgccatcatgcctggctaatttttgtatttttagtagagatgaggtttcatcatgttggccgggcaggtctcaaactcctgacctcaggtcatctacctgcctgggtctcccaaagmgctgggattacaggggtgagccaccgagcccagctgttcaaacattttaaattgagttacccttccctgatcacatagccagcaggtggcagagttggaattcccaccttatctattcccacatgtcagagcccatgctttttttgctcctccccgatgtcaaaatgttgtctgttctgggggacttggcacgtttaaagcagaacttctttgttctgtggcataggttgtacactgtaaaacataggttgtaccaggttgaggaaacaaaagtctttctctaatttgtccaccagtagtatgcatctttttctccactagccaggggctatg

SEQ ID NO: 801825 - DNA, 607 bp, Homo sapiens
gtcccaagtggaggaaaagacgcagtcataagtacatttgtctttccttccctctcatctcccttcctccctttcttccttcagcagtgaccaacgattctcccatccaggccctgtggaggggacacaggcgtgagccacagacccaggctctgccctctgggagcttgggtccgaggacacagttagacaaccggatgggagggmgcccttcgggaaggggaaacaggcaccccacatgcacagggccaggcagggcctgaagggcagtgtgaattacagggaaaatgcggagggagaggaagagtgctccagggcgaggaagccgcgcccgcagcgatctggagtgcggtggggagcaggtgaggccggagaagcccagttctgggacacgcaggccagctctaggcaggggaaaggaggggcgggaggccagggaatgttccctcaggctggtgcgtcagaatggcccaggcagcctccagcgtgggcccccgctggtcccgggaggcgccgccagaggctcggggagggtggacgatgtggctgggccggcgagaatccaggggctgcaggcaaggacggggactcgcgatgaaacccgaag

SEQ ID NO: 801826 - DNA, 607 bp, Homo sapiens
gtcccaagtggaggaaaagacgcagtcataagtacatttgtctttccttccctctcatctcccttcctccctttcttccttcagcagtgaccaacgattctcccatccaggccctgtggaggggacacaggcgtgagccacagacccaggctctgccctctgggagcttgggtccgaggacacagttagacaaccggatgggagggagcccttcgggaaggggaaacaggcaccccacatgcacagggccaggcagggcctgaagggcagtgtgaattacagggaaaatgcggagggagaggaagagtgctccagggcgaggaagccgcgcccgcagcgatctggagtgcggtggggagcaggtgaggcsggagaagcccagttctgggacacgcaggccagctctaggcaggggaaaggaggggcgggaggccagggaatgttccctcaggctggtgcgtcagaatggcccaggcagcctccagcgtgggcccccgctggtcccgggaggcgccgccagaggctcggggagggtggacgatgtggctgggccggcgagaatccaggggctgcaggcaaggacggggactcgcgatgaaacccgaag

SEQ ID NO: 801827 - DNA, 613 bp, Homo sapiens
ggtcaccgttttctgattcttgagtcccagttttgcagatgaggtcaccgggctcaggtgaggccatattatgcctggcttctttggggtgcctctggttccaggcccagcatctcctgcctgggtgatagaggtgactgamgtccccgactcctttttccttgccagccttttcacatagcctgccaactggccagcagcaactgagaaagtgcctgtgggtgcttgccccctgcccatccctagggaatccaagtgacaagaacaagcccctccttttaggagtgcctgatgtggaacagaggccaggtgtaagtcacttgtcacactcctgtgtgttgaataccctggagtgtggggtcccagaggtgggtggaggtggccatctttttgtacctgtgaagcagtgagggcgtcacaggagacctcacactgaggtcggagtagggcatgggtggggtggatctggtagagggagcaaacttattctttcgattccatgactctccagatgagaacattgcagctacccctggaggcgtcttgagttgccctgcagaacccgggagctgcagctggcttcctggctttggctgggcagggagggcaggcc

SEQ ID NO: 801828 - DNA, 624 bp, Homo sapiens
cgtgcccggccctctgtcccttcttgagggcatctggagaagagatggctggcccagggcagaacccagcatccacacctctggtctcctggagatgcgtggtcgcctgttacaatagcccagccagcccttggcttccaaaccttctcccctctgctgctgctgctgctttgaagtgtgctggacaaatctccctttcctagtagcaacttgtatggaaggtgaaatgacctgtgggaaagccccactgggaagcagctgccagctctttccaagacagaatgtgcagtaaggctttactgccaggtgtgagcaggcctgccagggatgctggaaccttctsttctgggcactccagcagggcatgggtgtcccctaccccgggtgtgggagtctgtgtctgatgggtctcagactgctctggtggagacctatcttagtgggctgtgagtagtgcgagcagatgggctggaatttctcctgcatttctttgctggaaatgttttgattttcttagtgatgtaactgtggacatgtgtgcttctgctagtactctgtctccctcttgttctttgtgggcaaatgttgaagagaaatcaattctaaacaatttatgcagcatac

SEQ ID NO: 801829 - DNA, 566 bp, Homo sapiens
gacgttgagcatcttttcatgtgcttgctagccatctgtatatatcttccttggttaagtgaccattaagatcttttgcctattttatttattatttttttttagagttggggaggtcttgctgttgcctaagctggagtgcagcattgcaatcctagttcaccacagcctccaactcctaggcttaggcagtcctcttgcctcagcctcctgagtagctgggactacaggcatgtgtcaccaagcccagctaatttttttgttttttttttgtaatgtagagatgaggtcttgttatgttgcacaggctggttttgaactcctgggctcaagtgttgctcccaccttggcctcctaaagtgttgggattacaggtataagccaytgcacttggcccatgcccatttaaaaaattgggttgttttcttattgaaatttgagcatgctttatatattctggttacaagcaagccctttatcagatacatgatttgcaaatgttttctctctgtgtgtggtttgtctatgcattatcttaacatgtcttttgaaaaacaaaagttctc

SEQ ID NO: 801830 - DNA, 666 bp, Homo sapiens
caaggggccagcgggctgggaagatgggttgctggtgaggaacagagaagagcacgaagagatgcactggacaaccagagggtctgacacccttggagaggacaagggcttgcagggcgcactcatgatgtggcagaaggtgctaggtccgacatgcttacactcagcagcccacctggattgctgaggcattcatatcaaacttgtggaaaacggtgaaggcctcctcatacagcgcgctgctgacagcgatgctcgcgatgtccagtgcgtcatagttgtccaggcrgctgatgtactccatgacccgtgtgcggtctgccttgatggcagtcaggatcaacagattctgtagattcctgaggagagagggtggtcagcacggcatcccaggaacgaaggctgcacaaaccattttttggcaggtcaggcatccccagacccccagtttttttaaaaaagtaattaatatacacacacataactgctaagtaaatacaacagagtatttgtgaagtatttgggatctaaaaagaaacagtatagcaaagtcttgggaaagcacaggtaagagaatcagaatgtgccaatcaaaccactgggagggctgctgtggctttttagagcccagcctctggatcctgctgtagaggtacctattttcct

SEQ ID NO: 801831 - DNA, 604 bp, Homo sapiens
attattactgtgtgaaaaatcatatttatgtgtttaaatggttaatgtcagtccctccaaaggggctgtgatttttctcaagggcaaatcttttctcagtcactatgttatcccaaatgccaagtacagtgcctggcatgtaatagatacttcataaagtttttgttgaataaataaatggacttacgaagaccagctttccaaatcttggaaaaatccctacttatctctttctattacggtgcaaaatgtacattccctttacaacttctttgccagcctggaagttggaaaaactctgtttaatwaaaaaaaaaaaaaaaaaaaaaaagaaaatcccattcctgtacctgtcactgctgggttaaacaagttcacttaagatttttttctctgtgtgggctttcctcaggccctatagatgtgccacgtatgttttatgagctaacatttattttcgacactttggcctattggacatgatctcgtaagcctgaactctcagctgacatgctgttgaacataatggggagatttaaaaaggtatcaccaaggagtagagaggattgcggagcgccaggggcgaggaggaggtggttgagat

SEQ ID NO: 801832 - DNA, 560 bp, Homo sapiens
ttaactatttttttttcaacttacatcgaggtgacaggcatcttttatacagaaggtaatatttagatgtcataatttctagtggggcagaagaactaattaaatgcatgtcaataatgataatgatgatggcataagcaaaggatartttttggttgctgattattcgggagatactatgctatgtgctttatatagattgtctcagtgacagctcacaaaatttggagggagctacacttctatactcactttatagataagaaccttgaggttttagagatgttcactgactcagaatcatacgggaagtgtgtgactcaagcccagctctcatagttacctctagatttcagtgcattcagatttcaaagacaggagtggtcaatgagggctggagtagtccagaaagaaaagtattgatgaacttcatcatatatttcagaaattgatttttgaatcaaaaatctctgggccacactgtttggatccttcaactgggcaagagagggcacccgcagtggttgtgcatggaaggtcacagttcttgctatgccagg

SEQ ID NO: 801833 - DNA, 560 bp, Homo sapiens
ttaactatttttttttcaacttacatcgaggtgacaggcatcttttatacagaaggtaatatttagatgtcataatttctagtggggcagaagaactaattaaatgcatgtcaataatgataatgatgatggcataagcaaaggatagtttttggttgctgattattcgkgagatactatgctatgtgctttatatagattgtctcagtgacagctcacaaaatttggagggagctacacttctatactcactttatagataagaaccttgaggttttagagatgttcactgactcagaatcatacgggaagtgtgtgactcaagcccagctctcatagttacctctagatttcagtgcattcagatttcaaagacaggagtggtcaatgagggctggagtagtccagaaagaaaagtattgatgaacttcatcatatatttcagaaattgatttttgaatcaaaaatctctgggccacactgtttggatccttcaactgggcaagagagggcacccgcagtggttgtgcatggaaggtcacagttcttgctatgccagg

SEQ ID NO: 801834 - DNA, 570 bp, Homo sapiens
ggctgaaccaactttgggaggaacttagtttatagcttacctttgaaataaagacgataacagccctttcccaaaacaaatccccttcctgtctgggcactagactgcctttgcaggactaacaaattagccacaaggttagaaactatggtttaggagtcatgcggctggaggctgcaagattctaaacttcccaatttgctcctcaggataacatcactattgtaaaacctaagatcagtgcttgaggtattaygcagaccctgcactcagtggatcagctggtaccacccagatggataaactggctcatctggtcttgtggcctccacccagaaactgacttagtgcaagagtacagtttcaactccatatgatttcatttccaaacttatcaatcagcactccccatttttcaacctcctacccaccaaattatccttaaaaactccaatccctgagttttcagggagactggtttgaataacaataaaactccgggctcccatacagccagctctgcgtgaattaaactatttctctattgccactctcctgtcttgataaatc

SEQ ID NO: 801835 - DNA, 621 bp, Homo sapiens
tgtgtgtgtgtgtgtgtgtgtgtctgcatgtgcatgtatgtgtgtgtgtgtgtgtgtgtgtttctttgtcaggggagagatggcctggagagaaaaagagtataaatgtcacaaacaggtcatattcccatggcataaagtgtgaacgtcctcttcaagttgttgatttgggttttcggatggggtgggatagcagagtgtagtgggaaaggggtgggaccaacagtgaaagggtcagtacataaagagggagaagatgaccaacaaaaatataaaagcagcaaatatcatataatgtgatcgtaattatgtaaaattatgtaacatgtgagtgcgtaaaaacaccgagttgtccgtgtagctrtgtagctgccgaattgttaagagtgtccatgctatatctttaagtgagcaaagcaagttgctgcgtaatacatagaggatgcatctccttcggaagacacagacaagtcaaaatcctgagatacacaaactcccccctttccaaatgcccagcttccttctttcagatggtaagcagagacaataaaaagtgtcaaatgatgagaaaatttatattgaggtgtgctatgctccaggttaaatgaacactaaacattc

SEQ ID NO: 801836 - DNA, 655 bp, Homo sapiens
ggcggtttgattttctttgaacagaagtcagtgttgtgttttctgcatggcatgcatatgtgctacctctggggtaagatgatgcctaccaaagtggcagaccacgaggaatggatacaagtggagagacactggagctggctcgaactgggtgctttatccttgtgtctgtcatgtactgctgagctgtgggaaagctgagattaattacaggaaatggaggtacatcaaaggcaaggaacaggcagctcagagctcctggctgaggagaccaagttgagacacaaatggggatcatgtagaagccaaccatggcagtggtcaaaatggaatgaactgaagccagttggaagaaggtgagcaagttggagtctaacgtgtcaaagagtggccacctgtcaaggaattcaggggctgcattcccaccctggagggaaaaagaagktcaggaaagcaatgcaatgaataatattaaaaacatagatattactgcttttgtaacttaatcaaatgctagcagggagagaaaagaatgagaaagagaaaagagatatgcatcatgaaagatagaaaacggtagaaagagaataagagaggaaggctggaagagagggaatgaaggaagcaagaagacaaaacattaacttaaaaatga

SEQ ID NO: 801837 - DNA, 618 bp, Homo sapiens
ctttggatccagcaagtcagggttcaaatcatgcctctgcctcttcctggccctctgaccgtgagcaagtcatcttgtctctctgagtctcactttcttcattgtcatcgatgaagttgttataaatactctgcctcacagttttcaataaagattaaatcaaataatggatgcaaagaactgagtgcatgcctgacatgtgggtcgctgtcaatcaaacatcagtttccactgatctttccatggttggttcmttgtcatcaaggtttcagcttcagggccaccatcctacccaaagtagcccattctttctattaaaaaaagtttttttggagacagggtctcaatacgttgcctaggctcatctcaagctcctggcctcaagcaatactcacacctgggcttccgaaagcattgggggattacaggcgtgcgccactatgcccagccatagcttctttctagttatcctctcccttgttacaatgtttttattttttgtttgttttctttataatacttagccctatcttgaagtaagcttatttcaatccttgtttatctctgaatccctcactcaaatgtaagtcatctgagagcttcgtccttttctgtctc

SEQ ID NO: 801838 - DNA, 661 bp, Homo sapiens
ccatgtgccaggcaatgttctaaaagcttcacaggcattaaatgtacttcacctttgtaatcattctgtgagactcatccttttactattctttacaagaaaaggaaactgaggctcagagagagtaagtaacatgcccaaggccactcagcgggtaaccaggagagatgagacttatgcccagggaggacttgctgttgacttctctcctctacggcctttcacaatatctctttgtaattattaataattagcaataatataaaccattagtaataatataaacaagaactttctatgcaacattcatttaatcctcaaaatcaccctataaattaagcattatgattattatcatcctcattttcgagatgacaaaatcgcattccaaaagaggttgagyaaattggccaaagcaatatagcttgaaagtgatgccaaatccaggtcactgcctgcttttgtaaataaagttttattggcacagagccacacccatttgcttacaaattatctatggctacttcctctcaacagcagcagagttgagtggttgttgcatggtctgcaaagcctaaaatatttactatttggccctttacagaaaaagtttgctaacctcctaacaatcacgtgttatgcccactccctggctgtgtct

SEQ ID NO: 801839 - DNA, 605 bp, Homo sapiens
gttccataattcgggaaatggggtagtgcttgttttatgggccccagtacttcagttctctagctatgccctttgccggctaacttacttgtatcttcctactctgactgtaggcttgactgtgccatgttgtctactgggatgttagcaagtgtgatgcaaacaaaaacttgaaaaatgcttacctgaatggacttgttcargcttttaccctcagccattgatgtaagaagaaaatgcctaggttagcctgctccacaattacacaggtgtgatatgggaccaagttgtcctagccatcatagttgaggctgtcctagatcagccaaccgatagtcaatcccctaaacatgtcagtgagtccagtccagacaagcagaggctgtaatccctcatggaagctgatcatacgtttattgaagaggaccaactgagatcagcccagctctagcccaggtcatctgtactccacagactggtgagctaaaaaaatgttaaagtttatggcactgagatttggaggttttggttatggagcactgtcctgtcaatagataactgacacggatgagaatatttacttcatagaagttgctttgaaaaat

SEQ ID NO: 801840 - DNA, 615 bp, Homo sapiens
agaaaactaagcagtatgattagcatatttttttaaagtcagaaacagcaggaagtcaaataataagcaaaaggtgacttgacgagtgtggaatcagtataatgtttgaatgttgaattgcatgaggctaatccaygctatgctcgtcgccataatacagctatgaatgtcaatggcactataatacccaaccattggctgaaactccttctgacctcacatgtgcttggatgatcaatatgtatatttgttctataagtatttgtgtctcaccaaattttcttctgattgtctcatctttctttagttaatgaaaattaatcagattttaattaagtataacccatctgagaagattgctaacattgatacaatatgctccactttatctctcaaggtataaacaagcctggaagttcaaaatctgccttggttctgtgtcttgcctgctgtcaaacatcatttttaatttcttaaagcaaaacgaattttttaacaattaacataaagcaataaaagtagccaataatgtatatagatatgttaaatgcacatatttaaaatatcaaagtgtctccaatattttttcttctatataaatacaggtagggtcag

SEQ ID NO: 801841 - DNA, 615 bp, Homo sapiens
agaaaactaagcagtatgattagcatatttttttaaagtcagaaacagcaggaagtcaaataataagcaaaaggtgacttgacgagtgtggaatcagtataatgtttgaatgttgaattgcatgaggctaatccacgctatgctcgtcgccataatacagytatgaatgtcaatggcactataatacccaaccattggctgaaactccttctgacctcacatgtgcttggatgatcaatatgtatatttgttctataagtatttgtgtctcaccaaattttcttctgattgtctcatctttctttagttaatgaaaattaatcagattttaattaagtataacccatctgagaagattgctaacattgatacaatatgctccactttatctctcaaggtataaacaagcctggaagttcaaaatctgccttggttctgtgtcttgcctgctgtcaaacatcatttttaatttcttaaagcaaaacgaattttttaacaattaacataaagcaataaaagtagccaataatgtatatagatatgttaaatgcacatatttaaaatatcaaagtgtctccaatattttttcttctatataaatacaggtagggtcag

SEQ ID NO: 801842 - DNA, 580 bp, Homo sapiens
caaatacctatgttaggaatgtttcttttaaatcactcgtgtagtgtgagtaaaatgagttgagatattgctcaaattcaattacataaggtattctaatgtataaattgtactttaaactcatatatgaaattagatttgawattaggtgttacaatgtctttgtaatacatcaactgaaacatcatattgaagttttttttttttttttttgagacggagtctcgctctgtcgcccaggctggagtgcagtggcgggatctcggctcactgcaagctccgcctcccgggttcacgccattctcctgcctcagcctcccaagtagctgggactacaggcgcctgccactacgcccggctaattttttgtatttttagtagagacggggtttcaccgttttagccgggatggtctcgatctcctgacctcgtgatccgcccgcctcggcctcccaaagtgctgggattacaggcgtgagccactgaagttttttagaagaaattttttatgttaaaacatcgtgaaggagtcagaaacctcaaatgtcttcatttaattcagtgttatttttagttgaaa

SEQ ID NO: 801843 - DNA, 613 bp, Homo sapiens
tacaacattcttttccatgggtccatttagatatatttctaccaatactatataattttaattactgtagcaatattataagttttagagattggcaaatataagtcctctaaccttgttctcatcttcaactttatttttaattttctttgtcagtttgcaatacacacacacacacacacaccataaatgaaaccctacttggatgatgattaaaattgcattgcatctaatatatcaatttaaggatatttcctaatataaaaatgatcagtcgccctaaacttcaaacatgttatagctcttttcatttgcctttaaaaattttcttttaatgatatcttgtgaccctatctagtgaacttgcatatatttatatttattcctaaattttgaaaattataatttttataactatgggactttcayagtagattttgtaatcgttcattgctggtatatagaagcacactaattattgtgtattgatcttacattcatataccttgcttaatttatttattaattctcatggagttttcatagatttcattgacatttcttacaaacataattctatcactgagaaggacactttataccttcttcatgc

SEQ ID NO: 801844 - DNA, 630 bp, Homo sapiens
gaggactattttataaagtgtatttacatttacttaattttccacttttgtttttccattcacttcagtgattgttactgaggcttgctcagagcttctcactagaccgatacttttggcttgggaaaggccatagcttttcttggcttctttaggaataagatcctcctatgtgtttgcccatgcctctgactagcctaggcatgaattgtccctatggctctcaactgaagtctgccattcaggcatgaaaataagataataatgtggctcaggagaatgtgttggactcaagcgagagcctctgagcagataaatgaaggatcaacgacagttgcttttcctttattctatcaataaacttttggcagggagattttattcttttgtcctagagataagctgaccaaaaaaagttatatggcccaaagttcaaccatctaacatttaagttttgttcattcyggcagttattaataatgctgctctggcctgatctaaatatcttacccagtgattttcagataacctttaaagagtggatctgtgtatcctggaaaatagtagcaaagagaaaatatctttgcttctgtttaaatttcaatgaaaagtaattataataacaaaata

SEQ ID NO: 801845 - DNA, 603 bp, Homo sapiens
tagttctattttgaatgtattgctcctttccagactattttttccactaactcaaaataacagaatgaatgaactatttaaagtgactttgcgtatatacactataattccattttataagggaagtatctagaataaagtttatatacacaaaatattaataatatgattgttaatagattatgatgtatgactttaatattcacatttatttacttatttatttatttatttatttatttatttatttatttattttgagayggagtctcactctgtcacccaggctggagtgcagcggcgccatctcggctcactgcaatctctgcctcccaggttcaagcgattctcctgcctcagcctcccgggtagctgggactacaggcacgtgcccccatgcctggctaattttttgtatttttagtagagatggggttttactatattagccaggatggtctcaatctcctgacctcatgatccgcccgccttggcctcccaaagtgctgggattataggcatgagccaccgtgcctggcccacatttatgtttatgattttcttcaatgagcacatatcatttatgtcatttaaaaaaacaaa

SEQ ID NO: 801846 - DNA, 618 bp, Homo sapiens
ccaggagcagatgccagccccatgcttcctatacggcctgcagaaccctgggccaaataaatctctttttttaaataagtcacccaacctcaggtattccttcatagcaacgtaaaacgtcctaatacagcattcaaactctggacatgctgatataatctgagactcttaaggacctcattaaaagattcttaccaayagcagcaaaaaatttgtcagattactaaatattttttggcttacaaaaaattatgctcccttacagaggactttaaaaattttgttttttggccgggtgcagtggctcacgcctgtaatcccagcactttgggagtccgaggcaggtggacaacctgaggtcaggagctcgagaccagcctgaccaacatggagaaaccctgtctctactaaaaatacaaaattagccgggcgtggtggcacatgcctgtagtcccagctactccggaggctgaggcaggagaattgcttgaacccgggaggtggaagttgcggggaggtggaagttgcggggaggcggaagttgcggtgagctgagatcgcaccattgcactccagcctgggcaacgagagcgaaactccgtcttaaaaaaaaaagac

SEQ ID NO: 801847 - DNA, 618 bp, Homo sapiens
ccaggagcagatgccagccccatgcttcctatacggcctgcagaaccctgggccaaataaatctctttttttaaataagtcacccaacctcaggtattccttcatagcaacgtaaaacgtcctaatacagcattcaaactctggacatgctgatataatctgagactcttaaggacctcattaaaagattcttaccaacagcagcaaaaaatttgtcagattactaaatattttttggcttacaaaaaattatgctcccttacagaggactttaaaaattttgttttttggccgggtgcagtggctcacgcctgtaatcccagcactttgggagtccgaggcaggtggacaacctgaggtcaggagctcgagaccagcctgaccaacatggagaaaccctgtctctactaaaaatacaaaattagccgggcrtggtggcacatgcctgtagtcccagctactccggaggctgaggcaggagaattgcttgaacccgggaggtggaagttgcggggaggtggaagttgcggggaggcggaagttgcggtgagctgagatcgcaccattgcactccagcctgggcaacgagagcgaaactccgtcttaaaaaaaaaagac

SEQ ID NO: 801848 - DNA, 596 bp, Homo sapiens
aatttattcaaataacgggatggaagtaaaagtatgaggcctgggatttgatgatgtacagtattaaacaggacttagagaagaacccagtgggaagagctatggggaacagactaaattcctcatagaaacctctctcatgttccctgacattctgtctgtccctatcatatttcagattacaagcctccttgaaggcatttactctagcttgtttgacaccaaaatctctgcattcctagaaactcaacttagtgtttagtacatatagctactcagtatttatttactgagtgaaggaaacatggttgagatgggagaggcaggtaactaaaaaatgccagatgcttggaagtaaaagagagatggggacaggctaggcaacaagtgcctggagtggaggtgggatgggaagaccgtaggrtggaggtggagccagaagtgccatctgtgggcaaggagaattttttcttactcatcaagatgctgctgggatgattccttcttcaataattggtcagaaggaatcactcatttgaaacaaaattctcaaggaaggggattataaaattagatcagatttgctagaagaaaat

SEQ ID NO: 801849 - DNA, 569 bp, Homo sapiens
aaatcctttacatatgctgaagtgagggtatttcattcaaagcaaatttggtaggtctttatgtttaaggacatcaaaaactaactgttgcttactatgctcattacctggatgatgggatcatcattcatattccaaacctcagcatcacgcaatatacccatataacaaacctgcacatgtwtccctaaatctaaaacaaaagttggagttcaaataaaaaattaaaatgttactccattaaaaaaggaaaaagaatgtgtagctttatattttgtttccctttttttaaaaaaaattagtagaccaagagtccattaatttattcattctggtttccgattaaaacaactcccatgtgctttgtaaactctccagtgtaattgcccatgtgcattagacttcactggtcttcaacatcagtttttcccagtaatacgaagtaatcttttctagtatctgagtcatatttaatggctttctcttctgcaagaaaacaaaatctgtgtagttagggtaagctgtgcattaaagacattattcagacaccttgatagataataaaaaga

SEQ ID NO: 801850 - DNA, 498 bp, Homo sapiens
caacaactaaagtgaggttggaaacagatctcttcacagttaagccctgatgaaacggcaaccctagaaaacacctagcttgcaatatggcaagaccctggagcagagaactgaggtaaactgcacctggacttctgaactacagaaactgaagttgtaagccactgagattgtggctttttttttaatacaacatagaaaacaaacatactcctcttgacagaaatgtttttaatttagagtacagaaagataaaacacaataataagtaatggtatttttttatgtaccaaaaatggtattrttttataaacatttgctccctagtgggagtctttgcagtataagacacaagatacactgggatgggagtcacctctctgaaatttcctgggcaaaggaattatccacttgagatataagtcaatggagtagccaggtgtttcctatttactatacccactaactgtattggctgaaagggttggcactaatttt

SEQ ID NO: 801851 - DNA, 526 bp, Homo sapiens
cacacattagactcaagaatatacaccttgagtttattttctgtttcactgacctagatttcttcagggttggcttcactacacagcattttactgatgatcatatcatttttgttccataaataaaaaagtctctatctgtttttgtgccatggaaacaatgttgtcgtttgttctttccagagaatgaatggtagctattttctaaaatcttgcttttcaccactgttaccaaaaagatgtcattaatttttcccctgtctttgagtttttatattgctgaatatgttcatcagtaatgctaaattttgtttctcytgctctctcaagcttccttgaaaataggctctctgcaacatagttctataattcggtctttggtgatactccatgacagcaagagccctcagtgctaattctgggtgaaaagactaaacccacttgacatatttttagaagtacaagttcaggctgattctgtaattagtgaggaaggttcaaggtaggagcagagtcacagtgatcc

SEQ ID NO: 801852 - DNA, 510 bp, Homo sapiens
gaatttagcaagacttgccggatgcaagatcactatgcacaaatcaattgtatttgtttgtattaacaatgcacaacataggactgaaatagaaaaataccacttaaattgacataagtatttaaatactgtgggatatgccaggcatggtggctcacacctgtaatcccagcactttgtgacctgaaatgggcagattacctgaggtcaggagatcgagaccagcctgaccaacatagcgaaaccctgtctctactaaaaatayaaaaattaggcaggagtggtagcacatgcctgtaatcccagctacttgggagactgaggcagaagaatcacttgaaccagggaggcggagattgcagtgagctgagatcgcaccacttcactccagcttgggtgacagagtaagactccatctcaaaaaaaaaaacaatactgtggaataaatctgatataatatgtaaagtactgggacactgaaaactgcaaaacattgctgagaaaaaaatt

SEQ ID NO: 801853 - DNA, 625 bp, Homo sapiens
atagcaagaaggtcctcacaagatgtcagcaccatgctcttggacttccctacttctagaactgtgaccaaataaaaccctattctttataaattacctagcttttgttatgctgttacaacagcagaaaatggattaagacacccactcacatatattttcttstttgtctttttaatactgtgaaacagaattttttagttaatttagttattcttatattagacttttccatttatgaaagaatgagttcttacaatggacctctttgataccattgacttgaatgtgtaataggaagaactctaaggcttctgaaataatccaactgtttatctgcaaaaccacctgcagccagaaagtgagataacaaaatcactgaagaaatcaaaacatgagagttgaatcacaaaacctcactttatcttgatgattttctatggaaggtatatacctcagcacatcgataaaaggacaattttgtgtactaaaacaaaggaggtcattataaggatataaaaaccaatggtgttaaaagcagcactaatgctcagcagactaaaaccaagtaatccagtgtaataaaatggttaggttggagtcttaatagattgtaattgttagg

SEQ ID NO: 801854 - DNA, 580 bp, Homo sapiens
attagatcactcgccctgcaaggagctcagtttcctcagatgtaaatatggaatactgggctaaattataggttgctttatgttctaaagtattataatttaaacctgtagtctcatccttccagatacggcaaaataaggcagcagaaagaaaaatctcatgagattttttcctcagtgttctgcctaattcattcatgcatgattcacaatcacagtctacaacaaattaaaaatctattcactctcaatttacacatcttatccaggatacggcataacttaatatttatttccaagcctatatgtaaccactgtacctcaagtatagatgggtttctaacatacatattaacagcttatgtttatttccaagcctatatgtaaccactgtacctcaagtatagatgggtttytaacatacatattaacagcttatgtgccagttttgataaaggaagccattaaagtcaaactgttaccatataagccaaagccctctaccttgcatcacatataaaaagatattcagattgacggaatatgtataaatatgaaaaaagaagaaaatctaacatgt

SEQ ID NO: 801855 - DNA, 600 bp, Homo sapiens
tgggcataatgttaacaggaaagagtcaataattgcagcactttggaccaaataaagagtggaattaggttatgcagtaaaagatgccagggcagagaatcaaagggtgtattcctagaaaacttaagattttcacatgtagaaggaaaaatgtttgraatttcattaaacttggtatgcatttggggccaagtaaaaaatattcaaaaaggaaccagattaatgatttattttttttaaaggcagcaaatacttttaaaaaagaaaaggaaaaaaatgagtctgaaaatatatacaatttagaatctgtttaataatgatagttatgacaaaatgacaatgagtcgattatatccataatacatactgaggatttactgtttgctagacaccactgaactgattcaaatgtcaaaatgactctaaaaggtaagtactattactattgctacttcaagacttgaagaggttaactaaattacccaagtaacatagttaataagtggcagaaacgagattccaaatcccatcagtctgactgcaaactaaaaaaaacaaaaaacaaacaaacaaaaaccctctaactgctctataatattg

SEQ ID NO: 801856 - DNA, 607 bp, Homo sapiens
tatgcaatcacaaattatattagtttgtcctattttgataacccttataattgaaattctacataggaaactttattactattttaaaacacacccataaaacattactgaggtggcataagtgacagcctcacagaactggtgatgaggacagaacagagctttgcatgaactgcttctaccagggaaattaaaaagcattacaggagggaggggtgaattcagtgcattttaatccaratcggagattaagccataactcttcacacttataaatttgttctttattacttttcataattaaggagaattagctaaacatgataaattggttctgatgtgaaaactagtgtaaccaactatacagcttactactgactggtagattcatacagtgaaaatctaatatgatttttaaatggaatggtaattacattctatgcataaaatgtagtgaatcttttgatatttaactttgaatgaacagagaaatgaaagcagctatatagccatctgaaatcattactttttgaacttgaaagagatattgacaacatcataacaacaactcaaacataatttgcagttggcacaaatctctacttac

SEQ ID NO: 801857 - DNA, 621 bp, Homo sapiens
aattataactagaaattttattttggtgaataagctgaggacttcctagagaagctgtatgatgtgaaatagttgcaaataatgacaaagtaactcgtagataagttactttaaggctttatttgttaagttactgcatagagttgcaaaagcatcgacaacatatttcctcaaaatgtagagtttacaagttttctgagctccctgaagtttgcaatctattccagtctcagtgtcctctaattttacatcaatcttctaatgatctagattgcccattgcatgcagctatcttttcatgtttgatttggttaaaggaaaatcagctttacattgtgaaaatgcatattgttagcgaattgtgaaattgtgaggaattgggctgtaattactgaatattggctctccatgaacatgttgctaaaaygtgggaagatgtgccagagaaattgtctctctcctcagtagtccatcgttacagcaacaattgtggaaatcagatgagatgtggaaccatttttgattgccttaaatggcgcatttgtatatgccagcaagaatctatgcttctatgtaaattgaaaaagggaaatgaaacagtctgtggatgtggactctctc

SEQ ID NO: 801858 - DNA, 633 bp, Homo sapiens
ttgttatgtcaaaaaaggactgcaataagtcttaacatcattgataggttcttgaaaactggtaataggtatatatatttatggtcacatgtgatgttttgatacacgaatacaggagggataaattggggatggttaattggtgcaaaaatacagtaagcgaaacccattttaccgtagattgacataaaaaagagttaagcttctayggcttttggtaacaaaaacatcaacaaacttgtaaataaagatcaaaacacttctaatattaaatgctgaaataaatttgagctattcatacatttaatattaataaaaactagtaaaatcattatttacctacttatttcagtttagggttgcagttgaccacagcctatcctgtcagctcaggatgcaatgtgggaaccagccctggacaggacgccatcgcattgccggtgcactcacacatacccacagttactcagactgggaccacacagacatgtcaatcgacctcacatgcacagccttgggaagtgagaggaaactggagcatccagagaatatccatgcagacatggggagaatacataagctctacacagacagtgaaccccaactggaatctatttgttttttctcatcaac

SEQ ID NO: 801859 - DNA, 554 bp, Homo sapiens
aattattatgacaaacataattaactatgaaaacccaaaaacagttcatgctttgataatgctaaagttgataagtagattaagatgtgatagaacaatctgtaaatcttggtgcttcctaacttttgagaaaacatttttaggcaaaatatgatgatttaaggaagaaaagttgctgatggatgaggcatgtcccttaaagacaaacactatgaacactgtgtacagcctttataatgsaaaggtgccaggttttttttttaagtccttggaatctcaggtggcaactttgaaattcatgtgtaattcatgagttttttaaaagaaatgtaataagtaacacaagtgattctagagcttgtctttaggctgagggagatattggcattataagttgaagtgttagaaaggaacaataagaattaagaataagcagtaatttctgccaagatctgtggcacccagtctcacacataaggctttttggaatctcttggtttccaaggttcaggctctcatactttagtttgtacataaaggacttaagttattct

SEQ ID NO: 801860 - DNA, 598 bp, Homo sapiens
tcctttttcctgatttacacccttcagtcccagggtaactactaccctgaatttatgtttaggattccctgcctttaaaaaaacattgttttattgcatatatatgattgccctaaatgacatattatttagttttttaagggtataatttatttacccattcttctattaatttacccattctcctattaatgaaaatctggcttgtttccatatattcgctattatgaatggcattacattagcatttatttttctactacttctggtacatatgggcaagagtttctccagggcctatggtagagaaattactttgccctaacatatgaraatgctcaactttatgagataatccaaattgttttccaaagtggttgttctaatttaaactctcacctcctgtattagttcgaaatgatcttgttgatccacagtctctccatatttggtgatatggtttggctatgtccccactcaaatctcagcttggattctatctcccagaatacccacatgttgtgggagggacccagagtgaggtaactgaatgatggaggccagtctttcctgtgctattctcatgatagtgaataag

SEQ ID NO: 801861 - DNA, 609 bp, Homo sapiens
caaaaacaagacagaagaattcccagaaacttctttgtgatgtgtgcattcaactctttttttctatagaacagtttagaaacactctttttgtggcatctgtaactggacttttggagtgctttgaggcctcaagtgaaaaaggaaatatcttcacataaaagctagacagaagcattctcagaaacttctttgtgatgtttgcattcaactctcagagttgaatattccttttcatagagcagttttgaaacacactttttgtagaatctgcaagtggacatttggagcgcttggargactatggtgaaaaaggaaatatcttcacataaaaactacacagaagcattctcagaaacttcttctgatgtgtgcactcaagtcgcagaggtgaacctttcttttgatagaacagttttgaaactctctttttatggaatctgcaagtggacatttggagtgctttttggccttcgttggaaactggaatatcttcacataaacactagacagaagcattctcagaaacatctttgtgatgtgtgcattaaacttacagatttgaacattccttttcatagagcagttttgaaacactctttttctagt

SEQ ID NO: 801862 - DNA, 617 bp, Homo sapiens
agcaaaagaaactaccatcagagtgaacaggcaacctacaaattgggagaaaattttcacaacctactcatctgacaatgggctaatatccagaatctacaatgaactcaaacaaatttacaagaaaaaaagaaacaaccccatcagaaagtgggcaaagacctgaacagacacttctcaaaagaagatatttatgcagccaaaaatcaaatgaaaaagtgctcaccatcactggcgatcagagaaatgcaaatcaaaatcacaatgagataccatttcacaccatttagaatggcaatcattaaaaagtcaggaaacaacaggtgctggagaggatgtggagaaataggaacacttttacactattggtgggactgtaaactaattcaaccattgtggcagtctgtgtggygattcgtcagggatctagaactagaaataccaattgacccagccatcccaatactgggtatataaccaaaggactataaatcatgctgctataaagacacatgtacacgtatgtttattgtggcattattcacagtagcaaggacttggtacctacccaaaggtccaacaacgacagactggattaagaaaatgtggtagatata

SEQ ID NO: 801863 - DNA, 597 bp, Homo sapiens
tggttcctggcatctccaagtttccgggatgtcaccacattccccggtgccagacgggaaagccgcttgcagtgaacccggtccagccacagcctcacagagagatggtgctcacgccagcacctggagctgcccacaccatagcagcagatggtgtgtctgaccgcacagtgggcggaccccacgtttgctgacacacacccctcaccactccatgcctgactccagactccctttgaagcacrggatccaggctggtagcatgagctgagcgcagcctgccagggcgagtgggtggaacaagcccagcaggtccaagcaaaactcaggcaagggcaccaccagtcacatgtttccggccagaaaagtgacaccccaaagaccccatgacagtatgacttatatcctgttatattgtctcatcacaattcacatagggttgaatctgctattttgactgtttgtgatgttttggctagcatctgaacagatgggcagtttttcttcagtatgactatttgccaacaattggaagggtgtaaaactcattctcagagcaacccaaacataactacaaggagtctaacagataaaata

SEQ ID NO: 801864 - DNA, 596 bp, Homo sapiens
aaaactctgtaagataatacctaccaatcccaatactcagatgagcaaactgagactcgggcaacgtatgttgctcgaagtcctcagccaatcagtggcaaagccaaggctcacctccaaagcccaggtccaactggtttcttcctgaaatttcatacttcaaaaatccctctccaggccgggcgtggtggctcatgcctgtaatccctgcactttgggatgccgaagtgggtgaatcatttgaggtcaggagttcaagaccagcctggccaacatggtgaaaccccgtctctactaaaawtacaaaaattagccgggtgtggtggcacacgcctgtaattccagctacctgggaggctgaagcaggagaatcacttgagcccggaaggcagaggttgcagtgagccaagattgcaccactgcactccagcctgggtgacagagtgagactccatctcagataaataaataaatacataaatatccctctccagtcttacatgattatttccccatgttttatgtggtttcttttattttacaaataactcttatatttcactataatttatttcagtatgttctgtaaggtaggg

SEQ ID NO: 801865 - DNA, 565 bp, Homo sapiens
tgggttttgtttttgcgtacagattgaatcatgagttatttctggctgcaagaatccaggttataattttcttcatgtttttagttggcaccctaatggaatagattccttcttctgttctgacacacacgttctcttttaattgtcaaattgttaacattacttatctctcatagttttacttcatgcaagaacaccagaatcatggtcttctgaagactagagatgatttgacaaagcctgtgcgtctcctgtacttggaatcccacttggcctgatctgtttttcactgcaaatacccagctactaaaacygtacaggcaccctccctctgggcccggggactatcatggaagaggtgggtgcatgagattgtaagggctggttttgagggacagaattagttcagaccctccaaatcaaggatgggtacacagatgtctaaacagctggtgaaataagggactttacctcctggatttttatggtgtggcaccttttcactcgtcccaaccatgaagaattttctgcttcacatagaattaaaataaaattattactgaga

SEQ ID NO: 801866 - DNA, 585 bp, Homo sapiens
tttatggatttgtttaatctggacatttatgtaaatacagtcgtacaataagtggctttttgtgtttggctgctttcacttaatgtttttaaagttcatacatgttatggcataaatcaatacacacccctttttatagctgaataatattccattgcatgagtccaccccytttttttttttttttttttttttggagatagagtctcactctgttgcccaggctggagtgtgatggcgtaatctcggctcactgcaacctctgcttcccaggttcaagtgattctcctgcctcagcctcctgagtagctgggattacagttgcacactaccacgcctggctaattttttgtatttttagtagaaacagggtttcaccatgttagccaggctggtctcgaactcctgacctcaggtgatctgcctgcctcggcctcccaaagtgctgggattacaggcatgagtcactgcacccggccattctcactttcttgatagtatcctttgtagcacaaaagttttaattctaatgatgccccatttatctattttcttttgtttcatgtgcttttggtgtcatgtcta

SEQ ID NO: 801867 - DNA, 455 bp, Homo sapiens
tgcatggattatcacagtataattcactgtcttttgcacaaccacaccatcgccatgaacgaaactctgcccaaaaggagagatctagttttctcaaggtcaaagaatgtttttttaaaaaacacacagctgctgaatgttcaacctgtgaaactgagatgtttctaaaatgacacagtaaatgtgactcagaaataartaaataaatagctcagaaaactatttttgtctccatctttttttttacacacagtatattaaacaaaaaggtaaataaggtataactagatttaaaaaataaaagtttaaaaaatgtacactttaagagattctggtcaccctcgctgtgaatacctgactacctctctgttaaatttgcacctttacattttggttcggtttatttctatgttgaattagagtggattaagttaattttcttttgtcagtgttac

SEQ ID NO: 801868 - DNA, 554 bp, Homo sapiens
ccatacacacaagaaaatgtagatcaacactctacaggcagttctatatatattatctcatttaatacaatgaaataggtattatgaaacacatttgaaagatgggaagactgagattctgaaaaaaaaattcccaagatcacatagctagtaagaggtagaaccagatttgagactcaagtctccctgagttatcctgctgactgcatctttaagaataccctacttgggccaggcgtggtggytcatgcctgtaatcccagcactttggtaggccaaggtgggcggatcacgaggtcaggagatcgagaccatcctggctaacacagtgaaaccccatctctactaaaaatacaaaaaattagtcgggcgtagggtgcctgtattcccagctactcggcaggctgaggcaggagaatggcgtgaatctgggaggcggagcttgcagtgagccgagatcgcaccactgcactccagcctgagcaacagagcgagactccaactcaaaaaaaagaatcccctacttgaaagccagtattcaagatagtatccaa

SEQ ID NO: 801869 - DNA, 598 bp, Homo sapiens
gccagatatgctaaatcagccaatactgatattgtttaaatgtatgatttgagtgaactccacggtctaagtcaaattacctatgataatccatcagccatcagtgctatgtacctaaattggagaaacaactagtattcgaaaggacgttaagtttgtccagtgttaaacatggactcggggagaaccaggatggccacctgtccttcctgagttcttaaaccrtttgttattaaaagttctgcattccatgactcatcatggaaaagataagatgatcaaaattaaatatatattggtatggtgacttctaaattgctaaaatagtttatgaccaaagttttgtttgtcagaccaatattcctgggaagacaatgaaagattcaggtacattctgctacctgatgggccacttaaacatttacagagtgatttcattaaattgtcatcttcagtgtgttgtaagacttttccttggttcagctaaagatagggttctttgtcccaagtccatgaaaattgatgcttgctgacaatttgaatggtaagacaagattttatttagtgaaaaggaagaaaaggagaaaacaagggattc

SEQ ID NO: 801870 - DNA, 644 bp, Homo sapiens
taagcctcacgagatctgatgattttataaggagaaacccctttcacttggttctcattctcttttgtctgccaccacataaaatgtgccttttgccttccaccatgattgtgaggcatccccagccatgtggaactgtgagtcgattaagctgctttttctttataaattactcagtcttgggtatgtctttatcagcagcatgaaaacaaactaatacaattacattccccaacaaatatgcacaaatattatgtaaaaacagaaatatataactttaaaaattgaaatataaattttttaaactattacaacattaaaatactgtttgagaaagcaaggacataattcttagtttcttgtcaggtgctgaccatatttctcacacgacccaaagctgctttcctttctggattatctcagagtgcaaaagygtgtccttccttgggatggcaaatattttaggcaagcagaatagaatgattttgtggcatgtgtctgagtggttcttgcattcccttagaaacgtatctgttgtcagggtcacagccagcttagtattgttttctcagaaataaatgggcaaggaaaactcccgtaccaggtgtacctcataacagggatccaaatttttcctaactgag

SEQ ID NO: 801871 - DNA, 613 bp, Homo sapiens
cacccaacagtaagaagcagtgcaggagcttgcaaccaggctctgggatgaactcaacttgtgctctttcagaaaaattttatagcttgattttatttttaattaacatataataattgtatgcatttgtgggttataatatgrtattttgatacatctatatacattgcagaatgataaaatcagactaattagcatgtccatcacctcaaacttctaccatttctttgtggtaagaacattaaaaatcctctcttttagctactttgaaatatacacttttattaactatagtcaccatactgtgcaatagaacagagtttattccacctgtctgactggaactttgtacttgttgacccttttccctgtccattttctgtcctcatcccccagcctctgctaaccaccattctacattctattctgtacttctacgagtttgactgttttagattctacatatacagaaacgagatcatacagtatttgtctctctgtgcctgacttattccacttaacataatgtcctctaggttcaaccatgttgtctcaaatgacagaatgtcctgttttcgaaaggctgtgtcatactccactgtgcatatactac

SEQ ID NO: 801872 - DNA, 613 bp, Homo sapiens
cacccaacagtaagaagcagtgcaggagcttgcaaccaggctctgggatgaactcaacttgtgctctttcagaaaaattttatagcttgattttatttttaattaacatataataattgtatgcatttgtgggttataatatgatattttgatacatctatatacattgcagaatgataaaatcagactaattagcatgtccatcacctcaaacwtctaccatttctttgtggtaagaacattaaaaatcctctcttttagctactttgaaatatacacttttattaactatagtcaccatactgtgcaatagaacagagtttattccacctgtctgactggaactttgtacttgttgacccttttccctgtccattttctgtcctcatcccccagcctctgctaaccaccattctacattctattctgtacttctacgagtttgactgttttagattctacatatacagaaacgagatcatacagtatttgtctctctgtgcctgacttattccacttaacataatgtcctctaggttcaaccatgttgtctcaaatgacagaatgtcctgttttcgaaaggctgtgtcatactccactgtgcatatactac

SEQ ID NO: 801873 - DNA, 628 bp, Homo sapiens
agataggaactgtcacctgcgagggacacaggtccagctcacggccagctagagcaaggcccttgactcttacctttctgaccatgtcttaggccttcttaatttgctgggcctttaggtcacatgtaatctgcacagcaatccygtaaataagtactgttattcctcttttaaggaggagaaaactgaggctcatgaataagttgttcaaggtcacccagctagtcaatgattgaatgtgcatttcaaagagggcccgtctgactccagaatccatgctcacaaagcctgccctctaccctagacgggtacaggtgtggcctgagcaagcatcccggggaagggcaatgaatgaatgaatgaaacatctgcacaactttgttggaaaattacctgcaagacacatcaatcaggtgaagtattcattattcattagaaaaaaattaaaaggcaaagcccttttaaaaggttgattcaggaatgaacaaggcaatcgctacagcactaaagcaatcaatgtgtaatcttaagtgattcaatgccaagtaacttttatatccgtgccaaatttcatatgctacagaagagaacgggaaaatgagttaaaagaccattgccagattttgtt

SEQ ID NO: 801874 - DNA, 628 bp, Homo sapiens
agataggaactgtcacctgcgagggacacaggtccagctcacggccagctagagcaaggcccttgactcttacctttctgaccatgtcttaggccttcttaatttgctgggcctttaggtcacatgtaatctgcacagcaatcccgtaaataagtactgttattcctcttttaaggaggagaaaactgaggctcatgaataagttgttcaaggtcacccagctagtcaatgattgaatgtgcatttcaaagagggcccgtctgactccagaatccatgctcacaaagcctgccctctaccctagacgggtacaggtgtggcctgagcaagcatcccggggaagggcaatgaatgaatgaatgaaacatctgcacaactttgttggaaaattacctgcaagacacatcaatcrggtgaagtattcattattcattagaaaaaaattaaaaggcaaagcccttttaaaaggttgattcaggaatgaacaaggcaatcgctacagcactaaagcaatcaatgtgtaatcttaagtgattcaatgccaagtaacttttatatccgtgccaaatttcatatgctacagaagagaacgggaaaatgagttaaaagaccattgccagattttgtt

SEQ ID NO: 801875 - DNA, 651 bp, Homo sapiens
acttagtagctatgactttggataagttatttaactgcttgtatgaggtttagagggaattagaaataatatttatgtaaagcacatagccaggtgtctggaacttaaaagaggctcaaggaatgtagctcttccacctccacctccaggaattatattatccagcattgaaagtgcatcatctacctctggactgggattccacagctgtgcaacagctgcatagaaacacaattacagaggacaggaaggaagacggcggctgtggcccattaaaattctgcctctggtggggttgtgcacagcacccacactgcaacaaaaaatcttgggcttttcagggagggtgatgatagcagtgccctagtctgcagttcccccaaatggccctggtttgttcgaagcggataaggaatgtgcaggctaggccagtccctycactctgcattacagcagcagacaagcatgtctttaagcatccagggcagtcctgaagaggaaggaaatctcgaagtgaggtgagggcaggccgttctaaccagtccctccatccttcccatcccaaccctcaggatgctgtcggcgccagcgctggatgcctcttgcttttatttgaatgaaagataagacacgttgtgtcaatctcaggtt

SEQ ID NO: 801876 - DNA, 629 bp, Homo sapiens
aaaaatagaaagcatattgcttcctgatgtagggatactcaacatagtaaagatgtcagaactccctaaaataagctgtacattcatgcctttctgatttaaacaccaacatttatagatatatacgtacatgtgtatgtatgcatacatatttttagaacttgaacaaatgatactagagtttatctggaggaacaaccatgtagaaataatgagagagagagagagagagagagagagagagagaaaacagtaatgacagaggtagctatctaatggtctaaccaaacaygcagaatattaaaatgcaaaaggaagataataacaaaacagtttggaacttaagggaaaaatagatatatacaaaaaagggtccaaaatgaatatacctatacacaaatttgggtaacattttaaatgagtgggagaaagatcaattagtcaattgggatatttgaatattgggataatttagataactctctgtgaaaaaaaaaaaagctggactcctacctcacttcttataccgataactattctagctagatcaaagatgtaagtattaaagaaaaaaatggaagaaagaaagaaaaaatcgaagagtataggaaggaaacaagagtagattt

SEQ ID NO: 801877 - DNA, 465 bp, Homo sapiens
tctttaaggagggacccagacacagtatgcagaggcctgaatcctctagatcattctctctccaccatgagtcctgccgtggggacttttccagctccctttggccttatgagccagaaaatcaggctagagcctaaagagaayagaaatttcagaatcaggcttgttctgcgactgtatgggggagctgaaggacacaatgggctttctatattggagactacccatcatactctctctgcccagggagaaaggacagatgctgtgtgattttgtagtctgtgatttggcttctcattctcgctgctctctacacctcattgtttacttcactcccctgaaaaaaatgctccctaacaggctcagtacccaacttctgggtattgctgcccacatttgccttggttctaccttttcagattgcaggatcctgaggttttgcttggagcagctcagattctccac

SEQ ID NO: 801878 - DNA, 565 bp, Homo sapiens
atttttgtgtgtttttgtacctatgcactttcctgaccccaaatctgaaagagagacaatttaaagcctatttatagcaaatcatttgagtatttagaaaaataaagttgtatccattgctacaaactctgggcatgagaaaacattcattctggtttgttctgttaattttaaaatgtcttgttatcaccgaaaatgtcaggttgtaaactctttctagtrttcgtaagatgcagaatactttctagaagaaatacaaacaaatctcatgcatgtttatatatcacagtgttttcaggactcaacttcctttggagaagacttttttttgttttgaatcaactcataattacaacaacagacactactttcactgtagcaatgaaacagatggatatccagatgcacccactggaaaattgagaaaaacaacaaccaagatccaaatttctcatttgtttgtatgtttgtttgtttgaaaaaagacaaggtgttggaaggttgagagtaaaaagtgtaaattagatctcatcaaggttagggaggaaaatattctggataagtc

SEQ ID NO: 801879 - DNA, 565 bp, Homo sapiens
atttttgtgtgtttttgtacctatgcactttcctgaccccaaatctgaaagagagacaatttaaagcctatttatagcaaatcatttgagtatttagaaaaataaagttgtatccattgctacaaactctgggcatgagaaaacattcattctggtttgttctgttaattttaaaatgtcttgttatcaccgaaaatgtcaggttgtaaactctttctagtattcgtaagatgcagaatactttctagaagaaatacaaacaaatctcatgcatgtttatatrtcacagtgttttcaggactcaacttcctttggagaagacttttttttgttttgaatcaactcataattacaacaacagacactactttcactgtagcaatgaaacagatggatatccagatgcacccactggaaaattgagaaaaacaacaaccaagatccaaatttctcatttgtttgtatgtttgtttgtttgaaaaaagacaaggtgttggaaggttgagagtaaaaagtgtaaattagatctcatcaaggttagggaggaaaatattctggataagtc

SEQ ID NO: 801880 - DNA, 561 bp, Homo sapiens
cacaagtgtattgcttttgttttactacatgtttcattccatctgttgggagcccagtaagtcaatatttatcacatttatagattctgaatcactaggggaaaaaaatcacttctgggaaaaaacgtgcatctatcattctcaactatttcaaagtttaaaagtgttgtctctgtgatgttgactttggttttttgagctaaaataatgcagcttgcattatkttttaattaaagcaattttaaactacatgttttcaaagtttttcgttttccccaaacctctctgtaattgccttgtcatgattatcattttcctttcactgttgctttctatagaagccccaggaaagagttactaaaaattaaatttcatgcttgcatgtgtttctgtgatctgcagcgtgtatgatctctgagtggaaaacttctctgaaaataaatggattaccctttttactacactgtctgatgtctcttcagcagatagcattgcttccctgtgatctctaacccaccacaattgaaatgacaagcgttgaaatgggggcctcacggtggc

SEQ ID NO: 801881 - DNA, 578 bp, Homo sapiens
gacagataaataggcaatagaacagaagagaaagcctcacatttgtggtcatttgatttttgataaaggcactaaagcagtccaatgggagaaagaaagtcttttcaacaaatggtgctgaaataactggatattcatatgggggaaaaataagaaccttgattctacatcacaccatacacaaaaatcaattcaagataaagagtaaacctgattgtaaaagttagaacttctaaaaatttcaagaattataggaaaatattttgcaacctgagtgtaggcaaaagtttcttagataaacagaattttgagcaatgtaacactgttmcttccttatttaaagacaaatgacaatttccttgtttaagccaacaaatgacaatggaatgatttaggcttagaaaattgtgcagaaatcattgcaaaagttggtagtattcaaacagtagctgagggtgccctatgaacatagagattgacatttcaaaaatgatgcagcaaaatccttccagtgcttgaaacacaacaccattgagcaatgattcaattcaaagatgttaacactgaaaagcagcgaa

SEQ ID NO: 801882 - DNA, 578 bp, Homo sapiens
gacagataaataggcaatagaacagaagagaaagcctcacatttgtggtcatttgatttttgataaaggcactaaagcagtccaatgggagaaagaaagtcttttcaacaaatggtgctgaaataactggatattcatatgggggaaaaataagaaccttgattctacatcacaccatacacaaaaatcaattcaagataaagagtaaacctgattgtaaaagttagaacttctaaaaatttcaagaattataggaaaatattttgcaacctgagtgtaggcaaaagtttcttagataaacagaattttgagcaatgtaacactgttacttccttatttaaagacaaatgacaatttccttrtttaagccaacaaatgacaatggaatgatttaggcttagaaaattgtgcagaaatcattgcaaaagttggtagtattcaaacagtagctgagggtgccctatgaacatagagattgacatttcaaaaatgatgcagcaaaatccttccagtgcttgaaacacaacaccattgagcaatgattcaattcaaagatgttaacactgaaaagcagcgaa

SEQ ID NO: 801883 - DNA, 593 bp, Homo sapiens
gtggcgcgatctcagctcactgcaacctccgcctcctgggttcaagcgattcttttgcctcagcctcccgagtagctggggctacaggcgcgtgccaccatgctatgctaattttttgtgtttttagtagagacgaggtttcaccgtgttagccgagatggtcttgatctcctgacctcgtgatcctcccgcctcagcttcccaaagtgttgggattacaggcgtgagccaccgtgcccggccaatytgtgctctttaaagatgaaataaaaaatagatttttagatttattttctttggaagtgaagccatggatgttagatccagctggaagcaatctcattcagctgtggaggaaattcaaatagaactcattgaatcaaaatataatgaggaatgcaaatacaaatttgaaaaaagtgaaatagctgagtgtggggatcaaaataactaaatttcttttttcaataatgtgatctgaaatgacaaaagtacttctttgttttctaacatcttatatagttataagtggttttggttcagtaagtaatatattagcaaagtaaagaaacagaattgatatgttcaagcag

SEQ ID NO: 801884 - DNA, 553 bp, Homo sapiens
ttctgcatgcaggctgttgggatatactgttttggttgaagtatatgatgaaaatctggccttacacagatatggaggcaggaaaagaaggagtattttagtgcccttttaagataattctagacatttttcctttctactgcactaaactcaacaagtagtagtttcttacacattggttgccatgcagaatctgaaactatattgatgaaaattttgtctcattttacactaactttcttgcactttgaatagatatattccccatgcacaaccttataacatcatgcattgattagttgaaaaatattgctcagttgagttaytgtggaactttcaaatgtcaacacatttcattatacaatatctaaaagcaaatcgcccactatctcatcaagtctataattattggaaagcagtcaggctcatggtaaaaggtaatgttttcaaaaagttgtattttttactaaaatttcaaattttgtcactagcaacaaatactgtcaattgtgcagtgggagattcactgtgctcattttcacaaaagtgtctg

SEQ ID NO: 801885 - DNA, 611 bp, Homo sapiens
tggccacctacccctaacctgaagctatctaaggctttgtccactgtcaggagtcatctcattggctgacaaaagacactgttttcactcaggagattgcaagtgttttaaaagctcaggatcaggaactagggacaaatatcactttttttttttttttttctgagacagagtctcgttctgtcactcaggctggagtgcagtgtgatagtgtgatctcggctcactgaaacctccactttccgggttcaagcaattctctgcctcagcctcctgagtagctgggattacaggcgtgtgtcaccattcccggctaatttttgtattttytttttagtagagacgtggtttcgccatgtcggccaggctggtctcaaacacctcacctcatgatccacccaccttggcctcccaaagtgttgggattacaggcatgagccaccgtgcctggcccaaaggccacattttaaaaattattattgtataccataggaacctaataaaaatttgaactcatagtggattcaacctagccaagattccaaagaaagatctatgtcattgggcagaggggaaacgcttcttcaattttcaggatcctggggctgcaa

SEQ ID NO: 801886 - DNA, 611 bp, Homo sapiens
tggccacctacccctaacctgaagctatctaaggctttgtccactgtcaggagtcatctcattggctgacaaaagacactgttttcactcaggagattgcaagtgttttaaaagctcaggatcaggaactagggacaaatatcactttttttttttttttttctgagacagagtctcgttctgtcactcaggctggagtgcagtgtgatagtgtgatctcggctcactgaaacctccactttccgggttcaagcaattctctgcctcagcctcctgagtagctgggattacaggcgtgtgtcaccattcccggctaatttttgtattttctttttagtagagacgtggtttcgccatgtcggccargctggtctcaaacacctcacctcatgatccacccaccttggcctcccaaagtgttgggattacaggcatgagccaccgtgcctggcccaaaggccacattttaaaaattattattgtataccataggaacctaataaaaatttgaactcatagtggattcaacctagccaagattccaaagaaagatctatgtcattgggcagaggggaaacgcttcttcaattttcaggatcctggggctgcaa

SEQ ID NO: 801887 - DNA, 611 bp, Homo sapiens
tggccacctacccctaacctgaagctatctaaggctttgtccactgtcaggagtcatctcattggctgacaaaagacactgttttcactcaggagattgcaagtgttttaaaagctcaggatcaggaactagggacaaatatcactttttttttttttttttctgagacagagtctcgttctgtcactcaggctggagtgcagtgtgatagtgtgatctcggctcactgaaacctccactttccgggttcaagcaattctctgcctcagcctcctgagtagctgggattacaggcgtgtgtcaccattcccggctaatttttgtattttctttttagtagagacgtggtttcgccatgtcggccaggctggtctcaaacacctcacctcatgatccacccacctyggcctcccaaagtgttgggattacaggcatgagccaccgtgcctggcccaaaggccacattttaaaaattattattgtataccataggaacctaataaaaatttgaactcatagtggattcaacctagccaagattccaaagaaagatctatgtcattgggcagaggggaaacgcttcttcaattttcaggatcctggggctgcaa

SEQ ID NO: 801888 - DNA, 634 bp, Homo sapiens
ataaagtaaaaactggaaaaccaatacagaaaaccaatgaaactaaagctggttctttgaaaacttcaataaaattgataaacctctagccaggctaaccaagaaaaaattatctgtatcaggaataaaagaggagacattatgattgagcccatagaaattaaaaggataataagagaatatttcaaataattatatccaataatttagatcaataaattgaatgcagttattaaataactgtattcaataatttagataacataaaccattactattctatcataattcactggagaataaataacctatatgatcrtagagaaatcaaatttgtagttatattatcttccaaagaagaaaactacaggcacagttggtttcattgataaaatctgtaaaacatataagcaagaaatatctaaaattctattaacctattctagaaaatagaagaagagataacactctctaactcattttactaggccagtattcctccaacatgaaaatcaaatacattacaagaacataaagctatcaacgaatatctctcatgatcacacatatgacaatgctcaacaaaatattagcaaatcaaatataacaatatataaaaaggatggttcatcat

SEQ ID NO: 801889 - DNA, 600 bp, Homo sapiens
accttagaccagacttcattgtccatatcattatcagcatgttggtcaaaaccattcaacaagtctctgggaagtcccagattttcccacatcttcctgtcttcttctgagccctccaaactgttccaatctctgmctggtacccagttccaaagtcacttccacatttgcagattatcttcatagcagtaccccactctactggtaccaattctctgttttcaaagtgctataaagaaatacctgagactgggtaatttataaaggaaagaggtttaattgactcagagttctgcatggctggggaggcctcaggaaacttacaatcaaggtagaagatgaaggtggagcaagacacatcttctcacggtggcaacagagagagagagcatgcaggggaaactgtcacatttaaaccaacagatctcatgagatctccctcactaccacaagaacagcatgggggaaactgcacccatgatccactcacctcccagggattacaattcgagatgagatttgggtgggaacagagaaccaaaccatatcaaaggctgatatacaaaagcccatcacatccctctatagttgcaatgaaac

SEQ ID NO: 801890 - DNA, 598 bp, Homo sapiens
tcttgaatgtaaatagatgaaactctccaatcaaaaaacatagagtggctaaacggattaaaaaagacctaactatatgctacctagaagagacccactttagctttaagagcatacataggctaaaaaatgaaaggatggaaaacagtaccatgcaaaagagagcaggggtagctatacttaacatcagataaacttagacctcaagtcaaaaactattataagagacaaagaagtttattttgtaatgataaaagrgtcaactcatcaagaggacataacaattgtaaatatatatgcactcaactttggagcacctaaatttataaagcaaatattaatgaacataaaaaagaaatagagaacaatataataacagtgggggacttcactatcccatgttcaacaattaatagattaacaagatagaaaattaacaagaaaatactggacttaaaatgcactttagaccaaatggatctaacagacatacatagaatttttaattgaacagaggcagagcatgcattcttctccagtacacatggaatattttccgggacagacaatgcattaggccacaaaacaagtcttaaca

SEQ ID NO: 801891 - DNA, 582 bp, Homo sapiens
tttgtattctagttagtaaattaattcctgtataattgatatttctgatgttattgttagaggtatcatttttttcaaatttcaattttagaagttcttctttccttaaaaaagaaatacgattgatttcaaatattatcttataggcacataccttgtaaatgtattcatataatagtttatctgtaagttattcatttttttggtgaaaaattagcttaattacttctcckcaagttcttatatcttttttatttcttctttactttctcactagcaattttgtcaggtgtaaggttgaacaaagttgatcatagtatcattttctcattcccaatgtcagcaggaaaatgttcatcacagtcattttggaggtagcctttaataatttaaatatttttttcatcattgcaacttaggtaataggttttgtcactcatagactttggagttttgtttttttttttagttatagagaatgtcatataatttttggcttttattctgttaagaaaacacactgcagttttaaaattttgaatattaaaacacgttcattcctgtaacaagcccaacctatgt

SEQ ID NO: 801892 - DNA, 446 bp, Homo sapiens
tgattgaacatccaggcctactatgatagtccaaatataagcacaatagcttgatgcttaaaatcaggtcagtggactaagaattctacatctattctataacactggatattttgttggataaagaatgactttgaaaaaagagaaatggatttatgtatctaattctggcccaactcttagtcaggtctttatgttacctttagacatgttttttaaatataaaataartgaaaatacatcatagggctcttttaattctgtttttaaaaagtacaatttatatgaatgtcatcttttaaatgtttagagcatttatatggacatctcttaagttgttggatctgattttaaaatgtaagaggcaaaatccccgatatagtgatgtgagtgggctgccattcttttccctaaaaccaactacaaatactcaacaaaatacttgt

SEQ ID NO: 801893 - DNA, 631 bp, Homo sapiens
taatgatgacacatccctttgatgttctgcaacagtaaaaatactgaaaatattctatatgtattaatgtggaaagtttttcaagatatattgctaacgaataaagcaatgtgccaaaaggataacgtgttatgctgtccaaataaaggaaatcagtaatgtattttgctatttcttatatatacataaaatacttaagacaccaagaagctgtcgttaagagttgagaaccgggcagacaatagaaaaggatagaatgtggaattttccagttctgtatcatgtaaatgcatcacctattcaaaaaataaaataatgttcactgttccctacattttctgagaaatatccaactcttyagccagtaatttatagcctttcacaattgttccagtaatatttcatttttcttgctcatgctaaaccaccttctcatcaaactattcagtaccttaaattctactaaaatttctttgtggcatcacacacatacccatttcaatacactgtttttctattatcacctgtagaaacctacataactttcacagcacatctcagatgccagctctttcaagatcttctctgataaacccaagaagaaataatttttccctcatcaaaatcctta

SEQ ID NO: 801894 - DNA, 653 bp, Homo sapiens
gtagtccacccctacagccttggaccataaaagccagttgtgtgtgactttgttctcacattttgaaacccctgcacagggccacccatgctggtttgaggcccagctataatgtggtggtgtatgtgggtgggctggtggcaggggtggggaggaggaggtagggaattctttcaccaattcaagggaagctaactactgtaccattttaattctgcaataacaytgtataatttgagagaaagccttccaaatttccaagttgatttctgcagttactcatattttcctctgctttgtagcactggcccctgatgctaaattgcagatcagaaaggccagtgaagcgtgaggggaaagctgcaggatgtggacccatgcacgcttcacccagcacatcccagcactgcagacccttgaggggctcatggggtctgtggtctgcccagcttctggacactgccactccaagctgaggagcacaagctgaagctccacagcatcctctttgttcttcctataacactgcaccctgcctcaaggatgggagttttatgagctcttggctcctctctcaatttcttccaaattgtattaaatctgtctgcaagatttagagtttgtagtgtgtggtaggaataattccttagttt

SEQ ID NO: 801895 - DNA, 646 bp, Homo sapiens
tctattttatttatatgtgtctgtgtttctgagtatgtcctgagttgcacgataatactatatttcttactgggtaacatgtcagaaaagtttctaaaaactttctctgctgcacttattttatacattttatttatgttaataatctcacatttaacacacttatgatttattctcaacagaaaaaggtggtatttctttcatttagtcttttaaaaagctcacattatcaaatgattgctcaatcatttaatctctttgcttctcttatatgcattgatttaataaatatgtatactagtttctccatcgattctttagatttgaamcttattttccttttattcttacaaaactgacttgtctataggcccacttctacttcctttattctatcatcttcctcaacttattctgtggtcaaagaatggagaaataatattaataatatgtttttctcatcaatgacttccacctgttctctgagaaattcagcttcaagaactttagtttgatatgactgcaaagataatacacagtctaaatcataaaaatgtctcaaaggttttttttttatttgtttctttgaaatatccatgaacaggcatgtttctcccctgtagtgcaatttgtgtgaaattctggc

SEQ ID NO: 801896 - DNA, 686 bp, Homo sapiens
agtatttggattgtttcccatctttgagcaatgctgcagtgaaaaccttgttcatttctcatacctttgtgcaaccctctgtggagtaaatttctgcatatgagattattgagtcaaagggtaaatgcactataaacttytatatttgttgtcaaattgccctcaatagagcaccagtaatatttgtgagaacctgattctccacagtgttagcacagagcatgccaaaaaaaaatgggtgtttttgccaatttgatccatgaaaaataatatctcaccatagttttactttgtatttctttcattatgagtaaagttggataccttttaacatgtttaggagccacttatttttctttttttcttcttttcttttttaaattgtctgttattaccctttgcctatttttgtactgggttttggtcttttaaatatttatttccaggtgatttttatatataaagagagccttgttcttttttttttgcaagcagagctatgaacatatacatactaaaagtatattggctcattatagtaacatggaatttgtattaaaagtgatgcgtatataaagaaaagccacaaatgtggacagtctgtccaaggttgtctgtgtcgtggtgggggtggtaagggcacatgcacctgacctagtctctggtcctcagagtgggatcctgtc

SEQ ID NO: 801897 - DNA, 599 bp, Homo sapiens
taaactgtgtaagtggttaaggttaagtgattaatgtagtgcttccaggtcatggcaaaagcttggtttgcatccaattctgtctataatcaaatccattggatactttcgagaagagtgactttcctgatcaatgatttataaagatcatttttgccaccttctagaggaaggactttaggaaaacaagagtagaggcagggagaccaggacagatgctgtttcagaggttcaagtgagagatgttggcagtgcagactaggatgtaggcaggggagagggtgagaagcagccagattcagatgagttctggaggtacagcaggccagacaaggcagggagattgtgaactatgcagaaagagragaaacaaggataggacctagattttggctttagcaactaaagagtgtttattacgagattggaaagcttgacaaggaggaggatggggtaggattttgtccacattaaattgaaacgtttcagagatcaaaaggaaggctctggttttatagcaaaggttcctgctcaggtcctcattcagttcctttatgcaaatgaaggatgttgggtcagcatgatcctgatgggggtct

SEQ ID NO: 801898 - DNA, 669 bp, Homo sapiens
aatgtttcacctatgcaaattaagtactactgcccttctaaactctaataacagcttcttttctgctcctatcccatccctgaagccaatgccccaaaaaaggcggtgctttgttttattttgtttttaatctatggcaacaccctatgctacgccttgcactaatttctgtgttggttaggaaaggagaagttaggctgtggtaagagatgaagccttaattagtggcatacaatgtaattttatttcctgcttcaagatacatgtctagcacaggccagcagcagctgtgatccacatcatcttcatgttgggaccaggcttataggcagcttccatctgaaacattacagccagtctcatggcacagaaaagagagaatatatggagaaacttatggctggaaacatgttatttctaattaaattgaattgatcaaagtaagtcacatgatccagatggatattaatgcagccaagaagtatgaagaaggcagcaagyatctgtgaacaataatatattctaccatggggtcgagtagaaaaataaaaaaaaaaacttgagtccctctggctttattgaactggtataccagatctgaactgcctataaattgggaaaaataaaaatctatttgtttaagccattacctgtatacagttcaagaag

SEQ ID NO: 801899 - DNA, 551 bp, Homo sapiens
atcatgtcttatctatattacctgtcttatcaaattaacggtatgattcataaatagcatataaatatggaaagcatagttaatcacagctcttatttttaaaacttagttgctctgaaaaacctttagttttgatgatccttcggcagcttattttcaggtggagcctcatggagttcctcttcaaartgcaaggatgtccatgattccagtataacatttataaaggtaattaactaaataagtcaatactgataaaatattatattcctgacaatagttgctaaaatgcattaaaaatgctagctatgggctctttaaagtttaaagctcttaataaactgggggtaatgggataaattataaaaattgttgaatgaatacatcccaaaagaaggagcagcatcctaagttcagtagtaagatagttttattgccattagaatcagaaacctccaaaaaaaaatcaaattcttatcaccaccctatgccttgttgtggaatattagacaagttattaagcatagaatttagccatggtcaactataag

SEQ ID NO: 801900 - DNA, 597 bp, Homo sapiens
cagcaaaacgtattgacaaggaacaaccaatgagacacgaggaaaatcagatctgaatgaattaaatgaaacaaggcatcaagaaggaacgagtggtggaatctgtcaagcactgacagatggggcctgggatgtgaccactggatttgctggcagagaggctggtgatggctttgctaagggctgtcttgttgctgatggattcatgagaaaactagaggtggggaaccagaatgcaaatatgtatgagtcttctgaaatgttttgccataaaagggaggagaatcacagagttaattttcatggaaaactcaatggsctttgtgcaaaaaattacaatcagaaaaccataaaaatcactcaagtcgaccaaaatgtattaagtctctcctctttggaaagctcagttctattaaacagcaggatggtggaaaagggactcaaaaggggcaaaatataccccatctccatgaagattataataactctgagagaccccagaaggggatagtgctgtcagtgaaacatgtggggtgtcaggatccttataagaagggacattgattctgattaaggatgagggaagacataggtgac

SEQ ID NO: 801901 - DNA, 536 bp, Homo sapiens
acccatttcaaatgggagaaattggctaaaactaaggggctaggggccccatgcaagttagaaattcagtgaggcagtcaaatattaaagctccagaatgatctcctttgactctatgtctcacatccaggttatggtgatgcaagaggtggatttccactgtcttgggaagctctgcccctcttgctttgtggggtacaggcttcctcccagttgctttcacaggctggcatcagygtctgcggcttttccagacacatggtgcgagccgttggtggatctaccattctggggtctggaggatgatggccctcttctcacagctccactaagtggtgccccagtagggactctgtgtgggggctccaaccccacattttcctcccgcacttccctagcagaggttctctatgagggcaccacccctgcagcaaacttctgcctgggcatccaggcatttccatacatcctatgaaatctagacagaagttcccaaaccccacttcttcacttctgtgcactcgcaggctcaacac

SEQ ID NO: 801902 - DNA, 536 bp, Homo sapiens
acccatttcaaatgggagaaattggctaaaactaaggggctaggggccccatgcaagttagaaattcagtgaggcagtcaaatattaaagctccagaatgatctcctttgactctatgtctcacatccaggttatggtgatgcaagaggtggatttccactgtcttgggaagctctgcccctcttgctttgtggggtacaggcttcctcccagttgctttcacaggctggcatcagcgtctgcggcttttccagacacatggtgcgagccgttggtggatctaccattctggggtctggaggatgatggccctcttctcacagctccactaagtggtgccccagtagggactctgtgtgggggctccaaccccacattttcctccygcacttccctagcagaggttctctatgagggcaccacccctgcagcaaacttctgcctgggcatccaggcatttccatacatcctatgaaatctagacagaagttcccaaaccccacttcttcacttctgtgcactcgcaggctcaacac

SEQ ID NO: 801903 - DNA, 490 bp, Homo sapiens
actagactcatgttaccagagctcatgaaagactgatgtataaaactaggagagtgcttcagagtgtgggtgaggataaaacaaactagagtttgaatcctggctctgctatatacttggctctattacctacccaagttatttttcctcctcacttgcaaaatgggtattaaaacttgctttaaagggttttacagaaagaattatttggaaaatgtaatgttatataatgtaaattatgcttcccagttgtattgtattgtattgytccacttaatgtaatactaaaaatccttcaaaacatgcctgttttctgtcttggaaatatttcttggagttgattttgttgcattaattcatgctatttacaaggatattttcacattcagtattgtattcactctccctcattgttaatgaatagaaataaaaatatttatggaaagattttacaaagcagcaggacctagtgcctaggagctgaaatatg

SEQ ID NO: 801904 - DNA, 549 bp, Homo sapiens
cttgcttagaagaaaatattttgttctaaatattactggttttgacaatgcacctagtcacccaacagctctgacagatgtgtacaaagagattaatgttgttttatgcctattaacacaacatccatcctgcagaccatggatcaaggggtaattttaactttcaagtcatattacttaagaaatatatttcataaggctttagctgccatagatagtgattcctctgatggatgtggtcaaagtaagtggaaaaacatctggaaaggattaactattttagatgccattaagaacatttgtgattcatgggaacttgtcaaaatatcaacatcaacaaaagtttggaagaagctgattccaactctcrtgggtgcctttgaaaggttcaagagttcagtagagaaaataaatgcagatgcggtggaactagcaagagaagaagaaaaaaatggagcctgaagatatgactgaattgctgcagtctcatgatgaaacttgaatagatgaggtgttgcttcttattgatgagcaaagatgttttcttga

SEQ ID NO: 801905 - DNA, 513 bp, Homo sapiens
tagcttcacaaacagcttgggaagcacataggcatcgaagacgctcgcttcagaaatgtccctgactgctgcggcctccactatgtttcaaatgacgaatttcttaatggccttgtccttgggcatgcatcaggcacagttagtgcagcaaataggctgcacgtggctgtggccctttttggcacgaccattgttccttcttttctttgtcatcttggaggcackcaccggagagctgaatcacctcttaaagaccataactctcaatactactgcattggggattaaatttcaacatgcattttagagggagcattcaaaccataccaccatttcacataatccatcatttacgtctgaaaacaaaaaacaaaagagctcttggaaaatttggaaaataaaaaaacttgcctaacctggtagaagacatccctgaaagaactccatagctaacatcacataattatgaaagacttaattcttccttttaatatcaggaaaaagacaaagata

SEQ ID NO: 801906 - DNA, 667 bp, Homo sapiens
catcaatatcagaaaacataaatttagaatcattaaatgggaaagaaatgttacatcattttggtaagatttagattgggtaatgaaaaaaagttgataaaatttatgcacaggataacttttaaatgtttaagtcaaaatatagcaaaaaaaagttttaatacagagacattattattrtttaacattgtgtggaagtcctgcccagtaatgaaacaaacattggagagaaagacacaaaattatgattatttgcagagaatatcattacatacctagagaaaaaaaatgagtaaatcaagaggaaaaccattagagaatgctcagaaactggctagctacaaaataaatatttttaaatcatttgcctgtatagtggtaataacaagtctaaaaacataacgcaaaaattatcatccattacggaaaaacaaaagactgaaatacctggaaatagccttattaaaatatgagagagacgtatatagagagaactatgaaataatgaattactttaaataacttgaataaatggtcagaaatacaatgttcacagaaggcaagattacatgcacaaaaaagaaaacaattattttctcttttttttcttttttagagacaaggtcttgctatgttgccaaggctggcatgcagtggctattcactt

SEQ ID NO: 801907 - DNA, 700 bp, Homo sapiens
tccattacggaaaaacaaaagactgaaatacctggaaatagccttattaaaatatgagagagacgtatatagagagaactatgaaataatgaattactttaaataacttgaataaatggtcagaaatacaatgttcacagaaggcaagattacatgcacaaaaaagaaaacaattattttctcttttttttcttttttagagacaaggtcttgctatgttgccaaggctggcrtgcagtggctattcacttcacaatcacagcccattacagcctagatcttctggtgtcaagcaatcctcctgcctcagcctcctgagtagctgggactacaggcacactccaccatgccaagcttctaatttgtttctgtgtctaatgcaataccaaacaaattcttattggtaaggtttaatgcggtaatgtagcaaatttctaaaactcttctgagaagatttaaatcatcagagacctgtcctcagggagtgaaacagtttaaagttggcatttttaaaaaataatgagatgtgagaatagaaaactcaatgaacaaattaaataactcagaatataccatgggtatatacgaagaatctaaaatatagtaaaagtaaactgtcatcacaaaatggtataatgaggaattatttagtgaatagatttgggtttctttattggttaactatttggaagagagagaa

SEQ ID NO: 801908 - DNA, 700 bp, Homo sapiens
tccattacggaaaaacaaaagactgaaatacctggaaatagccttattaaaatatgagagagacgtatatagagagaactatgaaataatgaattactttaaataacttgaataaatggtcagaaatacaatgttcacagaaggcaagattacatgcacaaaaaagaaaacaattattttctcttttttttcttttttagagacaaggtcttgctatgttgccaaggctggcatgcagtggctattcacttcacaatcacagcccattacagcctagatyttctggtgtcaagcaatcctcctgcctcagcctcctgagtagctgggactacaggcacactccaccatgccaagcttctaatttgtttctgtgtctaatgcaataccaaacaaattcttattggtaaggtttaatgcggtaatgtagcaaatttctaaaactcttctgagaagatttaaatcatcagagacctgtcctcagggagtgaaacagtttaaagttggcatttttaaaaaataatgagatgtgagaatagaaaactcaatgaacaaattaaataactcagaatataccatgggtatatacgaagaatctaaaatatagtaaaagtaaactgtcatcacaaaatggtataatgaggaattatttagtgaatagatttgggtttctttattggttaactatttggaagagagagaa

SEQ ID NO: 801909 - DNA, 620 bp, Homo sapiens
acctaaaataactttgtgtgtctgcaccataacttgtttaacattttcatattattgagtaattagactatttctagtattctactatgatactgtaataaacatctctgtgcataaatctttgtctccactttggattattttcttaggaccctagtctggccaatatggtgaaacctcgtctctactaaaaatacaaaaattagccaggcatggtggcaggtgcctgtagtcccagctactcgggaggctgaggcaggagaattgcttgaatctgggaggtggargttgcagtgacccaagatgcgccactgcactccagcctgggcaacagtgagatttctgtctcaaaacaacaaacaaacagacaaacaaacaaaatccctaaaagtgaaatgtatagggtatgaacatttttgggagctgtgttacatattgtcacattgctttctgaacacctggtttttggtggggactcctactagctgtcaaagacagcacagtttctagtatacgtattatttaattattgaaggaaaggaatgataactatctgtttcattgaacccttcctggcattgttattattaaaatcaatctaaatgaagctgggcacagtg

SEQ ID NO: 801910 - DNA, 620 bp, Homo sapiens
tctctacaaaagatttaaaaatcagccaggcatggtagtcccagctgtctgggaggctgaggtggaaagattgcttaagcccaggagtttgaggctgcagtgagccgtgtttgcaccctccagcctggacgacagagcaagactgtctcaaagagaaaaaaaaaataaccacacacttttgtttttggaggtttttatcaggttttattgtggttcctattcaggactacatgcactgaaattactagaaaagcagcacagcacacatacgcaagattacaggagctgacctttctattgcaaggttaaatagtggtacttcaagctaggaaggtttagcttgctacaaaatrtacctgctgggagaactattatcagaatggtaaatctcagcagaggctaatatccccctacaggctgtgggaaaatacttagaacttaacagtaaaaatattcacaaaaagactgaagagaatgagctaggattacatgctggttaataacggaccagccagaatccaagacatatcactaaggcgccagacctgaaaaagaaagtaaaccaggtttacttttcaggaatttaaaatggagttaaaattaattttgttctaaagtgt

SEQ ID NO: 801911 - DNA, 508 bp, Homo sapiens
ataaaagtattaatttggggaactaataaacgtccatgaaatcttcacgatttatgttcttctgccgtggcttcagccattccctccgttcggggtccctgacttcccacaacatcctgacttcccacaacagaaaggaaaggaggggaggggaggggagrgaggagggaaaaggaaaggggaaggggaagggaaagggaaagggaagggcattaggaggaaatagaaagtatgcaagaaaaaaaagcctcaaaaatataattaatatcctcagatagagaagatccttgaaatcaaaataggatactactttaaaaagggaaatatcaaaaataaaaaaagattatcttggaaattaaaaacatcataactgaaatgaaacagtcaatagaatcctggaagagaaagttgaaaacatcttccaaaaagtagagcagaaagattaaaatatgggagaaaagatcaggggtcctatccaggacgaactactgtatatcagaatagaaag

SEQ ID NO: 801912 - DNA, 508 bp, Homo sapiens
ataaaagtattaatttggggaactaataaacgtccatgaaatcttcacgatttatgttcttctgccgtggcttcagccattccctccgttcggggtccctgacttcccacaacatcctgacttcccacaacagaaaggaaaggaggggaggggaggggagagaggagggaaaaggaaagrggaaggggaagggaaagggaaagggaagggcattaggaggaaatagaaagtatgcaagaaaaaaaagcctcaaaaatataattaatatcctcagatagagaagatccttgaaatcaaaataggatactactttaaaaagggaaatatcaaaaataaaaaaagattatcttggaaattaaaaacatcataactgaaatgaaacagtcaatagaatcctggaagagaaagttgaaaacatcttccaaaaagtagagcagaaagattaaaatatgggagaaaagatcaggggtcctatccaggacgaactactgtatatcagaatagaaag

SEQ ID NO: 801913 - DNA, 622 bp, Homo sapiens
attagatgattgattggacatcaacagaataatctgtgattatgaaataaattctctttggaaagtaagaaagtctttcctaaattcaaatgatcattcttattttagctccttcttttaaaagtctgagacaactgaacgaaactcagctttcaaaaagccaaggacgtctttgaaatttcattctacattcctggattactgatgctgcctctctatcagagctctttatccttccttccctttttgcagacttcaaatcagcctcagttttcttcaattatccttttgcctctccttgcctagaagaaactccgaaaattttttgcatatttgatggataagatggaaaggacggtaggtgaggaaatacagcagctaagatgacaagccagctctccactgaccacacaggcayatctctagcaagggacaggaagacagaagaatgaatgcaacaggaccgctaagaagtaaagacagtcttcagctatgcaagaagagcagctagaaatagacaaactgaagaagagtttatggaaggaggagctgttttgtccagagagcagcctggtagttttccgttttcaaatgcttggctttcagggctctgatgtttccc

SEQ ID NO: 801914 - DNA, 601 bp, Homo sapiens
ctgtagcccaaaacctacagagattacatgtcacgaggttctagcaagataggctgaatgcctgctttagggtaggatagaagaaaagacacaacaaaggtatggagccctcatggaggctgtgaactttgagccacaaaactagggatttatgcctaggatccactgcttactgactcaataatctcagttcaatccatttgcaaaatggagatataggctgggcgcagtggctcacgcctgtaatcccagcactttgggaggccaaggcaggaggatcaccygaggtcaggatttcaagaccagcctggccaacatgtcgaaatcccatctctactaaaaatacaaaaatcagctgggcatggtggtggttgcctgtaatcccagctactcgggaggctgaggcaggagaattgcttgaacctgggaggcggaggttgcagtgagctgagatggcaccactgcactccagcctgggcatcaagaatgaaactctgtctcaaaaaaaaaaaaaaaaagaaaaaaaatggagctatgaatcccaacctctcaagctgctatgagaactaaatgagaggagaaatgtgagagtatactgcat

SEQ ID NO: 801915 - DNA, 633 bp, Homo sapiens
agcagcagactatccacataaatttttgaggataaaattaatcttgttcatgccctaattgaagaggaccaatgattaacagcacaaacaatagtcaacactatggatacctcaattggttcagcttacacaattctaaccaaaaaattaaagttgagcaaactgaccattgatgggtgtcaaaatcgttgcacccagattagctgcaaacaagtgcagagttttcaatggaaattgtaaagctcagtggatcttgatccccctcgtttcttcaaagcatttctttgaagagtcttaactagagataaaacatggctttaccagcacaatcctgaagacaaagcacactcgaaacaatggctaccaagagggggaagtggtccagtcaaagcaaaggtggactggtcaagagcaaagttcatagcaacagttttttgagttgatcaasacattttgtgtgttggctttctggagggccaaagaacaattgcatctgcttgttatgagagtgttttgagaaagttagacaaagctttagcagaaaaacacacaggaaagcttcaccagcaagtccttctcaaccacaatatacctgctccttcctctcatcaaacaaataaaacaaaggcagtt

SEQ ID NO: 801916 - DNA, 489 bp, Homo sapiens
gaatacttgctttcaaacatttggcatatatatctaggagtgtaggtgataggtatttttggtaattctatgtttaactatttgaagaaccatcaaactgtttttctcatctactgcgtcatttttctattttctttttgacacagtctccttctgtcacccaggcgggagtgcagtctcagctgagtgcgatcttggctcgctgcacctccatctcctgggttcaagcgattctcatgcctcggcctccccagtagctgggactacaggcacttgccaccacgcccggctgattttttttttttttttttttttgkatttttagtagagaaggggtttcatcatgttggccaggctggtctccaactcctgacctcaagtgatctgcccacttcagcttcccaaagtgctgggattacaggcatgagccaccatgcctggcctaccacaccattttatatagtttcaccagggctgaaatacatgagg

SEQ ID NO: 801917 - DNA, 605 bp, Homo sapiens
  misc_feature 571, 572, 573, 574, 575, 576, 577, 578, 579, 580, 581, 582,583, 584, 585, 586, 587, 588, 589, 590, 591, 592, 593, 594,595, 596, 597, 598, 599, 600, 601, 602, 603, 604, 605: n = A,T,C or G
gaatgtcaggcctctgagcccaagccaagccatcgcatcccctgtgacttgcacgtatacgcccagatggcctgaagtaactgaagaatcacagaagaagtgagtatgccttgccccaccttaactgatgatgttccaccacaaaagaagtgtaaatggccggtccttgccttaagtgatgacattaccttgtgaaagtccttttcctggctcatcctggctcaaaaatcacccccactgagcaccttgcgacccccactcctgcccgccagagaacaacccccctttgactgtaattttcctttacctacccaaatcctataaaatggccccacccctatctcccttcactggctctcttttcggactcagcccgcctgcmcccaggtgaaataaacagccatgctgctcacacaaagcctgtttggtggtctcttcacacggacgcccatgaagaaaaggaatgacaaggaccactgtttatattctctgtaaagttttggttaatgaaaaaggatttatgaagttgttcttaagctgtaaccaatctggtgtgctttgtgtgtctttnnnnnnnnnnnnnnnnnnnnnnnnnnnnnnnnnnn

SEQ ID NO: 801918 - DNA, 485 bp, Homo sapiens
catgtatttcagccctggtgaaactatataaaatggtgtggtaggccaggcatggtggctcatgcctgtaatcccagcactttgggaagctgaagtgggcagatcacttgaggtcaggagttggagaccagcctggccaacatgatgaaaccccttctctactaaaaatmcaaaaaaaaaaaaaaaaaaaaatcagccgggcgtggtggcaagtgcctgtagtcccagctactggggaggccgaggcatgagaatcgcttgaacccaggagatggaggtgcagcgagccaagatcgcactcagctgagactgcactcccgcctgggtgacagaaggagactgtgtcaaaaagaaaatagaaaaatgacgcagtagatgagaaaaacagtttgatggttcttcaaatagttaaacatagaattaccaaaaatacctatcacctacactcctagatatatatgccaaatgtttgaaagcaagtattc

SEQ ID NO: 801919 - DNA, 613 bp, Homo sapiens
taaatcatggcaattcaccaggaaacgtttattgcatttttcttcaaatggctttatatcaggttcaattcctgaaaagtccaacctctataaaagagatagtatgaatcattttcaaaaaaagatgggattcatattgatttacatcaatatacaaaaaatggcaaaaatccaacagttctctgtccattcttcatttgaaccctttttatgttttcatctaacaagcttttatagactttttacactaaggttaaacagtgatggagaaatcctagagggagatgatgaaactcggatctaagggcaatggaaaagtcacaagtctgtactatggcctacaaagccctacatggcatgattccctgtctcttctcactgctctgacctcatctcctaccacaattgccctcttccctcttgcagccacactggcctccttggttattttgccagcacarcaaggacactcccatgccggggcttttgcacttgctactctgtcaggaaccctcttccctcagatagctgtatggcttgctccctcatttccaagtctctgatcagtcgacacttctgcagggagacctttcctaactccctatagaaaact

SEQ ID NO: 801920 - DNA, 613 bp, Homo sapiens
tatgttaatgtgaaattttatgaagacataataagcaatcttgttatcttctatatttataatagaaatgtatattggtagagaaagtgagaagggaggaggatggtaagaagacagtgctattaatcattttcartgactgatattaaatttaaaaaaagacagctttttataattcaaaagatttatgcttaatctagttccttgcttttctttctctccccatgctcacttttttcatatctttggatactggaagtataaaacagtacaagatttggtacacaaaaaggctacaactaagattgttatgctaaaagaaaaaaaaaaaaggcagtcctcaatcaagaaataggctcccttacagtattttgttagaagtcagatatatctgaaaatattaaaaaagaaataaataaaaaggcctttcactcttacagtggctcacgactgtaatctcagcactttaagaagctgaagcaggaggaccacctgagtccaggagtttgagaccagcctgggcaacatagagaccttattaatattattattagttgttttaaagtcagatataattggaaaatattttctcactgaaacaccacaataagtg

SEQ ID NO: 801921 - DNA, 638 bp, Homo sapiens
ttttacatacgtgatgaaagtctaagaagccagagcacatgaaggagagaacctcagagatttgtaacaagaagaagccgctaatacttttgtaagcaggtctcactgccagagcccacaggtcaggactgttcaatagcagctaggcccatgacatggggtttcccagtgtgagctgtgccaataggaggatgggctgtccagctgaacctggagccaaggaaataaaaggctttggaggagacaccgcctgtgacaataagagagaggaaaatagcctgatttctctctttctccagtctacaatcactctcttgccagtatctcccattgagtgaaccctgccagaaactaaaaaacatagtaggctgggaatgcaccttctggtgtgggggcracatagagcatagcaagagaggtgcagagaatagctttgagatcaaataggcaaaaatgagtgcataatatctttccgttaattttaggtagaagttttcaaaaaatatacgattattttcaattatgttcaaaaccttaacattggtataaatttgttatatccttttcacatagaatttctccatgagaagggtaattaattttgttgatattttacagtctaactttgttgtctaaat

SEQ ID NO: 801922 - DNA, 644 bp, Homo sapiens
cattataattggattattgagattctctgagagtctctggcttctgcccttgacccttgtagccaggtccattcttcccacaataagcagaatgaacattttagagttcaaatcagatcatcaacaactccaggccttctatttaattcataagaaaatttataattttgatagtagtcaacacagccttatagagtctggtcccctgatgcttttmtgactttacctcccactcctattttccactttactctgctctaggctggggtcctttagctgtgcttccaacaagtcaggcattctcttgcctcagttagtttgtatttgctatttcttccctgcaacttttttcccctaaagttctacataacttgttccctatcttccttaggttttcattaaatgacctaatgtattaaacagcaaaaatagcgcgactgttcccacactccctttatacatgttatctatttacttgattgattattgtctgtctctttccactagaagcaagatccaggaattttgtctatttggttgcttctatatattccaagggcctaaaaataatgaacaataaatgtaagcgtgtgttgagtggataaatgaaggtaaaaattaggaaaattttggagaaaggaata

SEQ ID NO: 801923 - DNA, 424 bp, Homo sapiens
agtttgctacttcttgctcactggatccaatcagcctaatgtcatcaatgtaatgggccagtgtgatatcctatgacagtgaacagtgatcaaggtctctctgaataagattatgacacaaagctagagagtttatataccactgaggtaggatagtaaagatatattgctggccttgccagctgaaggcaaattgcttctggtgggccttatggacaggaatggasaaaaaggcatttgccaagtcaattgctgcatactaggtaccaggagatgtgttaatttgctcaagcaatggaaccacatctggtacagcagctgcaattggattcaccacttggttaagctttacgataatccactgtcattctccaagatccatctgtcttctgcccaggccaaacgggagaattgaatggggatg

SEQ ID NO: 801924 - DNA, 623 bp, Homo sapiens
atcttccttattcttttttttttttttttttttacagctgtatggaatgccactgagctgatgttgcataatttatttaaccacttttctatgttcaggcatttaagttgtttccaatattttgcaattacaaactatgctgcaatgaataactttgkgcatatgtatttttgaattgtaaaaaaagttcatattcgaggatagtttcttagaactgggatttctgagttgaaaggttatgttagctgttgccaaattcctcctcaaagagttgtaccggtttgcattctcagtagcaatgagaatgcctatttccctaagactcatcaacagaattggcagttacacttttgggtgtctggtcctttgacacttagtcttttaaaatttccaattactctttatttttatagagttgctaatcacaaattatgcctgagatttgatattcttgtgaaagtatttcagatcaaattaaatgtcttttcagtggctatgattcaccatgattaaatccaacatgtttgaccaagttgttaattgactgttcttaattctggtggaagttctggagatcagcaacaattttggaataggttcagcagcctgggtaattctcatca

SEQ ID NO: 801925 - DNA, 623 bp, Homo sapiens
atcttccttattcttttttttttttttttttttacagctgtatggaatgccactgagctgatgttgcataatttatttaaccacttttctatgttcaggcatttaagttgtttccaatattttgcaattacaaactatgctgcaatgaataactttgtscatatgtatttttgaattgtaaaaaaagttcatattcgaggatagtttcttagaactgggatttctgagttgaaaggttatgttagctgttgccaaattcctcctcaaagagttgtaccggtttgcattctcagtagcaatgagaatgcctatttccctaagactcatcaacagaattggcagttacacttttgggtgtctggtcctttgacacttagtcttttaaaatttccaattactctttatttttatagagttgctaatcacaaattatgcctgagatttgatattcttgtgaaagtatttcagatcaaattaaatgtcttttcagtggctatgattcaccatgattaaatccaacatgtttgaccaagttgttaattgactgttcttaattctggtggaagttctggagatcagcaacaattttggaataggttcagcagcctgggtaattctcatca

SEQ ID NO: 801926 - DNA, 425 bp, Homo sapiens
gatagggactgagattctattactgaatgaaactcttataagggcttgggagtgcagatagggggagttctcaagaaattttacaagaaagtgttatgtattatgaagcatgggttattgtttgtttgtaagtaaaaaaaaataagagagagagagagattaagcaaaataaacattaagcaaggagaagctgctctaaccatttaaatgakacttttaaaatgaagattaacagcctttggcagactagaagaaaaaaaataaaagaaaaatgtcaagcagaaaacagttaccacagatttgatcagtatttactatcaactgtaagaccgttctaggcaggtggggtctatgggaaatacaaagataaatgagagagaatcccctaaaaccaataatattgctttatgtttaatttatcactt

SEQ ID NO: 801927 - DNA, 601 bp, Homo sapiens
ataatttggtttataaatccagtaaattctgcctctttaataagtctttatcttttttcttaatccttatagtcactaccttattttgaagcaccattatctctcagatggattactttaagtttctgaacccctctccctgcttttctaattcacattcaccaagtcaacagagtgttctttctaaactgcagatctaaacatatctctcctcttaaaccagggaagcatactctaaacctccagcttgatagtacactactttgacccactctgtacattaggcttattgaactgcctgcctatctctggtcctgcctggtatgtcccttaatattttttatttgtacaaatttaaggggtacgagtgcgattttgttatatggatatattgcatagtggcaaagtctgggcttttgcccctcgatttttaagagttcttcatatattagatagatctgtyctttctctgtgttatatgtcgtaaatattttctaccagtttgtcactcatgttttgattttgttatggtgcatttgttatgcacattcttaaaatgtaatcaaatttaatagacttttattgcctctggattttgagt

SEQ ID NO: 801928 - DNA, 650 bp, Homo sapiens
tgtcagggaaatggggtggtagggtagtggggtggtggggctcataaccatgggatatgtaaccagggaagccttgagaaagtccattaagagccagtggcagagcaatcttacaggtagttctcctggcagtggagacagacagctaggggacaccaaggaggcctagaaatagcattgtctcccttgctcagagccttcaaagaatctctgaaagtggttcgactacaattaaaattccaggtgcctttttctatttccttctttattctttccttcttctatcttctcagtgatgtttcaataggcacttacgggaactaatttttatataacttaaaatgtgctgtccttggaagatcwacatctgatcacaccattcatagcacttattaacaaattgcggtgattttacgtatttgacaggttacttgctgttgtgcatccccccattgccatcctcaccccactttcatagctgcctgcattatatatacccttggctgtaaaccttataaaggaagatactgtgatctgtattatatgttactgtatgtagcctcagaaacctgaacagtgtctggaacatagtaagtactcatcatatgatgtaaataaatgatataaataaatctccaaattatattttt

SEQ ID NO: 801929 - DNA, 627 bp, Homo sapiens
ctttataatattaaagatttttgttcatcaaaagatacaattaagagagcaaaaaggcaaaccaccaactgagagaagatattcatgaaattggcatatatacacatgcatatcctgttacaagtctataagaaaaagacagaaacttccattttaaaatagtcaaaatatttgttcagggccttcaataaagaaaatatttaaatggtcaataatcatgtaaaaagacgattaacatcattgctcattagagaaatgcaaactgaaaccacaatgaaatagcactagamacccactagaatagctcacattaaaaagggctgaaaatatcaaatgttggcaagaatgcagagcacctcaaattctcataccttgctagtgagactataaagtagttcaacaatgatatggtttggctgtgtcaccacccaaatctcatcttgaattacagctctcataatccccaggtgtcttgggaggtacccggtgggaggtaattgaatcatgagggcggttttttcctgtgctgttctctgatattaaataagtctcacaagatctgatggttttataaagggcagttcccctgcacatactctcttgcctgctgccatgtaagacgtgcct

SEQ ID NO: 801930 - DNA, 645 bp, Homo sapiens
tcaaatgcattttgtaaggccagtattacactgacaccaaaactagacaaagacacataaaaataaataagtaaataaataaataaactaactacagaccaatacttctgatatatatggatgcaaaaatcctcaacaaaatactagcaaacataattcgacaatacattaaaaacatcattaatcatgaccaactgggatttatcttcgtgatacacggatggtttaccatatgtaaatcaatcaacgtgatacatcaaatcagcagaatgaaggagaaaaaccatatgattatgtaaattgaggctgaaaaattatttgatagaatttaatatccattcatgattaaaaaaaaaccctcaaaagactgggactagaagtaacatacctcgactgtaccaacatggtggcgcccaggtcctaatttgagaaacgtgcatcttgactaattcggttttctgtggttacgagagaagagccmggtttatcgcgaggggcagtccccagggctgccgaatccagcagcgatggagagcggcaccgggccctgcggagaagagcgcccacgtgaagtccagcagacgacagtcactgagggggctgccaaaatcccagcgccaacgaggtcttttataaccttgtgca

SEQ ID NO: 801931 - DNA, 609 bp, Homo sapiens
tttaaaactgaacattgggatttcagaactaagcaaggtctatggcaatagtcttagaaaaaatgatagtctttgaaaaaacgtggccaggcgtggtggctcatgcctgtaatcctagcactttgggaggccgaggcgggcggaacacaaggtcaggagttcaaggcagcctggccaacgtagtggaaccccgtctctactgaaaaatacaaaaaattagccgggtgtggtggcaggtgcctataatcctagctactcggggggctgaggcaggagaattgcttgaacatgggtgtcggagtttgcagtgaccactgcacaccagcctgggcgacagtacgagactctgtctcaaaacaaaagcaaaaacaaaacaagcaaacaaaaaaacgtgcaacctttggggaagcackcaattagtgggaagagatattgcagtgagctggaaatgctgtagtagtaggttggatgagtcaacaaagtgtgggttataacagacctcgtttcaaatattatcaaatgtgaccttagggatacaccagttatgcaaataaaatttataaatacattaaacaagtcatttgtcacaaatgagtaggagtttcacca

SEQ ID NO: 801932 - DNA, 597 bp, Homo sapiens
ggctctgcctcccaggttcaagtgattctcccacctcagcctcctgagtagctgggattacaggtgactgccactgcgcctggctaatttttttttttttttttgagatggagtctcactctgtcacccaggctggagtgcagtggcgcaatctcggctcactgcaagctctgcctcctgggttcacgccattctcctgcctctgcctcctgagtagctgggactacaggcgcccgccaccacgcctggctaacttttttgtatttttttagtagacacagggtttcaccatgttagccaggatagtctcaatctcctgacctcgtgatccacccacctcaacctcccaaagtgctgggattacaggcgtgagccaccacgcccgaccaatttttttgtatttttagtagagatgagttgcactatgttggccaggctgatmttgaactcctggcctcaagtgatttacctgactcagcctcccaaagtgctgggattacaggcatgagccaccacatccagccagttttgtctatatttctaaacaatattttatttagcttcacatattttcacctttttatgaatatatactat

SEQ ID NO: 801933 - DNA, 638 bp, Homo sapiens
tcacctgccacaggtatgcttatttttaagtggttttagatattctttcctctgaaacctaacatgttaaactagtagaagtctttttacagctcgagcatctgtcatccgaaaagcttaggaccagaagtgtttggggtttcagattttggaatattcgtgttacacttactggttgagtatccctaatccaaaaatctgaaatggtccagtgagcatttcctttgagcatcatgtcagcgcttaaaaagtctctgatattggaacatttcagaattttggattagggatgttcaacctgtatcatctataatcattctacaaggtaaataacttgagaatcaaaaagttggtactcattaaccgggacaccacacaaagtcttgtcattaacttggaattttctacaacgaaatcctagttctattatttaagcagataatttttttagatttctcctytgtataatgagatagaacttaaagaggtttttgtggagattaaatgacattacagatgtgaagttcttaggacagtgcctgacatttcactttatagtaccggaattctggaaaggacacaataactgcagaaagtaaactttcttgcattttgaaatcgaatttacatacaagtat

SEQ ID NO: 801934 - DNA, 592 bp, Homo sapiens
gtatagtgataaaataattcatagttggctaggccttttcaattacacctttatcccttactctttcttccagccataaccatcaaaaagtgcttttaaaaaaaaaagggggctgggcatggtggctcacatctgtaatcccagcagtttgggaggccaagacaggaggttcactgaggcccaaagtttgagaccagcatgtctacgaaattttttttttttaattagctagatgtagtggtacatgcgtgtagtcccagctacttgggaggctgagtggaaggatcccttgagcaaaggagttcaaagctgtgccactgctctttagtctgggcaacagagtaagacctcatctcccaaaatttaaaaaaastgctaaaaaactgtctttgtgtttgcccatttccttctttcatctccatccctttctaattatgtatgtgtcattatctttacctaaaaagctctatccatttagccatctgattgggtaattcttcattcttacttcaaacatctcttctttctgaaaacccatccctgaatcataagctatttttctatgtgcttatgaagtaccctgtgcttatct

SEQ ID NO: 801935 - DNA, 612 bp, Homo sapiens
gttgccacacatgtaaaaaatacacacatacacgtgtgtgcataatctttataaaccatttaagagttggacatatgtccttttacccttaaatacttcaatgagtatttccaaataacaagaaaactacactagtaaaatactaccatcatctaacccagggtttccgttaytgacgtttggccaggtaatcttcgttgtacaggactgttctgtctaggactgcactataggttacttagtaacattccaggcttctacccacccctcaaccccagtttaagacagctccagacactgtcaaatagccacctccaccccctcggaggagcactgatttaatccatggtccatattcgagttcatcaattttcccaataacgtccttttacatcttttctacaaagcccaagattaaatatacattgcatttggttttcatgactttctattctttaatctgcagaattaatcatcctttgtgttctttgacctttttgaaaactggaggtcaattttgttgaaatgtcactcaatttgggcttccatgccacttcgtcataattagatcagtctaagcattgtggcgagtaacacagaagggaggcaggt

SEQ ID NO: 801936 - DNA, 627 bp, Homo sapiens
ctgtgcggagtcaaatatccaaaaagaaaataggccttagggagttttgttttttttatcaatcactgaaagggaagtcctgacccaatgaagcttgacttcctctagaatagtaatatgtatgcaagatgctgttggcataagatactttctaaaataacatggattgtgggagttttcctkttttataatgcaaagacaatttaagcaataaaatatgtggtggtgtcacatggaagcatacaatatacatgccatcattgaatactgcctatgcttctaaggtctgatacgaatgattatgaaatggagaaagaatgtcccccaaaagtatgctgggaagaattaagcaatttgtccactgcacttttcaaattggccacgatttttttaaagatgaaactcagtgctggtaagggtgtggaaggacatagactgctgattggagtacactattacaatggttcgaaaaagcaacttagaaccatatatcgctagacttagaagtgataacatatcgtgtccgggtaattccaatttcaagaatctatactaggaaacaattagcaatgctattaaagatttatataaaagaaagtttatgaaaatgttacttacaacagtcat

SEQ ID NO: 801937 - DNA, 610 bp, Homo sapiens
gtgatcaatttctcttccccacacttaagccacatccacagactttctattttcatcacaacactataaatatcacagtaacattttaagtacctccttaggttttctctcctcatctgctgtccctaaggagcaggtggggtgcaggagaaaagatggaaaccatgctcaaggagccccagcctcctctgctctcttcaataaatgctgatgtcctgcccataagcctggcactggattgggactggctcctggtcctatcaatttgaactttctacctaatactactatattatgtcaaatcttctaggcttcttttaaaactctggatgagcataggagctcagacacacatgtacgcagttgtgcatgcacacgtatgctcacatccactcacmatcacccctcactctcagcaggtgatgcctagatgacgtctcctgcttcgtacagacaataggaaccaccatctggaaagtccttcagagtcacacattcagagctacaatccacccacatccacatgcattctcttttcctttccctctcctgtaagaaagttcaatcaaagcaatctgaggcaagttctcttacctatttttggatgcca

SEQ ID NO: 801938 - DNA, 620 bp, Homo sapiens
catgtataggagtgaaaaataagcattggttgttataagccactgagatgttggggatatttgttaccacagtgtagcctagtgaaaactggcaaacatgtgagacatggagacagggctgcagaacacagagcaggtcccacatggggggttatggcacgaaacagccatgaatgtcattagttgtgaaaatgtctcaacatatatacatcctggaggactcttcacatataaatggggggacaagaaggatacagatacctcttggtagatttggggaggtttcttagagaaaatactctctttgaaatgaagggaggacatagcaggacaataagagggaacatgagggtgggtctggaagcaattaatatagtgaattattctaattcactgtatttggtgaatargagggcttgagtagatgttagatttgaagcccaacttcagagttagattgtgggaggggacagagggaggacaagaagtggctgagggtgttgatgaagagtgacaagtttgtttctttagtaacaccaggtcttccagatgtctcttttctgatctccacagagaatgcatctgaggccactttcaacttctctttagttatagtttag

SEQ ID NO: 801939 - DNA, 653 bp, Homo sapiens
atataaacagcagatgaagtcggagagatagtctaatacacttagatcatgttccaccacaatgatatatctatctggatttattagagatcgtatagtaatagcagcctttaaacgctgcttgacatctaggtaactagaagcctcatcaaacatgaaaatatcagctttctgtatgcaaatgacagcacaagcaaatctctgcaactctcctcctgaaagatcttcaacatttcgttctttcaggtggattaaatcaagctgctgacatacaactgcctgtgtctttgtttcatcttttcggtccaaaatagatcccactgtccccttgcaaatgaagagaagttaaaaagatgtgtatgtataaatatccaggaatgaagaaaaaaatgggagagtttgagctagcaattgtagctagagagtttacagattctgaaattatggtgatgctgkgggaaaatggaacgggtaaaacgacatttatcagaatgcttgctggaagacttaaacctgaggaaggaggagaagtaccagttctaaatgtcagttataagccacagaaaattagtcgcaaatcaactggaagtgttcgccagttactacatgaaaagataagagatgcttatactcacccacaatttgtgaccgat

SEQ ID NO: 801940 - DNA, 653 bp, Homo sapiens
atataaacagcagatgaagtcggagagatagtctaatacacttagatcatgttccaccacaatgatatatctatctggatttattagagatcgtatagtaatagcagcctttaaacgctgcttgacatctaggtaactagaagcctcatcaaacatgaaaatatcagctttctgtatgcaaatgacagcacaagcaaatctctgcaactctcctcctgaaagatcttcaacatttcgttctttcaggtggattaaatcaagctgctgacatacaactgcctgtgtctttgtttcatcttttcggtccaaaatagatcccactgtccccttgcaaatgaagagaagttaaaaagatgtgtatgtataaatatccaggaatgaagaaaaaaatgggagagtttgagctagcaattgtagctagagagtttacagattctgaaattatggtgatgctgtgggaaaatggaacrggtaaaacgacatttatcagaatgcttgctggaagacttaaacctgaggaaggaggagaagtaccagttctaaatgtcagttataagccacagaaaattagtcgcaaatcaactggaagtgttcgccagttactacatgaaaagataagagatgcttatactcacccacaatttgtgaccgat

SEQ ID NO: 801941 - DNA, 610 bp, Homo sapiens
ttagatcaaacagtaattagtttgacaaccacctgatcatcgctatgtgatagagtctatcagagataagaaaagatattctagacatgaaaaatttctcaacagaccaacagaatctagggctaaataaaatggctgttgttttaatccactaaattttgggctagtttgttatgctgcacaatctaactgatgcaaactggaaaagagacaacagatacctggagattagaaatgggacaaaatttgataggtctcataatctgcatagaccacaaacatagtctatggtaacaccccaaaatgatagtgcacatagtgaagcacagaagcagataatttctttatgtccaagggattatagaggtcttggacaatatagatgataaccaaacttacaaggaattaaattctagtcccccccaccccggcttttctagcattatgcatctgaatgctggtataaytctaggggtagtgtaaaatatccaattattagtgaaattgattttctcactactttggtggaatctttgatataaactcaaatatagatttgagtttattaaaaaatttttaacttctgattttgcacaaggattgcattgaa

SEQ ID NO: 801942 - DNA, 501 bp, Homo sapiens
cttgaggacatgttaccaactgctgtgattgagaattcaggggaccacactaacatcagaggaaactagtgcacactaacctcttgcataaagtgaaaggaaattgatctaccaccaagattcttataagtgatgtttttcccaatccctgaccatggccagtgtcatgaagttgtcattgcaattggactcagaacattaggggcctggagaaagaaatacagrattaggtcttctaagcctttgtttataccctgggtccttttaaaattcctatttcagactctgggcctgtggtccttcctaaaatgtacaactaaagcaattctctaagggttgaagtttttttagagggacattaaatggtttttcttcaaaaatttgactcaaagaaggaagggaccaaagatatacacatattctttggtaccgttacttgcacttagaatctgcatgaaaatgtttaaatagctaccccaggcttacagcttgtgggctgag

SEQ ID NO: 801943 - DNA, 520 bp, Homo sapiens
tgattttagcttagagaattatccaacatggtcatttaaaacgttccaataaagcacccccagaatgtctaaagaaaggcagattgctgaaaggctgtgctgaaaatgtactctcactaacttacatcacgtaccaatgattgtaattagaattagatggagaaagaactgtgtgggtctcaagcggctccaagaatcaaagtggaatttttttcttaatggtcacaagactactgcacacttacatgacatgttaagaaattaaagatttaaatcagtcttccatatctctaaatttggaaacagttgatagattcttcagctatagattcaataaaaataagatcasataaaagcagaaatgactgcacaatttatgcaatatttaatccatcctacaaaaagactctgcatggagcacaaacagaagctacatgacaagttttgctctgttcaatttttctctttaaactctactgtgtactgtttggtaaacgctattatttcagaagggagaatc

SEQ ID NO: 801944 - DNA, 640 bp, Homo sapiens
gcttgcccagagttggtcctcataaaacttcaactctccattaataggcccgctctcctgctgggcacattccctcctgggtgcccatggggcagggcatcaagcaatctttactgctagtcacattgcagacctatgaaaaatatcccccaggcccgccagaaaacactggctttcatattgagttacaccacagaaacttgctgtcaataaaagaccaaattccttgtgtctgccagacagtgagcatgcatcagcaaggaacccaggggactgacagaatcccttccaggtcccactgtggtgctcrgtgacatggcagtcatcagtagaaacttagctcaaggggcactggctgatccccagatgagaagcatctctccaaggctaggcaaattcccatcaggtccagtaaattgctggtacgatctccatcatctgcttttgaatatttcacagacctcaaggaaaacacaaaggaagtggtgacaatcagaagatgagcactagcattggttgtgggacctccagcaagcacgtgcatctacccatctaacttgtcaggtgcttaaataagatcatctctaaggctagagctggaaaagctctgatacattctgcagtgcattccagtgcttcc

SEQ ID NO: 801945 - DNA, 646 bp, Homo sapiens
aacccaagcagtgtggctccagaaagaataagctgtggggtggtaaggggataagatacagaatctataccagcaccatccaacagaactttctgggattatggaaatggtcgctatctgtgctgtccaatacaagagccactcatcacttgtgaaagtggttggcgagactatgcaactgaagttttaatttgattcaattttaattgatttaaattaaaatgtaactagccacatgtagccagtggctcctatactggatggcacagaactacactacagaaagatcccctgctgatgaccagctctgggactgtrtatgacaagaagtaggccaggtgcggtggctcatgcctataatcccagcactttgggaggccgagacgggcttgagcccaggagttcgagagcaacctgggcaacatagcaaaaccccatctctacaaaaaacacaaaaattagctgggcatggtggtacacacctgtgatcccagcaactcaggaggctgacatggggggatggcttgggcctgggtggttgaagccgcagtgggcaatgatcacaccaactgtacttcagcttgggcaacagagcaagaccctatcgcaaaaaaaagtaggatccttgatatctgcccccttggat

SEQ ID NO: 801946 - DNA, 650 bp, Homo sapiens
cataatataaacatgaccaggggtttatctctttgatgctagccaaaaagagctatgttttttctttacttttatatcattttagtctaagtttatcgtatttttctggttatagatagaatatataaacattgttgaaaaaaataaaaagtgtaaaaaatacattgcagaaattgcaaccccaattgtaacaaattttaatggtttggtctatttttctagtttcttgtctatgtttgcatgaatgcatatgtgtaatatctagatatttacttgaaaagttgaatttacaccttaaatactttttgtctccagtttcactgaacattataaaatgagatattaacatgtcactaaacactttttgagcataagattttaaatgactacataatattctttaacaaattcaacagtattgagcatgtaggttgtttttaattttttgttcttgtaagtgataacagtgataagaattttgatacatmaattttggaacctatctctgattattttctttgatagattctggaattggaattgatgagtaaaatataaaccttttaaaagttcatgatatgtttttcccttactattttgaataaatattccagtgtaaattgcattaactcccaccactggtggaaaag

SEQ ID NO: 801947 - DNA, 575 bp, Homo sapiens
gccctctttttttgcctgctgccatccatgtaagatgtgagttgctcctccttgccttccaccattattgtagggcctctccagccatgtggaactgtaagtccaataagcctctttctgttgttgtaaattgcccagtctcaggtaggtctttatcagcagcataaaaatggactaatacagtaaattggtaccagtagagtggggcaccgctgaaaagayacccaaaaatatggaagaaactttggaactgggtaacaggcagaggctggaacagtttggatggagatgaggaacttgttgggaactggagcaaaggtgactcttgttatgttttagcaaagagactggcagcattttgcccctgccctagagatttgtagaactttgaacttgagagagatgatttagggcatctggcagaagaaatttccaagcagaaaagcattcaagaggtgacttgggtgctgttaaatgcattcggtttcaaaagggaaacaaggcataaaagtttggaaaatttgcagcctgactatgcaatagaaaagaaaatcctattttcagaggagaaattc

SEQ ID NO: 801948 - DNA, 548 bp, Homo sapiens
aaagattgccagcaaaccaccagaagctaggtgagaggcatggaacaaattgttactcagtcatcagaaggaacgaaccctgctgacaccctaatcacagacttctagccatcaaaactatgagacaaatttctgttgtttaagccatctagtttgtggtcctttgttacggcatccataggaaattaatacagcatttattggtgttgatatcaccaatccactgtgaaaaccaccagatacctctttaagtgaccatacttcttaaaagtaagtgttacactcattgaacaaatacaagtcaatggcctytatgtgccagccactcaggacagagcagtaagaccaacaatgtccctgccctcatataggttatagtgcagtcaggataactgacaccaaacccaaaattatacaatgataaaatacaattgcattaagaacaaaaaatgatatatttcccttcctctctaaacagatggtaaacacagttaaccatgcatggagcctcatggtatagttggatgcctttcatttttatttttgtt

SEQ ID NO: 801949 - DNA, 588 bp, Homo sapiens
cttattcattttctctgggttttctagtttatgactatatagctgtttgtaattgtctctgatgaacttttgtatttctattgcatcacttgtaatgtctcattttgatttctgattatgtttatatggattttctattttcttgcttagtctagctagttgtttatcaaatttttaaattttttttaaaaaaccaactgtttgttttattgattctttgtatttttttgtccccatttcatttagttctcttttgatttttgttatttcttttatactgctaactccaggtttgmtttgttcttctttttcctagtttcttggtgtttttgtccattttacattgggtctttctataattgtattggaggaattctttatacattctggattccagtcctttctcagatatatgttttgcaaatatttctcctagtctgtagtttaaatattttcttaatgatgccttttgatgaaaagtttttaatttagataatgtctaatttttttttttcagcacaatgccgctatgggtaaggaaggaaggggcaggcagcataaggaagcaacatgttgctagcatagaca

SEQ ID NO: 801950 - DNA, 635 bp, Homo sapiens
tttcaaccttggtgaatctgacaattatgtgtcttggggttgctcttctcgaggagtatctttgtggtgttctctgtatttcctgaatttgaatgttggcctgccttgctaggttgtggaagttctcctagatcatatcctgaagagtgttttccaacttggttccattctccccatcactttcaggtacaccaatcaaatatagatttggtcttttcacatagtcccatatttcttggaggctttgttgatttatttttactcttttttctctatrcttctcttctctctttatttcattaatttgatcttcaatcactgatacccttccttccacttgatcaaatcggctcttgaagcttgtgtgtatatcacgtagttcttgtgccatggttttcagctccatcatgtcatttaaggtcttatctacactgtttattctagttagccatttgtttaatattttttcgaggtttttagcttccttgcaatgggtttgaacatcctcctttagctcggagaagtttcttagtaccaagcttctgaagcctacttctgtcagctcatcaaagtcattctccttccagctttgttccactgttggtgagaagctgcaatcctttagaggagaagag

SEQ ID NO: 801951 - DNA, 524 bp, Homo sapiens
agataagacctcagcagacaaagtaaggcaccaaggacaagtactggaagaacagagatatgtgacctttcagatagtaaactcaaaatagctgttttgatgaaattcaaagaaattcaagataatagagaaggaattcagaattttatgagataaatttaacaaggagattgaaataattaaaagaatcaagaaaaaattctggagttgaaaaatgccattgacatactytagaatgcatcagtctcttaatagcagaattgatcaagcagaagaattaatgagcttgaaaataggctatttgaaaacacacagtaagaggagacaaaaaaaggaataacaaacagtgaaatacacctacaagacctagagaatagtctcaaaagggcaaatttaagaattattttccttaaagagaaggaagataaataggggtagaaagtttattaaaagggatactagcagagaactttagaaacctagagaaaggtattaatatctaagcacaagaacattataaacca

SEQ ID NO: 801952 - DNA, 603 bp, Homo sapiens
cacttttccatattcaaaaataatatgactgcacagttaacagaacttttgttttaaattttatttctattacggcagcattctccattcaaactgtgttccatggatcaagtgtctggcatgatattgttattttctttttctttagagacagggtcttgctctgttacccaggctggagtgcaaagaagtggtcatagctcactgcagcctccaactcatgggcttaagcgatcttcccaaattagcctccygagtagttgggactacaggcatgcgccaccatgcctgacctttttttttggcgggggaggggagagaaagggtctcactatgtcgcccaggcttgtctgggactcctggccttaagcaaccctcctgcctcggcctcccaaagccttgggattacagacgtgatggctcacgcctggcctggcaagatattattaatataaaaccactctaccacatatttacaaacattcaaagagtcaatgatcaaataaatttggaaaagagagcataatctatctccatctaggagagtcacatttcatattagcacatgaaatactatgataacttttgtagcaaagaaatcta

SEQ ID NO: 801953 - DNA, 603 bp, Homo sapiens
cacttttccatattcaaaaataatatgactgcacagttaacagaacttttgttttaaattttatttctattacggcagcattctccattcaaactgtgttccatggatcaagtgtctggcatgatattgttattttctttttctttagagacagggtcttgctctgttacccaggctggagtgcaaagaagtggtcatagctcactgcagcctccaactcatgggcttaagcgatcttcccaaattagcctcccgagtagttgggactacaggcatgcgccaccatgcctgacctttttttttggcgggggaggggagagaaagggtctcactatgtcgcccaggcttgtctgggactcctggccttaagcaaccctcctgcctcggcctcccaaagccttgggattacagacgtgatggctcacgcctggcctggcaagatattattaatakaaaaccactctaccacatatttacaaacattcaaagagtcaatgatcaaataaatttggaaaagagagcataatctatctccatctaggagagtcacatttcatattagcacatgaaatactatgataacttttgtagcaaagaaatcta

SEQ ID NO: 801954 - DNA, 647 bp, Homo sapiens
agagacagtgacagagacagatgaccctatgtcttagtccattttctattgctatatctgaataccacagactaggtaattcataaagaaaaaaaatttatttcttaaagttctagaggctggtaagtcctaagccaaggggccatacctggtgagagcctttactgtgtcataacatgatggaagacatcatatggtgagagggcaagagcaaaaacaaaaccggctttcataacagactcattctcatgatttaaaaaaaaactcactcccatgataccccatgagtcacttgcatgagtcacttaatccatgaatagactttacccattcatgagagcagaactctcatgaaccaaycatcttttttttctttttttgagacagagtcttgctctgtcacccaggctggagtgcagtgacgtgatctcagctcactacaacctccacctcccagattcaagctattctcctgcctcagcttcccgagtcattgggactacaggcacacccactgtgcatggctaatttttgtattttagtagagatggggttttgccatgttggcaaggctggtcttgaactcctgacctcaagagatccgcccaccttggcctcccaaggtgctgggattacaggcatgagcc

SEQ ID NO: 801955 - DNA, 573 bp, Homo sapiens
gcatttaacttatttttaaggcagcctaaacaatactgaatgaatacttgtaatgtataagaacatgatggggagtatacacaccaatttcatgatcattgatggctctgggtagggatggaggggaattggtttgaggaagactacaaaggaacttgaactctayctgtaatattttatttattttaaagaaaagagacaaattgtaaagtatgatagtgttgatatttattagttctggacaatggataaaagtacttgtggtttatagttctttctagttttctatatattttaatagtttttttttgagacagagtcttgttctgtcaccaggctggagtgcaatagagcgatctcagctcactgcaacctccgcctcctgagttcaaacgattctcttgcctcagccccctgagtagctggggctacaggcgcgcgccaccatgcccagctaatttttgtatttttagtagagacacggtttcaccatgttggccaggatggtctcagtctcttgacctcgtgatccatccgcctcccaaagtgctgggattacaggtgtgagctacc

SEQ ID NO: 801956 - DNA, 573 bp, Homo sapiens
gcatttaacttatttttaaggcagcctaaacaatactgaatgaatacttgtaatgtataagaacatgatggggagtatacacaccaatttcatgatcattgatggctctgggtagggatggaggggaattggtttgaggaagactacaaaggaacttgaactctatctgtaatattttatttattttaaagaaaagagacaaattgtaaagtatgatagtgttgatatttattagttctggacartggataaaagtacttgtggtttatagttctttctagttttctatatattttaatagtttttttttgagacagagtcttgttctgtcaccaggctggagtgcaatagagcgatctcagctcactgcaacctccgcctcctgagttcaaacgattctcttgcctcagccccctgagtagctggggctacaggcgcgcgccaccatgcccagctaatttttgtatttttagtagagacacggtttcaccatgttggccaggatggtctcagtctcttgacctcgtgatccatccgcctcccaaagtgctgggattacaggtgtgagctacc

SEQ ID NO: 801957 - DNA, 635 bp, Homo sapiens
tttcggaggtctgtgctaggagccacaggcagacaccaaagatagatttcttaccctgccacacctgggaggtggtagcgttgacatcaagggtgggaggagattagcaagctgggcatgaaggaaccagtgggaaaccaggttagaaaggggggtaaaggtcagatcatgatgggttttgagttctaggctaaagtgtttatagtgttagctcgtgacacatccaggatgtggaaacatgagcagaactgagccttggaaaatgacctcagagcctgtagcagggctgtgatctggacctggaccagtgtggtggcrggcaggaaagaggctgcgtgcaggaggccttggagggcagggctgggacatggtgctggcccaggtgagctcacccatctcagcatggtgtgcctccaacttggggtgcactttgtagctgcttactgagggtaaacagttacacttattttatttttttaaaattttaatttttttttttttttttttttgcagagacagggtctcactctattgcccaggctggagtgcagtggtgcgatcatagctaactgcagcctccaactcctgggttcaagcagtcctcccacctcagtctcccaggtagctaggtgcat

SEQ ID NO: 801958 - DNA, 610 bp, Homo sapiens
aattttcccccacatatttttggggtgtataaagttttatttccaccaaactaaatagctacaattacctttaataaataacygctgttttaacaagatatatgctctttaacatttttttcataagtttatgtttcttttacatacttttaaaaatgtacgtgaaaaatgagtgtgatttttggaagtcttagaacaaattaaaatatttatcactaaaataaatgatactagccctttcactcaaactgtttctcttttaactggagcaaattaaataggtgggtacaggtgcacaaagaaggttttgcccaacatccttatgatggaagagctccgaccgtgccatgtgagcacgaacgcagctgtccatgaaaacagataaagggattcacgtatgcatcagccacaagtgtgggcaccactgtaggcaccaaaacttcaattgggaggactcggaagttgagaatgtatttaactattgtcctctaggaagcaagttagtctttcagctgcagtgtttggaatgaactccgccttgctcagtcgctgagtacaaaataagaatataaaatgtcaatatgataccagtaaaacaaaaggaatctaa

SEQ ID NO: 801959 - DNA, 610 bp, Homo sapiens
aattttcccccacatatttttggggtgtataaagttttatttccaccaaactaaatagctacaattacctttaataaataactgctgttttaacaagatatatgctctttaacatttttttcataagtttatgtttcttttacatacttttaaaaatgtacgtgaaaaatgagtgtgatttttggaagtcttagaacaaattaaaatatttatcactaaaataaatgatactagccctttcactcaaactgtttctcttttaactggagcaaattaaataggtgggtacaggtgcacaaagaaggttttgcccaacatccttatgatggaagagctccgaccrtgccatgtgagcacgaacgcagctgtccatgaaaacagataaagggattcacgtatgcatcagccacaagtgtgggcaccactgtaggcaccaaaacttcaattgggaggactcggaagttgagaatgtatttaactattgtcctctaggaagcaagttagtctttcagctgcagtgtttggaatgaactccgccttgctcagtcgctgagtacaaaataagaatataaaatgtcaatatgataccagtaaaacaaaaggaatctaa

SEQ ID NO: 801960 - DNA, 633 bp, Homo sapiens
attcaaaccctggacatttgtctctggagtccatgctcttacatgctgtactgcattttcccaatattaaaaatgatatggtctgatgatttgcattatttaaatgaacctgggttttagatcaatgttgattgattagtttctttgaatagttagctctcctttttgttggtttattacaatgagttagaaaaactctgaaggacaggaagtagagcaaggaaccatcaaatattcattcaacacccacggaaaacccatttgggaaaataaaatgtaagtaaatggggaaaccagagctcaacttgctaaaattcagtttgtgagcatttgcaaatccctgcataaaataatgaacacattttccacaaagggcacagcctggattcagaaacattgcttgggtcacaaaaaacagctgagttcaagaaaacaaacaaacaaacaaacaaaaccaaaraaaaagtgttcttcagtgcgttctgccttggcctgttgctctgtaatgatagttgctatagaaatgcccaggtgaggtgttctcgtgaacacaatgggtggtaccttcagcattatctttattacaagtttagggcttctgtcaaaatcaagtctccataaaaaggaaatcaa

SEQ ID NO: 801961 - DNA, 573 bp, Homo sapiens; identical to SEQ ID NO: 801478

SEQ ID NO: 801962 - DNA, 628 bp, Homo sapiens
aaaaaaagaaatatattttttactgtggtaaaacatacatcacaaaatttatcattttgaccatttaagtgtagatttctgtggcattaagcacattcatactgtcatgtaatcattaccatcatctatctctagaacgtttttaacttccccaaatgaaactccatacccattaaacattaactcctcattgtctgctcagctcctagaaactgccattttattttctgtctctatgaatttgtttactctagrtacctcatagaagaggaatcatatgatatttgtttttttttgtgactggcttattttacttagagtaatctcttcaaggttcattcatatggcagcatgtgtcagaattgccttttttatggctgaataatattccattatatgcttataccacattttgtttatcaggtctatccattgatggatatttgggttgcttctgacttttgtctgtcgttaataatgttgctatgaacatgggtgtacaaatatctcttcgagatcttgttttgaaatttttggatatgtacccagaattggaattgctgtgtcatacagtaattttatttttaactttttgaggaactgatatactgtcttccacagtggctgc

SEQ ID NO: 801963 - DNA, 540 bp, Homo sapiens
acgttttcctactatggtgctgattagttttttggtaagattcttgatcacagaagatatcaaatacacagactgaagttcaacacttattttgaagctagaaaataaaaatatatatacattcttggaataatctattgcatacatacagtatgaaaaaaatgaagtaacttcataaaacagtatccatttgtaaaattcactagagaattccagtgtatttccatggaactatgcattgtcaagtttttaattagtcacactaatttccycctttggtgttaactatcaaagcatactcaaatcttcctcattggcattacacattggagttgctcaataaatgtatgttggacttcagtgtggtgttctgctaagtacttaaaattcaatagggaaaaataatcacaagaatttctgttaggagtttgagataatttggtggataattatgtgccttcctattactgctggagggtaacagctgtcatgtatgacccaagtgctgttgtgaagtgtggttttgtgcattcttcaaag

SEQ ID NO: 801964 - DNA, 496 bp, Homo sapiens
ggataattatgtgccttcctattactgctggagggtaacagctgtcatgtatgacccaagtgctgttgtgaagtgtggttttgtgcattcttcaaagataactaagcatctttcatgtgttacgacttgtgtagtcctgagtgattaatcactttgatccttgaatcaaatgggctcttaggtgaaagaaatataaacacttatgcaatgggacaagggctataattcagttatctataattcacttattaagaatctactatgcactgggtactgggaagggggrtaggccctggggaaacatagattaatccccttgagtatgggccaggctttgtgactcgtttctaataaatggaagcttcatggatgaggctgctgacttccagttcaggtcataaaagacatcctgctttcacctggttctctaacccctcttcctgccactgttctttaaggaagccaaacagccacatggaaagaccacatttaggtg

SEQ ID NO: 801965 - DNA, 652 bp, Homo sapiens
  misc_feature 33: n = A,T,C or G
atatgaaaattttggtgatatctgtattgcaanatctttgttcattctgtggcttgtcttatcactgccttaaaaatatgatttgatggactctcattcttaattacagtagcatccaatgtatctttttttctttatggttagtgcttctagattgcatcaaggtcataaagacattcttactaagttttaacctaggaacttcattgctttacctatcgtatttcagtctaccatctgtccatctgaaattaatttctatttccagtgaaaacaaaaattaggaatgaaactttattttgttcaatatgtatatccacttggctcaacatcgtttattaaaatcatcctttcygtgaccccactgcactccaacaatcaagtgaccttgaatatgtaggtctgtttctggaccctctatctgtttcattggtctgtgtgtctattcttgcacaagtaccacactgaaactgcttaattacaacatttcttaacatctagtagtgtataagctagtaaggtttgtttttcctctgtaatattgtcttagatttttgcatttcttagattttgcatttctgatataaattatagagacatcttgttactttctacatgtacacacttacacacacatacacatacacacaaa

SEQ ID NO: 801966 - DNA, 591 bp, Homo sapiens
aggccctatggcaaaagtatagtaccatagatggattaaatcagattagccctactgaaggcacagagagactgacttagattgtgtaggcctgtaacaggccaaataccagtgctgcagggaaacttgaggggcatgcagtgagagacagcaatcacagagctggagctatgctgggagtgttggtgcagcttagggatataagttctactctggggaaagaacccttgagagagaagaaatggttgggttccaaggactatggcttagttacatgatgagcaggcaggacagtaactcctcctgcctcmcctcactcctcctttctctgtgaggaaaaagcagctgacagggcaaaggacaacagtgagccaaagagctatggagctgctgtggtcaagggtgtctgtgctttttatggaatatggtgcttatctccatgggtgtttgattcttcattctgaaaattattttttgcacttcttctgggcctagtgcctaggtttatcattagttcagagttacctttttgggtgggtttatcgtttatgtataccacattccacagaattatccctgagagatttgtct

SEQ ID NO: 801967 - DNA, 547 bp, Homo sapiens
ggaagtttttgtgtgttttgtaagtgtttttttgtaagatgtgatcaatgattcaaatcacttagtataacattttattaaaaaaataattttgcaaattacttggcaattaaaatggttatcatacatcccttctttgtaattcatacagaccaatacctaaaagtataaagagctaagccattgttgatgtacagctacttaatagaatattaccggtaggatgattatgatttttactcaaaaaatgkcaagagattccaaccaactaatcgaatgaagaatgagtttccagaaaacacatttctcagtactgagaataaagcagaagaggaaaactaagtaagacactacacagccaagcactggcccccaaactctagaatcttactagcagggtctggaatttttagttttaaattgatggtaaagatgaagacctgtaaggaatatgtacattcgcatttttattcctgatattttaattttaataaatctctttgccattaaaagtttacgtttgaacctttttttttcctaaaaagtg

SEQ ID NO: 801968 - DNA, 640 bp, Homo sapiens
atgttccaattcaccagctagactttttgataggagtcctagacagtcaaattctatgacctgatattccccatatattctggcataataatatgagcaggtgttcccctctctgaccagagttgaggctgctgataccctgttttcagctgaaagttgctccaacttctgcctctttgaattgtgctccctttttaaaggtctttcttctcttcatcctttctgttttgtgcctataaactcaccttctgcccagctmtttttttctttatgtttcatgttttaattttgaagataattttaattataaaattatattaataatgaataatgtaaataagatattttaaatacagaaaaaatttaatatctccagcaatcacacctcttagagaccaccattactaatattttgctatatccccccaatgattcatatatatatatatacttttttttcattaccaaactgccattactttctacattctgctttatggctttcttcttacttaagattatatcataagtattttatcatggcaataactacagttaaggacatgtctttatgttagcatttggttgcaattctttttcaatcatatagctataccagaagttatttaatttatgttct

SEQ ID NO: 801969 - DNA, 622 bp, Homo sapiens
agaagccttgagaagggaggtaaaggcagatttgactttagattatcaagtatatttttaaacaaagaaatctcattttaaatgattttggttttatagtcagttccaatgtcaaaaagttttttaatactttggaaaatggttaaaatactatatagcagacaaaatcctctgaaggtactttcaagagaaagagagagagagagatctctcccagaatattctgagcaacagtggcatcagtatacgaggtgtaaattagtcccttgaattagtctttgaaatggatcagttatggtatgcttgtttgaacaaaatagggaataatcagcttgttagccaaaatatttgtagattattgctgaagtcwaccatctcatctatccctcaatactgtcagtttgtactcagagatagctgcatgtgaaactggcacataggttgtagcaggttgcagcagtactcttcgcaggcagtgggggtgtgagtgtgtgcacactctgatgaggcctgagtgatttttgcccttttggaaatgctgactagactgtcatcctgcagctgagtatgagcctcctgatatgatgaaaagcaactaacgaataggctgatagatccatgg

SEQ ID NO: 801970 - DNA, 576 bp, Homo sapiens
aagcacaatgggaataattggatcccaaggtgacaggggccaaatggtggcactcaactatcaaaggcaaggtgggcatagctacgtaatggacagcagagacaaagcagcagtcagaatagtctgactcatgtagagctctggcactggcttattaatcacagtgttcctagaagtgaaagtgataggaagccttctgcattcttacttagtttgtataggcagaaaactttcaggtcgagtggacaaaaaactaatttaaattataaaaatagagaatcactactgggggaaccagccctcaatatttcaacrtaggttctcttctattttccctaagtgttggccggtctgagaaataaagggaaagagtacaaaacagagaaattttaaagctgggtgtccgggggagacatcacatgtcagcaggttccgtgacgccccatgagctgtaaaaccagcaagtttttattagcaattttcaaagaggagggagtatacaaatagggtgtgggtcacagagatcacatgcttcaagagcaacaaaatatcacaaggcaaatgggcagggcaagg

SEQ ID NO: 801971 - DNA, 604 bp, Homo sapiens
tctctgttcataatatgtcctgaaccatttgagaataagttgaaacattaacccctaatttcttcagtgcatatttcctaagaacaaggacatcgtgctaccttgccactgtaccataacctaaatcaggaaatcaacactgatactgttattagaagaacttcagccaaattaaatttaaaggaggttaattgagcaatcaacgattcgtgaatcgggcagcccccagaatcagcagattcagacagactccagggatgccctgtggtcagaacaaatttatagacaaaaaaagggaagtgrcatacagaaattggcagtgaggtacagaaatagctggactggttacatattggcatttgtcttacttgaacacagtctgaacacttagcagtctgtgagtggttgaagtacgtcgtctgggattggccaagactcagctgttgttacaggtgcgtactcctagttaggttatcaatcttgtccgcctattgagctaggttacagttcgtccacaaggactcaaatatagaagtacagagtgcttctcaggccatatttagtttaagaatccaatacctttatctaattggtagaccttatt

SEQ ID NO: 801972 - DNA, 604 bp, Homo sapiens
tctctgttcataatatgtcctgaaccatttgagaataagttgaaacattaacccctaatttcttcagtgcatatttcctaagaacaaggacatcgtgctaccttgccactgtaccataacctaaatcaggaaatcaacactgatactgttattagaagaacttcagccaaattaaatttaaaggaggttaattgagcaatcaacgattcgtgaatcgggcagcccccagaatcagcagattcagacagactccagggatgccctgtggtcagaacaaatttatagacaaaaaaagggaagtggcatacagaaattggcagtgaggtacagaaatagctggactggttacatattggcatttgtcttacttgaacacagtctgaacacttagcagtctgtgagtggttgaagtacgtcstctgggattggccaagactcagctgttgttacaggtgcgtactcctagttaggttatcaatcttgtccgcctattgagctaggttacagttcgtccacaaggactcaaatatagaagtacagagtgcttctcaggccatatttagtttaagaatccaatacctttatctaattggtagaccttatt

SEQ ID NO: 801973 - DNA, 667 bp, Homo sapiens
cggtcaaagcccagatgacagctgtgtcacagaaaaggaaaggtaagggtttattttgtgctactatattaggatcatgctcttaaaataatgagttttgcaacttcacacttttgagtcatactgccattttttaaaggtaccaaaaggctcctccaaggtaatgttacgaacctcaggtgtcaggataggaaatgtagcctggccgattgcagatagyaatttgttttaatcttgtgatttataatacgtagtttttgcttcattgtgaccgaatgcaataggtcgtgaacattatttccatttaacatctaaggttacaaatgtgaataaagtttaagtcgcatggacgaacagaataaaaattagaactgtcatccttaacctttaattttacaagtggtaccacctctactacttctacggacatcacaaacatttgttcttgcattttaaagaccttatgcaaattaaggctaggcacggtggctcatgcctgtaattccagcactttgggtggccgaggggggtggatcatgagatcaggagttcgagaccggcctggccaacatggtgaaaccccatctctactacagtgaccggatggtcgctcttcttgcacattaaattttcataggtagagtggggttcaggagtcgcttgcttc

SEQ ID NO: 801974 - DNA, 571 bp, Homo sapiens
atactgccattttttaaaggtaccaaaaggctcctccaaggtaatgttacgaacctcaggtgtcaggataggaaatgtagcctggccgattgcagatagtaatttgttttaatcttgtgatttataatacgtagtttttgcttcattgtgaccgaatgcaataggtcgtgaacattatttccatttaacatctaaggttacaaatgtgaataaagtttaagtcgcatggacgaacagaataaaaattagaactgtcatccttaacctttaattttacaagtggtaccacctctactacttctacggacatcacaaacatttgttcttgcattttaaagaccttatgcaaattaaggctaggcacggtggctcatgcctgtaattccagcactttgggtggccgaggggggyggatcatgagatcaggagttcgagaccggcctggccaacatggtgaaaccccatctctactacagtgaccggatggtcgctcttcttgcacattaaattttcataggtagagtggggttcaggagtcgcttgcttcagtgctaaaataatgtcacatgca

SEQ ID NO: 801975 - DNA, 601 bp, Homo sapiens
ggtctctttgctgactctctgtccactatttcagttgagaatgtatttagctgtaggtaacagaaaaccaaatttatagtgacttaaacaaatacggggtcatttttctcacctaacaagttcagcagtaggcaagagtcaaagggtcaatgatgttgacaagtacccrgaccaggttttttctgtcctcactctgccagccttagcctgtcccgtcatggctgtgaggcctcctgcactctcaggtgtcctctttacatttcaggcagggagaagggcagagagctgcgccagctgactgtgtccctttttatcagcaaagacaaactttctccgaaggtctcccacctctccctcactggccagaccagggtcttgcggcccatcctcaacagagaccaggaacaggagggaaactgctgggtcagccccaaatcagcatctgccccacctgcactttctgatccatcttccatgtaacagctaggataattctttttttaaagttttatttatttatttttgagacagtcttgttctgtcactcaggttggagtacagcatacttcactgtaacttcaaacttttgggctcaaacagt

SEQ ID NO: 801976 - DNA, 618 bp, Homo sapiens
ggatggtgctaaaccattcatgagaaaccctcccccgtgatccaattacctcccacctggcccacctccaacactggggattacaatttaacatgatatttgagtggggacacagatccaaaaatatcattccacccctggacccttcccaatttcatgtccttctcatgttgcaaaatacaatcatgccttcccaacagtccctcaaagtcttaactcctttcagcattagtcaaaagtccaaagtctatctgagacaaagctagtcccttcgacctatgagcrtgtaaaatcaaaaacagattggttacttccaagatacaatgaaagtacaggcatttggtaaatattcctgtttgaaaagggagaaattggtcaaaagaaaggggctgcaggccccacacaagtctgaaaccgggcagggcagttattcaatcttaaaactccaaaatcatctcctttgactccatgtctcacattcagggcacactgatgcaagaagtgggctcccaaagccttgagcagctctgcccctaaggctttgcagggttcagcccctatagttgctctcatgggctggcattgagtgactggaactttttgaggttgagggtgcaa

SEQ ID NO: 801977 - DNA, 487 bp, Homo sapiens
ttttctagatataagacatgccatttgcaatcacaaatactttgaattcctctcttcctagctgaatgactttctttctttctcttacctattgccctggccacagtttccaatactatgatgaatagaagtggtgagacagggcacccttttcttttgctggttttcaaggagaatgcttccagctttcgcccatttaatatgacattggctgtacatctgtcatatatagctctcattattttgaagtatgttccttcaatatctagtttattgagagtttttaacatraagggatgttgaattttatcaatagccttttctgcatatattgaggtaactatgtttttttttaaaagtctttagttctgtttatgtgatgaatcacatttactgattacatatattgaaccaaccttggatcccagaggtgaagtctacttgtttgtggtggataagctttgagatgtgccactagatgcatttg

SEQ ID NO: 801978 - DNA, 609 bp, Homo sapiens
tgttggccaggctggtctcgaactcctgacctcaagcgatctgcctcccttggcctcctaaagtgccaggattacaggcatgagccaccacgccaggccatctcactgtttttttgtttaattgctttaataaattctaagagaagactgatgaaatgttcaactrtaattgtccatttatctatttattgctcctcttagttatatcagattttgtttcacttatttcgagactgtgactgggtgcatatacattcgagattattatgtctttttggtgaattgatcctgtattattatgcaatattcttatttatctttgttattatttattgtttatattttttgtcaaatattatattgctattagggttttattagtatcagtgttgcatagaatacattttcccatttttttaaatgttagtctctatgtatatttatatttaaaatgttcctctgcagacattatataattgaggcttgttttcttcttcactctgacagtttcgtctttttatttggactatttgaatcaatcatgttaactttaatttttttggctttctaattatttttatttcaacttttattttagatactggggag

SEQ ID NO: 801979 - DNA, 636 bp, Homo sapiens
ggatcctggccagctttctccatctccaaagctagcaacactaggtcgagttcttatacggccatctctctggatctttccagcagcaagaggctttctactttttagaactcatgaaattaaattgagtctattcagataattcagtataatcttttcatctcaaaattcttaacctttattccttctgcaaaaactccttttccatggaggcacaggtgctggagattaggacttggcatctttaargactaatctgcctaccctgtagttaaataagtagagaatttttcctgcactaataatagaagcaaagacaagaaccttccaatgggactgaattcaagtgatgacatgtgactggcatttttcttttctattgtggttttgaaaacactctgagacctaactaaatcatttatttattaccatagaacttttaatagccacctactgcacactgtcactcttcaaaagttaaaactaataactcaaggagaaaaataaacaaatattagagtgtcctgtccttgcatcaataagttgccaccatgcaatatgatatatcacagcagtggaagcattttctataactccagatattcagggattatgaaaggtttgcttaccactgta

SEQ ID NO: 801980 - DNA, 625 bp, Homo sapiens
agtgtcattctttcatattgggagattccctcaaaatttgggtgatgttttgttatccttttgtatttaatagtccctaaaacttttactggaaattgtctaagcatgtatgatactttcaaagaataaaatatactgaagggagagacattaggtttctcagagaatctgcctataccattatttttaggcagtttctccatatgatacagtttctcttaagtaaaatctcagcgaaattcttacctggaaaattttgtctgtcagttctatggtgctggwaaggtgaagagagtttgggagtctttacattcagtaatgcctgataccagtattcattcaaacgtgcatgatgttgctaaatctagagtctggagtttaatgtctacagataatagactttctgaaaatctgtgctcctggaaggagcagattggctgctgggatgaggaacgccacataaaattacccttttaaacagagttttaacctagtccccctattttaattttcttgtttcatcaaacctactagattacacaatggtaacaagtgccaatctgttctatgatactactattggattttctcagttatcattcttttctgcttatttaggatcctc

SEQ ID NO: 801981 - DNA, 538 bp, Homo sapiens
cagatgtctaatttaggacgttttccaatttctattaaaataataaaggattttacaaaaactatatagaagttttaagtggttggcaacaatataaaatttcgcttgacctaaatataaatccaaagtctaataaaatgaaaactttttggcacatcctatattagaatatgaagctacagtattgtaaaggagatactttgaattgcaattaaaatgaggttgcactgaatataattactgtgtttttgtttttatgacttcacataagtgtacttcttcttattgacttaatatgtttatatatttgcctggtttcacattttccagatttaatcacatsttttcatcatttagttgacagcttatacactgaataaaatgacattgttgctaaatattggtgtcaataactatgaatacaatgagttttaaacctcatctttcttctctgaaattgctttttaatgttatgttttttctctttgattttgaatttgtgcttagagtgtaatttaattacggagataagaaggac

SEQ ID NO: 801982 - DNA, 547 bp, Homo sapiens
cttcttttgaaaagtctctgttaatgtgctttgtttatttattaatggggttgtttgttacttgttaaattgaatgaattcctcatagatcccaggtattagacctctgttgaatgcatagtttgcaaatatttcctaccattctgtaaatgcttgtttactctgttgacagtttatttcattatgcagatttttagtttagttgagtgtattagtccattttcatgctgctgataagggcacacctgaaagtaagcaatttacaaaagaaagaggtttaattgaacttacagttccacatggttgaggaagactcacaatcatggtggaaggcaaggaggagtgagtcacatcttacgtggatggcagcaggcaaaagagagggcttatrgaaagaaaccctcatgttttaaaatcatgagatctcatgagacccattcactatcatgagaacagcacaggaaagacccgcccccatgatttagtcatctcccactggacccctccctcaacacatgggaattatgggagctataagatgagattt

SEQ ID NO: 801983 - DNA, 595 bp, Homo sapiens
gctattatcaaaaagacaaaagaggcatggcacggtggctcatgcctgtaaagccagcaatctgggaggcagaggtgatagaaccaattgagaccaggagttcaacatcagcttaagaaacaaagagagacccctgtctctacaaaatataaaaattaaaaaaaaaattaaccaagcatggtggtgcatgcctgcaatcctaagtattcaggaggctgaagtgggaggatccttgagctcaggaggacgatgctgcagtgagctgagattgcaccactgcgctccagcctgggtgatgkagctagcgagactctgtctcaaaatagaaataaataaataaaataaagaacgtggacaaaagggaactcttgcatactgttgatggaaatgtaaattagtgaaactattaaaggaaataatattgaggttctttaaacattgaaaatagaactaccatatgctccacagatcttactactgggtatgcagttgacccttgaataacatggatttcatctgcatggatccacttacaagctgatttccttctgccctgccaactctgacacgctgaaaccaatcccttctcctcttc

SEQ ID NO: 801984 - DNA, 621 bp, Homo sapiens
tcttattggatgaataatttgcaaatatttcctctcattctctaggttttctctccattttgttagttgtttcttttgaatgaagctggtaaactgaaatgccaaccagcaacagatgaaaaaatggcccaacaaatgtcagccttctctagccagagaatctagagagagtagaataggaagacggggaagaaaaagtttagaaaataaccattctacttcaaccaaataacaaaaacaaacaaactaataaaaccctgtgggtttacccttgcccaaattaamaatagctgagtgtggaatttagactttgaccagcactatactgtaacaatgttaagaggcacagaagtagtttcctctgacattggggtgaattagaagaagattgagtaggaatctcagacttttatccccattggacactaagtatatatttgaacacccaataagctgttctctttaactgtttgacctgcttttcaattgtttttcataaaaaattatctaacttctacttcaactattttgctaattattttaatgtctatcaaattagctgaccacaacattcagaaaagagatgaatataaaatatataacttctatattataagtaaa

SEQ ID NO: 801985 - DNA, 621 bp, Homo sapiens
tcttattggatgaataatttgcaaatatttcctctcattctctaggttttctctccattttgttagttgtttcttttgaatgaagctggtaaactgaaatgccaaccagcaacagatgaaaaaatggcccaacaaatgtcagccttctctagccagagaatctagagagagtagaataggaagacggggaagaaaaagtttagaaaataaccattctacttcaaccaaataacaaaaacaaacaaactaataaaaccctgtgggtttacccttgcccaaattaaaaatagctgagtgtggaatttagactttgaccagcactatactgtaacaatgttaagaggcacagaagwagtttcctctgacattggggtgaattagaagaagattgagtaggaatctcagacttttatccccattggacactaagtatatatttgaacacccaataagctgttctctttaactgtttgacctgcttttcaattgtttttcataaaaaattatctaacttctacttcaactattttgctaattattttaatgtctatcaaattagctgaccacaacattcagaaaagagatgaatataaaatatataacttctatattataagtaaa

SEQ ID NO: 801986 - DNA, 621 bp, Homo sapiens
tcttattggatgaataatttgcaaatatttcctctcattctctaggttttctctccattttgttagttgtttcttttgaatgaagctggtaaactgaaatgccaaccagcaacagatgaaaaaatggcccaacaaatgtcagccttctctagccagagaatctagagagagtagaataggaagacggggaagaaaaagtttagaaaataaccattctacttcaaccaaataacaaaaacaaacaaactaataaaaccctgtgggtttacccttgcccaaattaaaaatagctgagtgtggaatttagactttgaccagcactatactgtaacaatgttaagaggcacagaagtagtttcctctgacattggggtgaattagaagaagattgagtaggaatctcagacttttatccccattggacactaagtatatatttgaacacccaataarctgttctctttaactgtttgacctgcttttcaattgtttttcataaaaaattatctaacttctacttcaactattttgctaattattttaatgtctatcaaattagctgaccacaacattcagaaaagagatgaatataaaatatataacttctatattataagtaaa

SEQ ID NO: 801987 - DNA, 622 bp, Homo sapiens
gctcaaaatgagaataagggagcaaaatgttaaaactgcttaaactcacaagaataaagagaacaagggggaacatgacagcgaaagagattcgttataaaattgtagatgatggatacttttagaacaagtaaaagatgactaacaaaacaaacttcttaattattctaagtgtctgttgggagtggagccaacataaagcaaataaactcatgccacagaatattagaaagtatcagaaatttgaggcaagaaaagagttgcagagagagggcaaatattaaaggatatttgattgtggcaattttgatgcagagaagttaatatttcattttaggaartcaatagatattgaaataaaaaaaatgtaaacttaggctatataactgaaagtaaatacaagaacaaagagatgaaatttgaatttggggagataaattccatcttatcaaatatttgtaaagctattctactttaacaaatacgtatagacatttccttagtttaaagcaatcaaataaaaaaacccacaagtacaatcagaatatagtaccataaactactaataaatggcccccaaatttttgaaatgtaagtagaaggtacatagaaatttagtctc

SEQ ID NO: 801988 - DNA, 539 bp, Homo sapiens
aatttgaggcaagaaaagagttgcagagagagggcaaatattaaaggatatttgattgtggcaattttgatgcagagaagttaatatttcattttaggaaatcaatagatattgaaataaaaaaaatgtaaacttaggctatataactgaaagtaaatacaagaacaaagagatgaaatttgaatttggggarataaattccatcttatcaaatatttgtaaagctattctactttaacaaatacgtatagacatttccttagtttaaagcaatcaaataaaaaaacccacaagtacaatcagaatatagtaccataaactactaataaatggcccccaaatttttgaaatgtaagtagaaggtacatagaaatttagtctctaaaataataaattatatacagaaaactgtaggcatttgattacatcaacataaatatggactattatacattctaaaaattacattattaaatactagcattagtttaggattcttcatatttattcagtggtcatttataaataaataaacaaaa

SEQ ID NO: 801989 - DNA, 655 bp, Homo sapiens
tagatcccaaagtaaaatttttcattcaaaggacagtttttaaaagttcttggtatattggctttccattttgtcttctttctcttccttccttccttccctccttccttgctttctctcctttctttctttatatagaracaacttatagctacaccaaaattataaaataattttaattccttacttgaaccaatagtggctattatttttaataaaattttgacaatttgacagaagaaaaatattactttattttaattaacatttgttttggttataagttccatggatacaaatctttctaaaatacattgcatacttttctattatttaaagagtttgcataaaataaaaattgtgatgatgagttaccatcattaacataactgttaattagtacaatctgcaacaaagtagtattgaagctattttagtagagaaagacattatttgctccagacagctatgctttgtgaattcttatatctactgtaaaaatttctctgtccttgctctaaaattggaaacatgccttcctttagccaggtgtctttttttcccacacattctccacttttattagcattttctaatccattctggggctttcccttagtgtcaagttcatgaactttagagtacagacatttgt

SEQ ID NO: 801990 - DNA, 634 bp, Homo sapiens
tctactaataaaatgtggttttcctttgaatgttaaaaatggaagaaacttctactgaaatattaaaaaaaaatgacagtcattgctttttaaaaaacagacatattttaagtgatttgctcacttggttagaataaaaatttacctcacaataacatagaaagcatttccatatgccagacactactctaaaacaacatctattttacaaataatgcaactgagctacagaaaatttaattaactttcaaaggtcctaagagtgagcaaggtgttaaatrtgactagtatttaacctaggcagtctgtctcaaaggctatgttcttaaccacaacattatatggcctcttttgatgtcagtggtaatattacaccttggaccaagaattgttctattcatcttaaattcctcaaattgaatcatggttgcttgctggaagcttagacaagaaaagaagagttgtaacccacaatggaaggaaaacctaaacagtttctaactcatgtggtatgaattatatgtaagagaattatgtatgaatacaaagattaacatgttttgacaatgtatttacataaaactataaaataaagtacaataatattttcaatcaacaaaagcaatcttaaaat

SEQ ID NO: 801991 - DNA, 625 bp, Homo sapiens
ttttggttctttatccagcttacattctgtgccttttaattgggaaaattagttcatttacattcaaggttagtattaatgtgtatttgatcttgttatcctgttgctgtcgacttattatgctgacttgtttggttgctttatagtgttactggtctgtgtycttaagtgagtttgtgtggttgctggttatggtctttcccatccatattaatgcttccagaagctcttgtaaggcaggtctggtggtaataaaatccctcagcatttgcttttctgaaaaggatcatatttcccttcacttaggaagctttgtttagccaaatataaatttctttggctggaatttcttctctttaggttattgaatataggtcccaaatctcttctgacttgtaggatttgtactgagaggtctgctgttagtctgatgggcttccttttgtaggtgatctgtcctttctctctagctacttttaacatttttttctttcattttgaccttacagaacctgataattatgtatcttggggatgatcttcttgtgaagtactttgtgggagttctcttcattttctgaatttgaatattggtggttaggttggggaagttctcatggatgat

SEQ ID NO: 801992 - DNA, 722 bp, Homo sapiens
agggatcctctctgtttccctttgattgtggatgtcagagcaggttatggggtatgtttgcaggggatcttgtgatgtggtgactcaatgactgaggttctacaggcacagcagtggcccactatgtgtacacaactagtacggcacttgacatctcagttcaggcctgagaagagtgtgggcacccctgtgtgagttaacaacatggatttctgtctttgggaattttccaaattgccacggacatcattgcccaggattgtgagggtagaaggactctctaataattcgatggttagcaggttkttgccagggtgaggggaacagagaagcacccccacctatacttttttggggtctctaagttccttgggggtcaatctctgccagactcttcctgctttctttttctgtaccctagcttcttcttgtgggttctctgacaggtcctggctctcatctgactgtgtttcattcagatcattaccattcacctgtaactttgatctttccgagaactagcatcccaagtcagtcaaccatgttggaaaaacaaagaaataaacaaaaaccttgactgtatgtttattctgagaagttaaattcaagttttaatagtaactacattgttttcgttagatggcaaaatccagagattttgtcttttttattggaagctttgtaagctattacatgtatatgtacatatttctagattacat

SEQ ID NO: 801993 - DNA, 635 bp, Homo sapiens; identical to SEQ ID NO: 801246

SEQ ID NO: 801994 - DNA, 635 bp, Homo sapiens; identical to SEQ ID NO: 801247

SEQ ID NO: 801995 - DNA, 615 bp, Homo sapiens
atcaggcaatgtgatgggtcccctgaagcctttcagtgactactttttcagaactgggaccagatgagaatagcaatcatggggttaagattctcccagacacagggacagaccgcccaactcacactggcctaagcaaaaagcgcaactttttttttcttagacggagtctagctctgtcgcccaggctggagtgcagtggcgcgatgtcggctcactgcaaccttctccacctgctgagttcaagcaattctcctgcctcagcctcccaagtagctgggactacaggtgcatgccaccacacccgactaattgtttgtatttttagtagagatggggtttcaccatgttacccagactggtctcaaactcctgaccttgtgatccacccatctcagcctcccaaagtggtgggattacagkcgtgagccaccgtgcccagccaaaaagtgcaacgtcttggctcaaggagctgaaaacttcaagggcagatctggacaggctcagtgggatccaggggctcatgcagtgccattggacatagtctctgctttccactgtgctggcctccttctcaggtgccctcccctcatgttggcaagaaggttgccagca

SEQ ID NO: 801996 - DNA, 615 bp, Homo sapiens
atcaggcaatgtgatgggtcccctgaagcctttcagtgactactttttcagaactgggaccagatgagaatagcaatcatggggttaagattctcccagacacagggacagaccgcccaactcacactggcctaagcaaaaagcgcaactttttttttcttagacggagtctagctctgtcgcccaggctggagtgcagtggcgcgatgtcggctcactgcaaccttctccacctgctgagttcaagcaattctcctgcctcagcctcccaagtagctgggactacaggtgcatgccaccacacccgactaattgtttgtatttttagtagagatggggtttcaccatgttacccagactggtctcaaactcctgaccttgtgatccacccatctcagcctcccaaagtggtgggattacagtcgtgagccaccgygcccagccaaaaagtgcaacgtcttggctcaaggagctgaaaacttcaagggcagatctggacaggctcagtgggatccaggggctcatgcagtgccattggacatagtctctgctttccactgtgctggcctccttctcaggtgccctcccctcatgttggcaagaaggttgccagca

SEQ ID NO: 801997 - DNA, 576 bp, Homo sapiens
acatcatctcattctttcgtttttgcccatggaaatgcttagcaagaatacaataagatatctacattttgcatcagttagttaataactcttctcagcattttgacacaacagagcataacactaaatacagagagaacttgcttgaaaatggcatttcaaatatgttctttyccttgtttttaaaaactgttgtagctttgagttttcctaatgaagactaaagttgtgttcagactcgcttgttttcattgtctctacttgaaaaaaaaaagattcttttactgcttaacatagtaatgcatgttcattataagacaaaacaaaataaaaagcaatatagaacagaaagtggaagtaggtcgcaatcttatccttcagacaatcactgttaagagtgggtctatattttctagccattttttgcatgcttatctcaacatatatatgttattttaattattcatataaaatagatacatacataaggtttttcattctttgctcccctctctttttcaacttatttttccaagcagtaattatttcaaatggagagacaagaatacaaaatgt

SEQ ID NO: 801998 - DNA, 647 bp, Homo sapiens
agaatacaacatactagactctctgggacacagccaaagaagtgttaagaggcaagtttaaagcactaaacacccacatcaaaaaatttacaaactaactttcctaacaaccacatcaaaaagttaacagcctaaagatcgaaagttgacaatctaccatcacacctagaaaaacaagagcaaagcaacctcaaatgtagcagaagacaagaaataatcaaaatcagtgctgacctgaaggaaactaacatatgaaaaacaatacamaagatcaagtaatccaagagactgtgatttgaaaaaattaatacgatagatacaccactagctagaataatatggagaaaagagaagatccaaataaacacaaccagaaatgacaaaaggaatgttacccctgaccccgcagtaatataaaaatcccttagaggctaatacaaacacctctatgaacaaaaactagaaaatctgaaagaaatggctaaatttctggacacatacaacctaccaagatggaaccaggaagaaacaaaattcctgaacataataataatgagttccaaaattgaaaattaatagaaagcctacctcaaccaaaaacaaaaaaaaaaaataccaggaccagaaaaattcacagctgaattcta

SEQ ID NO: 801999 - DNA, 606 bp, Homo sapiens
ggtgtggtggcggtcgcctgtagtcccagctagttgggaggctgaggcaggagaatggtgtgaacccgggaggtggagcttgcagtgagccaagatcgtgccactgcattccagcctgggcgacagagccagactctgtccccccmaaaaaaaaaaaaaagaaaaaaagaaaagaaaagtctcaaagaatagttttcctaagagttaaaggtgtaaaagacagcaaatgaatctggtctgcttgtccccagccctatatactcaactgagaccaacagaaagaaaccatgcaatttaggaagatacattttaaagtttaactgcaagccaaaaatataaaaatgagtcctgctctaattgtgaattgcaagtagagccaagaaaacctgtatctagtttagaagtcaagacctctggagatggggaaagcttagaagtcacttgtattagcctgttctcacactgctagtaaagacatacccaagactgggtaatttataaaggaaagaggtttaatagactcacagttccatatgactggggaagcttcacaatcatggcagaaggcaaaggaaaagcaaaggcacgtattaaatggcagcaggc

SEQ ID NO: 802000 - DNA, 606 bp, Homo sapiens
ggtgtggtggcggtcgcctgtagtcccagctagttgggaggctgaggcaggagaatggtgtgaacccgggaggtggagcttgcagtgagccaagatcgtgccactgcattccagcctgggcgacagagccagactctgtcccccccaaaaaaaaaaaaaagaaaaaaagaaaagaaaagtctcaaagaatagttttcctaagagttaaaggtgtaaaagacagcaaatgaatctggtctgcttgtccccagccctatayactcaactgagaccaacagaaagaaaccatgcaatttaggaagatacattttaaagtttaactgcaagccaaaaatataaaaatgagtcctgctctaattgtgaattgcaagtagagccaagaaaacctgtatctagtttagaagtcaagacctctggagatggggaaagcttagaagtcacttgtattagcctgttctcacactgctagtaaagacatacccaagactgggtaatttataaaggaaagaggtttaatagactcacagttccatatgactggggaagcttcacaatcatggcagaaggcaaaggaaaagcaaaggcacgtattaaatggcagcaggc

SEQ ID NO: 802001 - DNA, 606 bp, Homo sapiens
ggtgtggtggcggtcgcctgtagtcccagctagttgggaggctgaggcaggagaatggtgtgaacccgggaggtggagcttgcagtgagccaagatcgtgccactgcattccagcctgggcgacagagccagactctgtcccccccaaaaaaaaaaaaaagaaaaaaagaaaagaaaagtctcaaagaatagttttcctaagagttaaaggtgtaaaagacagcaaatgaatctggtctgcttgtccccagccctatatactcaactgagaccaacagaaagaaaccatgcaatttaggaagatacattttaaagtttaactgcaagccaaaaatataaaaatgagtcctgctctaattgtgaattgcaagtagagccaagaaaacctgtatctagtttagaagtcaagacctctggagatggggaaarcttagaagtcacttgtattagcctgttctcacactgctagtaaagacatacccaagactgggtaatttataaaggaaagaggtttaatagactcacagttccatatgactggggaagcttcacaatcatggcagaaggcaaaggaaaagcaaaggcacgtattaaatggcagcaggc

SEQ ID NO: 802002 - DNA, 581 bp, Homo sapiens
gatcctcccatctcagcctcctgaatagctggtgggagtgcaccaccgtgcccagctaatttttgtacttcttgtagagacagggttttgtcatattgcctgggctggtcttgaactcctgagctcaagcaatcctcccaccttggcctcccagtgctgggattacttactggtgtgagccactgcgcccagcattcatttatcaatagacatttcactgaacagttactgcctacagggtgttattctagctgctgaagatacagtgataagcaaaaaacattgyctgctcttgagaagatcacaaggaagaaatacacatgtaatcagtcaagtatacagatgcagataggtgatatagggctaaaataatggtttgcccaaagtgctatgggaacattgaggaggagcacctagccagcaggttaaggcaggctagtggtggagggcagggaagtctcccaagagtggtgtgggagacacacgaacagcactgaaaggagaagtgactttgccatgtggaagtgaagggcagaggcctctggcagagggcatgggagctccttgatgtgatgtcatct

SEQ ID NO: 802003 - DNA, 520 bp, Homo sapiens
gctgaggtgggaggatcacttgagcccaggaagaccctgtctccaaaataaaaaaagaacattattaaaggtaatgagacaatgagaccaaccatgtgctaaacaagaataaaaatttagagacaaaaatctaataacttaaaaaaaataactatttcattaatgcaacaatacttactgagttctactaacaccatgttgggcaccagagacatttgatccctaggcaaaggtcagaagaaggaagaacrgcttctttcctgaaggagcttacactatggtggagaaggcagaaaagaaatctgggggctgtgaggagctcactgggagccctgaagacaaagtgggggcacggggtgagatgagagggttgtcagccagagaaacagctttcctggacccagcatgggggtggggcgaaaagtcacaacacttatattgaatatttagtaccagttaacttaggtttctatacatgatgcattacttgattaggtaagtgtaaatttacttggttcct

SEQ ID NO: 802004 - DNA, 520 bp, Homo sapiens
gctgaggtgggaggatcacttgagcccaggaagaccctgtctccaaaataaaaaaagaacattattaaaggtaatgagacaatgagaccaaccatgtgctaaacaagaataaaaatttagagacaaaaatctaataacttaaaaaaaataactatttcattaatgcaacaatacttactgagttctactaacaccatgttgggcaccagagacatttgatccctaggcaaaggtcagaagaaggaagaacggcttctttcctgaaggagcttacactatggtggagaaggcagaaaagaaatctgggggctgtgaggmgctcactgggagccctgaagacaaagtgggggcacggggtgagatgagagggttgtcagccagagaaacagctttcctggacccagcatgggggtggggcgaaaagtcacaacacttatattgaatatttagtaccagttaacttaggtttctatacatgatgcattacttgattaggtaagtgtaaatttacttggttcct

SEQ ID NO: 802005 - DNA, 619 bp, Homo sapiens
atgtcataatgaagtattagagtactagcattaaaaaagtcctacaaattattagagagaaaatacaggttgcacgcaaagcataaagaatgagaatggcataagacatcttaacagtgccacagaaactaaaaagtagttctgagtaaaaatgaactatttacccagccaaaccgttaattaggtataaaggtagagttaagacatttatagacatacaagatattaagattactgagtcaattgatattcaacaggggtgcaaatggagaaaaagtcttttcaacaaatagtggtgggacaaatggatagccacatgcaaaagaacatatatataagagctaaaaccataatgcttttagaagaaaatatagggtttatcttcatgaccttgaatttgacaaaggattcttggacatgacaccaaaagcacaygcaacaaaagaaaaattggagtgatatgattaatatggtggaacaggaggtctccagcttgcatcctccgtctccttgacacaaacaacaatctggcagccatccatggacaaaagtgcctctgtgggagctctaggatccaggtagaaggttatgaaaccctggtaaagcccaagacggagga

SEQ ID NO: 802006 - DNA, 606 bp, Homo sapiens
ccaccacactcagctaattttttgtatttttggtagagatggggtttcaccatgttggccagaatagtctctatctcttcacctaatggaccaccaaagtgctgggattacaggcctgagccacagtgcacagccaagatacactttctttttaagaaaaaataatctttacttgtgtggggggtacaatagtaatgaggataatttatatatacatctgttaccaacatscacatggccatagcagcttcaaaaatcattattgaggccagaaggttggtctttggtgtgacacctatagagcgtagacagagacacacaacgaattggacttacaggagctgtgcctggctgcttctccagagtgtcaagagaagaagggaggtagaggcaaggtatacgactatataccagatgagacctctccatgtggagtgcccaggagcacgaaacggtaggggttacactgagcacttggctgaaaagcgaagtgttctcctatctaccacaaaaaggagtttctatgcacaggcagtaataaatcaccacattttaacagcagttgaataatgagtttgtgcaagacaactttggtagcatgggagg

SEQ ID NO: 802007 - DNA, 509 bp, Homo sapiens
gaggcaggagaattgcttgaaccaggtgaggcagaggttgcagtgagccaaggttgcgtcattacactccagcctgtgcaacaagagcaaacaccatctcaaaaaaaaagcaaaaacaaaaaaacaaacaaaaaaactgcacttgtaccccttaaatttataaaaataaaaagcactcaaatrttgaagcttaaccccccagtgtgacggtggtcagaggtgtgacctttgggaggtaactacatttagatgagatcatgagagtgaggtcccagaatgggattcaagaccccagatctttctctccctaccaccttctaatgtggtaatacagaaaatcagatgtagtcccactgcaaaccaggaagaggccttcatgagaaactgaacttaattccccagctccaagtattatgagaagcaaattgttgtttaagccacccaatctatgacatttgttacagcagcctaaactgactaaaacactgaagaatgaaatattaatttaa

SEQ ID NO: 802008 - DNA, 509 bp, Homo sapiens
gaggcaggagaattgcttgaaccaggtgaggcagaggttgcagtgagccaaggttgcgtcattacactccagcctgtgcaacaagagcaaacaccatctcaaaaaaaaagcaaaaacaaaaaaacaaacaaaaaaactgcacttgtaccccttaaatttataaaaataaaaagcactcaaatgttgaagcytaaccccccagtgtgacggtggtcagaggtgtgacctttgggaggtaactacatttagatgagatcatgagagtgaggtcccagaatgggattcaagaccccagatctttctctccctaccaccttctaatgtggtaatacagaaaatcagatgtagtcccactgcaaaccaggaagaggccttcatgagaaactgaacttaattccccagctccaagtattatgagaagcaaattgttgtttaagccacccaatctatgacatttgttacagcagcctaaactgactaaaacactgaagaatgaaatattaatttaa

SEQ ID NO: 802009 - DNA, 630 bp, Homo sapiens
tgattcactttgagtcatattttgtgaagaatgtagggtttatgtctatgttcactttttgaatactaatatctagttgtgccagcactgtttgtgagaaaaacttcttctccattgtattgcttttctctttggtcaaaattcatttgtctacatttatgtaggtgtaattctattttgttccattgatttgtctattacttttttttacccaaaccacactgtctagattaccttagctttatactgtcttcaagttggttagtgtcagtcttccaactttcttctcctacactattatattggttattctgggtcttttgcctctctatgtaaactttaagaacagttggtcaacatccacaaattaacttgctaggattttgatttggattgaattggaactacagatcaagttgagaagaactgatatattgacaatattgaatttttctatccataaatatggaatatttctcagtktacttagttcttcgatatctttcattggtttcaagttgttttcatataggtcttggatatattttgtcagatttttacctaagatttcatttgttgggtgctaacgtaaatagtaatgtatttataattttgactttcatgtactca

SEQ ID NO: 802010 - DNA, 599 bp, Homo sapiens
tatatgacccagcaattccacttgtatttgtccaagagaaataaactatttatatttacacaaaaacattgcacaagaatgtttattccaattgtattcataatagccccaaactggaaacaaccgaaattttcaacatcagcaggatggagtaaggtaatatgatataatcacacattgaaatgttactaagcaataaaaaggaacaaaccactgatacttacaaacacattaataaacctcataaatgctacawagccatagagctgcattcaaaatagcatatacagtgcaatttcattcatagaaatgcaaagaggcccagaattactttttaaagtggggcagttactgtgtatcttgataagggtatctgtatatttgttaaaacttattgaaatgagtatgtgtatttcacagtaaaaaactttttctcagaaaacaattatttaattccagctaatgggtttgcttttcacggcgatgttatttagcaattttgaaattacttcctttgttttttatacttgagcaaatgagtaaataaatatgtggaggataactggagacaggattctaactcttggagaagagagtta

SEQ ID NO: 802011 - DNA, 631 bp, Homo sapiens
ctcctttgactccatatctcacatccaggtcctgctgatgcaagaggtgggttcccatggtcttgggcagctctacccccgtggctttgcagggtacagcctccctcctggctgctttcatgggctggcattgaaggcctgcgggtttttgaggtgcacagtgtaagctgcttgtggatctatcattcyggggtctggaggatggtggcctcttctcacagctccaggagggactctgtgtaggggtggtgccccagtagggactctgtgttggggctccaaccccacattttccttccacactgccctagcagagggtctctcatgagcgccccacccctgcagcaaacttctgcctgggcatccaggcgttgccatacaccttctgaaatctaggcagaggttcccaaacctcaattcttgacctttgtgcacccgcaggttcaacaccatgtggaagctgccaaggcctggggcttgtatcctctgaagccacagcccaagctctacattggcccctttcaaccactgctgaagcagctgtgggacacagggcaccaagtccctaggctacacacagcgcagggactctgggcctggcccagaaaaccactttctcctcataggcccc

SEQ ID NO: 802012 - DNA, 607 bp, Homo sapiens
acaagctctactccactcagatgtaaccttcccaatccatttccttgaaaccatgaccccagttgagtttggattttttgttttgtcttcatatgagacagacaggttagaggagctggaatgggagaaatgtaattctcccaggtaggataagggtcttacaaagtcttctcaarggcagagtatattttttaatggagaagcctctgggtgtatttcacaatggttatgctttatctcatcctgccagaattatgaagagatcttttgcatttcttctccattaatatctgacgggattctgagagaagtacatgaaagtttgggggccctacaaagattgcaacctccaagtagtttctcaatctatgctaatccaaattcaacttcaactttatcaaatgtaccttgcgtatgttcctgtcagttgatggctccagtggcttctgctgcagataagcagatcttggctatgtctctctggatgatcctgcctctcaagatttcagcatagccatttccctgtgacttagttttctaaaaggtctcaataagtaattgtgctttcagtttgtccaactctttattgtaagtacaggagtgatgc

SEQ ID NO: 802013 - DNA, 629 bp, Homo sapiens
tgtgtgtgatttacactatcttcagtgtaatcggaatagggaaaggtcacagggctcaacaggtaaccccctgctgcttttctcatcgctggtttcctgttcactctatacacgggtctcttctctttttctaatacatattgactttcttatttcacaaaccctgtgatattttgcacaaggttggtaaccctgaagattttctttcactgcaaaacaaagggtcattcttctgaagatgtttcatatatcctcrtttttaaatgttgtttagaagaggaaggaatgccgtggtttaaggtaacacaattttgtataaaaatttctttctttaaaaccctaatgcagggttgataaggcttgaccatatgtactgtgtatatgtgtatacagtttaattatatgtagaattaatgtttacccaacctaaagcatgcatgtgcttgcatacaaatgtgtgcacatgtatgttcatgtttgggcatgccctcccccactcccacacacagaaacacgtgatcacgcacacatatatatatgtgcgtgtaattctgttcatctttcattccaaccaggtttaggtatacatatatacaggtatatatatatacctatacttggaatgaacc

SEQ ID NO: 802014 - DNA, 603 bp, Homo sapiens
taatctttgcgttctcttcctcttagtgatatggacaggagacggaaatactgggtagaaaagggcagttccctggcaaagcctcaccctcaagcctggatacctgctgtcttaaacgaaaacgaaaacaggcatttctgtgttcatgctccaaaagttatcttttggcctgccacaccccctatcctgcacccatatgaatcccgaaccccagactccagaagcagaccagcaagcccgcagaccagcagaaggatggcagaaygatgtggcagagaaagggagaagaggaggaacatctgaatgccaaaatgagttcagctgggggcagtcagagaggagtccagccactgggcagccagaatccaggggaggatcacctttccacttcatccccttcctctgcctccccatccatcctgctgaaagccacctccaccactcaataaaacctgccattcatccttggagtccatgtgtgacctgatttttccaagacactggacaagagctcagatacagaaagctatcaccttggccctctgcccttgtgaaaaggcagagagttcattgagctgattaacactcaagccatctgcagac

SEQ ID NO: 802015 - DNA, 603 bp, Homo sapiens
taatctttgcgttctcttcctcttagtgatatggacaggagacggaaatactgggtagaaaagggcagttccctggcaaagcctcaccctcaagcctggatacctgctgtcttaaacgaaaacgaaaacaggcatttctgtgttcatgctccaaaagttatcttttggcctgccacaccccctatcctgcacccatatgaatcccgaaccccagactccagaagcagaccagcaagcccgcagaccagcagaaggatggcagaacgatgtggcagagaaagggagaagaggaggaacatctgaatgccaaaatgagttcagctgggggcagtcagagaggagtccagccactgggcagccagaatccaggggaggatcacctttccacttcatccccttcctctgcctccccatccatcctgctgaaagccacctccaccactcaataaaacctgccattcatmcttggagtccatgtgtgacctgatttttccaagacactggacaagagctcagatacagaaagctatcaccttggccctctgcccttgtgaaaaggcagagagttcattgagctgattaacactcaagccatctgcagac

SEQ ID NO: 802016 - DNA, 611 bp, Homo sapiens
aattatgtggatcaaaagcatgtttacttatttccaattcacaatcccaaaaggaagcctatctgttaataagctctctccatttgcactgaacctacagtttagtacatattcatccagaaagtacaatgaaaattcaacaaaataatgcattgcgaaagtgaaaggaaagtaaatcttgaggcccccaaatcattaagctaaagggaaaagtcaagccgagaactgcttagagcaaacccgtctcccatttattcaaagtcattcctctgctcgctgagataaataagtatctaattgcctcctttggaaaggctaatcagaaaatcaaaagaatgctactgtttatctctcacttacctgtgacctggaggccccctccgtttcaagttgtcccgccttcatggacagagccaatgyacatcttacatatattgattgatgtctcatgactctctaaaatgtataaaaccaagctgtgccccgacgaccctgggcacaggtctcaggacttcctgaggctgtatcatgggcacgtgtcctcaaccttggcaaaacaaactttctaaattaactgagacctgtctaagatatttgggttcacacaacta

SEQ ID NO: 802017 - DNA, 589 bp, Homo sapiens
agatagcaaacacataaatgaatgacaactacattacattagctactctaaaggacatcaacaggataatgagatagtataactagagaggaagagttaagaaaggcatctgaggagatgacatttggactgagatgaaaaggagccagccatgaaaggatctggggtcaaaccattccaataatacgttagaaaggagtttcagatgttggagcagaaaagggggcctgtttggctaaagttcagtgagaaaggaggaaaatgacatgagatgaggatagagaggtagccaggaactagatcattcagaaaccctaaagtccaaggtgaggaacatggattttatcctaagaacaacaagactcccttgaagtgttctaagcagggacaataaatgacctgatttgcattataaaaattttcttgtatctactgcagggagaatggatagtgagagtaaacaatggcwttaacggagcctattaggaggcgtttgaatcagtcccaggtgacaatagatgtaggattggataatgacgatagtattggagatagaagtaaactgggaacttgttttggagataaatcc

SEQ ID NO: 802018 - DNA, 644 bp, Homo sapiens
gctctggacaatcttcttaaactttcaagcctcttttcttatcagtaaaatgtgttttttcttatctaggaaaaagattgcttattttacctaatgctgtgatctgaatgtgttgttctaaatctaatccctaatgtgatgatagtataaagtgggrccattgggaggtgactagatcatgagggcagagccctgttgaacaggattagtgtccttataaaagaggccctagagagctgccttgtcctttcccccatgtgagggcacagtgcaaatgcattgttctaagaaccaggaagtgggctctcaccagacaatgaatcttctggtgcctttatcttggacttctcagccaccagaactgtgagaagcaaatttccattgtttataagccactcattttatgatatttcgttgtagcagtacaaatggaataagacattcaactggcagatttcacataaaaataagttgaggtaatgaatagaaaaagactatataaactttcactgttttccaccaataaatgatcattactatactctgaaaagaggagaggatttcatgttttttgaaataagagaaaaataatttgtttccattgtcatgtatctattaccatatgtatcttcatcttgttgaga

SEQ ID NO: 802019 - DNA, 631 bp, Homo sapiens; identical to SEQ ID NO: 787760

SEQ ID NO: 802020 - DNA, 631 bp, Homo sapiens; identical to SEQ ID NO: 787763

SEQ ID NO: 802021 - DNA, 631 bp, Homo sapiens; identical to SEQ ID NO: 787764

SEQ ID NO: 802022 - DNA, 631 bp, Homo sapiens; identical to SEQ ID NO: 787765

SEQ ID NO: 802023 - DNA, 623 bp, Homo sapiens
ttcaaaaattgtttttaaacaactgaatgtccatgtgtgaaaaaaaaagtccccccaaacaaaaacaaacaaaaaatactcaatccattctttgcaccatatacaaaaattaactcataatttaagagagaaatttatagaacaaaaaaagaactttttgctttgtaaatttttactttgtgaartaggatccctaacaggtattagaggttgccattattgcattttacttattctcagtcacactttttcatttttaaaaacgtctttgaaatcagcttgtgatttaaaattgatggcaacttagttaccatcaatcaggtgttagtcacagcacagttttcacttccttcatatgtgcaaatgtgatcatagttatgacgttttatgtatagcctaggtattagatgtattttagtataaccaatataacattattttgaccatatctagtgtaggaaatttatctttgagtttagatttgatttttgccaacaattgcaaattattcagagctaacttttgtaaggttgggcatctgtctgaggaatgttttatgtcaaaaggtgatataactataacgagagcacatttcttgtgtgatatataaacttaccctaaca

SEQ ID NO: 802024 - DNA, 609 bp, Homo sapiens
ttacttttttcagataagtgatttacaattaactgaaattgttaatggtttaagctgatggttctcaattttgaatatacatcagaatcatctgaagggaatacaacacaatttgttgggtcctaatcccggagtttctgattcagtaggtctcgagtgggatctgaaaatatgcattyctaacaggttcccaggtgatatcgatgatgttggtgttgagaccaagcattgtgaaccactggtttaagccaaagggatattatgagtttaaatcatcacaactaagttactaaaggagacatttggtgtaagagaaacattcagtattgcttcaagaaaataggtggaaataacttcacagtcaagtgacttataccattaacaaaaaaatgtaattttgtattggaaggtctggaacatttttttcccatagttagtccctgtttctttattcctcagaaatttctgtgtacatgtacagcactaacttctcaaaatccacatgcaccagcaatctagtgcctagtctcaaatacattttatttagacttacatttcccttgtaaaggtatgagacatctaaagctaatccctgtcctttgggcctcc

SEQ ID NO: 802025 - DNA, 631 bp, Homo sapiens
gaagaaggaattaatattattcactcttctggctttcggagctcagaaaaacacaccctgaagggaaggcctcagaacacctttctttctgaccttctcctgcctcctgtctctggcttctcattctcccctgaggcaagccatagaaactagaattccttttccccaaagcaagtcatagagacagactcctttttccccccgaaagccatccataaagcctaaaaatattattttaaccttcccctgcttttctgtttgacagctgtcatgcagaaattaagattctcattccaaaggagtcctacctcatacctggaaggaagaaatgctacaacagagaggccaagaagaatctcaacagacaagccttgctggttttcctcacttaggccactatcattagagcactctcttttcattcaagcacaattctatcactgcycattctcattaaacctaagcataaaaatgcagttttcccctgtattgtcaggacttcattcagaaaggctcctgtgtcatcttaatctttaattaaataaatctgtaatgcttttctcttgttaacccgtctttttatataagtgtgtcatccatgacccttacaatggagaggaaagggatggta

SEQ ID NO: 802026 - DNA, 611 bp, Homo sapiens
aacagagacaggattactgaattggatggtaaattgaattggatcatctcaaaggagcaattgaaccataacattttacagaagcaaaaggatcaatgcagagaggagtgaggcatacagctatatgattgagtatattcatgatagttattttgaagtaactatgaggcattatactaaaacactgatggtttagagacagactctacatcaaaagatcagatgtctagaaaaaaggtgataccacgtgttgactttaataaaggaaatggtgtctcataagatcaaygctctatgaacaaatttaaagactctaggggattcaaaagaaataaaggacactaaaagtcaataatttggagtttgtcctgtttaagcattttgacttcaccatacaggagtatgtggctttgggcaattaatttaagcttccattattctcttttaggaaacagatatcataatgcatgcctcatgaaactattctcagatatgagtgaaataactcatggtggatactcagcatggcacctgacacctaaaatataatccattcatttatgtcttttaatggtattaccatcttataagtacataggaaacagagaaca

SEQ ID NO: 802027 - DNA, 555 bp, Homo sapiens
taagttttattggtttgtgcatttgacatcatttagtatttttatgtactgtttaatggggagaaataagagaacaggatgaaaagaagggaactaacattgtattttgatgtattggagcaaactaagctaatatatttcatgggtagaacttttcaggtctaatcactgtcctatgaagcattcacaaatccatgctttcataactacattcaaaatatgttgtttgttatttataaatcgctgaaaawacagggggttgaaaaagacagacatagttcttatttttgtggatttttaattctagcagagaagacattcagtaacaaaaatccaattaattatctaattacacttgtagtacgagattaaagagatcgtgataggagaacttgacctagctggagaggggttgaggagagtgggaagctttccaaagttgttaagtgaatgtttgcagatctgaatgcatcatcaatcaacctgtgtcttcaataatggttaggagtcggcctggagaaaggtgtgtgtatggaggaagacctggaaagggaa

SEQ ID NO: 802028 - DNA, 594 bp, Homo sapiens
ttataagaagaatgtgtacttgggggtctcatttgacttgacagccatgcaaatatcctgatggcaaagtatagtatgaaattttaagtattaacaaaaataatacatgttttaaaagtaggcatgtaaaagagatttggtagggatgttgtagatacttacacgttgatttagtggttgaacaatattaactttttagcatctatctgagattctgtatttaattctcaacaaagatcttcctagttctaattctcagtgatttttatttctctccctatagagaggtccctctcccatattttgtaagtcaatttagccatcattacatagaaraaaacaaatgcttgttcattgctttaaattggtgtctagttatgtgaacataacttgagatataaattccttaaaagcaaaactatattcatatttcctttaactgggttcctatatgcatttgattaaaacaacagtaataccttccacttattgatgcaaactctgtgccaggctaaggccatttgtctaatcccatctgagtaataacaatagtactattcttattattcctagtcccaatgtgcaggtgggaag

SEQ ID NO: 802029 - DNA, 680 bp, Homo sapiens
attgaacatcacacagctgcaaagttaagtggcaaacattcaaaccctgtcagtctggtgtctgagttcaaatatgcttaaacaaagaccgctgtctaagctcaaattcactgtcttatggaaaaagtcagtaagggtagaaaaatagaatttatgtaataacaacatttgtcaacttggatagagttttgcttctagttggatcacagatgttataaaatttaattgcttgctacttctctactccaacagtgtctttctcagcactgtaacacagcaggtagttataaaaaatcattgaagttgttactattttyatatttattagaactattatttttttcatcagaaatacccgggtctattacattagttttttctagtgctttctttggcttgcagtcttaagtaaatcattctgttttgtaattttgtaataatgacaactagtcagatccatgccttacagcagctcctatatctttttcataaatttctccaatatagaaaattagctatagaattacaagtaacagaacatatacttcttactttaaaaatagaaatctttacgagttgtttatgaaaactatagtgattttgaataacaaatcatgaaagtttttactcaattataaatttacacaaaagtgtttctgttgtcatcctgacacaggatc

SEQ ID NO: 802030 - DNA, 680 bp, Homo sapiens
attgaacatcacacagctgcaaagttaagtggcaaacattcaaaccctgtcagtctggtgtctgagttcaaatatgcttaaacaaagaccgctgtctaagctcaaattcactgtcttatggaaaaagtcagtaagggtagaaaaatagaatttatgtaataacaacatttgtcaacttggatagagttttgcttctagttggatcacagatgttataaaatttaattgcttgctacttctctactccaacagtgtctttctcagcactgtaacacagcaggtagttataaaaaatcattgaagttgttactatttttatatttattagaactattatttttttcatcagaaataccmgggtctattacattagttttttctagtgctttctttggcttgcagtcttaagtaaatcattctgttttgtaattttgtaataatgacaactagtcagatccatgccttacagcagctcctatatctttttcataaatttctccaatatagaaaattagctatagaattacaagtaacagaacatatacttcttactttaaaaatagaaatctttacgagttgtttatgaaaactatagtgattttgaataacaaatcatgaaagtttttactcaattataaatttacacaaaagtgtttctgttgtcatcctgacacaggatc

SEQ ID NO: 802031 - DNA, 680 bp, Homo sapiens
attgaacatcacacagctgcaaagttaagtggcaaacattcaaaccctgtcagtctggtgtctgagttcaaatatgcttaaacaaagaccgctgtctaagctcaaattcactgtcttatggaaaaagtcagtaagggtagaaaaatagaatttatgtaataacaacatttgtcaacttggatagagttttgcttctagttggatcacagatgttataaaatttaattgcttgctacttctctactccaacagtgtctttctcagcactgtaacacagcaggtagttataaaaaatcattgaagttgttactatttttatatttattagaactattatttttttcatcagaaatacccgggtctattacattagtttyttctagtgctttctttggcttgcagtcttaagtaaatcattctgttttgtaattttgtaataatgacaactagtcagatccatgccttacagcagctcctatatctttttcataaatttctccaatatagaaaattagctatagaattacaagtaacagaacatatacttcttactttaaaaatagaaatctttacgagttgtttatgaaaactatagtgattttgaataacaaatcatgaaagtttttactcaattataaatttacacaaaagtgtttctgttgtcatcctgacacaggatc

SEQ ID NO: 802032 - DNA, 519 bp, Homo sapiens
cacccagctaatttttgtaagtttagtagagatggggtttcgccatgtcggccaggctggtctggaactccccccctcaggtgatccacccacctcagcctcccaaagtgctgggattacacgcacgagccaccgcccccgaccccatcattgtttttttctacatttctttttcttctcttctctaaatactgyaaaaaattcctgaaccccagcatctctctctctccttctattccactctgccacgatcaatcactgagctcctgagatacctccatgtttcccattatttcccgcatcaaacacataccctccaaccctgcagccgggtcatgatgttggcatgtaaatcacgtgatgccatgtcgctcctgaacacccatcctcaacactcctaagcactcagaaccgactgcgaagcagctttggtctgtgaggttctgcgtggcctggcctccgtcaccctctcctcacacgggccccatcatctcctgactctctctgctactgtccttc

SEQ ID NO: 802033 - DNA, 577 bp, Homo sapiens
agctgtcattcatgaggtctatgtggaggggaaagaaagtggtcaaacaccaactgatggcttttactcaaaatctgtttcaccagagcttatgacaggacatgctattccacccagccaattggattctcagattgatgacttcactggtttcagcaaagataggatgatgcagaaacctggtagcaatgcacctgtgggaggaaacgttaccagcagtttctctggagatgacctagaatgcagagaaacagcctcctctcccaaaagccaacragaaattaatgctgatataaaacgtaaattagtgaaggaactccgatgcgttggacaaagtaagtaatataagaatgtctgttttataaaactataggaagtctctctttctatgattcagaagatattcatgttgcctgttgagtttcattctttgccagagttgagattgcacataatttatggtggttcctcttttctttgactaaagcatgtacattttttctttttcttttcttacttggttatggttaaaggagttacattcgtatgtatgtgcaggtgtcttttttattattta

SEQ ID NO: 802034 - DNA, 577 bp, Homo sapiens
agctgtcattcatgaggtctatgtggaggggaaagaaagtggtcaaacaccaactgatggcttttactcaaaatctgtttcaccagagcttatgacaggacatgctattccacccagccaattggattctcagattgatgacttcactggtttcagcaaagataggatgatgcagaaacctggtagcaatgcacctgtgggaggaaacgttaccagcagtttctctggagatgacctagaatgcagagaaacagcctcctctcccaaaagccaacgagaaattaatgctgatataaaacgtaaattagtgaaggaactccgatgcgttggacaaagtaagtartataagaatgtctgttttataaaactataggaagtctctctttctatgattcagaagatattcatgttgcctgttgagtttcattctttgccagagttgagattgcacataatttatggtggttcctcttttctttgactaaagcatgtacattttttctttttcttttcttacttggttatggttaaaggagttacattcgtatgtatgtgcaggtgtcttttttattattta

SEQ ID NO: 802035 - DNA, 443 bp, Homo sapiens
aaatcttggctactgtggatggtgctgcaacaaacatgggagtgcagatatctgttcggtacactgacttcctttctcttgggtatatacccagcagtgggattgctggatcatatgatagctccatttttagttgtttgaggaacctccaaactgttcttcatagttagttgttgtagtaatttatattctcaccaacagtgtatgarggttcccttttctccacacccttgccagcatttgttatgccggctagactgcctcttaccatgcagatacatttctatttccatgctgactgttacttcatctttctatctgtcacagcgcttcctacagcataggttctttggctatcttttggttaatgacatgtctctttcttttcagatgtatgagacgagactttgttaagcaccttaagaagaaactgaaacgtatga

SEQ ID NO: 802036 - DNA, 449 bp, Homo sapiens
aaggtcgtttcagaatagggaaatcaatgaatgtaattcatcacataaatagaactaatgataaaaaccacatgattatatcaatagatgcagaaaaggcctttgataaaattcaacatccccttatattaaaagctctcaataaaccaggtactgaaagaaaatacctcaaaataataagaaccatrtatgacaaagccacagccaatatcatactgaatggaaaaaaggtggaagcattccccttgaaacttgcacaagacaaggatgccctccctcaccactcctatttaacacagtatcagatgttctggccacggcaatcacgcaagactaagaaataaagtgtattcaaatagggagagaggacgtcaaattatctttgtttgcagatgacatgaccctatatctagaaaatcccattgtctcagcccaaaagcttcttaagc

SEQ ID NO: 802037 - DNA, 588 bp, Homo sapiens
aatggaacagaatagagccctcagaaacaatgccacatatctacaactatctgatctttgacaaacctgacaaaaacaagaaatggggaaaggattccctatttaataaatggtgctgggaaaactggctagccacatgtagaaagctgaaactggatcccttccgtacaccttatacaaaaatttattcaagatggattaaagacttaaatgttagacctaaaacagtaaaaaccgtagatgaaaacctaggcaataccattcaagacatagtaggcatgggcaaggacttcatgactaaaacaccaaaagcaatggcaacaaaagccagaattgacaagtggggtctaataaaactaaggggttctgcacagcaaaagaaactaccaccagagtgarcaggcaacctacagaatgggagaaaaaatgctcctcatcactggtcatcagagaaatgcaaatcaaaaccacagtgagatgccatctcacaccagttagaatggtgatcattaaaaagtcaggaaacaacaggtgttggagaggatgtggacaaataggaacacttttacactgttggtgggactgtaa

SEQ ID NO: 802038 - DNA, 644 bp, Homo sapiens
gcaatgtaagtccctggaaagagaacatcacacccagggcactcttgccactctgatagctacatctttttgaagacatggtaaaagtctggggtaaagtagtggttgttctctagcaaaaatcgaacaccagcctacccctgaagtattttgaacctttcgcatacaaaatgcaaattacaataccaaagtcatttgatgtggccaaatgggtggggattcttgggattaagcaccccatcttcaaagctgcattcttcttcaggtacctgaggcaatgtctggggttattacggggaaactcattggggtaccaacaaatgctgaaaggagagaacattggtagaacyggacagcctcacagtggtggccttggactgtagcagttggagctggctctggcagctgccctcatcttgggtcctggggtgcctgcccataggctctcagctgccctgcactgccggggctccgcatcctcgcctggcagctgcagctcatcagactaggagctgccagggctcagtgtcacctcggtcctcccagttcagcatccaggtctgtcctgggagaagccctgcctgagccccaccccagccctctttgttccctgtgctgccagcggacttgcctcctgggcacac

SEQ ID NO: 802039 - DNA, 630 bp, Homo sapiens
ggaaatcaaatccacaaggagatactacctcacctcactgggatgaatattaacaagtaattaacaagtgttatagaggagaaattggaaccctccaccattgctgctgggaatgtaaaatgatgcagcatctttgaaaaatagtctggcatttcttcacagaattgataataaagttattgaacaacctgcaaattccacttctagctaaatatccaagagaaatacaagcatatatccacagcaaaacttgcacacaaatatttgaagccagatccaatattatattttgtacaccttcataccccagccttaagaactactctcacacatttaccagagactactatattggaaaaatcatacagttgtttcggtgactatcacacctcttgacagggstcagtgtttaactcactgttttggccagcaggaacttgaatttaagtgcaggttaagaagcaatgaggggtgctggtgttagtttcagaggaggagcagcggtgcccttcaaggcaacgatctcaggtgagaccctcacagctcttcgggtaaaggggaacctcgggcaggaggagtgggagggctgcttctattgacaaagacacccggagaatttagggatttgca

SEQ ID NO: 802040 - DNA, 587 bp, Homo sapiens
ccatgtagaataaatgtgctaacacataatcaagtaatttaaattaattatggattcttttgaaatatttagtcattacaccgatgtacatagaaatttatataaagataaaaaataaatagttatgaagagtaaaaaatttcacaccaggcttctgaacaaatctgactttaaaaaactcttgaaaattaattaattttcttttttcttttttctttttttgagacggagtctcgytctgtcgctcaggctggagtgcagtggcacagtctcggctcactgcaagctccacctcccaggttcacgccatactcctgcctcagcctcccgagtagctggaactacaggcacccgccaccatgcccggctaattttttgtatttttagtagagatggggtttcacagtgttagccaggatggtctcgatctcctgacctcgtgatccgcccttctcagcctcccaaagtgctggaattatgggcgtgagccacctcgcccggccaaaaattaattttttaaaaatgaagtgaacaccagtgtaattttcataactgccttcagtgaataaagtacaaaagtttcttga

SEQ ID NO: 802041 - DNA, 577 bp, Homo sapiens
ccaccttcaacatttggaattacaattacacctgaatctttataggtacacacagccaaaccatattattctgaccctgatatcccagaatctcatgtccttatcacagagcaaaatacaatcatgccttttcaaaagttccagtagccttaacacattccacgtgtaaaaagttcaaagtttcatatgagacaaggctactgtcccttctgyctatgagtccctgaatttaaaagagatttcttttctttcaaggtacaatgatggtagaggcattgtgtaagctttctcagtccaaagggaagaaatttcccagaaaaataacacaaatgggcccacaggcccaatgcaagtccaaaacccagcagggcagtattcactcaatctctcagctccaaaatcatcaagagaactcactatcatgtgaacagcattaaggagagcgtgtttatccatttgtgaaacatctgcccccaccctcatctttcactcccacccacaaaataatctcccctattctccccactcccttacctccaaaccccatgcttctccatgattaaatcacctcccccca

SEQ ID NO: 802042 - DNA, 530 bp, Homo sapiens
gtttttccacagtatggttgcctagcaaagcgactataccatcttatttgaggttccttgtgttctgaggccactggagcaatttatgtggaattaaatttctttagtaaagaacaaatatgatcaactggtcgtaaaaaaggctattagtgtgggagtcaacttctttcaggaataacggcaagaacaatctctgtggaccacatggtttaaagagtttttccatgctgatgcattctcacttggaaaggttatggggtatattgtataattaaatatttgcagaaatgacccctgtcacgtcttcctttamagctatgatgtagctgatcttcagcaaaaacctggcattgaagagctttgatcctgaaaatgatagctgacttcaacatggtcatagtttcttccagtctttcaccacaggcaactacagctagatgcattttctcaacaggctgtattttcagacgacacctgtcccacccaccaggatgcacagcgggaccagcgctgcccgcgcctctcacggc

SEQ ID NO: 802043 - DNA, 750 bp, Homo sapiens
aatatctatcgacttttgctttctggtaactaagaatatggcagaatgggaaaaaaaaaaaaccttatcaaatgagcacacactgaagtgtcattgatttggtatctcccaaccttaaatattccagaagctgtttttattttaaaacaaaattgttttttcaaccaaaaaattacttactattgggccatctgcccattatcaagatatagcaaagaagatattgggagcagagctgctttcctaagttaggacatctagcaacctgtatcactccagctccagaaaccatgatatttaaaggaaacttggggcagctttgtgccctccctggtcctttatagcagtagaaatcagctccagaaatgttattttcttcccagcctttacaactcctgtactgtctccacacctcctgcctcaggmtcatttcattattttcccaagagttagatacacttgggtagctttggtcctatcctggcctcctgaattactgcctaggattagtcagtcacacctgtttcccaggtcctgatctgggagaaccatcttagatcttgccctggctgaaactcacctgtgggaatagaatgtgaatttaagtcagagaagagaagatctcagaacgatggattccttacagaaccaacaaccaacaacaacaacatatttcctgagaatttcactatttacaaagtaccatcccatacattatcttatttgctctttctaatcaccctgtgagga

SEQ ID NO: 802044 - DNA, 616 bp, Homo sapiens
attgtaaagcctttacttacacaaaatactaattgaaactacagtagaaaggtggattttaaagagcaaccccaccaatatttaggtaaaagtcaatgaaaggaaataacagggaatcctcagcttgttttttcacatgaccagtttttattattgtaaaaggatcagatattttgataacatacattttcttcttttttttttaagttatagacatcacaacagtttatttctgaatcctcagcatgcatttctaaggaagccattttttttctttatttttattttagatataggggtatgtgtgcaggtttgttacaggggtatatttatgatgctaaggtgtgggtgtctgctgatcccatcacccaggtagtgaatatagtacccaatattgattacttatatttaaaaaaatcttttcacttaaagacaacatacattggccatttttaatttattaacttatttttgtaraacacaagggtgatacatgttcttttgtgaaaaaattggtctatagagccaaatgactaatttgtttgacaggaagagaattgaattttttacctttgcatcagagtagctgcatgatttattatcttccagtcattct

SEQ ID NO: 802045 - DNA, 548 bp, Homo sapiens
tattcacagtgttgtacaaacatcaccactatccatttctagaacttttccatcaccctaaatagaaactctatgtccattaaataataacttccaattcctccttcccatatcccctagtaaaccattcatctttttgtgtctcatgaatttgactagtctagatacctcatataagtggaatcatgtaatatttgtgcttttgtttctggcttattttacttagcctgttttcaaggttcatccataatgtagcatgtatcagaattccattcctttttcaggctaatactccaytgcatgtattaaccacattttattgatacatttatctgtcggtgggcatttggagtgtttccaccttttggctattgtgaataaagctactataaatgttggtgtgcaaatatctgttcaagtcccagctttcaattcctttgagtatatacctagaagtagaattgctggatcacatggtaattctgtgttgaactttctgaagaacaaccacacggttttctacagcagctacacaattttatattctc

SEQ ID NO: 802046 - DNA, 624 bp, Homo sapiens
ttaagaaaaaaaaaaaaaatccccagtattttattcacatggttgaacagtgcaagcttgaggccagtaggaggtgcccataggtaaaaaccagcttctactaaagcaggtggataaatgccatacttaatagtgagcagagctcccagccttgacagaagcagctggggaaggtstatgaaatgcactgaggtcttttcagggagaagggagggagccaccacagctctccttccaggccaacaggaaagtaatacacctcccaggcacactcctgacctgctgttccagctgttcaaatcagaaaggcatctcttttcatctgcaggaatactgatgttccatgtagactttccccctatgagcccagcactgcacctgtgcctctgatgaaaaacaacttcccacaagtggaaagttcagggactcaaggcctgcagactggtttcttttgtcccacacggtgcctccgtaatgtgcggcactccccctttacctggagggccagactactgtgaatcctgctactcctctgggtctagctgctcagtgggactcccacactccaggatggtactggagaatatccgccaaggatccagtgatgtgacctgtcctctactc

SEQ ID NO: 802047 - DNA, 653 bp, Homo sapiens
gtactggagaatatccgccaaggatccagtgatgtgacctgtcctctactctcccagcagcgggtaccagcaccagttctgatgggggtaggagaggagtgacgtagactctgagatttccttagttacaaataaccttagtgttggctttctcagatgccagcagtagcagtaatgtactgggcacatggacagactcaagacctcctggttagccgaggcaatgcaggcaatggcaacagctgagggcatgcagaagttttctccttcctgagtgctgtgttattctgccttcaggtgtcataatgggctktgcctggctaccagccaggaggtggtgcttgcaaaagagtaccaggtgcggtggtagtagtggaatttgtgcttgccttatgttacccagggcaggcactctggggtctcaggcaatgggcggggctatggagcctccaaatatccctgtccattgtgttatgctaccagggctcataaagtggcaaagcctggtgaggactggaccaggcaagtcctcactcaggctctccaggtacaagcacaagcagtgtccccagtggggatcagagaacagctttctggccactggggtaatgttccagaggggagcagagctgcctctggtgcacagaagaatc

SEQ ID NO: 802048 - DNA, 558 bp, Homo sapiens
aactgtgggtctcctctcagctgagagctgagcagatgtagagacaacctgcctgcagagagaatctacccactgtgggtctcctctcagccaagagctgagcagacagtgggatggcctgcctgcagttaggagctacccattccagatctcttgagagctgtactgctgctcagggaagcacctctttgycttattcatgctccggttgtctgtgtacttcattcttcctggacacaggatgagaacttgggacctgcttaatggtgggactgaaagagctgtaacacaaaaagagctgaaacatgcccctcactcgccacattgcaacaaggagagaattgctgcagccctttggggagcccagacctaggagctccctgagcaagggctctgacacctgtttggggctctgcagttcctggcatctccaagcttccggacaccactgcattccccggtgccagcagtggaagctgctttcagtatgcctgtccagtcgcagcctcacaggaagcctggagccgcctaccccacggcagccggtgtgccctgctg

SEQ ID NO: 802049 - DNA, 593 bp, Homo sapiens
gtatatgaccaaaaatcctttctctgacattgtattaggccattcttgcattactataaaggaatacctgagactgtgtaatttataaataaaagaggtttaattggctcatggttctgcaggccatacaggcagcatggccctggcatttgcttgacttctagggaggcctcaggaaacttccaatcatggaggaaggtgaaggagaagaaggcacatcacatggcaaaagcaggagcaagagagagagagagagtgagcarggagttgccacatgcttttttcttttcttttttttttttttgagacagtctcactttgtcacccaggctggagtgcagtggcacaatgtcggctcactgcaacctccacctcccaggttcaagcgattctcctgcctcagcctcccaagtagctaggattacaggcatgtgccaccatgcccggctaatttttgtatttttaatagagacggggtttcaccacaaagttttaaatgaccagatcttgcaagaactcactgtcaagaagctaggaccaagccatgagggctccccatccaagcaccttgcaccaggcctccccccgagcaa

SEQ ID NO: 802050 - DNA, 593 bp, Homo sapiens
gtatatgaccaaaaatcctttctctgacattgtattaggccattcttgcattactataaaggaatacctgagactgtgtaatttataaataaaagaggtttaattggctcatggttctgcaggccatacaggcagcatggccctggcatttgcttgacttctagggaggcctcaggaaacttccaatcatggaggaaggtgaaggagaagaaggcacatcacatggcaaaagcaggagcaagagagagagagagagtgagcaaggagttgccacatgcttttttyttttcttttttttttttttgagacagtctcactttgtcacccaggctggagtgcagtggcacaatgtcggctcactgcaacctccacctcccaggttcaagcgattctcctgcctcagcctcccaagtagctaggattacaggcatgtgccaccatgcccggctaatttttgtatttttaatagagacggggtttcaccacaaagttttaaatgaccagatcttgcaagaactcactgtcaagaagctaggaccaagccatgagggctccccatccaagcaccttgcaccaggcctccccccgagcaa

SEQ ID NO: 802051 - DNA, 593 bp, Homo sapiens
gtatatgaccaaaaatcctttctctgacattgtattaggccattcttgcattactataaaggaatacctgagactgtgtaatttataaataaaagaggtttaattggctcatggttctgcaggccatacaggcagcatggccctggcatttgcttgacttctagggaggcctcaggaaacttccaatcatggaggaaggtgaaggagaagaaggcacatcacatggcaaaagcaggagcaagagagagagagagagtgagcaaggagttgccacatgcttttttcttttcttttttttttttttgagacagtctcactttgtcacccaggctggagtgcagtggcrcaatgtcggctcactgcaacctccacctcccaggttcaagcgattctcctgcctcagcctcccaagtagctaggattacaggcatgtgccaccatgcccggctaatttttgtatttttaatagagacggggtttcaccacaaagttttaaatgaccagatcttgcaagaactcactgtcaagaagctaggaccaagccatgagggctccccatccaagcaccttgcaccaggcctccccccgagcaa

SEQ ID NO: 802052 - DNA, 581 bp, Homo sapiens
acaatagttgatgagctaaaaaaaaaaaaaatcgcaaaaaaaaatctcgtaactttttaagaaagtttacgaatttgtgttggactgcattcaaagctgtcttgggctgcatgtggcccaggggctgcaggttggacaagcttgaaatctgagggctcactgtccttgttgcaagacaataagcatagatcctgatctctgctctctgttagcccctcccccatgatcacagtaggaactttagcagagtcgacgtgaacaaaatccctcatttccaacacagacgcccaaccactctacttgtgtaaasctgcacagtgagcctggataaattcttcatggcccatgaggtacgagatgagactttatttactatggtttgcaattatatccaagtcatctacatcagcactttctaaagtctgtttttgcagaatagtaacccacagagatgctctgagaaaagggttctgtgcacaaataattttgggaaatgccatgtactgctggagaatcaccatgttcattagcacactgaaggccctgagaagacttggaataaaggaagcagtgtaactcag

SEQ ID NO: 802053 - DNA, 616 bp, Homo sapiens
ggtatatagcaatacaatttatttttatatattgaccttgtatccagagatcttgctaaattcatttagttctaatagtttatgagtagattttattgtatcttgtaggtacataattatgtcattcacaaataatggttttatttattgctttcaatctttaaacctttattaccttctcgtcctttattgctctggctaggtcttctagtgtcatgctgaacagaagaggtgaaaacagtccatcttttcttattctaatttcaggagaatatccttcattatttcacaattaagyttgttatctactgtgagttttcttcttagtttttgtaaataacttatatcagaatttagaagttcccttctatttctaccttccttcaagttttaagaatgaatgtaaaattttattaaattttatctgcacctatgaattgatcataagatattcccctttattctgctaacagtataaataatattggttgagtttgaatattacaaaaactacgcattcacaggaccaatccaactttaactgtgacatattatccttttaaatatatcatcagattcaatttcctaatattttatataaattttttatgtttat

SEQ ID NO: 802054 - DNA, 616 bp, Homo sapiens
ggtatatagcaatacaatttatttttatatattgaccttgtatccagagatcttgctaaattcatttagttctaatagtttatgagtagattttattgtatcttgtaggtacataattatgtcattcacaaataatggttttatttattgctttcaatctttaaacctttattaccttctcgtcctttattgctctggctaggtcttctagtgtcatgctgaacagaagaggtgaaaacagtccatcttttcttattctaatttcaggagaatatccttcattatttcacaattaagtttgttatctactgtgagttttcttcttagtttttgtaaataacttatatcagaatttagaagttcccttctatttctaccttscttcaagttttaagaatgaatgtaaaattttattaaattttatctgcacctatgaattgatcataagatattcccctttattctgctaacagtataaataatattggttgagtttgaatattacaaaaactacgcattcacaggaccaatccaactttaactgtgacatattatccttttaaatatatcatcagattcaatttcctaatattttatataaattttttatgtttat

SEQ ID NO: 802055 - DNA, 628 bp, Homo sapiens
tgaataggattaaatcacgtatttacaaaatgcagcatcttattagtggtttatcacattagtggtttacgttggtccatttcccacctaattgaatacaaatgacaatgggagcaggagggtgaagtacacgatagatggcctccagggtggcgaagggtgatgaaagtggggctggggacttggtgcccaccctgcaaagcagcccttttatcagtgacagccactccattccaactgcrcttggatttccacattgggtattataggaagtaaggatggaagaggccaaaaaatgtaattccatggctcatgttttgcctgaatcctgtcttttcctctctccactttttggttaattagcaatggttcctataaaggcacagagctggggataacggcagccgggagctggggatgaaagcagtcaatagattcttgtttggtgggaagaatcttttaaggaaaaaagttggaaactagagagtatgagttccttaaggtagaaggctccaagttgattcaagaagataaagaagagagaaaaatgcaaaggaagataagaaactccaccacataggtagtgtgtaatcaacaagaggctgtggtttcctctctttcaaagata

SEQ ID NO: 802056 - DNA, 667 bp, Homo sapiens
ttgacaagtgtttaatatttgtgcgtgccacaggaaagacaatttttaactgtgcatggaagaatacgtaagagttagccagtcttagaaagaatggaagaacgttaagtaggaaaaataacatatacaaatgcacaaaaatgaaaatgcatggagtctttcacaagtagcaagcagtataggtaactggacyctctatgcattaaatgctgtgtgtgtgtgcatgcgcatgtgtgtgcacatgtgctgggattaggggcaaaagaaaaaccagtagacaaattgaagctggactgttgaaagttttgagtgacatgataaagtctctaatcttgtaggtaatggggagttattccagattttaaaatcagggcaatagcatgaccaagatgtgttttaaaaatatctttttggcagcagcttagaagagaaattgaggcaaaaacagaaggtggagctggattggaaccaaggaaaccagttggtagtctattttaacatttcaacagaaaactggggatgtactgaacaaaaacaatagcaaaagaaatagaagtcagggagtacagatatgagatattttagaggttgaacaaagtgtcttagtaactaactgaatgttggcgctgagtaggaaggaagattaaaagatatctaaggcatccca

SEQ ID NO: 802057 - DNA, 543 bp, Homo sapiens
aggggcacctgccagtacaaacaagttttctgtgtgcagaaccccccggttgtgggttggacaatgagacattaggccatcttccatgtaaaggaagtatcctgtgaaaggtacactgtgaatgttcacgtccagctcccctttatttctcatttggggaggttgactagccattctggtactaaaaccccagtgtagctgggggctttcaaracatccagtttcaaaattatgtgatgtaagtcaaaatatggctagctagggagcccaaagcccaatggtattgctctcagtaaatcacctgtctactgtactatcaatttcagatttcagaagattccaagtaaaagagagaacatttgatggaaatgaaatgcataagaacaaacagataaaatgtggaaaaaattaaaaagttctatattttaacaattataagtgggtttattaaaacatttttgtgtatctaggttttctttccaaatatgcattagtccgtttgatatctaccctgtgtagtttagtataacaaaatgcaaaaat

SEQ ID NO: 802058 - DNA, 600 bp, Homo sapiens
acagctaaattataccagacatataaagaagagctgatgccaatcacactaaaattattccaaaaaatttaggagtagaggctcctcactaacacattctatcaggccagcatcattctgatatcgaaacctggcagagataaaatgagaaaaagaaaacttagccaatatccctgatgaatgtaactgcaaaaatcctcaacaaaacactagaaaactgtattcagcagcacatcaaaaagttaatttgccatgatctagtaggatttattactaggatgcaagattggttcaacayacgcagatcaataaatgtgcttcatgacataaacagagttaaaaacaaataccatgtaattatctcaatagacatagaaaaggcctttgataaaactcaacattattactgaatcattcactatattaaagaaatattacattattacattgatctttctcttttgatagccttgctaacctttcaaattcagtctcttcagaataatggtctaaaccctctgctatgggctgagttgtgttccccctcaaatttattgaagttctaactcccagtatcttacaatgtgactgtatttgaag

SEQ ID NO: 802059 - DNA, 603 bp, Homo sapiens
cttttttaagttatctactctataaatagtaggtggtctccattcactatttactctcctccaacttggaaagaacctgctaatttatgatcagtaatatgcaagttaatgatggctagttttgattttaatatagatcacggtcttcgctgcttgttttattgatatgtgtaagatgtagacatctttgattagaaaatgtttaatatatctcttaaatcacatttaaaaataaactgtcaaatctacatgctactcaattctacctctggcccagtgcagctatatcatatcacaggaccctgggtgatcaagggtactagagatgtgtcacaggaacaaaaaagtaattgtaaagtcttagctcatagtttctgtctgtcccagaaattacaaggtcctcatacatttcttcccttttctcaaatgtatgcaccaagggggtgaattctggaccatayttgatgttataaaaggaaaagaagacaagtacaatgtgaagggtcagaatgtgagtagctgcttcccaggccgaagcttcaagaaacatcttcccagttaatgatgtgtaagagcactctacatcaaaagcaagaatttatg

SEQ ID NO: 802060 - DNA, 617 bp, Homo sapiens
aaatcaccaaatttgctctcatatagatgggttatgtacaaagtaatgggtgtttgtctttatcacatgtgatttctctaattaaattttatattrtctaaagtgagtcaaatatatgatgtggggggaagtgggagggcaccacaacattttaactctgctttctaacaagagaataggatgtaagaggaagaacaagtgggccacatttgaaagcccaagacatgtgaaatgaatctattatgtatttgtagctggaacacgtaaacactgccagtgaatttttaaattcttcatcttttgtcccacattcttacatacatgcacatttttcacatatttaacaagtaatacttttatcaccacgatttttgctattgattgcttctttaataacaaaatgcatcacaaacaaaaatgaatgaagctgtctgaggagaaaattccgtagtagctttactgtcaatgcccatcataaataaccatgacatcataggagccttatctacgggttgccgctactgatcgatggcatcactctagtagtgtaaatagcttctaatgtcccatcttccaccttcaaataggctctgattatttatgatagctgttaggtt

SEQ ID NO: 802061 - DNA, 617 bp, Homo sapiens
aaatcaccaaatttgctctcatatagatgggttatgtacaaagtaatgggtgtttgtctttatcacatgtgatttctctaattaaattttatattgtctaaagtgagtcaaatatatgatgtggggggaagtgggagggcaccacaacattttaactctgctttctaacaagagaataggatgtaagaggaagaacaagtgggccacatttgaaagcccaagacatgtgaaatgaatctattatgtatttgtagctggaacacgtaaacactgccagtgaatttttaaattcttcatcttttgtcccacattcttacatacatgcacatttttcacatatttaacaagtaatacttttatcaccacgatttttgctattgattgcttctttaataacaaaatgcatcacaaacaaaaatgaatgaagctgtctgaggagaaaattccrtagtagctttactgtcaatgcccatcataaataaccatgacatcataggagccttatctacgggttgccgctactgatcgatggcatcactctagtagtgtaaatagcttctaatgtcccatcttccaccttcaaataggctctgattatttatgatagctgttaggtt

SEQ ID NO: 802062 - DNA, 485 bp, Homo sapiens
gaggaaaccaaaaggcaccaaaataaatagaacaatattcctcccgtaattatctattaaagatcagtaaaatttcccctacttcctcaaagtgtcaaatcagtcatactttcagtttcatgaaagtgatctttaaaaaaggatagaggccgggtgtggtggctccagcctgtaaccctagcactttgggaggctgaggcaggtggattgcctgagctcaagcgttcragaccagcctgggcaacatgacgaaaccccatctctactaaaaatacaaaaaattagccgggcatagtggtgcatgcctgtagtcccagccattctggaggctgaggcacaagaattgcttgagcccgggagacagaggttgcagtgagccgagatcacactattgcactccagcctgggcaacagagtaagaccctgtctcaaaaaaaaaaaaaaaaaaaagcatagagacaagcccatctgtgccctcccactgg

SEQ ID NO: 802063 - DNA, 597 bp, Homo sapiens
ttcccagggtgttccaacccatagccatcactgttctccagatccctatctcatttacagtatccatgtaaatatagtacttgattgtgttcttctaccttcctctaattgtttaatatatgtcttgtttcttcgataaaatatgtaaactcgcaaatagtgactaggttggctttgtggattttctgtctctcacagttcctattgtaggaggattattgtgtggtctatatttttataacttgttaaaaattaaaacaatagctgaaaattatagaaagataaaatatctataattagaagcaaaatacagtyccactcagttggagaaagcactgttaactccttaatgaatatttctctataactggtttatatacatattttacaaaaatgggatccaattctacatattattctatagtggctgtttaattttgataatattgtcttctttatgccaataaatacatttatccaatcaaaatgttaacatctgcattttatttcattaggctgatataactgtaattttccaaactgatctctcagtagaatttaggttgtttacaactttttgctccctgaaacaatgcc

SEQ ID NO: 802064 - DNA, 605 bp, Homo sapiens
tgtgtattattattcccaatttaagaacgtagagatctaagtcgcagaaaggatgagcaactttccagaggacacatttaagtgattagtcagtggtgaagctaagaggcaaatttcggtctctctggctaaaattcttgcttttcccattccatcatcctgccttcccagaactagcttagcaatgtccaggctctaggacaactctcccttcttcttttaaaactataaaagagttaaaatattgagtgaagaggaagttaaataaagtaactaatactttgcatcaacaaaattaaatgtgttatttgcacaccatcaagaaatgaaattttcatgaaattgaaagcagtatctaaaatatcaatataactaagctctattayagtcaatttctcagttttttttaatatatgaatacatttattttcttggaactcaattcagtcctatatttaaaaagggaaagcaaagtaaagcataagtgtgactacaaaaatatattcaatgtttaactatgtatttggggaaatttttaaacatacctcttgaatagttttaacatttatagcaacatcattacggcaacgaacaaaaaatatgca

SEQ ID NO: 802065 - DNA, 609 bp, Homo sapiens
gggggtcttactccttggaagccacactgtgggcagaggtccaccaccctgttgctgcagccaaattcattgtcataccaggaaatgagcttgacaaagtggtcgttgagggcaatgccagccccagcatcgaaggtggaagagtgggtgtctgttgaagttggaggagaccacctggtgctcagagtagcccaggatgcctttgagggggtcctctgacgcctgcttcaccaccttcttggtgtcatcatatttgktaggtttttccagacggcaggtcaggtccaccactgacatgttggcagtggggacacggaaggccatgccagtgagcttcccgtttagctcagggatgaccttcctcacagccttggcagcaccagtagaggcagagaggatgttctggagagccccatggccgtcaccccacagtttcccataggagccatccatagtcttctgggtggcagcgatggtcatgagtccttccacggtaccaaagttgtcatggatgaccttggccaggggcgttaagcagctggtggtgcaggaggcattgctgataatcttgagctgttgtcatatttctcatggttcacacccatcacg

SEQ ID NO: 802066 - DNA, 578 bp, Homo sapiens
atatcaattcaatatttagcacccctactactttttaaaatttttcttattatagttatagaatataaagaaagtattaagaattgtgtccctacccaaaaaagatgggttaaaatcctaactcccastacctcaaaataagacctcatttcaaaataggttctgatatggtttgtatgtttgtcccatccaaatctcatgttgaaatatgatcctcagtgttagaggtggggcctggtgggaagtgtttgtctcaaggggacagatccctcatgaatgacttggtgccatcctcgaaataatgagtgagttcttgttctatacatgcaggatctggttgtttaaaagaatgtggcacctctccctcctcactccttctcttgccatgtgacacttcctgctcccttttgccttccccagtcattgtgaacttcttgaggtcctcacaagaagcagatgcccgtgccacacttcttacatagcttgcagaactgtgagctaaataaacctcttttctttacaaattacccagcctcaggtattcctatatagcaatgtaaaaacagcctaatacaggg

SEQ ID NO: 802067 - DNA, 578 bp, Homo sapiens
atatcaattcaatatttagcacccctactactttttaaaatttttcttattatagttatagaatataaagaaagtattaagaattgtgtccctacccaaaaaagatgggttaaaatcctaactcccagtacctcaaaataagacctcatttcaaaataggttctgatatggtttgtatgtttgtcccatccaaatctcatgttgaaatatgatcctcagtgttagaggtggggcctggtgggaagtgtttgtstcaaggggacagatccctcatgaatgacttggtgccatcctcgaaataatgagtgagttcttgttctatacatgcaggatctggttgtttaaaagaatgtggcacctctccctcctcactccttctcttgccatgtgacacttcctgctcccttttgccttccccagtcattgtgaacttcttgaggtcctcacaagaagcagatgcccgtgccacacttcttacatagcttgcagaactgtgagctaaataaacctcttttctttacaaattacccagcctcaggtattcctatatagcaatgtaaaaacagcctaatacaggg

SEQ ID NO: 802068 - DNA, 578 bp, Homo sapiens
atatcaattcaatatttagcacccctactactttttaaaatttttcttattatagttatagaatataaagaaagtattaagaattgtgtccctacccaaaaaagatgggttaaaatcctaactcccagtacctcaaaataagacctcatttcaaaataggttctgatatggtttgtatgtttgtcccatccaaatctcatgttgaaatatgatcctcagtgttagaggtggggcctggtgggaagtgtttgtctcaaggggacagatccctcatgaatgacttggtgccatcctcgaaataatgagtgagttcttgttctatacatgcaggatctggttgtttaaaagaatgtggcacctctccctcctcactccttctcttgccatgtgacacttcctgctcccttttgccttccccagtsattgtgaacttcttgaggtcctcacaagaagcagatgcccgtgccacacttcttacatagcttgcagaactgtgagctaaataaacctcttttctttacaaattacccagcctcaggtattcctatatagcaatgtaaaaacagcctaatacaggg

SEQ ID NO: 802069 - DNA, 607 bp, Homo sapiens
gagaaatgaattaaaacaaattgaacagtgatgcaccatttacctagatgattaccatgagacagtgtaaaaatatgaaaagagactgaagaaaagcacaaatcacttgagagaatattaagtcagtaatgcacatgaattatttggctagtggattttatctgcaaacaagcaaattagaaggcgtgatggtggggccaggtttgtctgctacacagtacttccaatatctggcacaaaaatayaccaaaaatatttgttgaataagtgaatttgttcattctggaaagcatttattcaatgtcatctgaataaaagtaaagtaacagaagattttattatcctcttttaagaatgcaaggtgagaaagaaaatctattactatttttagttagtatatatagcgcatttattctagcagggcctcagctaattgcttaatgtgggttatttagtgctattttcgttaatgtctctattttagaattaagaaaaaataaagagaagttttagagttggcaagtaatttatctaaagtcaataattagtaaatggtgaaaccgaggcagcaagacttctgagtcaattcactatattgcctaaaagc

SEQ ID NO: 802070 - DNA, 633 bp, Homo sapiens
atgattcaatatatcctacataaatatcaattgaatccagattttgatggttactgataggcaaaagtaggcactatattaccaggttaattgttgcattaaaatggattatagtgttccagcttggattatggcaaaaccctgtctgtataaaaaatacaaaaattagcggggtgtagttgcatgtgcctgtagtcccagctacttgcaggggctgagcagggaggatcgcttgagtctgggaaagtcaaggctgaggtgagctgtatttgygggtgaaaccctgtctcaaaaaaaaaaaaagattatagtgttaatctactagtttcaaatgtttgcaatcatctacaaataattaatatcaaattgttctacatcttggattaaacccaactgtaaatgaaaggattgccaatgatagtgacagtgttgatatttgaatgacatatttaaaaataagagaaacaccttttgaattttttgtcttctttgtagttaagatgccatcaacagcaaataataggacattgactcaaacttacttgagtcctaaggaattttttaaatcatttcacataatgagcaggaaaaagggaggaagttttcttgattggttagtttagttgctcagag

SEQ ID NO: 802071 - DNA, 633 bp, Homo sapiens
atgattcaatatatcctacataaatatcaattgaatccagattttgatggttactgataggcaaaagtaggcactatattaccaggttaattgttgcattaaaatggattatagtgttccagcttggattatggcaaaaccctgtctgtataaaaaatacaaaaattagcggggtgtagttgcatgtgcctgtagtcccagctacttgcaggggctgagcagggaggatcgcttgagtctgggaaagtcaaggctgaggtgagctgtatttgtgggtgaaaccctgtctcaaaaaaaaaaaaagattatagtgttaatctactagtttcaaatgtttgcaatcatctacaartaattaatatcaaattgttctacatcttggattaaacccaactgtaaatgaaaggattgccaatgatagtgacagtgttgatatttgaatgacatatttaaaaataagagaaacaccttttgaattttttgtcttctttgtagttaagatgccatcaacagcaaataataggacattgactcaaacttacttgagtcctaaggaattttttaaatcatttcacataatgagcaggaaaaagggaggaagttttcttgattggttagtttagttgctcagag

SEQ ID NO: 802072 - DNA, 632 bp, Homo sapiens
gtttcaccatgttgaccaggctggtctcaaactccttacctcaaataatccatctgaaagtgctgagatgacaggcatgagccaccgcacctgactgacttcaggttttacctgttggcatacttctggggtcttgcgtccctactyctgtgattcttcccttaagtggtgtgtctgcgtgtgcagtggcctgctagcgcttagaagcggagcatgcacagtgcgtttactagtgttgtactcgtgaccacttgatgcattttttccttaccagttgagtgtccctggaggaaggccacatactggttaaattccgccattttggctcttagtgcgcatgcctgagcccactcacccaactgctgaggttttattgggaagctgctgatcaccagtttcaggtatttctgtttattgggagactgcccttccctagcactggctgggaccaattattattttagaaggacagtttaacaatgaccgtcacctgatggtcgcctgccattcctggtgtgtgcgtagtgggggaagccctctcctcccctactcatgcctgactaggtacctactgtagcataggtatttactcatttgttagagaagtaatgggagttacccttgggaggtgg

SEQ ID NO: 802073 - DNA, 632 bp, Homo sapiens
gtttcaccatgttgaccaggctggtctcaaactccttacctcaaataatccatctgaaagtgctgagatgacaggcatgagccaccgcacctgactgacttcaggttttacctgttggcatacttctggggtcttgcgtccctactcctgtgattcttcccttaagtggtgtgtctgcgtgtgcagtggcctgctagcgcttagaagcggagcatgcacagtgcgtttactastgttgtactcgtgaccacttgatgcattttttccttaccagttgagtgtccctggaggaaggccacatactggttaaattccgccattttggctcttagtgcgcatgcctgagcccactcacccaactgctgaggttttattgggaagctgctgatcaccagtttcaggtatttctgtttattgggagactgcccttccctagcactggctgggaccaattattattttagaaggacagtttaacaatgaccgtcacctgatggtcgcctgccattcctggtgtgtgcgtagtgggggaagccctctcctcccctactcatgcctgactaggtacctactgtagcataggtatttactcatttgttagagaagtaatgggagttacccttgggaggtgg

SEQ ID NO: 802074 - DNA, 573 bp, Homo sapiens
aagcttttcaaaaatttcattgcagtaaatatttctcttcacactggcttttgcctcaagggtctggagaagtcttggtggttccttgtatgaaattcccattacttggctggcccatttttacccacagaaacagtttaatgaggttcaccctaatcctaacagaggagtaagattcagacgggcataataatgaatgcccatctcaactcactgttgctttgtgcaggcacaatgatgtattttctatattgaatcatttgttcatcatgaccaccattccattgtgcaaatgaagaaactraggctggctgggtgcaggggctcacgcctgtaatcctagcactttgggaggctgaggcaggaggatcgcttgagcccaggagtttaagaccagcctgggcaacatagtgagaccgcatcactacaaaaaaattaagaattagctgggtgagctggtgctcgcctatagtcccagctacttggggggtctgaggtgggagcatcacttgagcccaagaggtcgagattacagtgagctatgattgtgccactgcactccagcctggggaa

SEQ ID NO: 802075 - DNA, 511 bp, Homo sapiens
gattaacacctgacagacaacaaaacaagcaaggacctttttgtatgtgcaaattcacagaaaatgtaaggaaacccatgatatattgtaggatttttttttaaagcaggtttcagggaataaaaattaaactatatgggtattaaatgtgacattaaaaaaaaaatctacaaggatacacatccatcccaatggtttacacagaggatggtcatttccacaaagctaggctggatctgagkaggtgggtggctgcccacattggttgaagattttttttctattttaactaaagaatacacactattttagtaaagaaaaaagatgcaaaaacaccctctacttagattccccaaccaagccttgtcagggtcttctgggcattcttgacacagcctagaagaatccaagaaggtgcactcggactgcccaaacccagagatggggatgccaggcagaggccctccccagcaaaacacacatatggacaaaacacctgtgtgctgctctc

SEQ ID NO: 802076 - DNA, 646 bp, Homo sapiens
tgttgggtacacctgcagaaaggctgttgcttcacacttggaagattgcacagcggccaggcagaggtgctcctcacttcccagatggggtggcagccgggcagaggcactcctcacatcccagatgatgggcggctgggcagaggcgctcctcacctcccagacggggtggccgggcagaggcgctcctcacttcccagacggggtggccaggcagaggtgctcctcacttcccagacggggcagctgggcagaggcgctccacacttcccagacggggtggccaggcagaggygctcctcacttcccagacagggcagccgggcagaggtgctcctcactttgcagatgaggtggccaggcagaggcgctcctcacttcctagacagggtggcagccgggcagaggtgctcctcacatcccagacaatgggcggccgggcagaggtgctcctcacttcccagacggggcggccaggcagaggcactccccacttcccagacagggtggccgggcagaggcgctcctcacttcccagactgggtggctgctgggcagaggcgctcctcgcctctcagacggggcggccaggcagaggcactcctcagttcccagacagggcagccaggcagaggtactcctcacc

SEQ ID NO: 802077 - DNA, 626 bp, Homo sapiens
gccaccatgcctggctaatttttgtatttttagtagagatggggtgtcaacatactggccacgctggtcttgaactcctgacctcatgatccacctgcctcagcctcccaaaatgctgggattacaggcatgagccactgtgcccagccttgtacttgatattttatcaagawtatctgccaacaagttacccatattcgggtttcaatgagcctggaatcttctttccacttgataggggtatgtattaggaaatccagttgatgacatttttatttaaaaaatcaaaaagaatcagcacagtcaggttgtcttagtcttaaggatttctggattcctttcttggaggaggtcaggatctttccaaggcttgggtccttggatattcttccagtcatcaaaagtggagtcttttctcatattctgactctaatgatactatttgctttcagtttttttccaactcaggatcaattttaatcttcactgcatcatgtcagatttgtaaaaactcacgaacaccaaaagaaactccaacaattagcaacaacatggggacttcgtagtggagagtcttattcttgcgcaaagcacgcatcactgcgggtgcaaacgactgaactctt

SEQ ID NO: 802078 - DNA, 691 bp, Homo sapiens
gccaaggaaaagactctgggaggatcctgaggaccccccggttgcagccatgttgagagtgatgctgaggaggaccccaactgtcatgagcaacacccattgaacacagccacccacctggggacaaatcaagaagctgtcawaaatggcagaaaaaaacctgagaaaagcgagacaaccagtcacaacgaataatttaatggtagctatgatagtggttatcaccactgctgtgagtattccttcaataagggctgacacagagaacaattatacttattggttatatttatcagtcttggctggcaataatgcctggatgcaatcactttatgacacagttacacatgctttctgatctcagtatttaccataataaatctgctcctataattgaggcataccaccctcaaaaacctatttgtaaacaggattggacccagttagaaaaaatgaacctactagtttaggaagattgcattgcagagcaggcagaggtgctgcacaatgattcctatggaatcattattaattggtcccctaaggggatgtttagcttgaattccacctctcagtctgcatgccaggcccacactatgttcagctggtctgaacaaaatggtcagatggtagatataataagaagtacagcaagagttcctattatctggaaccatggcagtatagtggc

SEQ ID NO: 802079 - DNA, 691 bp, Homo sapiens
gccaaggaaaagactctgggaggatcctgaggaccccccggttgcagccatgttgagagtgatgctgaggaggaccccaactgtcatgagcaacacccattgaacacagccacccacctggggacaaatcaagaagctgtcataaatggcagaaaaaaacctgagaaaagcgagacaaccagtcacaacgaataatttaatggtagctatgatagtggttatcaccactgctgtgagtattccttcaataagggctgacacagagaacaattatacttattggttatatttatcagtcttggctggcaataatgcctggatgcaatcactttatgacacagttacacatgctttctgatctcagtatttaccataataaatctgctcctataatkgaggcataccaccctcaaaaacctatttgtaaacaggattggacccagttagaaaaaatgaacctactagtttaggaagattgcattgcagagcaggcagaggtgctgcacaatgattcctatggaatcattattaattggtcccctaaggggatgtttagcttgaattccacctctcagtctgcatgccaggcccacactatgttcagctggtctgaacaaaatggtcagatggtagatataataagaagtacagcaagagttcctattatctggaaccatggcagtatagtggc

SEQ ID NO: 802080 - DNA, 622 bp, Homo sapiens
tggatcacaaggtcaggagttcaagaccagccttaccaacatggtgaaaccccgtctactaaaaatacaaaaattagctgggcatggtggcacaagcctgtaatcccagctactcgggaggctgaagcaccagaatcacttgaacccgggaggcggaggttgcagtgagccgagatcacatgactgcactacagcctgggtgacagagtragactcagtttcggaaaaaaaaaaaaatctttaccttctgaaatcagtttatcagtttataaaaagttgaagaggcatttgcattttcaaatttacagacaccaatgccaaactatattgtgcccacttgtcaatgcttctcttttaacataacactgaaaatatgtggcagaagaattagtcaaaaaataaaaaacccattgaaattgaagacaagtaaaatgtttgtttgtagatcataaaatcttacatataaaaatacataaacagtacattaaaacctatctaataaatacactcagtaaattaccaaatataaactcaacttataagttatcattctataaacctaaattgtctaataaaataaaggaagaaagcaatattatttataatagcattaaaataatat

SEQ ID NO: 802081 - DNA, 637 bp, Homo sapiens
tggcaacacaataagccccaacatttgcattgtatttcagctcactgaagcacagctctcttcagtagggaagagagttctttactcccctgtaaagaacatgcacattttgattttacttgtcctctgaccttttactcattataatagtaaaaaacacacaagtgagtggagattaaagatgctaataagatatgtgacacataagcatgtacagccactgtgtatgtacaccaacaagaccactcagaacatgctaactaataacaccactttccacctcttcataaataatgatctaagactcccataratggagtctctctagttccagtctttgctgtctcattcttataagcagcccaccctgaatcccttctctcttggggctattttgcacctaatttttaaaatagtatttcaactttgcaataaatccctctatgttgcatcttcattgttttgtgtctcttgtttaaatttttgaaactaagaaccaaggtctcacaacagccatcaacactatcgtgctttgttttgtattcttcattaacagtatttttgggaatatgtcaatatctacattttaaacacagcccaaactgctaaattaaaaatttaaatgattgtaaaagca

SEQ ID NO: 802082 - DNA, 513 bp, Homo sapiens
cttgttcagaaaaaatagtgagaagaaattaggatcatttatttacttgaggcacatgagtgttctttatgtatgactcaaggacatcccacttctgtcctccctgatcttccatcttccatctgctttcctccctcttcccatctccctttcctcatattcctctccctctccctcacctrtaggactgagaattcctgtggtctcctgagatcagtttctttccaccagattgtaaacaagctgtggaaagttttagttcttagcgactccacgacccacactagtcaggcagaagcccccatgtacaaggtaccccttgagccttggcaaggtgcatgacacacacttggtcactggaggaaatgatgagtagagagtgacaagcagaggaggggagctttgggcctgagtcctctggggcacaagagtggttgaggcttggcacttgccacctagatttcagacaatgtgtcaggaatcctggatgcccagaaagaaacctgctcaggg

SEQ ID NO: 802083 - DNA, 515 bp, Homo sapiens
gcttgagcagccctccagcctactgctgcactgtgggagcccctttctgggctggccaaggccagagccatctccctcagcttgcagggaggtgtggagggagaggcatgggtgggaactggggctgcgcatggccttgtgggccagcacgagttccgggtgggcatgtgctcagcaggccctgcactcagagcggctggccagcctgcaagcccagggcagtgaggggcttagcacctgggccagcagctgctgtgctcaatttctcaccggaccttagctgcctccccatggggcagggctcgggacctgcagcccaccatgcctgagcctctccaccgtccgtgggctcctgtgtggctggagcctccctgacgagsgctgccccctgctccacggcacccagtcccatcaaccacccaagtgctgaggagtgcgggcgcatggcacgggactggcaggcagctccacctgcggtcccagcatgggatccactgggtgaagccagctgggct

SEQ ID NO: 802084 - DNA, 419 bp, Homo sapiens
caaggcatgcttaatagtcccactatttgtcagtattttgtggggcgtgtgcttcaacctgtcagggatcagtttccccgatgttacatcgtttactacatggatgatctcctctgcacagcccccccatacaccattttgatttcctgcttttctgtgattcaacaggscatttcagaagcaggtttgactattgcaccagaaaaaattcaaactacctctcattttcaatatttgggcatgcagttggaagacaagctgattacaccacaaaaagttcagcttaggagagacgccttaaaaactttaaatgactttcaaaagttacttggggatattaattggatttgcccttctttgggcatccctacatatgctatgtcaaacctttttgccacattatgtggggatccagattt

SEQ ID NO: 802085 - DNA, 444 bp, Homo sapiens
caaattattttgttctttcttgctctctgattatctcactcattactctggacttggacatttttccttaagatttttaattaattttattaatttttgttagtgctcattcttacccaatgggtagatttttttcttgatgctgaaatctatccaaacatcaccagtgacatttcyttgaaagtagtgcttttgtctttcagacttgcactcacgagtccttgaccaaattcttgctttctggcacaatctgaagcccaaaggctctaagaatcttactgtatcccagatatggaacttgttacatctccttctagttgtcaaaggtctttggaagccaggatctgattcatagatgagcttctgttcagaaatggcatttccatttatacttttagaagatatataaaatttatttctatgaaaaaggttattacttgacaa

SEQ ID NO: 802086 - DNA, 444 bp, Homo sapiens
caaattattttgttctttcttgctctctgattatctcactcattactctggacttggacatttttccttaagatttttaattaattttattaatttttgttagtgctcattcttacccaatgggtagatttttttcttgatgctgaaatctatccaaacatcaccagtgacatttctttgaaagtagtgcttttgtctttcagacttgcmctcacgagtccttgaccaaattcttgctttctggcacaatctgaagcccaaaggctctaagaatcttactgtatcccagatatggaacttgttacatctccttctagttgtcaaaggtctttggaagccaggatctgattcatagatgagcttctgttcagaaatggcatttccatttatacttttagaagatatataaaatttatttctatgaaaaaggttattacttgacaa

SEQ ID NO: 802087 - DNA, 602 bp, Homo sapiens
cagcttctattgctaattttgtaacctccacaactctattcctaggaacccggaggagtaatgaaaagtagtatttggtgatcaatgtgctcaacaggtagttcaggcacaaacaatgaccctcacaaaaatcacattattcttgcrtcttgggttagttctatatatggggtgataaatccatcccaatttgctttagtctttcctgcttagtaataaatgttgggtatccctggacctcttcaatcccaggtaattcctggttgatcactagcaatgagtttcccaagaacaacctcagattcagtcatttgttggacaaattaacaagactcaaattacagttataaatatagtctttattattactattattatttgagacagagtctcactctgtcacccaggctagagtacagtggcacaatctcagctcactgaaaactctgcccctcccccacttcatctcggactgaaacaatcctctcacctccgtctccccaaatagctaggaccacagatgcgcgctattatgccagttaaatttttgtatttttggtaggtacggggtttcgctatgttgcccaggctcaagctcccaa

SEQ ID NO: 802088 - DNA, 512 bp, Homo sapiens
atagaatactgaaaattattagaacctcttgataacgttttcctttttgttttgtggattttctaatgtgtagaaatgttaaaagaaaaatgtaatgaacaccttttacctagactaattgttaacttgttcatgttttttattctctctctctcattctctgtatcactattagagtgatttaktcaatttatagatttattcaattccatgtgttagcaattagtggcatcctcttgatatttaaagtctctcaaatttagagagtaagatacacttcaagcctgtatctgtttcctttagacatgaaattgttagtaattagacaattcctgccttgaattatgttgaaaacaaatgttgtttgcattatacctgtttattaaagagatatagaaattcaacaatatctatcaaacttaatatataatcttgttatttaaaaatttgcctctagattcttgtgggccttctaggtacatgaccctatcatgtgggcacaatgtgaccct

SEQ ID NO: 802089 - DNA, 578 bp, Homo sapiens
ttaaaattctactccacccctgcattcaagattttggctgttatttctcctgattctcagtggacctgctgttaatagcctctcatctaatttgctgtgggccagcaagccagataatgaagtctattagaattgtgtacaaaataaggttactgattaaagttaggacctgactgcctctcctgatgcttctcccacaggataaagtccatggtcttgatgatagttattttgacctcttaaaggccttctttgtttccttccaggttctggacatcttccagaaaggccacctaagattactggcagtctaaactacagataatggggatgktaccacagttcacatctactataatctaatctgttgaaacctttgctctatctccatgctgtgcagaaggacaagtgagctttatgatctaggggaactaggtttgcataactttaatgtagttaacaacagaacaatagagaacaagccattaacccaaagagcaaaggcaaggcctgttaggacaggaaaatgagtgaagataaaatatatgccaagttctgcctcctacgcccaaaagcct

SEQ ID NO: 802090 - DNA, 578 bp, Homo sapiens
tttacttgcctcttgaggaagttcctttcacaagacccttacccctccattgcacaccttttcagtgaaatagcactagagataaaaaaaagaatgctgtgcccttcaaccaaatgggaaagaagtgtggactagattcatccaatggggaccagagtggccacagagagagatagcgtttatggcaaacttgaaraataacaatcaggaagaccaagttaagttaccagtcccattgtaagaaaaagtcaacttctgcaggacaggaagctctcactgaatagagcttttggcaaggcctgacaaaacaaaagctgtcatccctactgaagtgaggtcaacatggagatatgaggaaggggccatttcactttttccttgacatgttattcagtaagtatgtgtgaaaatggtctgaaaagcaacattccttccccaaagcctaatgcctatcaagacacctgggtcacagcttccaaagcaccaagatatctttagccaccccaaaggagaaaacttcattttgtgcacagtctaaaaggtttgagacctgagttctgggataacttaaatgggag

SEQ ID NO: 802091 - DNA, 601 bp, Homo sapiens
tatcctagcttcagaaataacttttgttaggcctgttagtctgaggagggatcctaaaattcctagtagtccccactacagcagggctttgggcaaaaactgtgtctttctgattggtgagcctgggtgcctaaagaaggtaacagagtcctggagtttatactagaagtcattcttataggagaaacaagaaaagcaccagaggcaggtagcaatttttagaagtgggtcaagcctcagagaagagaggcgagaggaagtttgtctggcaggcattaggacccagagggcaagggtcaggatagataggatagatgggcgagtctcgcttgggcaacatgcttttgagagttccactcatggccacagggtaaaccaacatgttgtcgggaccccggagctgcatggctttcctctctgtcgaccctyggctcagcccagaagtacaagaaaagcggaagctggttctaggcaaaccaacggtcccaactccgaagagtcgggggttgttagagagccctttcccagaaagcctgacacccgtgtctttagtccggtggccgcgctagtcgcttttatctggccgacaggggcccggtat

SEQ ID NO: 802092 - DNA, 601 bp, Homo sapiens
tatcctagcttcagaaataacttttgttaggcctgttagtctgaggagggatcctaaaattcctagtagtccccactacagcagggctttgggcaaaaactgtgtctttctgattggtgagcctgggtgcctaaagaaggtaacagagtcctggagtttatactagaagtcattcttataggagaaacaagaaaagcaccagaggcaggtagcaatttttagaagtgggtcaagcctcagagaagagaggcgagaggaagtttgtctggcaggcattaggacccagagggcaagggtcaggatagataggatagatgggcgagtctcgcttgggcaacatgcttttgagagttccactcatggccacagggtaaaccaacatgttgtcgggaccccggagctgcatggctttcctctctgtcgacccttggctcagcccagaagtacmagaaaagcggaagctggttctaggcaaaccaacggtcccaactccgaagagtcgggggttgttagagagccctttcccagaaagcctgacacccgtgtctttagtccggtggccgcgctagtcgcttttatctggccgacaggggcccggtat

SEQ ID NO: 802093 - DNA, 620 bp, Homo sapiens
gttaccacatacaaaaatcaactcaaaatggtttaagaacttaaatataagacctaaaagtataaaactactaaaagaagtcatgagaaattgccttaattcattaggctgggtaagggatttggggatattactctaaaagcacagccaaaaaacaaaaacaaaaacaaaaaaacagataggcaaagggattgcatcaaactgaaaaatttctacacagcaaaggagacaatcaacagaggtaagagacaacctacaggatgggagaaaatattttcaaaatgtacatytgatacggggttaatatccaacgtatataagaagctcaagcaatagcaaaacaaaagccaatttaaaaaatgggataggatctgaatagaaattgctcaaaagaagacattcaaatggctaaaaagtatattaaaaatgttcagcattattaatcattaggaaatgtaaactaaaaccacagtgatacatcacctcacacatgttaaaatggctattatcaaaaagacaaaagataagtgttggcaaggatgtggagaaagaggaaccctcgtatactgttgttggaaatgtaaagggatgctgtcattatggaaaacaatacagaggtt

SEQ ID NO: 802094 - DNA, 668 bp, Homo sapiens
ctgaaccttacctgggccagaagggatcccactacccttacaggtgagttccaggccttgcagcattgaccacaagctgacagaagagcccttgggctttaagcgaacatcatggtggcctggcaaaaaccagtcaccaccatggaccagtggtggtggtggccacagggggaggcctctctgcctgtggagaggagagagaagagtaggaaggactttgtattgtggtgtgggtgccagcttagctgcagtagaatacatcaggtaaactgctaaggcttttggctctaagtctttgctcccagacagcatctctggacatgccaaagggcctgggggaacttgccatcctgaaggcaagggccttgggcaagacccagtgctactgtggcttcaagtctgaccyagcacagtcccggtggtggtgactacagaagagcttgcatcataacactcccagctctaggtagatgagcacagagagagagacagcatttgtctgggaaaaagtaaggaaaaagaaaatgtaagggaaaaagaaaatggtaatctctggatcagcttcctggtaatccagagattattctggatcttctctaagaccaccaagggggtacctccttgagtctgcaaaaaacaccacatcattgatgggcttgaggcccaag

SEQ ID NO: 802095 - DNA, 636 bp, Homo sapiens
tgaagaaaggatcagagtctcctaataacagaatcaatcaaacagaagaagaagttagtgagcttgaagacaggctatttaaaaatacacagtcacaggagataaaagaaaaaaaatacaatgaatacacttataagaaaaaacctcaaaagagcaaactaagaggaggtagataatgaggtaggggtagatctttttattttgtttgagtcttgctctgtcgcacaggctagagtgtgttggcacaatcttggctcactgcaacctgtgcctcctgggttcgattctcctgcctcagccttctgagtagctgggattacaggygcccacgaccatgcccagctaatgtttgtatttttagtagacacaaggtttcaccatgttggccaggctggtctcaaactcctgacctcaggtgatccacccgcctcaacatcccaaagtgctgagattacaggtgtgagccactgcacccagcagaagtttttttaaagggcttctcaaatctatagagagatatcaatattcaagtacaaaagggttgtggaacactaagcaaatttaacccgaagtagactacctcaagacatttaataatcaaacttccaaaggctagggacaaagaaaggatcctaa

SEQ ID NO: 802096 - DNA, 624 bp, Homo sapiens
ctctctctccctatctgaacaaatagtaatagcccttcccttccccttcctgtcccctagtccttctacctgcctattgattgtttaaatgaaactgacagaagagaggaggattataatacttcctattgttgctaattaagcctcttaacttttgaggaatataactatttattcttattgaaacaaccactggattcaataaaagattatggatttggaagtcacattgttgaacaatcagtgtttaggaatcacatgactgaataaaggcaccattacctataaggaaaatacacaggaaaagttcttgtgatataaaatctcatttgcttcctaggraaaaaaaaacgaaatgtcttttctacttctagtatgctcttctgaaatctagttttgctcatcagtaggaattcaaatgtttgacatctatggttcctgagcttagagaggagagagcaaaaacaaaaattgtgctgctaagccaatttggaaagaaaagtcaacatgagcaaaggtttacacattgacctcataattttaaacatcctgaaaatatctctaaaaccacttatatttaatttatgtaaattaaattttcatttcatcaaataaatatacaca

SEQ ID NO: 802097 - DNA, 624 bp, Homo sapiens
ctctctctccctatctgaacaaatagtaatagcccttcccttccccttcctgtcccctagtccttctacctgcctattgattgtttaaatgaaactgacagaagagaggaggattataatacttcctattgttgctaattaagcctcttaacttttgaggaatataactatttattcttattgaaacaaccactggattcaataaaagattatggatttggaagtcacattgttgaacaatcagtgtttaggaatcacatgactgaataaaggcaccattacctataaggaaaatacacaggaaaagttcttgtgatataaaatctcatttgcttcctaggaaaaaaaaamcgaaatgtcttttctacttctagtatgctcttctgaaatctagttttgctcatcagtaggaattcaaatgtttgacatctatggttcctgagcttagagaggagagagcaaaaacaaaaattgtgctgctaagccaatttggaaagaaaagtcaacatgagcaaaggtttacacattgacctcataattttaaacatcctgaaaatatctctaaaaccacttatatttaatttatgtaaattaaattttcatttcatcaaataaatatacaca

SEQ ID NO: 802098 - DNA, 476 bp, Homo sapiens
gcttcaaaagcctcctccatgttgccttccctgggccttcctcctccttccctctgcgggaagggctctcccttctctttcccctctataagcacccatttgtgctatacatgtaaattatatcacaatgctttgtaccatggatgtttgtgcctakgtttcattctcttccttgaggtcagggacattgtctgtgatgttagatcccttatagtacccagacagggctttgtctataataggaaaatggataaacaagaaaatggaggactttgggcatgaggattcactgacctggttctccttgtctttctgtcttgcatgtcatgaacctcactgcatccactctgtttttagatctcactgagttcatgtgttcaaccatacaccttattgggtgctcttacggacactgtgatgtgctatccagctcctgggggtgctgctgacagcaagccctcagcccttatcacaca

SEQ ID NO: 802099 - DNA, 526 bp, Homo sapiens
ggggctccacaggagcaggagacatgaacagttgggcaacactgcaattcatcctatacctgcctccagattcaacacgactttttccacagggctatcgtgagggtccaaagaaacaaactcttccttacaaaatgtaaatattagctgttattttaaaactataaatgttaattcttggctaggagtgktggttcatgcctgtagtcctaacactttgggaggccaaggtgggagaattgctcgaggccaggagttggaaactagcctgggcaacatagtgagaccctgtctttacaaaaaaaaaaaaaaagtaaatgcttatttttacttttcactattcccaaatttaagtaactcctgattgcttatgaaagttcaaactgttcttgactggtggtcatggaaaagaaaaaggaaagttgaaactgatcctagaatttaagaccacctttaaatgcaccgagctatttttctaacccttctccctttaggaatccctgtattctcatcagactgttcactg

SEQ ID NO: 802100 - DNA, 583 bp, Homo sapiens
tcttgcaactatttgaacctggctttgggaggtcacttgaaaccaattacttttatatacacatttaaaaattatttactgcacagaacatttataagggctaggaagtccaagaataaatatggcatggtagccagagaatgcacacaggtttattctttttagtctgtaacgaatgactgaaatagaaacactgatcagcaatggctactaaaatcagagaaatgagagacagccagacactgtgtgtccctgaaggggggycacaacactagctacaaagcaatgttgccccaaaaaaaaccccaaaacaacgaagccaaaacaaacaaaaaactaacctctagatccaattaccaatttataggaaatagaaacaacagaagaaggcgtataactatactgtggagaatataaccttcaaaatcttggcagtgggaaacgctataggacaaacaacctgatcccttccacaaataagttacgagggagaaaaaaagatgaagggagaacttcagagacttaaaagacatattaatcaattccaatttgtgaccgttatttggatcctgatttataccaa

SEQ ID NO: 802101 - DNA, 629 bp, Homo sapiens
gtaaggctgggcatggtggctcacacctgtaaccccagcactttgagaggccaagatgggaggactgcttgagcccaggagtttaaaaccaacctgggcaatatggtgagacccccatctctacaaaaaaatttaaaaattagccaggtgtggaggtccrcctgtggtcccagctactcaggaggctgaggtggaaggattgcatgagcccaggaggtttaggctgcagtgagccaatgtttgcaccactgcactccagcctgggcaacagagtgagaccctgtctcaaaaaaataatgataaaagtaaatgaatagaacattatttgagacacacattataatgggtaatggcattttaggccacacacactccctggttaggaattgaggcagaaaccacctttccacctctattcaggagcctgcccagactcctctcagttctcatttactataaggacccatctcttctcttccttgagactgccactgggatgataccccgttaaggagagattcaagccatctctttttccccagcaacccatgggaccatgtggcctcaatagaacaacatcaaaatactgaaaaataagcccctttctaaacaagagatacaccacgcag

SEQ ID NO: 802102 - DNA, 610 bp, Homo sapiens
tctctcctttatgctcatattgaagccaaggaaaagcatatttcaagaatcccgtgagagaaattgtaccagtatcatctgccttatttaattaacaggagacttcggtttaaaagtggggaggggcatgccagagaattcctgtctactgtatattctcaggactcagaattcctatcgctaattttaatactttgacaaattagcaattttctattatttgttacattctgcaagcatttcttgatttttcccwcattgcttttcttaacgactcttcatgggtttaaaggaaatattatttttcctttcctacttaatcagcgtaacgggccataattgtgtcaataacatgaaattgttgtcgattttgcaattttgtgacacaatacaataggctgttgacttttttatttttttattttttttgcagaaaagaaaaatacactttcatgtgaaaatgtacacactgaaaattatagattttacttgtggaaaatatatgattcaagaaaaatgaagtgatttacttttttcttaattctttcccaaaatagttttctgaaagtttagctatctgtatacttcagtgtttaaaatatgtaggcac

SEQ ID NO: 802103 - DNA, 631 bp, Homo sapiens
gcaaggaacacctggcctacccagagtggaaaactgctcaaaccacaaacaacagcatgagcggcctgttccataacaacatgtttttgctgcagatgatcatccagggactgtttctctgctcctcactaagaatgtttgtttcctgtaaagaatgcttttagctaatctataacctatagaaacaatgcttatcactggcttattgtcaataaatatgtgggtcaaactctgttcgtggctctcagctctgaaggctgttatccccctgattcccactttgcactttatttctgtgtgtttgtcttcattcctctagcactactgggttggggtctccacgaccgagctggtctcatcaagtggcgtccaacaaggggctcaaacccgggttgaggggttgctggagcgacggagaacgtggaactacactggaggacaccagagtactyttaagcaatcccttggtaagtaagacggggagcttggaagcatcagggtaacaatgggacaagggtcgagcaggcatgagtcttatttgagtctgttttggcagctcctcagaaaagggggaaggaaggttagtactagccgacttatgcagctttgtagtgtggtagagaaatattgc

SEQ ID NO: 802104 - DNA, 614 bp, Homo sapiens
aagtagttgcctcagtgactgttcaagcagcacctcaagcgaccactctcagttctattcaggcatggatccagcaagctggatgagagggtgatatggatgcttggcagttccctgttagaatacacccacctgatcaacaggggaatattatagctatgtttgaggcttttccttttaaaatacttaaagaatttaaacatgctattaatcaatatggaccaggttctccttttgtaatgggastgttaaggaatgttgctgtctctagtcagatgattcctactgactgggatgcttttactcgagctagtctgactctggctcagttcttacaatttaaaacttggtgggcagatgaagcttccattcagtctgctcgcaacaccaaggcccaacctcaaattaatataactgcagaccaacttttgggggtttgtggctgggcttgtttagatagatgcacaagtggccatgcaggatgatgccatagagcagcttagaggagtgtgcattagaggttgggaaaaaaatcacttcaggaggagaacaatacccttcttttagtgctgtcaagcaggggcctaaagaaccttatgcagattttatagcca

SEQ ID NO: 802105 - DNA, 545 bp, Homo sapiens
cgatgcccaacttgccaagtggtacattcctcatcttttacaggaggagttaatcctagaggactggaacctaactcttttggcaaatggatgtcacacatgttccctcgtttgggagactagcttatgtacatgtatgtgtggacaccttttctcactttgtctgggctacatgccaaacaggagagtcttctgcctgtgttaaatgtcacctttgcagtgttttgcagtgatgggcattccagcttccattaaaacagataatgccgcaggctatactagccaaactctagctacatttttctctatgtgggatattaaacacattactggcatcccatacaattctcaaggacaagccatagtggaaasaatgaatctctccctaaaacagcagtcgcaaaagcagaaagggggaaacagaaaatatggaaccctacagatgcaactgaacctaggattattaactttaaattttttgaagctgtccaaaggccagatgttatcagcagctgaatagcatctacagaaaccagctgcaaaca

SEQ ID NO: 802106 - DNA, 593 bp, Homo sapiens
taggagaaaagtataatatgcttattatagatacatcactaaaaaaattgtctgggttaataccattaattatattgaaattaaactttgattcacatgtaaatataggtcccaaatttggattaagtataatagattggccacagatttatttcctctgcctctggaagtctcgttagtcatacataaaatacaggttacacacaggatcaagagagaaggttgacagagatgatttttaataaatgctgggtcataaaaagtagataaaggagtggtaaataacacagaagcacaactttggtccctacagaaagcractggaagagaagcaagccagtttgtcttgtagaactaaaggcaggctgtgaatttacaggcaaatggaactttggaaagtagggtaaaacataaaacaaaagccagcaaggtcagaaaatctgtggttagaactccaaggccacctgtcgacccatctgataagaaacttagatgtgtgttctctggatataccaaacctgagaatttctaggttcagaaataccacggcgtaaaactgagatataaagaaaactgtacaccaaaaatagaac

SEQ ID NO: 802107 - DNA, 602 bp, Homo sapiens
agtcacagagtggctcagtgactgggcctgaaggagtcccaggcctccaggcactgctgttccccagtggcccagaggcaggacgggcacacaccccaaggccggccctccccccacatggctcagttcctgcctcccagactgaggtctggagccctaaatagaacaagcaccaccgtctcccttctcagggaggggaagccagctgtggcagttgtggcrggcggagagaaattttccctttctgtagattggatcagtcactctcagaattgatggcaacggcttcatcacaaagatctaatgctttaattatgttgtgacatgacctgacatgggggtggcatttgatggattctctggtgtcatcagcatggccctgacataggaaagtggcagaaggcagggggtggggaagaggaagggctctcagtgggagacgtgtccttccagggccccctaccttcccctgctctctgtcttccaaggcagtcctgcagtagtggagactcaggagaggagggggagcagcccctgtgcaggggagggtggctgcgcccttccgggatggactggatcctgggggccccgtaggagtgcat

SEQ ID NO: 802108 - DNA, 616 bp, Homo sapiens
aattatgtttttatacttttattgcatatttgaatgagatcataaataatacattggcagcttttttccaatatttttattgtgctaaaatacatacaacatgaaatttaccatcttaaccattttaaagcatatagttcagtggcattaaacacgttcataaagttgtgtgaccgttaccccaattcatctccataactcttttcatcttayaaaattgaaactccattaaacaataactccccatttccacttccccctagcccctggaaaccaccattgtactttctatcattatgattttgaccactctaagtaccttatgtaagtggaatcatacagaatttgtctttttgtggctggcttatttcactagtataatgtcctcagggttcatccatgttataacatattgcagaatctccttccttttttagggctgaggaatattccattgtatggacatatcatcttttgcttatctattcatccactgatggacatctggggtgcttccacactgtagctattgtgagtaataccgctatgaacatgggttgataaatatcttcctcttcttataagtgcacctataagagccatattagggcctcac

SEQ ID NO: 802109 - DNA, 633 bp, Homo sapiens
attctccaggaagttatcttctccagctggggcccctgaagctctcaggattctccaactgcaacctgccagcttgtcacctccagtagtaagattttcttcatgctggttcagtactttgtgaatattcacaaaagtcccagtggggtagagcagggattacgcccctggcttacagatgaggaagagaagtgactcccaagagcacacagagtgagtgcacggacagataagatttgaactcatgttggtctcattccaaagcccagcatcaccactgagaacaggtgtgagtgggggcagagctgggggctgtgaacctaagggagatgtggcgccacagggaacccccttctcctgcagatgcccctgacctccagccccagggccatcagccctgccaatgaggagygtgaggcctgcagggtagagtcagagggtttaaatcatagactcctagagtcaggacagaccaagaggtcttctgacctggcctgtgtccatcagcaaactcttacaggtgtctttacaggcgccacattgggccctgggtgtgtagaaaaggctctgacacttctcacccctccagggactcatggtccagagcatggcttctctgcttagtactgttga

SEQ ID NO: 802110 - DNA, 492 bp, Homo sapiens
gtagaaaagttctaattgtattcatagagagacactttaaactgcaatattgtaaaagttgggacctgaaaatttaatgcctgggacttgaacgtattgacatatctttattgttcagtatagatctgaaggaacatttcagcagaaagaaaagcatgaggaataggaaaccttgtgggagtataataacaagagtattggttgagtagtcttttgaaaaatataaattatattttcacaaatagaactccttgagtccccttatggcagtcaagctacagcagcatgagcgtcawatcatagtgatgtattttaaggtcacaacggcggaaagacatagaaagtatctgacctcttagaaacaagcagctgctgcctggtggtaacagcaaagggtagaagtcaataggtagattttatctgatattttattagacagaaagactttaacacttgtttgctttcatttagatgtgacataatttttttctt

SEQ ID NO: 802111 - DNA, 445 bp, Homo sapiens
tgaaaatacagttttaaaggatattttggagtatgagcaagctagatattttagcttacttaatgtcttatttgatacaaagccactctccagagtgttctgctgtgggcacttaagctgttggcacccactaccagcaggcaaccttggggattcyacatgtgaaatcaacaatcctcttcgagtccacacacatggtgagccttcaaaagctttacttttgtcttgtgaacaagcccctgaaactctatcgctctcaaaatgattttactctctcatttgataatccacagtgatggctcactgaaagcaataaatacaagagcagtactaaaatgagggcaattcttaattctagctaacatttgtacgggcagaaagtctgttttctttgacatcatagactctcatgttcatctgtatcaatttaatagtagctatgccc

SEQ ID NO: 802112 - DNA, 628 bp, Homo sapiens
aagttttggttgatttaggatcctgatttcacaggatactgtatcaactgctttaccaagatcaaagtacatgggttcactgcattcctttcagttgctaattcagttgtgctgtagccaggcaatcctggagccttgaaatccaggattctggtcaaggtgaggaagcagcccttcctcctggccttttcattctgcaaataccttttctttccttcttaatatttatttattcagcaatgtggcccaggctctgcatccctgacttcctaaagctttcagcctagtgcccctagacaagtggttacattcttgctacaaactggaaagtctctgagcccctcacyccactcctccccacttcttttcttctgctgtatttatggcactgtacctcatgaactttcacacaagggaaagcaaactcaatccaattgggtcttatgggtaagaaaatgtgttggttaaagtagattctggtcagccaggctatcgaagttttagtatttactagcagtgtgactttgggcaaattacttaacatctccatgtccatgtctcttttctcatctgtaatatgaagataacaataactcctacctcatagggttgttgtcaggaatcattg

SEQ ID NO: 802113 - DNA, 618 bp, Homo sapiens
actgtacctcatgaactttcacacaagggaaagcaaactcaatccaattgggtcttatgggtaagaaaatgtgttggttaaagtagattctggtcagccaggctatcgaagttttagtatttactagcagtgtgactttgggcaaattacttaacatctccatgtccatgtctsttttctcatctgtaatatgaagataacaataactcctacctcatagggttgttgtcaggaatcattgaagtgttaatacatgtaaagtgcttggcatttattaaactagggttagttaaaaaattgatgaataagctattaaaagttcataataaagtttctggagttttcaggtactccgtttctctttcgtgctatttgccttggctattccactacaggcaaaggaaaggagatgaaatttaaagtatctaattttgtaaccttaaattattcatgaattgtttttcttcgtgtagactccattataatgtataatggagaattgtattcaagatatgatgtgtgtgacttattccttatgaactctgaaagtcatttttaagaacacttcttaataatgaacattatatttatttgactttttaggatccaaccctttta

SEQ ID NO: 802114 - DNA, 618 bp, Homo sapiens
actgtacctcatgaactttcacacaagggaaagcaaactcaatccaattgggtcttatgggtaagaaaatgtgttggttaaagtagattctggtcagccaggctatcgaagttttagtatttactagcagtgtgactttgggcaaattacttaacatctccatgtccatgtctcttttctcatctgtaatatgaagataacaataactcctacctcatagggttgttgtcaggaatcattgaagtgttaatacatgtaaagtgcttggcatttattaaactaggrttagttaaaaaattgatgaataagctattaaaagttcataataaagtttctggagttttcaggtactccgtttctctttcgtgctatttgccttggctattccactacaggcaaaggaaaggagatgaaatttaaagtatctaattttgtaaccttaaattattcatgaattgtttttcttcgtgtagactccattataatgtataatggagaattgtattcaagatatgatgtgtgtgacttattccttatgaactctgaaagtcatttttaagaacacttcttaataatgaacattatatttatttgactttttaggatccaaccctttta

SEQ ID NO: 802115 - DNA, 652 bp, Homo sapiens
tatatctcatgagactacattgtactcctggtatccttcaccatacactattatttatgtacatctctcacacatccatctctttctccctaggttcccttaagggtagatataaacctttccatgtgctttattatgtggraagcattcaaatatccaaggaaaggaacctatcacaagaatagtgatttactcaatctcgaatcctcataactcaaagtaaaactgctctgataaatgaaaataacttagactactttaaataaattatatcctaaaatgataatttatgagttaacattcttttggttatatcatcagatttatatttagagttacagagaaaatagctaaatgaaagttcaattctttcattttctctatatcacaattttatatattatattaacatgaacataatccatatctaaaatttttcatgagaaaagtactcatagggcaattaaatttaaaaaattgcatcttataatgtaaaatgatttttacactccaagacgctgataatttaaagtcatttctacaccaaaatattaactatgcctgttacttctaccaaaagaaggaatcacaagagataatgaatgggacagagaactcacaaggactaaaaatagcagtagttcttgaaact

SEQ ID NO: 802116 - DNA, 652 bp, Homo sapiens
tatatctcatgagactacattgtactcctggtatccttcaccatacactattatttatgtacatctctcacacatccatctctttctccctaggttcccttaagggtagatataaacctttccatgtgctttattatgtggaaagcattcaaatatccaaggraaggaacctatcacaagaatagtgatttactcaatctcgaatcctcataactcaaagtaaaactgctctgataaatgaaaataacttagactactttaaataaattatatcctaaaatgataatttatgagttaacattcttttggttatatcatcagatttatatttagagttacagagaaaatagctaaatgaaagttcaattctttcattttctctatatcacaattttatatattatattaacatgaacataatccatatctaaaatttttcatgagaaaagtactcatagggcaattaaatttaaaaaattgcatcttataatgtaaaatgatttttacactccaagacgctgataatttaaagtcatttctacaccaaaatattaactatgcctgttacttctaccaaaagaaggaatcacaagagataatgaatgggacagagaactcacaaggactaaaaatagcagtagttcttgaaact

SEQ ID NO: 802117 - DNA, 586 bp, Homo sapiens
gtacacagttttatatgtactgattttcgttaccacactttaagtctataatatcagtacttaaacaacattgttcaaattttagttaccacggcatattaaccatgaacaatcacacaagatataaaatttgctgctagctcttcaggccacagattactatgtaaataacagatgcaactcatgttcagcggccaatcaygtcatttctttcagaaaggtgggtgttttgtcacaatgcatctgttgctccgttcacacagagatagctaagcaagtcattgtgttgtcttcttgtcttctagtcacaaatccatgcaacattttataaaacaaataatcaaaaggaggaactggataaggaagatgtaatttcagcaaagaaatgaaaagtgatgatactggaagtgaaatttgaatagatgggggtatagaaggcatggttgactaagagaaggaatgttgactactgcatgtatgcagtcaagaggaacttaatgacggtgagcttatcaatataatgaaaaggataaggataaaatgatgatgacgtcccagaggaagtgatgccagccaaaaaaaaaaa

SEQ ID NO: 802118 - DNA, 624 bp, Homo sapiens
atagctaagcaagtcattgtgttgtcttcttgtcttctagtcacaaatccatgcaacattttataaaacaaataatcaaaaggaggaactggataaggaagatgtaatttcagcaaagaaatgaaaagtgatgatactggaagtgaaatttgaatagatgggggtatagaaggcatggttgactaagagaaggaatgttgactactgcatgtatgcagtcaagaggaacttaatgacggtgagcttatcaatataatgaaaaggataaggataaaatgatgatgacgtcccagaggaagtgatgccagccaaaaaaaaaaaattatattaaggggattctcaacaaaacttcataccttcaaaaattcaaaagatgaaatgttaaaagctcatctaaccttgggaagagtatgttggtttgttaaggcataggaaagacacttactgtttgaaattatatgacaagaaggaggcaaacaccattcaaaccactctcaackagatttttacagtgaaataaaacacaaattctcaatgtttctaaatgatttaaattacagtgttctaagaatataaattatattatttgttttcatttcccctacatttataacagataatatc

SEQ ID NO: 802119 - DNA, 646 bp, Homo sapiens
actaaaattaaagacaatcactgctacaagattttcaatatgaccattaattgaccctgctactgatcaaaattgtgggaataataaagcatatggagttttcactgatcacatataatatattgtaattcaccactgaaaaaagtaatctatgatgcataatttaagcttggaagatatatgctgaagttataatttattattttgaagaaaaaagactcatctatattttcacccatcccaagaaagatgtcataattttttgggaaagctataaattattatcatatctctgcagatcataaataaattaactgcattaaaatttgctcccataatagcagcaagaagataaattaataatacattttagtgttaaagaggtacacataaaggcgtatrttagcctaagatgaaccacaaaccagaaagcagaccagaaacattctatataatcagggactatgctggaaacagaacacactaagattgttcaagagactctaatgaagggtttgaagagagttaaaaaaaaatagtgtgttgaagcagccagagattagcaaacatgagaagcctttatcacctcttggcctaaagggttaaggaaacgatgtgttaatgaagcccagggaactctagtgtg

SEQ ID NO: 802120 - DNA, 569 bp, Homo sapiens
ccctgggactggcccatgagaccattttttcttcctagatctcctggcctgtgatgggaggggttgccacaaaggtctctgacatgccctggagatattttctgcattgtcttggcaattaacatttggttgctcgttatttatgcaattttctgcagccagcttgaatttctacccacaaaatgggtttttcttttctattgcatcatcaggctccaaattttccaaaatttttaggctctgcttcctcttgagcaacttgctgcttagaaatttcttccaacagatatcctaaatcatttctctccagttcaaagttccacagatctctagggcagggccaaagtgccacaagtctttctgctaaaatataccaagagtcacctttactccagttcccaayaagttcctcatctccaatctgagataagcagcacttggtcaaagccattcaacaagtctctaggaagttccaaactttttcacattttcctgttttcttctgaggcttacaaactatttcaacctctgcctgttacgcacttccaaagtcgcttccacattttcag

SEQ ID NO: 802121 - DNA, 498 bp, Homo sapiens
ctattctcagtgtttgcttacatcttcggcattgctctacaacgtgctcctcagttcacagaaataactgtctgtgcataagtaacaaaatggttttgaaaaaatagtggtgacagaacataaatgaagcaggtggtgaagaggtgtttctgaggagagaagacragacaaatataaatacttgaagagctgctttcatcagatccaatgagattcttctggagagtaggaagacagtgttttgttgtacaagttgtgtactgaatataccctggaggtgtcttcacatcatagtttatgtaaatgccaccatctagggttgtatagtttatctatggaatacacatggtggccctgctgtagagtggtttgggatagcagatataaatctattatttgcatgtttttcatttttgcacacttcttagcagaaaataaaatttatttgttaagtaaatgtatttttttcatatagaaagtaaaccaactccttttgga

SEQ ID NO: 802122 - DNA, 458 bp, Homo sapiens
ccttagattgcctatttgtgctctttcagactttttgatgtgggcattaatagtatgaaccccatgtgattcaggaattccattactaaggatgtatccaatttaattgggcatgtcaaagagatatctgcactcccatgttcattgcaacattattcacaatagtcaagatatggaatcaacctaagtatccatcaatggatgamtagatatagaaaacaagacatatatccacagtgaaatgtaattcagcctttaaatagaagaaaatcttgttcatgtgtcaatgttctatattgtgttgtatatatcaaaacattataattgtatatataatacatatgtgtatataatgtatattatatataatacataattacaattatatgtgtaatatatatgtgttgtatatatcaaaattgctaagtgggtacattttaaatgtctcaccatgaaaa

SEQ ID NO: 802123 - DNA, 540 bp, Homo sapiens
tgagatttttttattctatcttcttgaaataggagattagtcaatatttaacctttcttcttaatgatctacagggataaatttttctgtaaccactgcgttagctgcatcctacacgttttatgtcatgtttatattattgttctgtcaaaggcccacctgtgtttgattttggtgagaatcccacgtgaactagaaaagaacwtgacttttcttattgttgtgagcattgttccatatgtacaaagttttgttaccattaagtatgttgtataaatcttctataactttagtaatttggaggtttctgtgctctatcacatattggcatgttaacatatatactattaaattgagcaatgactgggcaaaaggaaaaatcaaaagagaattaaaatctcaagacagacaaaaaatacactatactaaaacttatgagatgcaccaaacccagtactaagagaaaagttgattgcaatgaatagctacatgaaaaaaagaattcaaattaaccaactaactttatatatcaagaaacta

SEQ ID NO: 802124 - DNA, 535 bp, Homo sapiens
ctactgagacagagagagaaatgatcccaaataagcaacctaacttggcactctgggaattagaaaagaagaaaaaagccaaaagttagaagaaagaagaaagttataaaggttagagcagaattaaacagataagaaagacaaaagaaaagatcagtaacacgaggagttggttctgtaaaaacgtgaggaaaattggcaaacctttaggtagacaaaccaagaaaactaagagagatgactcaaataaaactataagtaaarcaggagaaattagtcaatactaccaaaatacaaagggtcataagagattatcatgaccaattatgtcaataaattgagtaacgtagaagaaatggataaattcttagacatgtatgtcctgaagaaagaataaacctgaacaaattaataactagtacagagattaaatcaccaataataataataataaacttaaaagttcaggacttgatgcttttactggtgattgctaccaaatatctaaagacagattaatgctattctcaaactt

SEQ ID NO: 802125 - DNA, 524 bp, Homo sapiens
tgccaaataaaaatttgtaaaattattttttctcatttttaactatgcttttgtagttatcaatgtaatagatgtttattgctttaaatgtctttcttaaaaactgtcctgctttaattttataaaacaaggaaaaaagttactcaaagtgctacaacacaggagaaagaattctttgcttagacctatctatttgcaactattttatataaaattttacttgaatgcttaatatrtgttttttcctgttcttgaaagtacatttaaaacattaaatattgtttataattctaaatgaatgtaaatgttttattgcataataaaacctttgttattaagctatcactgtttttctctcataagatgaacatctgaaactataagataatttgccatggattaatatttttacttaaatacagtcctagataagcaagtactttcaccctcagtcttatgaccctgatgtcagagaagccaatggcccaggatggggaaaatgtgctagctttcttcagcttcta

SEQ ID NO: 802126 - DNA, 563 bp, Homo sapiens
tatttgagttcacagattcattggcttgatccattctgctgttgatggtctcaactgcagtttacattttgttcattatattttgcagctttagaatttgtttgatttttaagttattccaatatttgctaagtttatcattgtggtcatattatttttatcgtttgtttgaatagtttctgtgtattttcttgaagtttgctgagcttccctaagactgttatttcaaatgctttgtcaggtagtttatgcatctccatttgtttgcttggtgatgtatgcttccttgatttctcttgygtctgcagtcatgcatctaatataataggtacttattccagtctttgcagacttgttttatcctgaaacattcttcaatagtaagcctgtctagagattctgagcaggttgtctggtgtggtccctaagctctagtttgctgtggtgggggcagccctaggtggtgccctaagcctgggactgccacgactggtgcagtgcagtgctgtaatcccatggccactggaactggtgtgggtcccagatgatatcctgtggccact

SEQ ID NO: 802127 - DNA, 526 bp, Homo sapiens
aggagataaataagtgggaggatatctcatgttaatgggttagaataactaatattctttaaatgtccatattactccagaaaatgtctgattcagtataaccccaactaaaattccacaggcattttttacataaatagaataaaacmactctagaaattttgtgaatgcacaaaaatatcaaatagccaaagcaatattgataaaaagaacaaagctggaggcttgactccgatttcaaactatattacaaattatagaaataaagccatgcttatatggtcaattagtctttgatgagggtgccaaaaatgcagcatgaagaaaggatagtctgttcaataaatggcattgggaaaaccagatacatacatgcagaggaacgaaattggactcttatcctacactattcccccaaaaccaaatctaaatggatcgaagacttaaatggaagacctggacttgtaaaagtcctagatgatgacatagggaaacagctctttgacattgatcttggccgtgatat

SEQ ID NO: 802128 - DNA, 526 bp, Homo sapiens
aggagataaataagtgggaggatatctcatgttaatgggttagaataactaatattctttaaatgtccatattactccagaaaatgtctgattcagtataaccccaactaaaattccacaggcattttttacataaatagaataaaacaaytctagaaattttgtgaatgcacaaaaatatcaaatagccaaagcaatattgataaaaagaacaaagctggaggcttgactccgatttcaaactatattacaaattatagaaataaagccatgcttatatggtcaattagtctttgatgagggtgccaaaaatgcagcatgaagaaaggatagtctgttcaataaatggcattgggaaaaccagatacatacatgcagaggaacgaaattggactcttatcctacactattcccccaaaaccaaatctaaatggatcgaagacttaaatggaagacctggacttgtaaaagtcctagatgatgacatagggaaacagctctttgacattgatcttggccgtgatat

SEQ ID NO: 802129 - DNA, 604 bp, Homo sapiens
agtgtatgttgaggatgtaatatgaaagagacccaaatggccatcttccagagttggaagtccatagcaaatgcctaaagcttaaaaagatcaagaaattacaatataagcatgttatttagagaaatggagataggtactcaaagccttcactaaaagagttggctgttgttgctccacatagtggttaatgagaggtggctgacagcctgccttcytttttgtaacagggctaaaaactgcaccaaacaggagcctattctctgtaatattttgtctatgaaattctggaagaattcttctgacctcatcactataggacttcatgctctgggccaggggtcacaaaatggtgccatagtagtgggtttttttatgactcccatagttttatatttttaataaaaatatttgaatttattgagaacaattacaaatcaggagatttacaggaaaataccaatttctaatttcccttgaaagaaatcagaagattcatgaaaacaaatgcctgcccaacaacagcagctgactgacacggggacagagctgtgcccctcaggcagccaaaggccccacctggtactcacctgctccccacctt

SEQ ID NO: 802130 - DNA, 604 bp, Homo sapiens
agtgtatgttgaggatgtaatatgaaagagacccaaatggccatcttccagagttggaagtccatagcaaatgcctaaagcttaaaaagatcaagaaattacaatataagcatgttatttagagaaatggagataggtactcaaagccttcactaaaagagttggctgttgttgctccacatagtggttaatgagaggtggctgacagcctgccttcttttttgtaacagggctaaaaactgcaccaaacaggagcctattctctgtaatattttgtctatgaaattctggaagaattcttctgacctcatcactataggacttcatgctctgggccaggggtcacaaaatggtgccatagtagtgggtttttttatgactcccatagttttatatttttaataaaaatatttgaatttattgagaacaattacaaatcaggagatttacaggaaaataccratttctaatttcccttgaaagaaatcagaagattcatgaaaacaaatgcctgcccaacaacagcagctgactgacacggggacagagctgtgcccctcaggcagccaaaggccccacctggtactcacctgctccccacctt

SEQ ID NO: 802131 - DNA, 644 bp, Homo sapiens
aagcctcatccgacagagcaggactgcagggcttctccagggcttggggagggggacaagggcagtgcgcacagttcctttttgtttgctgatgccacactaggcacgtgaaagggctgggtcagagaacccagcttggcccacgctgtctcggttggtggccgtcctcaccttcctcacccttcagatcccgtagggagcccctgcggtggtgccatggacgggaagcatcccaccgtgcttgtggctcacctcgaggtccaggtgtcactgcatggcctgaaaaggactgtctccgagcaggtgctccctcatctcccctctcccgatttctacarcatcctcttccctggctcctcgccactccctccactcttttttctttaaacttttattaaagaataacatccctcaatttttttccctccaacaaagaacaagctcatgaccaagaacaaagaggacatcttgaccgtgtaagtaatgatgaccgctctgtccccagctcatagggaccctgaggactccaggttgcctccctatgttggctcctgattcaagcagatggcaggggggtgtgtcccaaggagctgggtgctgatgtcaggagcccagcacccttgtggaagccaagaacgacactg

SEQ ID NO: 802132 - DNA, 501 bp, Homo sapiens
caacttaattaaaaatgggcaaaagatctgaacagatacctcacaaaagacatacagctggcaaataagcatatgaaaagatgctccacatcatatatcattagagaattgcgaattaaaacgagatactgctacacacttattagaatggccaaatctagaataccgtcaacaccaaatgttggcaaggatgtggagcatcaggaactcccattcattgctgtgtgaatgccaaatagtagtttggaagacagtttggcagtttcttacaaagcractacttttgcaatatactccagaatttgtactccttggtatttactcaaatgagttaaaaacatgtccacacaaaaccctgcacatacccttcactgcttccatgttgtagcaaccaatgaataaaattgctagaaacaatgtccttcaataggtgaatggataaaccatcgtgcatcaagacagtggaatattatccagtactaaaaaacgcaatatggaagc

SEQ ID NO: 802133 - DNA, 634 bp, Homo sapiens
ttgaagggcgtgcctatgagaggcctgggaagtcagtcctggcacatttactttaaccagtgatgtagctaagtcactactatatacagacctgaagactttagatatatctgtaatcttataggggaggaaaagtgagtggtattttatactgctcacctaagtgattttttatgtaggttaggaaacaccaattttagtcactcttagaaaaaagtatttgtgtagggggatgcctgggggctctggaaggtcacttaaattggtggttgcctcaccaaggtgatgarcctgaaggcttttttttttttaatggagtctcactctgtcgcccagtctggagtacacgggcatgatctcagctcactgcaacctccgtctcccaggttcaagcgattctcctgcctcagcctcccgagtagctgggactacaggcacacaccactatacccagctaatttttgtaattttagtagagatggtgtttcaccatattggtcaggctggtctcaaactcctgacctcaggtgacccacctaccttggcctcccgaagtgctgggattacaggcttgagccaccatgcccgacctggaagcttttatacttagaaatacctgaactcctccacatgg

SEQ ID NO: 802134 - DNA, 449 bp, Homo sapiens
tttggtcacttgctcagattcggaaaggagaggttcagtggacactggccagccaatggattgcactggcctcaccaggagcccagctttaatgctttaataccaggcagaatcatggtattaacatcgattcctgggtgtggtccttcagcagcagctattgggaaggtgcattccagatgggctgtttgggggttccctgttatagtctactgcagtgcttcctagaagctgggtgaaggacyggtggcatgtccagaacgaagttcttgcctttttgtgatgaaatgagaaaaacaagcatgtaagtatgtgagcgtgtgcatgtgtgtgttgggaggagaaatgatatgttaatataaagtcccagatgtcctttttgggaaatactgcctacacagcaacaacatccttcctgcttagggaagctagcatgtccttttatttac

SEQ ID NO: 802135 - DNA, 617 bp, Homo sapiens
aattctcttgaatagtcttgtcctctaacagctctcatcactaagaacatgttaagtaaatatctctatcatgatttatagctatctattgtctaacatctatctatctgtcatctatcatcaatatacattttgtgtatctatatacacaaaaatgtgtagtattttgtcaactttctgttcatccactaggaaagaaaatgaataagtgaatggaaaaaggaaggaacttaccatatattttcctgtatatagtggttaagattatgaattttctcaagtctggtagacccagatttaaatcttggatctaaacactgtatgactttgggcaattatacaaattattttaggcccagtttccctcygtctgttagaagggacaataataaaaccttttataagcaacctggagggagtgtggggcaaagctggctgcagggacccggtgacagcatgagagctccagatcgactgtaagaacaaaccagcaatcccaagaggacccacagaccctctgaaggaagcggactgctcctgtaggacccaggagacaccccaaatactgtgagtgccccaactgcggaagtgggaaagggagaccctactctccctaa

SEQ ID NO: 802136 - DNA, 490 bp, Homo sapiens
caattaacctatgaatttaatcttaaaataccagcatggtaagacaactataaattcatatggaagagaaaagtccttccaaatagtcaataacatttgttaaaccaagaataatgaggcaaaagttgtcatactaaacttcaaaaccctttaaagctacatggtatttaatatattgtcttactgacacaagaacacagtattcaacatataaatatggtacaattagatatccacttagaaaaagataatgtaggcctttattttatcccatatgaaaaaaactccaaatggatgaaagagttaaacatatcattacaaaactgtgcatttttagaaaaaaaaartcttggaagaggaaagggcagaaaaacaaagattcacaagtgaaggctggcagatttttttctgcataaaatgaaaatattttacacaataaaagtaaagaaaaaataagtttggagaatatacctgttgcataaataataag

SEQ ID NO: 802137 - DNA, 500 bp, Homo sapiens
tttatagtgctgtgcagatagtatcttcacaccttgttcctctgttcacaagtctgtgtactcatgacttcccaagatcacaatccttccaggactgaggctctttcctcttcttccaatcttccctatccagggactgcaattacctggtggagggtgtttcttagtgctaaatatracctgtttctaaattctcatgtcctatgctatatgttcacctatgatgaggtagatctctactgacatagtttctggattttctgtgcttcttttctactaaaccaaaaatatatattttaggaaaaatttattttccaaagaaatctaatgcagaactcaaaaatattcaacaagtagtactgaagctcatctgtccatttggctcttcctgtcttcaccagcagtctttgaaacatagatgaaagctattggattggtctcaaacccttttgttattcacaagtccactgaatcccaaacacataagaaatggccttcca

SEQ ID NO: 802138 - DNA, 595 bp, Homo sapiens
cacatagttactgtttgttgtctgcatgtatgtgtatatgattagaacttttaaggtctactctcttagcaattttcaagtaactaattattattagctatagtcaccatgccccacactgtaccaccaaaatatatgcatactgtctaactgaaacattttactctttgaccaacttcttcccacccccacatggtttctttgcttatgtgaaaatgcacacttwctttttttttttttttcctttttcttttttttttttttttttttgagacggagtcttgctctgtcacccaggctggagtgcagtggcctgatctgggcttactgcaagctccacatcataggttcaagggattctcctgcctcagcctcctaagtagctggaactacaggtgcctgccaccacggctggctacttttttggaaaatgtgcactttcatatagagaatggattttgataaatccaaattgaaagctattcaatggggatttaaaaatcacaaatacacccgaatgttttacttatcacagcttctgagacataaaatatgcaagtattttcagttccacggttttacatcatagatttta

SEQ ID NO: 802139 - DNA, 419 bp, Homo sapiens
caggatgacatagataagtttaataatcaggagtccgatgatcagcaaagtgaaccatcacagtctagttttaaaaagggggagaaatgggaaggtatatatgctaacttccagaaacttatgaaaaaacagttccacctactgcagaaacagtgccacctactatgcctttaggggaaggtccagaatggccacccccgcctcggctttatgaatttttgaaacagggagcctgaggaarggaggcttgctgctcccaaggttgcacgcctcgctgttaactatggcgaagggaagcttcaggcttgcccaacagccaattacggtgagggaatgatcccggcttgtccacctgttaattatggtagaggaatgctgcaagccggcccaaatacaaattatggcacagggaaaatcca

SEQ ID NO: 802140 - DNA, 624 bp, Homo sapiens
cttcattctccaaaaagatccattatgaatcaaaacagaaaaacctctggggattaaaggcaaatcaactctgtttctgttgatttttaacatctttgagttaactctaacctgtatacctcaagtttttgccttactrtttgttaaaattaccattctgctccagaaaatctggtttacccatgatttctaaatatgctgctactgcctagaacatgccactcttatcattacccgtttaaattccactcattctacaatgtctgtcaacccatagcatcttcactaaatggcatagcccacagaagtttctctcatctctaaacttatttgctacttataactgctttatatttcagaggaattattatttctctaaggatgaggactgtgcatgacactgtttacagtttctaacacatagtagatacttgataagtgcaggatattttggcagatgttattagtattagtgttagaataatcaatcaaggaaatgagtaaagcacatttaataacatgtataattaaaaacagctttgaatcatatttgtattcagaggacttctttctgcatagaatcacaacagtacagttagaattgtattccttgttcaagcttaa

SEQ ID NO: 802141 - DNA, 638 bp, Homo sapiens
cttgaactcctgacctcaggtgatcctcccgccttggcctcccaaagtgctgagattataggcatgagccacggtgcctggccaaaaaaatttttttaactcttaaagacttgttttttgagactgggtctcgctgtatcacccaggctggagtgcagtggcatgatctcagttcactgcggcctcgacctccccagcttaagcgatcctcccgcctcagcctcacatagctgggacctcagatgtacaccaccaagccaggctaatttttaaatttttaaattttttgtagygatgggatctcattatattacccaggctggtctctaactcctgggcttaagtgatcctcccacctcagcctcccaaaatggcaggattataggcgtaagtcactgcacctggctaaaaaaaggaaaaaaaaaacaaaaaaagactcttaatgtgtcctctcatctcccatcagctgataaacttgggggcccctcccaattcagcccaaataattcaggtcagttcttgttttcagagggacttcctgggggcagttttaagcagtcctgcccaattcatctgtcctgctgtgttatgacatctggaggtgtgcaagatgttatgtgtggaccgtatgtgagctg

SEQ ID NO: 802142 - DNA, 627 bp, Homo sapiens
gatgactgccgggaagaggcgctcctcacttcccagactggggggccgggcggaggggctcctcacatcccagacgatgggcggccaggcagagatgctcctcacttcctagacggggtggcggccgggaagaggcactcctcacttcccggactgggcggccaggcagaggggctcctcgcatcccagacgatgggcggccaggcagagacgctcctcacttcctatatggggtggcagccgggcagaggctgcaatctcggcactttgggaggccaaggcakgcggctgggaggtggaggttgtagcgattcgagatcacgccactgcactccagcctgggcaccattgagcactgagtgaacgagactctgtctgcaatcccggcacctcaggaggccgaggccggcagaccactcgcagtcaggagctggagaccagcccggccaacagggtgaaaccccgtctccaccaaaaaatacgaaaaccagtcaggtgtggtggcgcatgcctgcaatcccaggcactcggcaggctgaggcaggagaatcaggcagggaggctgcagtgagccaagatggcagcagtacagtccagcctcggctcggcatcagagggagaccgtgc

SEQ ID NO: 802143 - DNA, 627 bp, Homo sapiens
gatgactgccgggaagaggcgctcctcacttcccagactggggggccgggcggaggggctcctcacatcccagacgatgggcggccaggcagagatgctcctcacttcctagacggggtggcggccgggaagaggcactcctcacttcccggactgggcggccaggcagaggggctcctcgcatcccagacgatgggcggccaggcagagacgctcctcacttcctatatggggtggcagccgggcagaggctgcaatctcggcactttgggaggccaaggcatgcggctgggaggtggaggttgtagcgattcgagatcacgccactgcactccagcctgggcaccattgagcactgagtgaacgagactctgtctgcaatcccggcacctcaggaggccgaggccggcagaccactcgcagtcaggagctggagaccagcccggccaacagggygaaaccccgtctccaccaaaaaatacgaaaaccagtcaggtgtggtggcgcatgcctgcaatcccaggcactcggcaggctgaggcaggagaatcaggcagggaggctgcagtgagccaagatggcagcagtacagtccagcctcggctcggcatcagagggagaccgtgc

SEQ ID NO: 802144 - DNA, 621 bp, Homo sapiens
agtttatcagggctatgaacacattaacactctagcagtgtgaactttgcttatatggaaacagttggggaggtagtagaggaagacaagatgggcgaagggcttgatggagggagatgaggggtcagggaaacagaagaggaaaggaagcaaaataattgtaagtgagaaagtggaagatggacacatacacagagatataaagatgaatgcattaagactgggaggaggtcaaggcccatgcttccgtctgtgctccgggaggaagacattcatgcatacacagagagacagatactcagagagtaaagcacagatacacataatttcaagagagacacactcaaagaagagatatgcagataccaagaaccagagagagataggtacagaaacccyctccaccccgcccaccccacgcacagagagaaagagagagagaaacagacggccttatagacggtcaggatgaggctcaggcagacattgacagacacaggcaaagagacaggctcttgggaatgatgttggacatggcctttactacttggattttttaaagtccttttttttattgtttaaagcagtatatgctcatttaaaaaagtatgaagtgaaaat

SEQ ID NO: 802145 - DNA, 572 bp, Homo sapiens
actgagtaccaatcacaaacctattttttgacattgaagtttttatttttatggatttaggggtataagttcagtgtgttaccttgatatattgagttatggtgaagtctggcctgttagtgtacccatcacctgaatagtgcacattgtacccaataggtgatatttcaccctcacctcctttccattatttggagtctccagtgtctattatttcactctgtatgtctgtgtgtatccattccgcaaacctctttctctaaggagagtacggtgttgtaggarggtctgggtgaagataagctgaacagagtctctgggtcgtggtttggcttttctaagagttcttgacaatgcttactggggaatttagtgggtaacatcaaaaataaaccttgggagatgttgggatgtattagtttgttagggctgtgtaataaagtactagaaattaggttgctgaaacaatggaaatttattccctcagttctgtgggctagaagtctaagataagtgtgttggcatggttggttctgagaattgtgagaatctgtttcatgtttctttcctga

SEQ ID NO: 802146 - DNA, 600 bp, Homo sapiens
acacccctgctgcctccctcagcatgaacctcggtatgaagacagagacaatgttatgtgttcatcccataggttcttcccaggcatttcccggccccgtagggttagcattggttggcaaaaaccatgtgacagagatttgctgatggcaatgtgatgcagtaaagagatggtgtaaattctccatgtattcttacatgtgtggttggaagctagaaacctctgagaggacagactggcaagaaagaaccagctgacatccccaagtgatcactataggacagctgccaagaaaagctcgctgactcctctgagccccaaatagaagcaaaaaacaaagcttggttgtgttaagccactgatatgcaggggttatctgctaccatggtagagcttgtcctctrctgactgatgaaatggatcataagaatagtagcaaatattcattgagtgcttcctgatttgaatgcctagtcattgggctaaatactttacatataataccttagttagtcttaataattattctgtctgataggtactattattttaccctttttagataagaggtttagagatgttaagtcatatacttgagtt

SEQ ID NO: 802147 - DNA, 600 bp, Homo sapiens
acacccctgctgcctccctcagcatgaacctcggtatgaagacagagacaatgttatgtgttcatcccataggttcttcccaggcatttcccggccccgtagggttagcattggttggcaaaaaccatgtgacagagatttgctgatggcaatgtgatgcagtaaagagatggtgtaaattctccatgtattcttacatgtgtggttggaagctagaaacctctgagaggacagactggcaagaaagaaccagctgacatccccaagtgatcactataggacagctgccaagaaaagctcgctgactcctctgagccccaaatagaagcaaaaaacaaagcttggttgtgttaagccactgatatgcaggggttatctgctaccatggtagagcttgtcctctgctgactgatgaaatggatcataasaatagtagcaaatattcattgagtgcttcctgatttgaatgcctagtcattgggctaaatactttacatataataccttagttagtcttaataattattctgtctgataggtactattattttaccctttttagataagaggtttagagatgttaagtcatatacttgagtt

SEQ ID NO: 802148 - DNA, 617 bp, Homo sapiens
aatgataacctcaactttaacagtcagatattagttgtgctaagagatagtctgggttaattttaaattatttggatcagtttgaagttacgtggagaaattggcaatggtttaatctacttgaaccagtctataccagataagtacagttagaattaatttgagctggattctgctagtatagacattctggaacacccttggatttttgctaatcctttaacagagatattattggcagttagatagtaattattatgttaagaaaatgtaattatattcttaggttactgaagagtttaatcagaaataattaaatgtttcaaaaatcatgtgggcatctctaacactgctagygtagcaaaacctcctgtccaaaacctccttccagtcactacctcctccatcttttccaaagaaaagccttaccctgacttaacatgccatagtgtgggcgaaggattacccaggtgctgaggcaagagactgaaggcacaaactgttgcagtataataaggaaaatagttagaataagaatagttataatacaaattagatatagagataaccatagacattatcaatcattagtataaatattattactcattagcttt

SEQ ID NO: 802149 - DNA, 631 bp, Homo sapiens
ggtttttgtccttgagatagtttgctgagaatgatggtttccagcttcatccatgttcctacaaaggacatgaactcatcaatggttgtggctgcatagaaacaggctttgtgtgagcaaaaatgctgtttatttcacctgggtgcaggcaggctgagtccgaaaagagagtcagcaaagggtggtgggattatcatcggttcttataggttttgggataggcggtggagttaggagcaatgttttggggkcagggcgtggatctcacaaagtacattctcaagggtggggagaattacaaagaaccttcttaagggtggggagaattgcaaagaaccttcttaagggtggggagaattgcaaagaaccttcttaagggtgggggagattacaaagtacattgatcagttagggtggggcagaaacaaatcacaatggtggaatgtcatcagttaaggctattttcacttcttttgtggatcttcagttgcttcaggccatctggatgtatacatgcaggtcattggggatatgatgacttagcttgggctcagaggcgtgacagttatcttatgagatcacaaatagggaaaaaactatcatggcatgaggtataattttcaatgacaac

SEQ ID NO: 802150 - DNA, 630 bp, Homo sapiens
tgcccagccggattaagttttataagaccaaaaagcctggatgatcacctccttcacatagtctgttaagaacaagccctatggaatactattcagccataaaaaagaatgaaatcctgtcattcccagcaacatggatggagctacaggacattacgttaagtcaagtaagccaggaccagaaagttgaacaccacatgtttattcatatgtggaagcttaataaataaataaagctatctcaaagaagtaaaaagtagaacagcatatactagaggctggaaaaggtagggggaaaagagggatggggagacatttgttaaaaggtacaaaattatagctagctaggaggaataagttttggtgttcaataccactgtaggatgacctagctaacaatacacattatatagcttcaaatagctagaaggaggatattgaatggtcccaacacaaagaaatgataamtgtttgagatatggacatgctgattaccctgatctgtcaccatttattatatgtatagaagcatcatctacatactctgtgaatatgtacagttgttatttgttaattaaaaaataaataaaataaaagttaaaccaacgaaacgaaaccaaaccaaaagag

SEQ ID NO: 802151 - DNA, 606 bp, Homo sapiens
tcaaagaggacgaagatgaaaacaaaaacagaatatatcacaatttgtaggatgcacttaaagtagccatttggggaaatgtgatagtattacatgcttatattacaatgggaaaaattctgaaatttgtaaatttcaaatcattcatgatatgtcaagtcttctcaacttgtttttyttaaggactgttttggcctttattgtgtagtttataagttccacaaaatgtattgggaatttattggaattttgtcaaacgtatataattttgtcaaactcaagcataatataaatatgtttgagaattaacattattataaaagtgagacatttagcctatgaacgtagtacatatcacccctcattttgatgttattattgtacaaaagttttatattattgtatataaagacttcgtacactatttttaaatttattcttaaattttacacttttcacgaaatatgaagttaatcttataaattattatttttaacattattgctggtgtaaagaaatacaattcctttggacaatgaattttgtatctagtaaactcattgaatttgtttattaatttaattcatgtacaaatttttggatttt

SEQ ID NO: 802152 - DNA, 606 bp, Homo sapiens
tcaaagaggacgaagatgaaaacaaaaacagaatatatcacaatttgtaggatgcacttaaagtagccatttggggaaatgtgatagtattacatgcttatattacaatgggaaaaattctgaaatttgtaaatttcaaatcattcatgatatgtcaagtcttctcaacttgtttttcttaaggactgttttggcctttattgtgtagtttataagttccacaaaatgtattgggaatttattggaattttgtcaaacgtatataattttgtcaaactcaagcataatataaatatgtttgagaattaacattattataaaagtgagacatttagcctatgaacgtagtacatatcacccctcattttgatgttattattgtacaaaagttttatattattgtatataaagacttcgtamactatttttaaatttattcttaaattttacacttttcacgaaatatgaagttaatcttataaattattatttttaacattattgctggtgtaaagaaatacaattcctttggacaatgaattttgtatctagtaaactcattgaatttgtttattaatttaattcatgtacaaatttttggatttt

SEQ ID NO: 802153 - DNA, 656 bp, Homo sapiens
gacagaaacacagtcatccaaatttggcaaaaatatttgggagaaattttatttcaggtgtttaactgattacttttaatatgtagactacaacaccaaactcagaatactccacagacttattaatggtttccacccccrtctctgcaaatctatcaggcaagtttttcccgccctttactttcatataagctgagtcacagtctgtagtgggttttggggggagtgttactgcccaacaggtacaccctgcctgctgcctagacagagccaatttttcgacacaggggaattgcaataaagagctgcactctttatttggtgattgggggccggtgaattgagagttctgcttggccaggtcggagatgaaatcacagggagctgaagctgtggtcttgtgctgggtcagttcctgcttgggggccacaagaccagctgagccaggttatcagtctagctggtgccagctgatccattgagtgcagggtcggcaaaatatctcaagcactgatcttaggttttccaataacgatgtgatctccaggaacaatttggggaggtttagaatcttgcagccagaggctacatgactcctaaaccataatttctaatctcgtggctaatttgttagtccggcaaaggcagtctagtcc

SEQ ID NO: 802154 - DNA, 656 bp, Homo sapiens
gacagaaacacagtcatccaaatttggcaaaaatatttgggagaaattttatttcaggtgtttaactgattacttttaatatgtagactacaacaccaaactcagaatactccacagacttattaatggtttccacccccatctctgcaaatctatcaggcaagtttttccygccctttactttcatataagctgagtcacagtctgtagtgggttttggggggagtgttactgcccaacaggtacaccctgcctgctgcctagacagagccaatttttcgacacaggggaattgcaataaagagctgcactctttatttggtgattgggggccggtgaattgagagttctgcttggccaggtcggagatgaaatcacagggagctgaagctgtggtcttgtgctgggtcagttcctgcttgggggccacaagaccagctgagccaggttatcagtctagctggtgccagctgatccattgagtgcagggtcggcaaaatatctcaagcactgatcttaggttttccaataacgatgtgatctccaggaacaatttggggaggtttagaatcttgcagccagaggctacatgactcctaaaccataatttctaatctcgtggctaatttgttagtccggcaaaggcagtctagtcc

SEQ ID NO: 802155 - DNA, 656 bp, Homo sapiens
gacagaaacacagtcatccaaatttggcaaaaatatttgggagaaattttatttcaggtgtttaactgattacttttaatatgtagactacaacaccaaactcagaatactccacagacttattaatggtttccacccccatctctgcaaatctatcaggcaagtttttcccgccctttactttcatataagctgagtcacagtctgtagtgggttttggggggagtgttactgcccaacaggtacaccctgcctgctgcctagacagagccaatttttcgacacaggggaattgcaataaagagctgcactctttatttggtgattgggggccggtgaattgagagttctgcttggccaggtcggagatgaaatcacagggagctgaagctgtggtcttgtgctgggtcagttcctgcttgggggccacaagaccagctgagccaggttatcagtctagctggtgccagctgatccaytgagtgcagggtcggcaaaatatctcaagcactgatcttaggttttccaataacgatgtgatctccaggaacaatttggggaggtttagaatcttgcagccagaggctacatgactcctaaaccataatttctaatctcgtggctaatttgttagtccggcaaaggcagtctagtcc

SEQ ID NO: 802156 - DNA, 562 bp, Homo sapiens
aagtctctaaaactttaaagagattactgccccaattatcttaaggacagtaataattacgtatataaaattaaaatatggaaattaagcagggtgtggtggctcacacctgtaatcttagcattttaggcagctgaggagagaagaaggattgaagtcaggagtttgataccagcctgggaaatatggtgagacccctgtctctacaaatttaaaaatgagctgattttaaaaaactagccagcacagtggctcacattggtagtcccagctgcttgggaggctgaggcaggaggatcrcttgagcccaggagatccaggctgcagtgaactataattgtaccactgcactccagcctgggtgacagagtaagacctcaactcaaaataaaagaaaatgaagaataatttcttgactttttttttttcctgcaatgccaggctggttgactcacacctgtaatcccagaaaatcaggaggctgatgtgggaggattgctttaggcaaggagttggagaccagcctgggcaacagggcaagatgccatctttaagaagttaa

SEQ ID NO: 802157 - DNA, 566 bp, Homo sapiens
tttttcctagcatgattagtttttgttgagttggaacagtgtaaaggactcatccatattagaagcaatgattatttctaagatattcacaaaattaattaaattatgtaacttgtataaattaagggaaatgaatgagagaaaactcaacaatgtattgcagtggttttttgagtagcctctttgggagactttactgctgccagatcaatctttataaaatgccattttcatcaargcattcctctctgaaaaacttttaaatctgggactacaagataagatccagtctgacttatttttccgtcagtcagccattgttattgagagcttgttatttgtaaggcgttgtgctctacatatggaaaataaggaagatgcaaatgtctgtcattctctagttcacaaacattcttctgtagccacaccagcttctttactatccttagtggtctattctgccttatgctggacctgttctgtatgtaagacctccataagaactgtctctttaaagaacctttctctgatccttatagcctgtatcacactaatctcttctgtcc

SEQ ID NO: 802158 - DNA, 602 bp, Homo sapiens
agtaaagaaggggcaggagaaagctgtaattataacctgggcctgcctttgttctcatgaagccaggggcctctccatatcctatacttgctcttacactaataacaaaccaaatgctgcaaaataaaagtaataatgacccaaactaatttaagtcttttgtttaaggagtaaatgagagaaacattttagcttcttaatcaaggagtgctataatttcaaggcatcttaatataattcacttaccctaaagcaattgtgcaataagcaaattataaaaggaaaacaacaaaggttaactttytacaggggccaatagacaagatctgtggagcacagcaattaaccttcacatactggagtcttgtttaaaaggccatcaaaaactcagattactgaaaatcacaaatgtcaccaacaaaaggaatgttgattagagtcaaaaaaaaaaaaaaaaaaaaacaccttcccaaaggactgccttctttgaaggaatttcagaatgttgctagcaccacggtttaattaatttaaatatctcattgatggctccatcagagaatgagaatgccccagccagtgctgtttttaaaatgcactgg

SEQ ID NO: 802159 - DNA, 613 bp, Homo sapiens
ggacattagtttgggcaatgatttctttagtaagacttcaaaagcacaggcaaccaaagcaaaaatgaataaatgggatcatatcaagctaaaagcttctgcacaacaaagaaaacaacaaagtgaagagacaacccacagaataagagaaaatatttgctaacaattcaactggcaaacgattaataataaggagctcaaacaatttaaacagaaaaataatctgatttaaaatgggtaaaagatctgcatagatatttctcaaaagaagacatgcaaatagccaacaggtgcatggaaaaatgctcatcactagtcatcagaaaaatgcaaatcaaaactacgatgagctgtcatctcactccagctaaaatggctttttttgaactaaagtcttgctatgttgcccaggstggagtgcagtggtgtgatagcagctcactacagccagaaactactgagctcaaacgatcctcccacgtcagcctcctgaatagctaggactacaggagcatgctaccatgcccagctaattaaaaaaaaaaaaatagcagtagtgtctcactgtattcccaaggctgaattcaacttctagcctcgataatcctcctgc

SEQ ID NO: 802160 - DNA, 621 bp, Homo sapiens
gatttgcagtaaagacggaagattgatgtgtgacgtcagacagctggccaggaggcccatcgggcaaggaagctagcagctgcttacagcggatttgagagggtggagggagaatccaggaaggggggatcaaaactggatcttggagaggaaagataaggagaaccatgttaacaattttgcttccccccctcccctttgtgtcctttcagataagaatacattaatcctctgagtttgaggctatgtccaacaggtggcaaggcctattcctgcacaggrgacagctgctgggactaagggaagatgccagaaaaagggagcttcaggtgggaatccgcacagagcaattaaccttcaccctgaaacacaccggactccacttccaccactcacaaaggagagcacaacactgaaggccaaacactcaaagcatttcctagggcaaggatgctgaaagggtcatccagggaccagctgcagcagaatcccacgctcttctgtttgacaatgcggattcctgaaccccagcccaggcctccagagtctgaatatctgtaggtggagtagtcgctgctgccagtcactttctcttacatcatcccatgtattttcttcttc

SEQ ID NO: 802161 - DNA, 627 bp, Homo sapiens
aaaggaaagcagttacattctgtttcatagttttattgtttcatttttaaagctgccttgtcaaggatagacaatttgaagaaagattataaaatttatgtttctgacagcatgatacactaaatacaatgaacaaccttcttcttacaaaatactttatgattctgaataaaataatttttaaaaatatataattgagctgacaagtatagaagggaattcatcaaaggccaaaagacaaagtgaaagcaggaaaccagaaagataaagaagcatcaaagtgaccatgagcttccattttggcaaccctgagaaaagtggagggactagagaaaatagccatagcctctacacataggcaatctatagcagactcccacatagagctgagacccaaaggagtatatatacccttagtaaaacggaaaactgaaatgcatacrtacataaatcccactccacagacaatgacagcaaagaaatttgcttgtcccagctctggagcagagtgaaaaataaatttttcctgagatttcaagcccaccttcacacaggtttgtagtaagtgatccacaaaacttcaaatcaagaattcgcatacacatatttatgagagaaagacacctt

SEQ ID NO: 802162 - DNA, 616 bp, Homo sapiens
atgacatgtctattgatataggttggatgttgtccctccaagtctcaagatgagacataatccccagtgttggaggtaaggcctgataggaggtgtttggatcatggtgtggatccctcatgaatggtttagtgccatccccttggtgctgcccttgtgatagtgagtgagttctcgagagatctaattgtttaaaagtatgtggtacctcctctcccactctctattgtccctgcttctgccgtgtgagatgcctgctgcctctttgccttccaccatgattgttaagcttccaaggsctcctcagaatctgagcaggtgcgagcaccatgcttcctataaagcctgcagaaccatgaaccaattaaaccttttttctttataaattaccaagtctcagatgtttctttatagtaacgcaagaacatcctcacacacctactatgtgccagttatggtgcaaagaacatttttaagattgccttaaacccttgttacagtgatcttacccaaactgtatttaataaaagaatagttcttaggaaaactgctaggtattctcaagaaagagcctcatgccatattccctcagaatggcaattggtggcaataatac

SEQ ID NO: 802163 - DNA, 620 bp, Homo sapiens
cttttgtctgccacctgccaataccatatacctgcttgcagctctcaccagaaaataatggctttgggtttcttcagttttcctaaccttttgtatctgtaattggcaaagttaagcccacactatgctgacaaaagattctgaaaaatatgtttcccagatttcttctttaaaatctacagggcaatgtaacaagagatttgayaatatacaatcttgcacagcggctaaggagcttctagacttcagggcttaataagccttatagggtttctcagaggtcgatacgatgttcctgagatgatcacctcatcagtggtcttgagcctttagaaaagctaattataggcttatgggggaaatactttcttcttccctacctagtcaggaagtaaagtaagtgctccctcctgccccacatacacgtgaggaggcacttgtaaaggtggacgtcgccgcataaacatctcaaaccctgttccagagcttgctgagcagctgaaattagtcaacccttactgggtgccatttgagttgaaaaagtgaagtgagataatttttttttattgatatgttcggccctcctcctcaaccctgtctttgagggcatgcgcctgctt

SEQ ID NO: 802164 - DNA, 463 bp, Homo sapiens
aattatttgtgttatagccttaaaatgcctaatgttcagcttggcatgagagtggcaaatactaatcctaatgtactatgaaaacatttctcccaaaaaatgtatgataagtgaccattaaatcttttaaattactcacaaagatgatattcatttgaggaagaaaagtattcacaatatgtgttttcaaaattggaagktgccatcctttttgaagtctggctaagcgtgattccatcttgcagaggaaagtaaacttattgtactgtggctcttgactcaaaacataatcttagtaaaaccacttagaatttccatctgtaaactaaaattaaattggttgtttttctgctgccatccatttgagaggaacagtaaatgaagcaagcttcttaattaaaagtaatgatataagtataggtgtaaaagattgcattcttacaacatacaactcactttcaaa

SEQ ID NO: 802165 - DNA, 640 bp, Homo sapiens
aaatcacttagcctttttttcttcattgtgaatattcagtcatcctttttccactatattaacagagttgaattattaaagcaaacttatgagaatcacagctcttaaccagcaacaaattgacaaatgatccaaaggatataggcaagcatcagatacagccaaagcattcttttcctaaaagagtctgaacgcatctgatgcaacacccaaaagtatcccttttctcctcgttacagtatgttttggctttggaataaatgattagttattgaacaatatatggagaaatatcttacaaaaggaagtcatttccattttctaacatcttttacattgcactaattacatggtttaaatgactatccctaatcttcatccaactacaccccatgaattttaggtttatttaatcaacctagttagaccagatatawccttctaaaatcatttgtagatagagattctccttttgctagtaaataccattaacatatttacagaaggtctggtctaggtcatttattccaggcctctccatgattggattcatcttgcaaatcgtctttggagcccctggtatacaagttggactttagaatcagaattgattctagttcagaaagtactgggtaaaaga

SEQ ID NO: 802166 - DNA, 648 bp, Homo sapiens
ataatcacagcaattaatgctttcattttgaactttttcttcataaaacattaatgctatataaatcagactgatgacatccttatttaaaagacatcttgtactggtatcaaaatgtgacttattttaacaccaactgaaaaaatatagagtttgtatagtctattatttcagtgtcattttattattaaagttattctgaaggttttggtagcaaaattactgttaacaatataaatactctgtaagtgttgaaattctcttgaaagtgttgaaaggcggcaggcattctagaacgggattgtaaggaaaatcaaatattccaatatccaggataattaggacacttgttgaatttatatttrcttctttaacttccttctgatttgcctggtttatttctcatttggtatcataaaaagaaatcttaagtccaagctttttttagctggagtaattacttccattttccattatttttcttcattttttttttttcaaatacatgagaaaacaatccaagaatcactgcaggaagaaatgatcatttaagctcaatcatgttcttttgccttttaatttcatttaagagattaatattagagtcataaaagctttacagtttcaacacacatacacacaatcaca

SEQ ID NO: 802167 - DNA, 581 bp, Homo sapiens
gaactgagttcagtactgatccaaggatgctggcatcaaagcccttacacggaactatccctaaaggttccgtatttccgtaatataccaccaatcactctaaatttataataccctgtctttaacttggtatataccatcttttgggaaaaaaattattaatattttgagatgagatacaagaataaagtcattcttgaggttccacctctaatatgaaaaaatggacgctgtttgcacatagcagctagtttgatacctcctgttctgttaggctagccttcacacaatgagcatgcatatacagccacagttcactgcatctgttttgaagttgcaaagtgctgctcattcaagtcacagatgctaccatgttatgcaatgaaacagtaaaaytgtatgtccaccatgagaaaaggaaaataaacaatgaaaaaaatgcagcaaatataggcagttggcattcagaacacgccaaaaagctaacactcatgaatcgtcattataaggttttcctttccttaaaaaaaaagtctttctttgcatatttcaaaatgtaacggtcccagagaatcatgaag

SEQ ID NO: 802168 - DNA, 625 bp, Homo sapiens
ttctttatccactcattgattgatgggcatttgggttggttccacgattttgcaattgtgaattgtgctgctataaacatgcgtgtgcaagtgtctttttcgaataatgacttcttttcctctgggtagatatctagcagtgggaaggctggatcaaatggtagttctacttttagttctttaaggaatctccacactgttttccatagtaactgtactagtttacaatcctgccagcagtgtagaagtgttccctgttcaccccacgcatgcawctattgttttttgattttttgactatggccatttctgcaggagtgaggaggtggcatcgcattgtagttttgatttgcatttccctgatgattagtgatgttgagcattttttcatacctttgttggccatttgtatatctttttttgagaactgtctatccatgtccttagcccactttttggtatttttttttcttactgatttgtttgaggtcattgtagattctgggtattagtcctttgtcagatgtacagattgtgaagattttctcccactctgtgggttgtctgtttactctgctgactgttccttttgccatgcaaaagctctttagttcaattaggtccc

SEQ ID NO: 802169 - DNA, 607 bp, Homo sapiens
tgacaatgtgtctgggcaaagatctttttgcgatgaatttcccaggtcttctttgtgcttcctgtatttggatatctaggtctctagcaaggcctggggagttttccttgattattcccccaaatacattttccaagctttgtgcttcttgtatttggatgtccaggtctctagcaaggctggggaagttttcctcaattatttccccaaatatgttttcctgaggaagaagagaagtctatggtttggtcgtttaasgtaatcccagacttcttggaggctttgttcatattttcttttttccttgtctttgttggattaggttaattcgaagaccttgttttcgagctctgaatttctttcttctacttgttcaattccattgctgaggctttccagaacatttcgcatttctaaaagtgtgtccaaagtttcctcaatttttgattgttttaagctatttccttgaatatttctcccttcacttcttatattgttttttggatttccttgcattgggcttcgcctttctccctgattagcttaataactaatcttctgaattatttttcaggtaaatccaggactacttcttggtttggatcca

SEQ ID NO: 802170 - DNA, 603 bp, Homo sapiens
ttttacaaaaaatacaaaaattagctgggcgtgatggagtgcacctgtagtcccagctactcaagaggctgaggcttgagcccgggaggcagaggttgcagctgagatcacaccattgcactcactctagcaccccagcctggatgactgagtgagaccctgtctcaaaaaaaaaaaaaaagaaaagaaaagaaaagaaaaaagattgaaagcagaggcggcgggtgcgggtggagtggaagaaatccctttgtgtaaatagaaaatgtaaaaaaaaaaaaaaaaattagaaaaaaagaaatcccccaaactacaaataaactcttgcattgaagtgcttcactccacygaatctctatctacctgcacagcaagtctgaggagggcagcttctatccctttaaaattaatcaggcttttaccttaaatttccagttaactttatcttagaacctctggaccaagaagataaaatcccccaagcttggttctggtatgtcagaggggagggtgggaaagtaggaatggggacggggaagaaggagcttgctgagagaactggtctgaagcagaaaaaaacggcatccctgcccaatagcagaa

SEQ ID NO: 802171 - DNA, 650 bp, Homo sapiens
cattacaattatcgccttctctaagaacatactgtgacctgaatcaggtaatttaatagttcacaatgtgagttatttctgtggtagcttattttacatgctttggaatatatttaagacaagaatttgtttttcagattatcctaacctatattattatttagaattctaaattgatgacaatataggttargatagtctaagttataataaaataatgtatgaaatctaagacaaacattgtaaaatttatatgaccttttgttttttttgaccagttagggaaatggtgcaattaagtctttgtaacacttgatctgagagcaagtaaggtgacattgaggtgaaagtttaggtttctaggacacccgattaaaaaaatgaggacaaataagggtagcaaactgaataggactctattttgttcacataaacaatttaggtgtggctgtcaactcttaacgttaaaatttaattcaaaatcctagtcaagtttttctcttccaattccattccaaattgtgcaagtcaagagacagcttcagccatctcctatcatctaatcatgtgcctgaggggtagaattgggcaaaaaaacaaaagtttcttatactttgacaggacaagattaatcacagatctttgctgac

SEQ ID NO: 802172 - DNA, 606 bp, Homo sapiens
gtaaaaacatatacagtgagtgtgtgtatgtatggaaaaatatcttgaagaatatatacactaagttgtctagcagaatgtgactttatttttatgtctatactaattttctatactggttctgcaataaaattttgtaaaataaattacgtaacacaattgatagatttacattcaattcaagttttaatgtttcataatttcaatgacagtgcttgtaattcattcaacacttacattttaagtttctgtgaaatgacagtgctttatccctttatttrctagatagagggcctggatattttatttctattaaagacaatcgaggaattctataaaagtgaagatggagaaaatctggaaatcctctgtccagttcaagatcaagcctgtgtagctaaatttgaagatggaatttggtaccgagcaaaagttatcggtaggagaatgcatgctgtttctacagggagatgtcatacttcaaaactaatatcatttgagttggtaccaattcaatcttggaagtaatgttatttgatcttatcatttgctctgccatctgtctttagaaaagctagtgataatgttgaaaggtgaatctatctt

SEQ ID NO: 802173 - DNA, 637 bp, Homo sapiens
agggcaattataccttttacagacaatagtggcttagagtcaaggaatggccttcccatgttatggctacatggctgtgataacaagtggagttatacgcctgcactctaaactcgctgagtcactctggatgtttaccttggcctatttttgaccaaagcacagccgtattccttacagttagtaatgagaaagaatgaaggagagagaaagagtgagagctggcaagagggcwtcctaagttctctttagcactgcaatccttggctccaggttattcctgaggttctaccacttcctagccctggagtttcatgagatgacctgtatccttatataaattcatttttcttttgcttaaatctagtataattctgttgcatgcaaaccacagtcctaatggcactagaaaacaataaaagaatacttcaatagaatttaaatttggtaggattttttgaaaaatcaatttgtagaatgttgcaggagcatatatttttgtttgaagctggatggccctgacaatagaatatgtgaaatttcataaatattaaattacatctgtattctaataatctacatagtaataaatcatgtcagttgtacaggacctcctagtcccttgctttgggttagg

SEQ ID NO: 802174 - DNA, 569 bp, Homo sapiens
ttagaaagtttattttgccaaggttgaggacacatgtccgtgacacagcctcaggaggtcctgatgacatgtgcccaaggtggacagagcacagcttggttttatacgttttagagggacatgagacatcaatcaacatatgtaaaatgaacattggttccatctgaaaaggtggagcaacttgaagcaaaggcaggaagacctgaagtggggaaggggcttccaggtcacaggtggataagaatggttacattcttttgagtttctgattagcatctccaaaggaggcaatcagatatgcatttgtctcagtgagcagagaggtgactttgaatagaatgggaggcaggctggccctaagcagtttccagcttgactttcccttgtggcttagtgattttggggccccacgatttattttcytttcacagaggtaactgatggtctagctacaggttgagaagaaatgggatgggatggtgagagtattggatttcagagatagagggcccagggggagtggggaggtgggagttaccgatcccacaagggagggagccccttggggc

SEQ ID NO: 802175 - DNA, 589 bp, Homo sapiens
caacagggtaggattgatccagcgctcctgtttattatctcagggaaggctgcaagaggcaagcccagggaactaaagatgtgagtcccagaggcacccccagcagaggacccagctccatccaaccctgctcctcagggtccaccccgacctcccttatcyagcttcagcctctcacttgccccctcctagaaatccttgccatagacaagccccagtctcactcttgccccttcaacagatgcccagtgaatttgggcccagtgaggtccaggtccccttctctctacaggacttaaagcaaattaagggggatcgtggcgagtttgcagatatccctgacagatgtatagaggctttccagaatttcacccaaatatctgaactctcctggagagacattatgttacctttgaatcagaccctgacagacactgagaagcaggccactctacaagcggcagagagatttgggaatgacccttatatcacatatagtgtcagggaagagggcaaatattatcctactggaagagaagcagtaccagtgaatggccctaaatgggatcccaatgatgagatggagact

SEQ ID NO: 802176 - DNA, 561 bp, Homo sapiens
cacctgcactgtgccttttaacttccattatcatctgcctctggatccctcagatccagtttccttttttttttttttttttttttttttttgagacggagtctcgctctgtcgcccaggctggagtgcagtggcgggatctcggctcactgcaagctccgcctcccgggttcacgccattctcctgcctcagcctcccaagtagctgggactacaggcgcccgccactacgcccggctaattttttgtattttcagtagagacggggtttcaccgttttagccgggatggtctcgatctcctgatctcgtgatccgcccgcctcggcctcccaaagtgctgggattacaggcgtgagccacygcgcccggcctccagttttctttcctagggctttgaccctaagcttggaattgagtctgggacaaagatgtatctcggagtgggggttgtatggactgcttgtcataagccaaatgctaaggggaaactgtggaactgagtcctcacccaacaagggagagaaaaggatgtcttgtgacacacccagataactggtag

SEQ ID NO: 802177 - DNA, 579 bp, Homo sapiens
cttgaagaccagagatgaatgagttttgttttttaatccaacttacagctctttgcctgttaaggtttctgttgaaaagtctgtggtagcctgacggcattctctttgtatgtgatctgatctttcttttttttttttttctagctgtttttaagaattttgttctttctggttgacyttggacagtctgttgactacatgccttggtgatgctcattttgtatagtatttcaaagtgttctctggatttcctgtatctggatgtcaatggtttagaccactgacattcgaggttaatattgaatattactattcaccattgtgaagctgttggttggtttctttgtagtttatattgcatggttgctatacagggtctgtgggtatgtacttaaatgtgtttttctggaagcagaaaacattcatttcaatatttaaaactcccttaagaatttcttgtaaggatctcttgtaaggctagtctattggtaacaaattcccttagcacttgcttctctggaaaatattttatttctcctttacttatgaagcttagtttggcaggatatgaaattcttg

SEQ ID NO: 802178 - DNA, 629 bp, Homo sapiens
tactcacttccaacatgaatgagggtgaatatgccactaaaccctatactggttatcttttttatattgtgtttgcaaaaaaaaatttttttagatagattctcgccatgtcacccaggctggagtgcagtggcattatcttgactcactgcaacctctgcttcccaggttcaataaattcttgtgccacagtctcccaagaagctgggattataggcaggcaccaccatgcctggctaacttttgtatttttggtagagaaggggtttcatcatgttgkccaggctggtcttgaactcctggcctcaggttccaagacattcttaactcggggaccaaaagtagtggaaaactgtgtctacactattatctaagttttgaatgagaaaatatccaaccagaattttccacaatgtcatggaataatacagcagagcataaatagaagtattgagtgccttagatatatgtgctgagacagtctgacagtgtgccttcattatctgactggacatgcaaagcagtcatatatactttttctgtgcagttgaaagcaaagcagtcttgattgataggtgtgtgacctgaggttgtcttttgatcatgtcaactggattattaataataat

SEQ ID NO: 802179 - DNA, 653 bp, Homo sapiens
ttcgattatactaaactggctttcttaatttagattaataataactcttaaaatcaatggctatgtgtattagtttgctgtggttgctataacaccataccacaaactgagtggttgggttgaggttacagacatttattatctcacagttctagggactagaaatctgaaatcaaaatgtcagcagggttgctttcttatgtgggctacgaggaaaagatctgttccaggtttctctctttggcttgcagatgactgtcttctgttatctgtttacatcagatgactgtcttctgttatctgtttacatcatcttccctctgtgaatttcctctgtgtccaaatgttctctttttatcaggatgctggtcatattggtttagggcacagactactcatctaatgttaacttgaccacctctataaagactttgtctccaaataagatcatattctgatgtactgggagttaggactcttaatatyttgtgagctgggagagaaagtgggtgggacacaatacatccatgacatcgtaggtactctaaatctgttcttttataaaattattttggaaagtatagttccatttacttattcatatgaatttgagaatcaacttgtctatttttatgaagaatcctattgtgact

SEQ ID NO: 802180 - DNA, 492 bp, Homo sapiens
acaatacctgaattacagtggctctcaaagtgcagttcctggaccagtaacatcagcatcactggtgaatttgtgagaaattctcatgtcccaacccagacttgctgaatcagaaactcctagggtgagccccccaagggattctgatgaagggcgtttccttctagttwtttccccccctaaaagggcaagagtcaggtctctgagcacaagtccccatgccagggcctgacacagagcaggatctcagcaagcatcctttgaataagtgaatgaatgaatgatagttctcacatgagcagctgtctccccaaggcctgcccttcaccacagtcaatttgtgacagcccaagatgttgcattcacgccagttccatctctccaggggggcctaggcctctcagggggctagtcccagctgcaggcagaatgcccgttagcccctgctggcacggccccacgtgagagggtgagctgacaaaggcaggcttg

SEQ ID NO: 802181 - DNA, 681 bp, Homo sapiens
tcccgagtagctgagattacaggcatgagccactgtgcctgcctacctgggctcttcacacttccaaagcctctcccagccaccacttgcccagtcctcacaaaagcctgtgggagggccagaagctcatcttaaagggaggagactgaggaactgggtacagtagctcacacctgtaatcccaacactttgaggggctggacasggtagctcacacctggaatcccacactttgagaggccgaggcagggggatcgcttgagcccaggaattcgagatgtgcctggggaacatagcaagaccccacctctacaaaaaacccaaaaaagttagcttggcatggtggcacacacctacaggcccaactactcaggaggccaacatggaagaatcacctgggccctggagttcgaggttgcagtgagctatgattgtgccactgcactccagcctaggcaacagagcgagaccctgtctcctaaaaacaaaacaaagcaaagcaaaacaaaacagagaggggattgagctgcagtggaaacccagagaagatgggccctagaccactgaatcccatctctgccagtgaccagcatgtagtcctgggcaaggcaattttcctctctgtacctcagtctcctcaactataaaatgaacgcagtgataacagggtcaaccttacag

SEQ ID NO: 802182 - DNA, 584 bp, Homo sapiens
ttcccctttctgctatttcctcaattcttcagaagccaagtgtggccttctacttgttttctcaagcctcacctttggctttcacagggttcagtagtatctgaacctagtaggtagaggaaggcagggaaaatgaggcaaaacagtctactctcctgtttattacaaggtcttttgggtgaggagcctggaacaaccaggtacaagaggcagtagatggtgggaagaaccctagacccccaggtccaggtcaaagtcaaaagatgtrggttctagcctggcttcaccaacttaacagacactagctctgaacaaatcagataacctctcagtgtcatctgtaaaatagagttaaaatatcttcaactatttacaagagactggaagattaaaataagatattattggtgaaagtgctctgaaaatagttaaatgctattttaaaaatcatttcatatgcccatgcaatttctgtcccgcaaaacaaagtactggtggttgcttcttttcatcactagagccaaaacaagtatgacaaaattatccacttcttgacaattctgagccgtagacaaaattacagg

SEQ ID NO: 802183 - DNA, 634 bp, Homo sapiens
tcaagtcaagcatagcattttcttgatttctcaagcattttttgtcacactgcctattatagggataacactagatgagggagattatattgtcttatgaaatatgttttataatatgtttgtaatatgttttattattatttggattaaaaaacagtggaagtgcaaagtgttagaatttttggtgacrtatgaactatacattttattgggctaggatcagaaggctgaaagtagtcttaatgtaggcctcatctccattcatgtttataaggcaaagtaatcttattctttgaggttcatttgcagatttgaaaatcatatagattggtcttagaaatcaatttgcagtgttattgtttgaatatggcatatattgggtttttcaaaggaaatatgaaatcttcttaaactcatatcaacaccctcagtctgccagatgagacaaacttggtgaaaatcaaacaactgctaatttagcaaattggaaaggtaagagtggagatggataatctatactcagaagaaccttttctcggcagatttatatttaaataagccaatcaaatcggttgccttaaaggccacagtcataagcataattaacctctctgtggttgttggaaattgagaa

SEQ ID NO: 802184 - DNA, 656 bp, Homo sapiens
catggcttgatagttcatttccttttagcatgttttagcaccattgtttggatgcaccactgtttgtttattttagatcttttttattattttaatatatgttaaatctctctgataaatttctgaattgcttttctgcattatcttggagatcactgagtttccttaaaactgctattttgaattcttggccagagagttaacatatcacagtctcattggggtcagtcactggttccttgctttctccatatgaggaggtcatagtttcccatttgctgttgtttcttatggacrtacataaatatgtctttctattgaataatttgttctttatttcagtcctccgtctggcttgtttaggtttttattggatatgtttgcttagagattctttgtaatttatctgttggttttctttcttttcccctaggttactgccttcttggcactagatgttgccttaagcccaggtttgtcttgattgtagtaaacaatcagagtgccactcatctcaaatggtgggtgtctcagaggggatatcccagtagtgtgggaaggctggctagggttcatgcccaagggatgtatggaaaaaagccatctacagtgtggtgctgctgaacagccactctgatttggcttctcctttggct

SEQ ID NO: 802185 - DNA, 656 bp, Homo sapiens
catggcttgatagttcatttccttttagcatgttttagcaccattgtttggatgcaccactgtttgtttattttagatcttttttattattttaatatatgttaaatctctctgataaatttctgaattgcttttctgcattatcttggagatcactgagtttccttaaaactgctattttgaattcttggccagagagttaacatatcacagtctcattggggtcagtcactggttccttgctttctccatatgaggaggtcatagtttcccatttgctgttgtttcttatggacatacataaatatgtctttctattgaataatttgttctttatttcagtcctcygtctggcttgtttaggtttttattggatatgtttgcttagagattctttgtaatttatctgttggttttctttcttttcccctaggttactgccttcttggcactagatgttgccttaagcccaggtttgtcttgattgtagtaaacaatcagagtgccactcatctcaaatggtgggtgtctcagaggggatatcccagtagtgtgggaaggctggctagggttcatgcccaagggatgtatggaaaaaagccatctacagtgtggtgctgctgaacagccactctgatttggcttctcctttggct

SEQ ID NO: 802186 - DNA, 593 bp, Homo sapiens
atttatctgttggttttctttcttttcccctaggttactgccttcttggcactagatgttgccttaagcccaggtttgtcttgattgtagtaaacaatcagagtgccactcatctcaaatggtgggtgtctcagaggggatatcccagtagtgtgggaaggctggctagggttcatgcccaagggatgtatggaaaaaagccatctacagtgtggtgctgctgaacagccactctgatttggcttctcctttggctgagttacagagcagagtttccagggctggggatggtagtcctatcttccccctttgtcttcggcctctgccgcctttgtcctcagggatatttcttggggatattggcctttcccctttgtcctcggggatattgctcctttcaagaactcctgatgcctcctgtgggttgaggcagggacaggtctctttccagaaaacccaagatggtagggaagctggttgttaacctcaatctcactttccagtgtagaaactgtgagttggggaaaatttttcayaatctgtgccagacagattgtggagagcaatgtctcagatacggaagtttgattctc

SEQ ID NO: 802187 - DNA, 643 bp, Homo sapiens
ggaaaaaaccaggaatcttcagaaaagcattagttacctctagaagtgctatttcttccactttctttctcatgttaccaaatagtttcgcattagctctaaaggaggtaatctacttactctatcaggtcccttatctgtattatctgtggcaaaataattctgctgactttgctctgaataattaccaagagctcacttaacatggcyataattctctccccatctgactgaggaatgttcttaaactccctcaatcattccagcccacattctttcagtatagcaacagcgtgtctgtaacttttgtttcctttaattcaggatcatcagagtgggtataaaacaatgaccacctttcacagaatgaactatacttacagtgtttaatatatattatctcatttgatccttaggacaaaaagttatatacatatatgtgtatctataaatgtatgtatttatcgctttttataggtagtattgaaaccacagttcaagggcagtagcccaagattactccactagtgagcaataaacttgggattttaaacacaggctttggtttcaaaagtcaatttttttaaggctcataaaataattctttggcttggcaaagccccttgcttatttatatatacca

SEQ ID NO: 802188 - DNA, 412 bp, Homo sapiens
ctaaggtatatatgagatttcgatcttaattgctttctgataatatacacatttatgctcgctttttagcattataaatagaaataacctaaaatatgaataattaaattatttttgattaacctgattttaattaaaaaaggagtgtagacattcaaacattttcacctttcctttttgtctgtttcctcctgtgactgcatgttaaccctctgcttagacactgatatgagaagccttcctgataccatcagctgctccktgtcgttttacttcttatttttcttgagcccatatcttactctctttgagaacatcccaggtgaattctcccaatttgatatgatgttaaggatttaagaggccaaaatgttggaaatgtatgttcacgcacacacacatacgcaatcca

SEQ ID NO: 802189 - DNA, 617 bp, Homo sapiens; identical to SEQ ID NO: 796564

SEQ ID NO: 802190 - DNA, 617 bp, Homo sapiens; identical to SEQ ID NO: 796565

SEQ ID NO: 802191 - DNA, 469 bp, Homo sapiens
tttatctagcattcagttctagaaaaagtttcccgttctagctgacacttttccaacctctacccattactcagttccaaagcagcttttacattttcagatatttgttataacaacatcctacttctttgatacaaatttctatcttaatgtgttttgtgctgctacaacggaatatgtaaaactgggtaatttrtaaagaacagaaatgtattgcctcacagtgctagaagccttgaagtctgacataaaggcatttggagttttggtgtcccaatcttcactttcaagatggcaccttaaatgccatatgctctgaggaagaggaatgctgttcctcacatggcagaagggaaggagagagcaaacccatgcctgcaagttctttttatagtggcattaatctattcatggtaatggatgcttttgaactacctaaacaacacctcttaggccccacctcccaaaa

SEQ ID NO: 802192 - DNA, 680 bp, Homo sapiens
ccaatgaccctttaaaggaactggatccctgctgcaggctccctgagatgctgaaaaactgtgagttggcttgctttctcagcaaggaggctcatggtctggggcaagttctcagccctggtcaccagctgcctggcaatagattcagtgctgttgggtggggcactaggggagtgagactggcctttagggctgtgggctacatgggaacagggtgaggcctgtgactgccaggggggccccacttccctggcgacctgtatgactcagcagaggcagccatartacccctgggaatataactccattggactgggaaccacacccccaaccccagagcagctgcaataagccctgcccaaggagaggctgagctcagacatgcctatccctgcccccacctggtggtctttatctacccaccctggtagctgaagacaaagggcgtaatctcttgggagctctatggccctgcccaccacctgagaatcctgaatacttaaccaggtgtccctagggcaagtttgcatcctccctataggactgcagctgatgcactcttgaaagtgccaccttctcgctggaggccaaccaacacaaaaccagcacactaaacaaaaacacaaccaaggaccctcacagaatccacttcactcccttgccatctccacaggagcagg

SEQ ID NO: 802193 - DNA, 628 bp, Homo sapiens
cacacatggttaagatcatgaaatgtttttccttcattgttattatttttaaaatgaaatcttgtgacacaaatcaatatataaagcaggtaggagtggtgccgctctcattgaactagggccttagggacaatctcacctgttaaacttccccatcccttacccacaggctcttgggtcattgtgaggcagcagtaccctcctaccctctgccagcaaagagctctgactcagtctggctatctcttccaccatgaactacatttgtagtcagataagcttcttaccttctctaagttccagttttcacattgtaraataggaataagcctaggatctatctccttgagtaactatgagtattaaaaacataaaatgtaaaaatgtttagcataatagtaaaattaagtataataattatcattattacagaagtaagagtatgggttttggagtcatacagacctgggcttgaaacttttttctgccaccttctaactcttgtgaccttgagaaagttttcttaggtctctgagcctcagtttcctcaactgtaaatcaagggtaatgatatctaccttataggattgtagtaagattaaatgagataatacatagcaagtactta

SEQ ID NO: 802194 - DNA, 633 bp, Homo sapiens
tggaagaatgcatgtgaaccttctgtatgcacacacacatgccaaacagcacattgataagacctacataaaagaaactcatctatcttgttacttgtttcattgtgcaaaaaagtagtcccttgtatcaatgtttctcaaaagatggtctgtatcagttcatctgaaaagctttttaaaactatcattgcaaaactccaagactataaaatttcagagattggtcctaggattccagaaatccacatttttaatgagttcccaggtggttrtaatacatagaaaggttcaaaatcaccgtcttgaccagattttttttcccttctggggatgatgtccaccttcacctttgtgacatgggggaagggagtaatagtatatccagatattgaaatgtacacatatataaattttgcctgtgataaaaatattgccttaagtcataattaccaaacatatgaatgatagtcattttcagatgctggggcacagattagataagcattggttatgttcaattcctatatctttaattgttatagccattgcttttccttcagctccaaaaacacatatcagaaagtcaatgagtgattgatgttgttctaaaatataactgaatgcatctattaa

SEQ ID NO: 802195 - DNA, 373 bp, Homo sapiens
ttattttggccttataattaagtaataataaaagggctgcactgttttacaaggcaatattctagttccttagtgggtaagagacacagctgcttgccaaaaattgtaatttattctgacaagtatcgaccacccctactcctaccccatagcctgatgagagaaaaaggtctagrcatgctctgaaagagctaaaataaagatacagaaactcttgtgggttacaaaaaaaaaaaaaaaaaaaaagcagaggccattgactagaacaaggttaaattggacttgccattagtataggtgtcttgataatgttgaaaaggaattctgaggttagaaagtaaaaggttttctgactgttgtctcttcttataga

SEQ ID NO: 802196 - DNA, 547 bp, Homo sapiens
ggaacatctgggccagcgcattagcagcagcatgacaaacatgatgccatcaaagcagacacaactgctataaaccttcactataaaatcacccttcaacttctataaaaagagcgcatgtgtactgggcacaatgacaactcaaccccccaaagtacagacaaacggctttaaacagcagcagctggaggccatggcatcttgtcaytccactcatgagccgcaggcctgtggggacccagcaaatgggctccctaaatgtctggtcccagggggaaagaaagccctgctgagttgctgaacagccccagggaagagcttttcctcactgcccagcctccttcctgagaggcctccaaagcagccgactggtagtgaacctgaggcaggggtgaaacagagatgctgcagacaccgcctccaggcgaggcctgccgggcaatccaaactcagctcctggcacagcatcggccctgtaccaacccgcaggggagagccaggcagagctggaatccagtaactgaatcatcctcccatgaaaaactcc

SEQ ID NO: 802197 - DNA, 585 bp, Homo sapiens
atggcagtcgtttgattgacaggcatctcttggaagcttttggggcaggacttgtgtccaagtctccaggtcgcctccagccaccccctgagtcctccactgcctttgtctcacaggaaagtggaacaaggtccttgtgctcctttttccaggtgcttccagaggcagggctatgctcacattcatggcctctgacagcgaggaagaagtgtgtgatgagcggacgtccctaatgtcggcygagagccccacgccgcgctcctgccaggagggcaggcagggcccagaggatggagagaacactgcccagtgggtaggtcccaccagcagctgggggccttcaaacaggtccctgcggctactgtaccttacagatgaaaaccagacattcattccctgatgcgggagggagaagggaagtaatgatgaggattggccgaaaaggtgggtggctggccatgatggaccttccatctgcagggtttcataggactgcgcattcacagccagagatggacttggcagtgggctgaaggacgctgtccactctgccaccttgggtttacctctctcatgcaggtcact

SEQ ID NO: 802198 - DNA, 498 bp, Homo sapiens
agtttatgcattaaacagtagatataaaagacttctactacctacctacatatgtctgcaagataaaggttgtccaggctcagaagagagctcaagaggcagcaatatctaaaatattagcatggcctttaatatggsttctatacactgtgtcacttatccaataaaagcctcagatgggtttggaacacagagaggacctctgactaaaggggagtctgggaggcagcaagcctcacagagttgtccacaccactctgtgtgaggcgcaatcctgtagaagtatctatgggatgtttcactgcactagcaagagtgaagcaagtctggcagagaaaactgcacacacaattgctttcacaggaaggcagggaggatgcagtagcttcaacatagaccagtgctggccaggatgcagatgttgtcagtggacacaataacatggaaaggtgagaagatcagctgctccctgccaccagtgcctccagaacttaaatc

SEQ ID NO: 802199 - DNA, 543 bp, Homo sapiens
tgtatatatacatgtatatatgactcacaatcagtgtcttcttgtattgaacaaatgacttaaccgtactggtaccttatcaaacctttagttcaatgggtaacaagagatgccagaaaatagacgaacaaagacaacaactaaaatagttagatcagtctctctgaagtttgcgattgtccaggaagatcccagtagaagctccctcatgctcaggggagtgcagcagcaggtaataggcagataactcaagaggcttttggtatccagamgttctggcacagataggttcaatcatgggccaagagctaagatttacacttctgagaagattggagagagcaagcaaagagacaaaggggatgcccatagataggccaaacttcacaaactaagggcacagttttccacaaaatttccacaaaattctacttcatacaacactcacaagtttgggggactccaggctattcttacttctgaccggctggctacaaattcgggggttcccacggtcttatcaagtttaataatttttcagaa

SEQ ID NO: 802200 - DNA, 558 bp, Homo sapiens
gataatggatatacaggctatctcagctctaccactgattctttgtgctactaattcttagacacaatactccactggctactttcagtcatctcactgagaaatcagcaaagaataatttaagaagcttcacaataatcatttatctaccatcatattttaatattctatggaccatatttcataagcttaacacaaatcacattatactactatttmtagagcctatattttcgtactgctgcaagtgtcagaactatctagatgaatctcctgacagatcagatttcaatctcaagtgatataaaatagagtacattttagtttgacttttcatctacttatttcttaagaacttgatacagcttttagatgaactgagatacattctgtcctgctgtgacatataccagttaatttaaaataggcaagcatttgtatgctgagaacgcagttttatcattgtggacaaggagtttcttccaaaacagctaaagatgctcttgtctaatttctgttaagcaggaaaaaataagtgttacatgtaaactctaataa

SEQ ID NO: 802201 - DNA, 670 bp, Homo sapiens
ctgaaccttacctgggccagaagggatcccactacccttacaggtgagttccaggccttgcagcattgaccacaagctgacagaagagcccttgggctttaagcgaacatcatggtggcctggcaaaaaccagtcaccaccatggaccagtggtggtggtggccacagggggaggcctctctgcctgtggagaggagagagaagagtaggaaggactttgtattgtggtgtgggtgccagcttagctgcagtagaatacatcaggtaaactgctaaggcttttggctctaagtctttgctcccagacagcatctctggacatgccaaagggcctgggggaacttgccatcctgaaggcaagggccttgggcaagacccagtgctactgtggcttcaagtctgaccyagcacagtcccggtggtggtgactacagaagagcttgcatcataacactcccagctctaggtagatgagcacagagagagagacagcatttgtctgggaaaaagtaaggaaaaagaaaatgtaagggaaaaagaaaatggtaatctctggatcagcttcctggtaatccagagattattctggatcttctcgaagaccaccaagggggtacctccttgagtctgcaaaaaacaccacatcattgatgggcttgaggcccaagtg

SEQ ID NO: 802202 - DNA, 596 bp, Homo sapiens
acccacaaaaaacaaaaaaaaaatttggagctggggagtgctggcacacgactgtagtcccagctactcgagaggttgagaggttgagcgggggagtatcactcaagcccaggagtcaaagccaccctgggcaacatagcaggagcccatctcaaaaaaataaaaccagaaatttatattatgtgtttactaacattaataagactggccgaaagttaaatttttcttttttaatgacctcagtgtgttgtcgaccagcttgaataaggacattaaactgtggggtggtctttgacgcccctcctcttacrtattgatcagcaaacaactaaaaacagggaatgctgggccgggcatggtggctcacgcctataatcgagacgggcggattatgaggtcaggagatcgagaccatcctggctaacatggtgaaaccccgtctctactaaaaatacaaaaaattagccaggcatggtggcgggcgcctgtagtcccagctactcaggaggctgaggcaggagaatggcgtgaacccaggaggcagagcttgcagtgagccgagttcgcgccactgcactctagcctgggcgacagag

SEQ ID NO: 802203 - DNA, 579 bp, Homo sapiens
cttcacaggaacacacggcttgttaagagcacttgagctgtgctcttaaccacagcattctatagtgctgggtcccttcctctgagggccagggccattccttctgcagatttcaggcccagcctgaagcgggagggagggaaggaaggccaagcagggtgcagagaggaaacacttcaggtgaaacacggtattgttagcccccattttctgcctgggcatcctagccaatatgacacctggtgcttcaggcaggaagcacccccatgcccaggcagcccccaggcagctgtgacaccaccgcagctatgacacacgctgcagtgctcagagctctgcgatgcctccagaggcatctstgtcctcaaattcacacaaaggcctgcttcaatcctgtcctgtaagaaacaagtcctctgcctcctccaggaagcctccttcattgcacctgaggccagggcctctcctcccactcagtgctgtcctctccttcctgctctggctcattcccgtcgcccaaagtgatcatttctgtcccactgatcagagcccaggtataggatggaggctcctggtggc

SEQ ID NO: 802204 - DNA, 638 bp, Homo sapiens
ggtggctcacacctgtaatccctacactttgggaggctgagacaagcagatcacctgaggtcaggagttcgagactagcctggccaaaatggtgaaacctcatctctactgaaaatagaaaaaaaaattagccaggtgtggtggcgtgcacctgcagttgcagctactcaggaggctgaagcaggagaatcgcttgaacccaggagatggaggttgcagtgagctgagatcatgccactgcactccagcctgggcgacaagagcaaaactccacctcagaaaaaaaaaaaaaaaaaaaaaagaaggaaggaaaaagaaacactcctttatgtcttctaaggatagacatgaaatgygtgagccttggaacaccttctccctctcctgccccacgtgagctggagcttacatgccttcttgttttcagtactgccgtaaccctgatggtgatgtaggtggtccctggtgctacacgacaaatccaagaaaactttacgactactgtgatgtccctcagtgtggtaggttgccttctttttggtaaggaaactgcttacttaatatggatttgcaacaaaaaaggaaaagggcttctgagcagactgcttctggggaggagatagctgccctctccatca

SEQ ID NO: 802205 - DNA, 656 bp, Homo sapiens
atgcctgtacagtgttatcagggcaattataccttttacagacaatagtggcttagagtcaaggaatggccttcccatgttatggctacatggctgtgataacaagtggagttatacgcctgcactctaaactcgctgagtcactctggatgtttaccttggcctatttttgaccaaagcacagccgtattccttacagttagtaatgagaaagaatgaaggagagagaaagagtgagagctggcaagagggcwtcctaagttctctttagcactgcaatccttggctccaggttattcctgaggttctaccacttcctagccctggagtttcatgagatgacctgtatccttatataaattcatttttcttttgcttaaatctagtataattctgttgcatgcaaaccacagtcctaatggcactagaaaacaataaaagaatacttcaatagaatttaaatttggtaggattttttgaaaaatcaatttgtagaatgttgcaggagcatatatttttgtttgaagctggatggccctgacaatagaatatgtgaaatttcataaatattaaattacatctgtattctaataatctacatagtaataaatcatgtcagttgtacaggacctcctagtcccttgctttgggttagg

SEQ ID NO: 802206 - DNA, 570 bp, Homo sapiens
aataaccagaacacaaacccttccccattctgtgcaatggcagttcactattctaatctgatccttagtgctttctgagccaccaaagacccgcatgtttgggacttccaaattcatttttgagatatcctatatgtgttggtaccatgtggccagccccaggagctgagttcagcaaaaccactttggtaggttgagccagaatttggactggaattgagcagaggtttataccagagggggacagacctggtggcattgcccaggaaacttcaataaagacaacctgccagtctccctaccccatctccctgttctcccaggkacccactctggtaagtcatagggtggggctggagaagagaattaatatacgctcctccggcttgagaccagagattttagactttccccaggtaagcaaaaaaaaaaaaaaaaaaaaaaaaaaagataaatactcttcactagatttacgtaattaggaaaacaaattgttttcaagcatccattcaccagactgcacgggaggccttcaggccaaagctggggttttcagatgctaatttcaag

SEQ ID NO: 802207 - DNA, 633 bp, Homo sapiens
caggacaatgccacaataagtaacagtaacattattaaaacaatagaaagtagcctttaaatataaaagcattaagcatagtaaagggcatgatttattaaaataaaaaatggaatttacagaaaagatattagtcatatagttctttacatcagaaaagacaaatttattatgcaaaagtttgctataaattgattgaagatatgattgattaaagaagaaattgattaaaagtttgattatggtaagagagatcaatatatctctttcagaggtggacatattgaatcaggcaaatatatgttaacaatagaatataatacagtagttccctcttatccatgattttgccttcagtaacccacagtcaaccatggtctgaaaatattaagtggaaaattccagaaacaaacaattcataagttttaaattacatgcaattctgagtagcatgatagaatcctgtattgwcctactccatccagcctggaatgtgaattgtccctttgtccagcatatccaaaccgtatacactaccctcctgatagtcacttagtagacgtctggattatcagatggacttttgcagtgcttgtgttcaagtaactattactttacttaatagtggtccca

SEQ ID NO: 802208 - DNA, 545 bp, Homo sapiens
gtcatttattccaactctagaggaaattcagaaaattctcctcttgtcaagttgcaacagagctcaggttctaaaaccatggttttgttcattagaattggagtttcttgtctgtggggtgaaacaaaagtgagagcaagccatcacgaataagcaaagactttttaaacactgaactgagagagtaactgcaaagcagagcataatttaaagccaggttatgcctgcgaccacaggctagaaacaagatcctaaatgtaaaagaagaccaatcgttcacacwtattcttcttgcaacagaaatttacagcaaaactgtgttattgttctcacactactgcttggataaaggtatcactgttggttgtgtcctctagtttcccaaccttaaatttcctcctccttcctttcgtgtcaatccattttccatagcacaaggacgagggacaaacatttcttggtagaccaaagtttcaaatacagaagaaaaaaataatgtcatagcgctagatggtcatctgactctcacatgaatttattactgc

SEQ ID NO: 802209 - DNA, 483 bp, Homo sapiens
  misc_feature 83, 84, 85: n = A,T,C or G
cttatctcattagtatttgtaaatgttttactacacatttttatgttagtaaaataaacttgtgaagcattctttctgctttnnnttttttttttttttgagaaccagctgtggaacctttaccagagccccagtgagtgggaccgtctttaagttggctttggagtcctttagataaaaccctaatctttggtagcttccttgctacttggtctaacaaaatgttccaagtcactttgcagattttctgccctagatttggaaaaagccmtttttctaaggagcccttgttccttttagagggaaatcaattcaaggcaacaatctggctttattggtcctcagtgtcccacggatgggcactgctcctaggcttctgctctgaacttttgttgttcagatattaggcttcctggactggttctataatttttaaaaaatcttttctcttttaaaatctatttttttatttattttgagatg

SEQ ID NO: 802210 - DNA, 615 bp, Homo sapiens
ccattcttgccacctcagtccttaatgatgatccccaaagtcacaaagtcaggtagctttttagaaattatgaaatcagtataaattatttctaaagactcatggagactgacaattttctcacttaagctaagtaattatcacctaaatttgtgtttaccaaaaggaagtaacagataagttataaagtaaaaagtattttaaaaatccaagaaaggacagtaacagcrtaaaaaataaacctcagacgtggaatctccattaggaaaaaaaaaaaaagtagtgagcagataggaaagtgggcaatttgagtaaaggaagttcaaagagagatctgaaaatcaggatgacagttttatttagatttgctaaagataaaggcagcaaatcaaagtacaagtgataggtctggcactgtcctatttctagtacaagaaaagagtctggaggaagaatcatgcacttcccaaagtttcaacaatctgctgggggaagaggaaaaatagttttaatagatggaagaaaatgtaaagcacagatgacaacttcagtggaaataatgactttggctatgctccaaagataaagataattaagtcaaagaactttcctgac

SEQ ID NO: 802211 - DNA, 615 bp, Homo sapiens
ccattcttgccacctcagtccttaatgatgatccccaaagtcacaaagtcaggtagctttttagaaattatgaaatcagtataaattatttctaaagactcatggagactgacaattttctcacttaagctaagtaattatcacctaaatttgtgtttaccaaaaggaagtaacagataagttataaagtaaaaagtattttaaaaatccaagaaaggacagtaacagcgtaaaaaataaacctcagaygtggaatctccattaggaaaaaaaaaaaaagtagtgagcagataggaaagtgggcaatttgagtaaaggaagttcaaagagagatctgaaaatcaggatgacagttttatttagatttgctaaagataaaggcagcaaatcaaagtacaagtgataggtctggcactgtcctatttctagtacaagaaaagagtctggaggaagaatcatgcacttcccaaagtttcaacaatctgctgggggaagaggaaaaatagttttaatagatggaagaaaatgtaaagcacagatgacaacttcagtggaaataatgactttggctatgctccaaagataaagataattaagtcaaagaactttcctgac

SEQ ID NO: 802212 - DNA, 619 bp, Homo sapiens
gaacacatctcaaaagccaaactgatcccacggttagtctagattcagcctgcaggtcgcccgattgtagtggctgaactatgcggtttcttaaatatgcccttctgtacttatcacagtgtatttagtttatgtgctcctccaataaattgcgagtttatgagtggctctatattcctccgacagggactattccagaactttgaacatgatattcacatttttcaaagtctgggaaactcaataatagaactgaaattatggttcttcagctaaatgacgatctgcagagaagcaaggtactaaagggcaaggtgcctgcatttactccctggacactctgtccccaagttatcaggaacattgtgttgctaaatctatgagacatttttcagtcctagccgtacttgattattttgtagctatttgataatgttgaacgcttctrtaacattgaaactctcttgcgccttgaatttcacaaatctgtcccgctaccgccgccaccctgggtgtttgttcctcttcatttgcctttctgtgtataggggaggggattttatttcggaaaatttcaaacctacagaaaagttgaaacaaaatcatagactcaagtgta

SEQ ID NO: 802213 - DNA, 596 bp, Homo sapiens
gcacgtggttcgttgctaacattcccaaaaggtatcttgtactggttcacactacacctccatctgattcctcagttgtgagctgtttctttctcctagtctcagccaccaaccccttcagaagtggctcctgaaaactttgaggggagttagaaaatgactttgaagctctggtcagttcactgaacctttttattcattaccaygaatatagctgtaaatatttaaagaatccattctaaatacatgcattcatttgtttttaaaagaggagcttgttaagaatgggttttatattgtttataattttatgtattttggaatttatatattacttttgtaattaaaaaaaacccaaaaaactaagttatcaattttaaacaaatagggaaaagcctgaaattttggcatggccaactcagagtgtggagtcaacgcaggcatctaatcttaattgtgatctaaatgtgagtatcgtacttttctcagtgtttagaaaagatgttttaaataatttagagtaagtatatgcttgcaattttgtatccagaattccaagcaaatgcttcctgtggcattttttttttttttggaac

SEQ ID NO: 802214 - DNA, 620 bp, Homo sapiens
ctgtctctactaaaaatacaaaaattagccaggcgtggtggcgtgcacctgtaatcccagctacttgggaggctgaggcaggagaacggcatgaacccgggaggcgaaggttgcagtgagccgagatcatgccattgcacttcagcctgggtgacacagtgagactccgtctcaaaaaaaaaaaaaataaaaataaaaggctgggctcatgcctgtaatcccagcactttgggaggccgaggcgggtggatcacgaggwcaggagattgagaccatcctggctaacatggtgaaaccccgtctctactaaaaatacaaaaaattagccaggcttggtggcgggtgcctgtagtcccaggtactagggaggctgaggcaggagaatggtgtgaacccaggaggcggaacttgcagtgagccgagatggtgccactgcactccagcctgggaggcagcaagattccatctaaaaaagaaacagccccaaatcatttgctatagctaccaccagatatcttgacactgtctgccttagtgtacaaatctctccattctatatgccaaaaaatatgtatcatagaaaaactacttaccagcacttgcaacggtattaagggaaa

SEQ ID NO: 802215 - DNA, 531 bp, Homo sapiens
aaggaataaaactgtttttgttcatagatgacatgattatctatgtagaaaatcccaaagaataaaaatagcccctcctagaaccaataagcatttatgacaaggttgcaggatataaggttagtgtatataaaaagctagttgcattcctctgcagcagccctgaactactggagtatgaagttaaaaatgcccrcacacaattgtatggttaaaatgataaacttcatgttccatgtgttttacaattttaaaaatccattagaatctcagcaagtttgattttagttgatatctattttgtggatatcaataaactgattttcaaggttatataggaaggccaaagacctagaaaagtcaaacaatattgtcaggactgacactacctgacgttaagacctcctctaaagttacagtaataaaaaagcaaaagcaattcaaggaaaaaaggatattcttttcaacaaacaaatggcactggaacaactggacactaatatgcaaaaatattaatctgtacaatgactt

SEQ ID NO: 802216 - DNA, 610 bp, Homo sapiens
acacaggtaaaaggttaatgggaaactagatatataggtatgatttctaagtattaccccaatactcacttgctcttacaagggggaaaataatactttctaatattatttacaagctgtcacctttactcaatttaagtactaccaaacattattggcttccttatatgatgctatatgagatatacaagatcacctataaagaatactataggctgggcatggtggcttgagcctgtaatcctagcactttgggaggccgaggcaggaggagtgcttgagttcaggagtttgagaccagcctgggcaacatggkgagaccctatctctatacaaataaaaaagttaattaggcatggtggcaatcacctgtggtcccagctacttgggaggctgaggcaggaggaggattgcttgagctgggaaggtcaaggttgcagtgagccatgatcgcgccactgtacacgagcctgggctaccaattgagaccttgtctcaaaaaaaaaaaaaaaaatcatattcctccctgcaaatgtttaacctgaaattaatctatcaagatcacctacaaagtattctttctccccaaaatgtttaatctaacccaatc

SEQ ID NO: 802217 - DNA, 631 bp, Homo sapiens
cccactctttttaaaggctgaataatattccattttatgtatatgcagtagtccccccttatctgtggttttactttccacagtttcagttatccctggtcaactgtggtcctagaatattaaatggaaaatttcagaaataaacaattcataagtttcaygttttgtgtcattcatagtagtatgataagatctcacgctgtcccactcagtcccaccctggatatgaatcatctctttgtccagtgtatccacgctgtatatgctccctgcccatgagtcacttaggagccatctaggttatcagatcaacagtggcagtatcacagtgcttgtgttaaaggaacccttgttttgcttaataatggccccaaagcacaagaatagggatgctggcaattcagatatgccaaagagaagttgtaaagtatttgctttaagtgaaaaggtgaaagttcctgacttaataaggaaaaaaaaatcatatgctgaggttgctaacatctatagtaagaacgaatcttctatccacaaaactgtgaagaaggaaaaagaaattcgtgctagttttgctgttgcacctcagactataaaagtgatggccacagtgcatgttaagtgcttagttaag

SEQ ID NO: 802218 - DNA, 563 bp, Homo sapiens
gaatctctgagttcatccttttctttcatcactttgtccagtgacattaggagcaaccaaccgatatcattatattccttagttttctacaaatgtttgaaagtatcgtatacagggtcactaagttatttgccctcttataagtggttaattaggtgtatmcaatgcagacatttcgcttatctctataaacagttcatgccatgggctattagtgctttctgtactattggaaatagagtttttagcatttttaagtctaatcggattaaagagccaattcccaaaaccaattcaggagactcatccttaaaattctcttcctctacaaccactcttggtatcaaaatctatattagtcagagttctccaaagaaaccaaaccaatagaacggatggatagactagacagatagatacatagatagatagataggtagatagatagatagataggagaggagatttaataggggaattggctcatattattacagaggctgagaagtcccacaatatgctgcctgtaagctggagaaccagggaagatggcagtttggctt

SEQ ID NO: 802219 - DNA, 580 bp, Homo sapiens
ttgcttgagcctagaatttgaatctctgagttcatccttttctttcatcactttgtccagtgacattaggagcaaccaaccgatatcattatattccttagttttctacaaatgtttgaaagtatcgtatacagggtcactaagttatttgccctcttataagtggttaattaggtgtatacaatgcagacatttcgcttatctctataaacagttcatgccatgggctattagtgctttctgtactattggaaatagagtttttagcatttttaagtctaatcggattaaagagccaattcccaaaaccaattcaggagactcatccttaaaattctcttcctctacaaccactcttggtatcaaaatctatattagtyagagttctccaaagaaaccaaaccaatagaacggatggatagactagacagatagatacatagatagatagataggtagatagatagatagataggagaggagatttaataggggaattggctcatattattacagaggctgagaagtcccacaatatgctgcctgtaagctggagaaccagggaagatggcagtttggc

SEQ ID NO: 802220 - DNA, 580 bp, Homo sapiens
ttgcttgagcctagaatttgaatctctgagttcatccttttctttcatcactttgtccagtgacattaggagcaaccaaccgatatcattatattccttagttttctacaaatgtttgaaagtatcgtatacagggtcactaagttatttgccctcttataagtggttaattaggtgtatacaatgcagacatttcgcttatctctataaacagttcatgccatgggctattagtgctttctgtactattggaaatagagtttttagcatttttaagtctaatcggattaaagagccaattcccaaaaccaattcaggagactcatccttaaaattctcttcctctacaaccactcttggtatcaaaatctatattagtcagagttctccaaagaaaccaaaccaatagaayggatggatagactagacagatagatacatagatagatagataggtagatagatagatagataggagaggagatttaataggggaattggctcatattattacagaggctgagaagtcccacaatatgctgcctgtaagctggagaaccagggaagatggcagtttggc

SEQ ID NO: 802221 - DNA, 618 bp, Homo sapiens
caacaaaaaggaactcacatgagttgacttactacacatgggttgattcattattgcgtgagtttgtccttacaaaacccccatgagatgaaggattattaacatctccaacttttatggcaggaagcggaagaacagaatggtttagtgacttaggtcacagagcaggcaagagrtggggcatgggtttgatcctagcagtgaaaacaaagcccatggtctctttccaactttggaagcaggatgagggggttccctgataacccctcccagagcttagatcaccacgctggtaagagcttcaggcaggccggcccctgacctttgagagtgaggggcaaaagtactaatagaggcccatataacctgtgactaggatatttagaacttaccaattaatccaacaaattatcatatgaaatatgatacatcagtcctgggatctgtcctcctaccttgacaaatgtagctttgtaatgacctgggaggccacgttctaatttagagttctccaaagttccgtgtcagaatgtggcagtatgtggggggcttgccctggccactgtccacctctggctttatcctaaatgttgaggggtttcatgctcacatgcataa

SEQ ID NO: 802222 - DNA, 634 bp, Homo sapiens; identical to SEQ ID NO: 801824

SEQ ID NO: 802223 - DNA, 656 bp, Homo sapiens
tgccaggtcaacaacagacacacaacaaagttacttcccataatcaaagttgtaaaaagttagtttcaaaaccaagctgcacttttgagattccatttttcatttttatccagtttgtggccattcccaaaggactcctttcaggtgcttctggaaagtgttaccatacaaaagacttctagttctcaagggggaatggagaaatacatgtggattggaaattcaatccaaacaaaacctctctaaaaattttttaaatggtatttgtatccaggaaatcaaggccacaaatcgtttctatgaatgagaactttacaggttgccttccctcacaatttttccttcacttatatccctgataaaaataagaaatgctgctggatataaagcaaaattaatgttgaccactaaagccatttctagtcaaaattcaayagcctacatacacctcttgaaaaaacaatttgctcccaggctccgtatgatgacgctggccatgagtaacactcatgtcccagaatcctcagatttagctttctcaagaaaactttccatgaaacacgacttgccaggacaaggccttgcggaggctccttgtgtacctgtggccctcatccccagagtgctgtgctgttaccctgtgggttactgtgtcg

SEQ ID NO: 802224 - DNA, 576 bp, Homo sapiens
ccaaggcaatttgcccttgcatgcaatggcacaagaccactatgctttataagacttgtttctattttttaataattttacagtgcttgcctttttgacaggattcctgccactagaagtttctcatttctccctaaatctgtcctgggctaggaaaccagatacaaatgctcattgaaattgtatgtaaaatgccagtaaacaggagctgaatgaagagatgaaaaattacttttgagtagaagatgtgtgttttgtytcgtgggctttatgacaaagattgctcagaaaccctttttgtttacttgctctgtgagagagactactgaataaatgacctctgcatacataaggagttattgtgccttttctgtgcttatgagttgcctgtctgcctttcccagagttctctaccaacagctgagccatcttgatctctatgtcagcaagtttagcccaattgcatcatgccatacttgatgctagttaaaacctgattatgtgtcccagttttagttgctgtgtttctaccctgctattatcacttggtctcccacaggtaccttgtttctgtat

SEQ ID NO: 802225 - DNA, 647 bp, Homo sapiens
ctctacaaaaataaaataaaacaattatgtgggcataatatcattcatctgtggtcctagctatctggtagactttttttttttctttaaagacagaatttcattcttgtcacccaggctggagtgcaatggcatgatyttgactacaacctctgcctcctgggttcaagcgattctcctgcctcagtctcctgagtagctgggattacaggcatatgccaccatgcctggctaatttttgtattttttagtggagacagggtttcgccatgttggccaggctgttcttgaactcctgacctcaggtgatccacccgcctcaggctcccaaagtgctgggattacaggtgtgagccaccgtgcccggcccccccagctacttgggaggctaaaatgggaggatagcttgagcccaggagttcaaggctgcagtgagctatgatcatgctactgcactccagcctggatggcagagtgagaccctatctctgaaaaaaaaaaaaaaaaaagctaagcagagacaactatgactgcatactgcagaggagacagattctacagattacatatgggtaagttactaaataaataatgaaaacaaaaatcaacaataagagtttagagaaataaaccagaaaacaaagtta

SEQ ID NO: 802226 - DNA, 647 bp, Homo sapiens
ctctacaaaaataaaataaaacaattatgtgggcataatatcattcatctgtggtcctagctatctggtagactttttttttttctttaaagacagaatttcattcttgtcacccaggctggagtgcaatggcatgattttgactacaacctctgcctcctgggttcaagcgattctcctgcctcagtctcctgagtagctgggattacaggcatatgccaccatgcctggctaatttttgtattttttagtggagacagggtttcgccatgttggccaggctgttcttgaactcctgacctyaggtgatccacccgcctcaggctcccaaagtgctgggattacaggtgtgagccaccgtgcccggcccccccagctacttgggaggctaaaatgggaggatagcttgagcccaggagttcaaggctgcagtgagctatgatcatgctactgcactccagcctggatggcagagtgagaccctatctctgaaaaaaaaaaaaaaaaaagctaagcagagacaactatgactgcatactgcagaggagacagattctacagattacatatgggtaagttactaaataaataatgaaaacaaaaatcaacaataagagtttagagaaataaaccagaaaacaaagtta

SEQ ID NO: 802227 - DNA, 491 bp, Homo sapiens
tggatccatgaatcctggctatgggagatatactggatgctgattcagagcatatgtggccttctggagaactttgccccagccctgcaaagtattgtcacctagttggctttgtaattatgacttcaaaaggccattctactgttctattgatccagctgcttcaggatgacaggaacatgataagaccaggaactccatgagcacgagcccactgctgcacttctttagccataaagcgagtgccttggtcagaggcaatgctgtrtggaataacatcacagtgcataaggtattctgtgagtccacaaatggtagtctttgcagaagcattgcgtgcaggataggcaaaccactatccggagtaagtgtctattccagtgaggacaaacctctgcccttttcgtgatggaagaggttcaatataattaacccgccaccaggtagctgattgatcaccctgaagaatggtgccatatcaagagctcagt

SEQ ID NO: 802228 - DNA, 669 bp, Homo sapiens
tggcattagtaccaagcttgggaggggagaaatttgtaatgttcttacacgaagtggtatgatatcacttagaggtatactatctcttggactataataaattgaagacaaatattataaatgctaaagcaaccactaaaataataaaacaagaaaatataattaataagcaacaaaggatattaagtagaatcatttaaaaaatcaaaaagaaggcataaaaagaggaaagggaaacaaataataaaataggataagaaaagaaataaaaagatttaaacctaaacatatcaattttcacactaaatgcaaacagccttaacatcccatttagaaggcaaagattatcatgctggrttaaaaagacccaattataaacaacctacaagaaatcaattttaactataaacacaaataaaaggaaatgaacgggaaaagatataccattataagattagtcaaaagaaagttgtaatggttatattaacatcagagaaagtagatttcaaagcagtgaatattccatgggataaagatgatcatttcataatgaaaaagggatcaatttaccaagagaacataacaatccaaaacatttatgaacccaataacagagtttcaaaatacatgaagcaaaagattgagagaaccttaaggagaaatagacta

SEQ ID NO: 802229 - DNA, 604 bp, Homo sapiens
tagccattcttttattccttcactttccaaataaacttgttttcactttactctacctaattgccctgaattctttcttgcatgagatccaagaaccctctcttggggtctggattgggacccctttcctgtaacagagccatggaagtaatgagaagtcattatattctggatttgttttgaagatagagcacagagaattccccaacacattacaaacgaggtatgagagaataggaggaatcgaagatgactccaaggtttggggcctaactaacttgaaagatggagatgaggaagactgcagatagtgcaggtttgggaaagatgaagattccatgtggagaatttgaactggagatgcctactagacatccaaatggaaatgctcagtagacagctggaatataaagatctgaagtccagagggagcagtyaaggcttgagctatcactttcggaatcatcaacacacacacatagagagattgcatgaaatcatcaaaaagcatggagaaaaaagagctaaaccttaaggtattccaaggttaaaacctctaagaaaagaggagaggctagcacaggagacagaaaggagcagccag

SEQ ID NO: 802230 - DNA, 644 bp, Homo sapiens
tcaaagatgcagagaaaattttgagagcagctagagaaaaatgacatcacatagaaaggaactcctatatacaattatcagtgaatttctcagcaaaaattttggatcccaggaaagaatgtgataatgtattcaaagtactggggaaaaaaactctgctatccaagaatactatacccatcaaaactattacttaaaatgaaaacacaataaagcctttcccagacaaacaaagattgagggagttcatcatcactacacctgccttacaagcaattcttaagggaattcatcaaattgaaaggaaaccatgctaaagagcaatgtgaaaacatatgaaagcataaatctcacttgtaaaggtaaacatrcaaatgcagaataatgttataccatagtagcagtgtgtaaattacttttaacactaatataaaagttaaaagacaaaaatgttaagaatgactacaatacaaaaaattgttaatgaataaacaacataaaaagacagaaactctgacctcaagaacacaaagtggggtggagggaataaaagtgtagagatttagtatccaatttgaagctaagttgttaacaacttaaagcagatggttatagctacaaaatattttatgcaagtcttgcgg

SEQ ID NO: 802231 - DNA, 634 bp, Homo sapiens
caaatttgaaagactgttgattatataaagctacaataaaataatgcttctgatgtttataaaatatacagaaataagatatatgacaaaagtagccaaaaatggcaggagaggaattaattaaatgttactcaaaattattacatattagagaaatgcaagttaaaagcacaagtaagcattatgcaaccatcagaatggctaaaattttaaaggttgtcaatatcaatgttgatcatgatatgatatatggagcaactggaactgtcctatgttgctgatggcagcataaatttattcaaccattacttggacgtatctgttaaagcaaaacaaaatccyaacctatgacccagcagtattactcctaggtatatactcaggaggaaatgtgtaaaaattcattaaactatataccgaaggcttgtgcattttacggtacatatctcaagaaaaacttaagaacacaaatgtaaaatgaatgataagaaatcaaaaatcctaatagaaaaataggcaaaagaaaataacatgaatataaaaagtagaggaaaacagatgcttataaacatatgaaaatacgctccatttcattcatcaagttacaattaaaataccaaaatgatactgaagc

SEQ ID NO: 802232 - DNA, 634 bp, Homo sapiens
caaatttgaaagactgttgattatataaagctacaataaaataatgcttctgatgtttataaaatatacagaaataagatatatgacaaaagtagccaaaaatggcaggagaggaattaattaaatgttactcaaaattattacatattagagaaatgcaagttaaaagcacaagtaagcattatgcaaccatcagaatggctaaaattttaaaggttgtcaatatcaatgttgatcatgatatgatatatggagcaactggaactgtcctatgttgctgatggcagcataaatttattcaaccattacttggacgtatctgttaaagcaaaacaaaatcctaacctatgacccagcartattactcctaggtatatactcaggaggaaatgtgtaaaaattcattaaactatataccgaaggcttgtgcattttacggtacatatctcaagaaaaacttaagaacacaaatgtaaaatgaatgataagaaatcaaaaatcctaatagaaaaataggcaaaagaaaataacatgaatataaaaagtagaggaaaacagatgcttataaacatatgaaaatacgctccatttcattcatcaagttacaattaaaataccaaaatgatactgaagc

SEQ ID NO: 802233 - DNA, 503 bp, Homo sapiens
gacatatgatttctcttcaaacaatctatttaaacttgaagccacagcacaaattattaatttctgagttgctttcaatgaaggtcagatttagaaagactgattagtagcttgtgtttcggtttaaggccttaaaatgaaatattaaaaattccagatttataagtttaaaagaccatagcccctatttcagctcctccttccttttaaattttttttatagaagctgtgggaagaaatgggaagttcctgaccattytgaggcataaaacattctaaattttttctaaattatgtgaaaatccagtatttcatggcaggtagttttcacaaggtcccaataaaatgtaatgatacatagtgaaataaactttcaaaagtggaaatcagaattcaagcccattgacaataaatatgatctaagtctatacataccaataggccaaactatacttgttcagcactgtccatgaaatagtgccttggaatttcaatatttctga

SEQ ID NO: 802234 - DNA, 503 bp, Homo sapiens
gacatatgatttctcttcaaacaatctatttaaacttgaagccacagcacaaattattaatttctgagttgctttcaatgaaggtcagatttagaaagactgattagtagcttgtgtttcggtttaaggccttaaaatgaaatattaaaaattccagatttataagtttaaaagaccatagcccctatttcagctcctccttccttttaaattttttttatagaagctgtgggaagaaatgggaagttcctgaccattctgaggcataaaacattctaaattttttytaaattatgtgaaaatccagtatttcatggcaggtagttttcacaaggtcccaataaaatgtaatgatacatagtgaaataaactttcaaaagtggaaatcagaattcaagcccattgacaataaatatgatctaagtctatacataccaataggccaaactatacttgttcagcactgtccatgaaatagtgccttggaatttcaatatttctga

SEQ ID NO: 802235 - DNA, 624 bp, Homo sapiens
taataaaacaagagcaaagaaaaaaatgatgtttatttgtggtgacttttggccagcgtgcaagaaaaagatgctgtgtttgctactgattttaattcctgaagtcttaagaacaataattcccatcgagacaaatcaagaggtatataacatgttatatcttcaaaatatttacctatatgccataaaatacatttattcctggataaatgataactgaatgtgtctactttatgaaacatcatgctcgctcctttgagtgtagtaaagagaaatggagagataaagaagacgcatttcatgtcctcaagggttgttatagtctgacagaagaaaccaaatcatacaaatgtgcaaccaaataatacaactgcatgacagaggaagagaaaagccaattkttgaatgtgacctgattagaacaattgtggcatagtggggaaaacacacacacacacacacacacacacacacacacacacacacacacactgaaatcataattctctgggtttgatacaggaggtagaaataaattatttaggcagagagtgagggcaacagagttcttggcagaatttcccttctaacaaaaagcatccccccaaataatttcttttctaa

SEQ ID NO: 802236 - DNA, 627 bp, Homo sapiens
aacgggtaagctcagatggaacattatcgaatggtgaaaagcataagtttgtcttaggacacaaagtttctaacaaagattgattcttctcatatgaaataactgcttctttatacttttcatggcattttagaatacagggtaggattgcagtccctgaaatgtaccaattctgaattaaactaattaattaattaattttcttagcaccccacagagattgtgccatcacttttttgtatcatgctgcccctgattttcctcctagtgggcccgaaacatccatctttccacgagtgtggtcaggagattaggactgttataaatgaagtgcaaagagatttactattccaagcagaattttgcagtcagtaagatgttaaagattatctaaagaatatcaagtcaaatccagaagtctcagctgaaggtgtttcttctttaacatacagattttatactgcccwtcaatgagggtaggccttgggacagatttattctaagaaatgaggatagagtagagaaagaaaaagtctgaagctcttcttatggggctgcagagctgggagactttcagaaatatgagaaaggaaataagagaggcagatgacacatgagttttcatgt

SEQ ID NO: 802237 - DNA, 594 bp, Homo sapiens
  misc_feature 559, 560, 561, 562, 563, 564, 565, 566, 567, 568, 569, 570,571, 572, 573, 574, 575, 576, 577, 578, 579, 580, 581, 582,583, 584, 585, 586, 587, 588, 589, 590, 591, 592, 593, 594: n = A,T,C or G
atacaggtttttattacaagaaacaattgtattgattgtaatagtctaatattagaggtgtatttattcaaaaaattcaaattacactcaatttcaaaaaattagagagataaagtcatactttatattaaatgattatattatttcaagcattaaattcacaaaatcaccatgaaaatatatttttccagttatgtggagtaagaatgaacaaaaatcatttaaaaaacagatatggctyagcaaatgttcttccaggctttctaattatgtgttattctttctttatagtagtgcagaaaattcaagtatggtaaaaaatacctcatcagttgcttgattggaagaactaatttagactgaacaggaatgtgcttgcagaaaaggagaaatgaccttgtatagcatgatacgtacctacttatttactttgaagagtttctaagtaattttcaattataatatgatcaatcctacataaatttctgtttctgttttatccgatcatattcattcacagaacctatattattgaggatgatgaaattttacaaacttnnnnnnnnnnnnnnnnnnnnnnnnnnnnnnnnnnnn

SEQ ID NO: 802238 - DNA, 497 bp, Homo sapiens
taaaagcactgtgtctagatacagtcatccaagatagtagtcaaaagatttcagccacaaaaggaatatgagtgatttaaagttgaaataatctattgtacatactctacctaaactcatattgcctttatttcaattgatccccataaatcaagttagaatcagtaattttaaaaaatacttttaaaagttttaaaaatacttttggttcattgattggttggttggttgttcagttaatagattttcctattctgagaagctaggtatgaccatgcrtccattttcagattgcttgcatattaatcaaataatattgagagaagcttatattatatcatttgcaaatttcatataaggtatgctaattaatataatcccattccctcactgaataaattaaaggaggaatgtgttgaattaaaaagaaaaactaattaattaaaacaaaaatttctacattttgaatgtaaataacttctttcttcagaatcaat

SEQ ID NO: 802239 - DNA, 497 bp, Homo sapiens
taaaagcactgtgtctagatacagtcatccaagatagtagtcaaaagatttcagccacaaaaggaatatgagtgatttaaagttgaaataatctattgtacatactctacctaaactcatattgcctttatttcaattgatccccataaatcaagttagaatcagtaattttaaaaaatacttttaaaagttttaaaaatacttttggttcattgattggttggttggttgttcagttaatagattttcctattctgagaagctaggtatgaccatgcatycattttcagattgcttgcatattaatcaaataatattgagagaagcttatattatatcatttgcaaatttcatataaggtatgctaattaatataatcccattccctcactgaataaattaaaggaggaatgtgttgaattaaaaagaaaaactaattaattaaaacaaaaatttctacattttgaatgtaaataacttctttcttcagaatcaat

SEQ ID NO: 802240 - DNA, 521 bp, Homo sapiens
  misc_feature 521: n = A,T,C or G
acttcaatttgtgcagaatttgttgagaagtgatatggtttggctgtgtccccacccaaatctcatcttgaattgtaatccataatacccatgtgtcatgggagagacctggtgggaagtaattgaatcatggatatggtttccttcatgctgttctcatgatagaaagtcactccatattcatatgtgtgacttcttatgagatctggtgattttataagcgttgggcatttcccctgctagcactcattctctctcaagatgccctgtgaaaaagtgccttccagcagattgtaagtttcctgaggccaccccaccagccatgaggaactgtgagtcaattaaaccccttttcttyataaattacctagtctcgggtatttcttcacagcagcgtgagaacagactaatacaagaagcaaacacaaagtaaattataccaatattaaagaaaaaatattaaatctgatttttgtttatttaaaaatatgctctcttgctcccaatcaggaaatgaagtn

SEQ ID NO: 802241 - DNA, 648 bp, Homo sapiens
  misc_feature 1, 2, 3, 4, 5, 6, 7, 8, 9, 10, 11, 12, 13, 14, 15, 16, 17,18, 19, 20, 21, 22, 23, 24: n = A,T,C or G
nnnnnnnnnnnnnnnnnnnnnnnnggcaaaatacatagagaaagaaaacagattagtagttgccaaacctggggagagggaggaatttggagggacttaatgagtacagggcttttgttgggggtgtgaaagttctagaaccaaagagtggtgatagttgctcaacatcatgaatatagttaatgccactaaactgtatatttaaatatatattgtaaccaatgtattttgcaatataatatataattattacaatagtaaattttatgttatgagtattttgtcacaatttaaaaagaatgacaaattgcccatgacctacrtgtaagcaattgacaaaatgccccagagggaaattctataaaaggcccagacataaaagggtccaactactttgacattaaacggggtgttcttttaaaaacgattttaaaattcaaaacacttcactgcattgttgttattaaatataatataggatggcaattgaaattctacttgaaaagattaggaaacgtttcttgttttctttgcatctcaatgataaaaatacaaaaactagaacacaaattagtaaacaaggtggctgtattgttagagacactgtaatggtagagatgttgaatggaagacagcaactacaaagaa

SEQ ID NO: 802242 - DNA, 628 bp, Homo sapiens
ttacctgttgtgcaatgtgagatgggagaaaaggctgtctggggctgtgtgttataatttttgtttaaagcactattaatctgattcttcaggtatttttggctgcaatgagcttttttttttttgtaatatccagggtttaagctataataatttattttttaaaatgactacgaacattttaagtcctgaataatggacytgtgcttgagttttgggcaaatacctcctcatagtttggattttactagtatagaggtcatatgtgaaatgttctatgaatgacttggaaccacttgtatgaaatcaggtacaaactgataaggtgttcagaaactattgatattaggtctatcaggccttaaaaggagtggcccttggttgttgcacttctatctattcaatctaattttatagattttttttaggcatgtttgctgctctcacatttatattaactgcttctaataagattcatgccgggctgggactctaattacatgagtttattcaaattacagataaatcagtagatattaaatctgaagaagtctcagaaagaccactctctacagataggtaaaaagaatttaggtgtaaccaccttttaaatgatgagaggtctttc

SEQ ID NO: 802243 - DNA, 612 bp, Homo sapiens
aagcgtagctgactactagacaccgatggtgattctttatcactttcccctcccttccaactcccaatctcacggcttgtgaaaccattatctgcagattcataaacacacatacacacttactaattaactttaatgacaggaaaactattttcacctgaagactaccaagggcttgaatacaaatttttttgatggaaacagcttttaattatccaaaccaatatgcaattctggcttgcgatgcctgaaggcattttgataattcatgacttacccaaactgataaaaagaacccagccatggcgttgctgggaagcactgggaggcgtccccatctcttccttggctcagatcccagtctcctttctacctggtttccttctgccttagggatgagcaatgaagttatttcccctttataataaaagccttttctgtagatgctggagarcacagtaagagaatattacccttgcttccctccttgctgtaggctaaaaagtaggaagaataaagaaaaagtaacgttgcaatatctatggagctgagaggagcccctggcctagacccaatgccccgggtgagacattaaagaatgacaagctccag

SEQ ID NO: 802244 - DNA, 648 bp, Homo sapiens
aaaatctgtggtttagtgtaaccaccttcatcagttttctttgctagatcttctggataacttgctataacttctaaatcagcacttgctgcttcactttgcacttttatgttatgaagacagcttctttccttaaacctcttgaatcaacctctactagcttcaaacttttyttttgcattttcctcaactttcttgtcttcacagaattgcagagtcggggccatgctctgcaaatgctgtggctggtttttgttttgttttgtttttaagagacagggtctcactctttgttgcccaaggtagagcacattggcatgatcatagctcaccacagcctcaaactcctgggttccagcaatcctccacttcagtcttccaagtagctgggatcacaagtgtgctccaccacaactggctaacttttttatttttgtgtgtggagatgaggtctcacaatgttgcccacacgggtctttaattactggcctcgagcaatcctccaatcttggccttccaaagtgctggaattacaggtgtgagctccaccatgcctggctagtggctggtttgatctatccacagcactcagaccttctccctagcagcaataaggctatcttgctttcttatcattcatgtgttcac

SEQ ID NO: 802245 - DNA, 633 bp, Homo sapiens
gctgtagacagatgtactgtcatccaggctttgttgttccatgtatatatcacaagcagagtagatttagcataattcttaaggactctaggatttttagagtggtaagtgagcattggcttcaacttaatgtcactagctacattagcacctaacaagaaagtcagcctgtcctttgaagctaggcattgacttctctgtagttgtgacagtcctaggtaggatcttctcccactacagtatagggctgtcttgcctacactgaaaaatctgtggtttagtgtaaccaccttcatcagttttctttgctagatcttctggataacttgctataacttctaaatcagcacttgctgcttcactttgcacttttatgttatgaagacagcttctttccttaaacctcttgaatcaacctctactagcttcaaacttttcttttgcattttcctcaactttcttgtcttcacagaattgcagagtcrgggccatgctctgcaaatgctgtggctggtttttgttttgttttgtttttaagagacagggtctcactctttgttgcccaaggtagagcacattggcatgatcatagctcaccacagcctcaaactcctgggttccagcaatcctcca

SEQ ID NO: 802246 - DNA, 581 bp, Homo sapiens
caatgatagagatgacaaggacagcagcagcagcattaatgaagcagtggctctgcaccgggcactaggctaagcactgcatgcacattattaaactgccatatcccattatagaaactgagtccaggccgggtgtagtggctcatgcctgtaatcccagtattttggaaggccaaggcaggaggatcacttgrgcccagttcaagaccagcctgggccacacagggagaccctgtctctgcaagaattttaaaaactagccggtgtggtggtgcatgccagtagtcccacctcaggcatgcatcctacccaggaggcggaggtgggaggatcacttgagtccagaaggtcaaggctgcagtgagccatgattgcaccactgcactccagcctaggtgacagagcaagaccctgtcaataaataaataaaatgaataaatgaataaatacataataaactgagtcttaggttgaaaaacctctacctggcccaggtcgtcccagctgtaaatgtcagagcaggagctgaatccaggcagcccaggctgaccaccgccccgcaactacaggctcgaggcctt

SEQ ID NO: 802247 - DNA, 613 bp, Homo sapiens
ggagcaagcacctcccatcatctggcaaaacctcctaaggggacccacgcggcgccacttcctctggcctcaagttccctgcagcctcttcgaaagcgaaagaaacctggattttcttatgtttaaatttagtcctggatgggattttaaaaaaactgaacgtgcaactkaaaatacacaatcaaaaccttgtctttgcatgctaatctttagagtccaaggagaacacgaacttccagaaatcaaaatgagaaactttaacgtttattttttaaaaaactgaatctgggcttgattttatagtgcccagaatttttctttattccttattcattcagaaaaacaaaaaggcatcttgaggccaactgttacctggaaacattttttagagacagagcaaatataagcacttaaaatttttttttaatataaaggcccggtaatctccacacactagagatgcgacgtatttctcctgttactggttactggtttaacccagccaacggcagccccacttaggacgtgaatgttctagccacaaagaggaacccgtggatgctggaaagaaagggggaagcccgggaggaggagtcagatgcgattttatgct

SEQ ID NO: 802248 - DNA, 613 bp, Homo sapiens
ggagcaagcacctcccatcatctggcaaaacctcctaaggggacccacgcggcgccacttcctctggcctcaagttccctgcagcctcttcgaaagcgaaagaaacctggattttcttatgtttaaatttagtcctggatgggattttaaaaaaactgaacgtgcaacttaaaatacacaatcaaaaccttgtctttgcatgctaatctttagagtccaaggagaacacgaacttccagaaatcaaaatgagaaactttaacgtttattttttaaaaaactgaatctgggcttgattttatagtgcccagaatttttctttattccttattcattcagaaaaacaaaaaggcatcttgaggccaactgttacctggaaacaytttttagagacagagcaaatataagcacttaaaatttttttttaatataaaggcccggtaatctccacacactagagatgcgacgtatttctcctgttactggttactggtttaacccagccaacggcagccccacttaggacgtgaatgttctagccacaaagaggaacccgtggatgctggaaagaaagggggaagcccgggaggaggagtcagatgcgattttatgct

SEQ ID NO: 802249 - DNA, 585 bp, Homo sapiens
tgtacccagtttttcaggcacccagtgtcctctggcctcagccccccagctctcaagatcctcgcagaggctcccctccagatctcatgccacatccagagaattgtcaatctcctctccagacaactgtaaatgtgccaggcccaggtgacattccttcagcgggacagttagccaaatgtaaatgggcaataatgctttgaagtatcctcctgccttcaactcaagcttctagggctttaatttgaatagctgtcgctattctagggttgaggagaggctcttggaatctcagaaccactcccaaaatgattacctgctctgcctctgattcctgtccagakgaataaagatgaatagtgacgaacgagtgtagaatagtaatttctactagagccatgtagagatgggcgctgggaggctgtgaaaatcctgcaagacaagctctgcctttaagaacttaaatgtggttgggaagataagacactgccaacctcaaataatgagactcagaaaatacagtgaagtatagagtttattcaagcccaaagcttgaggatggccacctgggaacaatccattcaa

SEQ ID NO: 802250 - DNA, 643 bp, Homo sapiens
atgcatagaagacagataactactatgcatagatacaagaacttctataagaaacagtaatcccacctactagtaaccatggtcaaaattgcatctagaaagtgaactgatcccattggaatttctttatgcttgaaagaaagttcttagggagatggaaaagaaataacaactcttcctacattattcgctacttgccactgtcttagaatatgaagatattyaccctcaaacacctcttctctgtgattattttatctagacttctctctaatatatgttttcaaacatgcttcttaatatctgtgttttccctccatattatacaacctaccctaaatttatagatttagattagaatgaaataacacacttatgagccatatggtctttgaaaaggtatctcctcagtttctgtttgcaaatcttaaaaatggtaataatgtctacctcataaagtgtataattaggaaggaatacgcaatcacatgtaaactgacatagtggttaagagctgtggagtcagatacccgcattttaaaccagtaaatttaattaaccttgcaaggtatcattttaacccacaggtaaattggaaataacagcatcttctttatagctatgtcatggggaatgaaataaa

SEQ ID NO: 802251 - DNA, 591 bp, Homo sapiens
tcgaatacagttttttaattgcgtatctagggtggaaggtgaatacttaatgcagatgtaagtaagacatccttttattatttcacataacagtctaaacaacctatttttttttcttctaaaacaaaacaaaacaggatacatgtgcagaatgtgcaggtttgttacataggtatacgtgtgccatggtggtttgctgtacctactgactcatcctctaggttctctcccctcaccctccaccccccaacaggccctggtgtgaattgttcccctctctgygtccatgagtgctcaatgttccaactcccatttatgagtgagaacatatggtgtttggttttctgttcctgtgctagtttgctgaggatgatggcttccagcttcatccatgtccctacaaagatgtgaactcattcctttttatggccgtctagtatttcatggtgtatatgtaccactttttttaatccatatatgtaccacatttctttatgcagtctgtcattgatatacaacctattcttaagaaaaacactacctactaaactctgggtttgagaatagtaaaaatagattgtcatactacat

SEQ ID NO: 802252 - DNA, 591 bp, Homo sapiens
tcgaatacagttttttaattgcgtatctagggtggaaggtgaatacttaatgcagatgtaagtaagacatccttttattatttcacataacagtctaaacaacctatttttttttcttctaaaacaaaacaaaacaggatacatgtgcagaatgtgcaggtttgttacataggtatacgtgtgccatggtggtttgctgtacctactgactcatcctctaggttctctcccctcaccctccaccccccaacaggccctggtgtgaattgttcccctctctgcgtccatgagtgctcaatgttccaactcccatttatgagtgagaacatatggtgtttggttttctgttcctgtgctagtttgctgaggatgatggcttccagcttcatccatgtccctacaaagatgtgaactcattcctttttatggccgyctagtatttcatggtgtatatgtaccactttttttaatccatatatgtaccacatttctttatgcagtctgtcattgatatacaacctattcttaagaaaaacactacctactaaactctgggtttgagaatagtaaaaatagattgtcatactacat

SEQ ID NO: 802253 - DNA, 619 bp, Homo sapiens
ctttagcaaacgtgcaggactttctggattatctctttgaatgccaactttagttagccctattatatttataagtggcatccatactctttagagtgacgagaggcttacacatatacttcatttcttaaaatagcttatttgacaattaaaagaaaaaatgtattattaagggtcatttggtcgcatgtaacaaaaccagattccaaccactttaagtaagaaatggggttttattggctcataaaactgggagaaatggatggaggcagggcctcaaaagatgttatcaggggtgtctctctcatttcctgtctctgactctagcttttgtttcctctgtgctggctgaattctcagtaggcttttccatcaggtggcaaattgggcccagcaggattaatttgtaggccaccttcttagcaatcccagtaagcttgaagcgtctgctccccagtggctccagcctaagccctagtgagktctcttgctgtcctatcttggtccatgtgtcaccccgggccagtcctgtagcaagaggaggcagtgttctgggtagccgagtctgaggcacatggctcccacaggtaggggcagggtcatgacactaaagttcata

SEQ ID NO: 802254 - DNA, 689 bp, Homo sapiens
gtctaaggccctgaaggagcctatggcatttcagctatatccatttatgatactgagaaattgctgtgattataaacatcatcttcccccaaagccctcacaaatccctattacttacatgttctgtgtctgtccacatttatgagaagtgttttcttcctttctaaaaagacctccctatasagcagatgaatagtttaggcattcttctgcttcccattatgtcacattacctagcaaagaatgtcctatttcaccactgatccaaaattaaacatgaattgcttttcaaggttattcataatagttaataattgtgaatcaataatgtttggtgttggctattaaaagacagacagtgaagcagtgaatagtgaatagagagtgacatgtaaaacccactttgttaagattgggaagcttgcatggcctgtatctggggacccatggaggtcacctcagcccctcatccctcctgctgcaggccctacaccccgcatgcctttcagctcctcccagcgctgccccctcctccttgcgctgcctgcattgtggcccccagcctccatctcatgcctgggtagtgctaacaatcttccagccctgcctccctgcttacccatttcctgtccacccaccacattgcagccagagcatcttccacaatgcaaatcctacccagtccctac

SEQ ID NO: 802255 - DNA, 689 bp, Homo sapiens
gtctaaggccctgaaggagcctatggcatttcagctatatccatttatgatactgagaaattgctgtgattataaacatcatcttcccccaaagccctcacaaatccctattacttacatgttctgtgtctgtccacatttatgagaagtgttttcttcctttctaaaaagacctccctatacagcagatgaatagtttaggcattcttctgcttcccattatgycacattacctagcaaagaatgtcctatttcaccactgatccaaaattaaacatgaattgcttttcaaggttattcataatagttaataattgtgaatcaataatgtttggtgttggctattaaaagacagacagtgaagcagtgaatagtgaatagagagtgacatgtaaaacccactttgttaagattgggaagcttgcatggcctgtatctggggacccatggaggtcacctcagcccctcatccctcctgctgcaggccctacaccccgcatgcctttcagctcctcccagcgctgccccctcctccttgcgctgcctgcattgtggcccccagcctccatctcatgcctgggtagtgctaacaatcttccagccctgcctccctgcttacccatttcctgtccacccaccacattgcagccagagcatcttccacaatgcaaatcctacccagtccctac

SEQ ID NO: 802256 - DNA, 693 bp, Homo sapiens
cacgaaagcccctcagctttcaaaccagtggaggctcattcaatcccccactgcatccccaacagggaggagtgcttctcgagaggcagagagcatgtgcatgcaggggcctcatgggtctgcccggtgggagtggagagaacagagtgactcacttggtgtgaaatccagaagattgtagcaagagcatgggacaaaattcaaagggcaagcaccagcaggcatagtccagcccgagaacggacggctgtaggacacaccaagatttcacagcagggttcaagggtcagacaatagattgttagagatcccagagcaagacagcagagggggttctggaagagaggagaaggggctcagctgctggggcagggaacaggcagacctttcgtagccaccatggtggggagtggggtctggcaaggacaacccagagccccacttctggagaacctcaaatattagaagacggaccgtatgggtccatttgccccaagcaatcctaggttaggcctgctgttctggcaaaatcactttcaaaattgccacatccttggyttggaagatgaattataggtcacaacagggtggtcaccaatgcaggagccagcacaaggaattaggccaaaggtacacagaaaagccgctgtcacccaggaaggcaggaacatgcttggacaaagtggagagtgg

SEQ ID NO: 802257 - DNA, 588 bp, Homo sapiens
attcttgggcatatccaacttggtcaaggtgtagaattataaaaaggatcctaaaaactttttacatgttttggtagttagtggtttttgaaaattttgtttatttcttgaaagttatcatatatataagtgtaaaattatttgtagtattactttactgtctttccggcrattgaaggatatagaaatattcccagttttttcctgatattggtgatttgtgtcttctctctttttatttttgtcaatactgctgggggtctatttactttattaatttctttaaagaactacctttttatttcattgatattctctattttttaaatttaaatttcattgagttctgctttgatttttattatttctttatttttacttgctttggactgatttttttcttctttatctattttcttgagatgggaacttaggtatgagattttcttcatttctaatatgaacattttagtgctataaacttcactctcagcaatgctttggctgtatcccacatagtttactatgttgtgttttcatttttatttggttgcgtgtatttttattctctttgagacttctttaacc

SEQ ID NO: 802258 - DNA, 585 bp, Homo sapiens
ctgatttgtgttctatgggttgctactacttattatgcctcctagatatgtatccaaatacaaggctacgtatactgtcaattgacaaagtgcctgacatgrcataatagcaaaatgtgtaggcaataaaaagaaatgcacaaaataaatatcgataactgaagaaatcaagtgtgctagatgatacaagagatttcacatttaggaaacatttaagaaaagaggtgacagacagtgaaggatacctttagggagcctactcttttgttaaattttgattagactttttattttcatttttattattgcaggattgcctattttagaaataatgcttaaaagcaagatttcagttcaaggcttaaaaagctaccgggctcttctgaaactgtttcgttttgttttgtttttctcatggtcttcatatttgaaagaagcatgaagaaaacagctgcatttgaagagaaacggaataccagacacagagaaaagggaaattgtgttttattgagcgatttctttattaccactctgagaaccaaaaagtgactatggctatcaaataagtctacctcaaaaaaatct

SEQ ID NO: 802259 - DNA, 631 bp, Homo sapiens
agtggctatgaaaataactcttaaccacgggagagtcctagagacaagtgtggtgagtctagacaaaccaattgaacaaaagcagagagtatgtgtgttttgccattgctatatccccaacacctagaactgtacctgacacatagtaggcattcagtaaatagttgttaaaagattaaactcggggattagagcaagatttttattagaatccttgaaaattggtcataactctctagatctgatgacacttggactcagtcatttacccccaaatccctcctatctgcactagttacgtctcaaagcactcacctgcttctacacatttatatactatgacctccactagaatcatagcacccaaaacttcatggaagggaatttagggtcacatagttcagcctcccacactgagtagccatctagcctccaaatattaactactattctaagagctctytcccaaatctccctgaacaaattatagcaattgctttagaaaataaagattcccatgtcttactttggaaattctgactccaaaaatcttttattttaaaaacacatctcaggtaatttttatgcacaggcatcatctgtgagaaatgcttttctacagtacccatct

SEQ ID NO: 802260 - DNA, 494 bp, Homo sapiens
cttttaaaaatttcatggcagcagtttttacatccttcgtcacccccactgaatctatgctccatgagggcagggatttttgtatattttattccctgctgaatcccaggtactcaataaatacttgccaaatggatgaatgaataactggattttaactcttttcattttcttgcttagaacacaagggccttccctgcccaacccatcattccacaagtatgttttgaggyctgaatatgaactaaggtcttctgactgaaagcccattattttcctaccacagcatgccaattaactgaactacccaccacattctaaacatcttaggggcacagtctggctttatcattacttactttcacctccaaatacctaccagtgcatgtcttacgggaacagcacaaatgaatgttcaataagtataaacagaagaagaatttcacccagaaaagatggtaaacacttcctgtctagattatgagcccttcgag

SEQ ID NO: 802261 - DNA, 619 bp, Homo sapiens
atcattttacaacatttgaggatatattttctgcagtgaaattttgtttcatcttccctttcagtttttggaattgagcactactttgttattaactaagaagcatgcattttggttacagcagtttttagaatatgtcccagggtgttcctggtgaaaagggcagcccatcacaagaaattataggggaaggaagagctggaaatcatgagtcttgagtacaaaataacagtttcccttctgcccccaattttggtatatttgaagaaaagtggtgtgtctaacaaacaaacatcackgtactgaagggttttgatcaattctttcttaagccaattcatcaaaagtggcacatctcagagaattggatttttttttagttcaattagagccacactcttgaaggattaacatggcacctctggtctatttccaaacatatcagctgggtcttgtcagttcaatttagccatccacggggcctggcatggttactatggccttctccaactttttccttttcttgaatgtgaaaagcatgtcgtaactccatggctttgcaatctcctgccccaaatgcccttctcagtctttcctgacaaattcctgctagcttagt

SEQ ID NO: 802262 - DNA, 567 bp, Homo sapiens
gaggtaaatatctatgcacaaaagcagggattctaaatcacattctgcaaaccacacatttgatggtgcagttagcccatctcctcaaaaatgtttgtggtgaagtttccttgaaaaagcttgggcttaaagcatgtcacttagatgacagatttagaaagaatttcggtcattacagtgagaagtcctctttggctcagtcaggctaacccgctccaagggtaggagaggataattcaccaggcggtgcatctaatggacatcgtctctggatgagggaggtagagagagcctgtggttcttttaaatgcattgatttctstacggagtagcattcaaatatgtaactgatcatggactccaggtaagtgatgatggactcccctggttgtagaattgctaccgggtgttcagatgtctcaggcaaggaaagcagtgaaaacagaggcaaaggaaacccttgtgggattcactcatctggtttcatactgagtcactgtctcacggggatgaagtaccgttggagttcactcttgataacagggagaaagaattatgcgctgttaa

SEQ ID NO: 802263 - DNA, 617 bp, Homo sapiens
catttttaattgtcatcctgaggtttcaaaatgcatttagaacacaagcattacttcactgcaaaatactgtctcaaagctgactgagtctctttcttctccaaagacttcctcttctcttcctacaactcctcctcttcttttttcttctctggcagaaatcttatttttttcaaaacttctcaggtactaacacaattctcttcacagccaccaactcagatttgtatatgtgaaatttytaagacgttaaaatatgctgttctggcatattgactatttcagttaaagacacttgagggctaggtgtggtgactcatgcctgtaatcctagtacttgggaggccaaggtgggaggatcacttggacccaggagttcaagaacagctagggcaacatggagagaccccatctctattaaaaaaaaaaaaaagagagagagagagacttgaaaaacagcaggtacataaagatcactttgaccttcactctttttttaaaaaagcagaagataaacttcccatgtgaaagtcagcctccctatacggaagaaaaggccacatccttatcttcaaaaagaccacatatacaccttattagaatgacacaacttttaa

SEQ ID NO: 802264 - DNA, 548 bp, Homo sapiens
cgacttctctggtgatatatttggagacttagtgaaatattctgttttttcttttttaacaactcccaatacggattcccataattgaccccagatcactatattatttttttctttttacttagcattaagggttcattactgaatatgctgttttgaattgcattctgttaatacaggaacaaatactacatattgagctctcacatttttgtgtgccaaatggagaaaakatatttacttagggttcaggtatgaaatttacatctcttctgagattgaggccataaaatggaaattgccttccaaatcctcattaagttagaaggcttttactgacatttagaaagcaagtttatggtcagaacaaataaaaacagtgcagatgtcttcataaggctgattccagaagatcagctgttttgtaaaggtaagtgatttgcatctattacatatggattacccattctttcccaaattttttccccaaagagatgaatttttaccaaagattatagttgttgttgttgttgtggttttcctttttt

SEQ ID NO: 802265 - DNA, 639 bp, Homo sapiens
acacctataatcccagcagtttgggaggctgaggtcagcggatcatttgaggtcaggatttcaagaccagcctggccagtctggtgaaaccctgtctctactaaaaatacaaaaaaagttagccaagtgtggtggcacacacctgtaatcccagctactcaggaggctgaggcaagagaatcacttgaacccaggaggtggaggttgtggtgaaccaagatcatgccactgcacaccagcctgggcaaaaaatcgagacttcatttagaaaaaaaaaattagtagyatttttatacaccaacaagatccaagctaagagccaaatcaagaatgcagtcccattcacaatagcctcaaaatgaataaaatatttaggaatatagctaaccaaataagtgaaagacctctataacaattacaaaacactgataaaagaaattagagacaacacaaacaaatggagaaacattccatgctcatgtataggaaaaatcaatattgttaaaatggccatatggcccagagcaattcataggttcaatgctatttgtatcaaagtaccaacatttttcacaaaagtataaaaaaactatttaaaaattcatatggaaccaaaaaagagcctgaatagccaagaga

SEQ ID NO: 802266 - DNA, 599 bp, Homo sapiens
gaaatacgtcaataaaagaaactcagaacacattggcaacacaacatttaaaagcacaacccagagatttcaataggacattcactgagtagagaagctcggccaattctacaaacaaattactttctgaagtaattttctctcataatactcagyttaaacctaaggattatagtaataccaaactatttcatatacctccactgaaaatataataggaattattcatttattattttcttcatttaataatatgtttacttggtgcctattaggtgctaggcactgttctaaatcttcagatccattagagaacaaaacaggcaaaaatccagctctgagtttagtaaaggtacataaacaataaatataaacttcagaaataaggaaattccagtgtgtctgatggtgaaaagggtcataggaaaagcatagtgcaataagaaaagattaggatggactgcagtgctgggaatagggagtttccatttaaattcaatttaactgtaaataaaatttaaagactcaagaaattaaaatattctcccttggctctagcttgattggttatatatagttacactgctataagccaagga

SEQ ID NO: 802267 - DNA, 642 bp, Homo sapiens
agttttctgagaagcactgatgtaaaatagaaaactcaggctgattcgctcaggtgtttgtgagaaagactgaataacattatacataaggtacctagtacagagccatacgaaaggattggaacttggttttgaaggatgcaatgatccactgaagaacattaagctaggagtgacatcatcaggtttgcatttttcaagggtaacgaacagttatgaagcaaatctgaggaaggtggaattgaggagtttaaagacaaaaggatgggtttagagaccatttcaatagcctggaaattacgagaaccaatttaaatcaatggcagtggaatgtggaatacaggggaaagatacaaggtatgcttaggagatagagtcgaaacatttagtaaatgactgagtttgaatygagaaaggttgtaggaaaagagaaatcaaggataacacactggttgttaacttggaagacttggtgcttgatgcttgggtgaattattatgctataaacagatgcaaaaagtttgaagaaacttagaggataggacaggtactagattaaaataatgagtttcattttgaatatgtgaagttttagtaaaattccataaaattaaattaagtaaaattttacttccataaaag

SEQ ID NO: 802268 - DNA, 585 bp, Homo sapiens
actcaaatgatgtttgttaaattgattttaaaaattagttatctggttgatgaaattaaaaagctttaattgggaccaggtgtggtggctcacacctgtaatcccagcactttgggaggctgaggtgggcagatcacttgattccaggagtttgagaccagcctgggcaacgtggtaaaacctcgtctctacaaamcaatacaaaaattagccaggcatggtggcatgcatctgtagtcccggctactcaagagactgaggcacaagaattgcttgaacccaggaggtggaggttgcagtgagctgagattgccattgcattccagcctgtgtgacagagccagaccctgtttcaaaacaaaacaaaaaaaaaagcttcaattttcagagacgttataaagtgaagtatcagtatagtacaaaagtaaagagactagataatcaacttgttttgtccacatgataaaaataatgtgaagaatcagacttttcttgctctttgagcaattagccaagtgttatcacattgacaaaaaattaatctttattcaataaaattcaagttcagaaacatacttttttatg

SEQ ID NO: 802269 - DNA, 585 bp, Homo sapiens
actcaaatgatgtttgttaaattgattttaaaaattagttatctggttgatgaaattaaaaagctttaattgggaccaggtgtggtggctcacacctgtaatcccagcactttgggaggctgaggtgggcagatcacttgattccaggagtttgagaccagcctgggcaacgtggtaaaacctcgtctctacaaaacaatacaaaaattagccaggcatggtggcatgcatctgtagtcccggctactcaagagactgaggcacaagaattgcttgaacccaggaggtggaggttgcagtgagctgagattgccattgcattccagcctgtgtgacagagccagaccctgtttcaaaacaaaacaaaaaaaaaagcttcaattttcagagacgttataaagtgaagtatcagtatagyacaaaagtaaagagactagataatcaacttgttttgtccacatgataaaaataatgtgaagaatcagacttttcttgctctttgagcaattagccaagtgttatcacattgacaaaaaattaatctttattcaataaaattcaagttcagaaacatacttttttatg

SEQ ID NO: 802270 - DNA, 631 bp, Homo sapiens
tatgtcctgtttttattattttactttggacatctttccattattcttggtgtattgaagtattgtaataatgtgccttgctgtggttatttttctattcatatgctggatacaacaaaggtctttcagcctagagatgagtgttctttaattctgggtccccctggtttctcakgctgctaatattcatagcggtaggacccttgcctaccatagcctcagtgcctagcacagaaccctcagaatactcagcattcattaaataattatggaataaagatggaatctggaaagaaaggactgtagtgacttttgaattggtccttcagatttctctaaagttttaattctgacaagaaaacaagaacaaatagtgaagcccagacttggaaaaagtgacctagtcagtacatgtattaaaaccacgaaataaaagcgaggaggagtcatataaacttaggtaatgtagttccaaaagagaaaagcaaaatttacttccactagaagtgaaaatagctgacttattgatcactttcttttaaaatgaataccattgtcccatgttacagttgactaaactaaggctcagaatgttcaaataacaactaggaaatggcagagctggaattta

SEQ ID NO: 802271 - DNA, 517 bp, Homo sapiens
cattgggatatttacttttctaaagtgtctgctcatatcttttgtccatttcccatttgctttttgtttgtttaattgtaagaattttaaagatcataatctgagtttattgttgcacagactggtgacatatagtctcccattctttgctttttcactctctttgtggtgtcttgataaattaagaaactactaatgttaatttaagccaatttattaattttcttgtttatgtttagcatcttttgagtagcaccagtggtgttaaggaaatatttttgtytacaccaaagtcacaaagttattcttctgtgtttaaaagcttaagtatattactctttagatctatattctatataatttgatttttgtatatggtatagaaggaatcaagattcacttttttctgtatggatattcaacttacatagaaccatttactgaaatgattaccctttccctaccacactgccctgttacccttgttgtaatcttgtgaccacatatctgtgtttgt

SEQ ID NO: 802272 - DNA, 592 bp, Homo sapiens
tccaatttgctttctgttgtcattgtctcaccaccagtgcagtggcacagaggagagttggggaatggaggcagggaaaggttacgagcttggcctgggagccagccccaactctcctgtggaccatgggaaggtctttaacatctctttgatatcagtttctgcatctttaaaataaagacagtaacagtagtccctacatcatagagttgttgtgaaattaaattagttaatacataaaaaagcacasagaacagtgcttggcatatatgtagcatatgtatagttgctgctacttcttattctttctttttttaatttactatgagaatccatttaatattttcttgtgtatttattttttactttttgtaggtacatagtaggtgtatatattattgcgttacatgaaatattttgatacaggcatgtaatgtgtaataatcacatcaggacaaatggggtatccatcacctcaagcatttttcctttgcattacttattattcattcttctgaatacgatgaatgaggcagagtgctcctctgggattgtttgatctctaatgattctggtgatcaggacttttgct

SEQ ID NO: 802273 - DNA, 605 bp, Homo sapiens
aatttgcaaaagaaagaggtttaatggacttactgttccaagtggctggcaaggtctcacaatcatggctgaaggcaaggaggagcaagtcacgtctacatggatggcagcaggcaaagagagagagagtttgtgcagggaaactcccgtttttaaaagcaccatacctcatgagacttattcactatcatgagaacagcatgggaaagacctgcccccatgattcaattacttcccaccaggttcctcccacaaaatgtggaaattgtgggagttataattcaagatgaggtttgggtggggacagagccaaactatattacagactatgataagacatttgcaatatgttgcacagttgataaactgttatccataattttaaataaatatkttaacctttagaacaaagaaccaaagctcaaattaaattaatataaactgataatttataagaatgatataaaatatataaattcatgtagagtgtataacatcagcaagatgattaaataaaaagctataaaccttcctgccccttcagagaaacagatgtaacaacagtaaacaaatcaactgcctctctctcacttaagagatttctg

SEQ ID NO: 802274 - DNA, 649 bp, Homo sapiens
gacatatatatatatatatatatatatatatatatatatatcagcagaatagaattgagaaatgaaccattacatttacagtcaattaattttaaacaaaagtaccaagacaatttaatgagtaaagaatagtcttcaataaatggtactgggacaactgtatatccacatgcaaaataatgaattaagactcctacctcttaccatatacaaaaattagctccaaayggaacaaagtttcaggatacaaaatcaatgtacacaaatcagtagcactgctatacaccaacagtgaccaagctgagaagcaaaccaagaactcaacctcttttacaatagctgtaaaactaacaaacaaaacctagggatatggctaaccaggtaggtgaaagccctctacaagaagaactgtaaaacactgctgaaagaaatcatagatgacacaaacaaatggaaacacatcccatgctcatggatggatagaatcaatattgcgaaaataaccatactgccaaacacaatctacaaattcaatgcaactcccatcaaaataacatcatcattctccacagaactagaaaaaaaaaatcctaaaattcatatggactaaaaaagagcccacatagccaaagcaagactaagcaaagag

SEQ ID NO: 802275 - DNA, 532 bp, Homo sapiens
tccaaagcaaaccccaagagaaagttcttggttctcacgcaagaaagaattcagggcgagtccttagtgcaaagcaaaggcaagtttattaagaaagtaaagtggtgaaaggacagctgctccatagacagagtagggtgttcccgaaagtaagaggaggcacgcatccaccctcggtgcaatccttgtatatatggggacatgtgctctgctacaagggtttgtgataaagaattacttttcttaattactatactttgcaagaattgatattactatctttaaagcaaaattaggaatgtctttgttctccagatattgggatatctggatgctcccaagtctgggtcagtttagtaaccactattaatttgttcctttaatcrtaaacatcgagaggcgaggaatgcctgactttctgagaaggcagcccagcaagtctcagcctcattttcctagccctcactcaaaatggagtcgctctggtttgaacgcctctgacaatcggagggacaaaacagatgcctctata

SEQ ID NO: 802276 - DNA, 580 bp, Homo sapiens
accttcataccatcttaaccatcctggtgatttagctttccaacacacagacgtgaagcagcacactgggagccactaggactcagcaagcgcatgtataagcatgaccatcagcaacactgcgaaagagactgaaaacccagactgcaggactacacagcacagagcacaggaatacttagagcaaatggtctctcctacctgccccaactggccctgagggcataaatgtattatgacattaaataataatgaatattcatcattatggccrtataagtcatcaagaatagtttaattatgtctacagtattcagttacaaagcgttctgactaaaatgtaaagtgtctagccctgcagtgatcagcttcactcagctactccgtgtggcttccatctcttctccccacagatgcagtcagtggcagatgtgacacaaggtgcagagtactgcccttgcactgggaccaacctgctgtaaggcttcatctgggccagagcctggtcctccagctgatcactgttggatgcagcactcaaggggcgatggttttcatcactagcagcaaaaaatgaggc

SEQ ID NO: 802277 - DNA, 594 bp, Homo sapiens
aaaactacatgtaaaacattaacataaagtcaccatgaaaagccgtaaaatgccattgtactttatagaaaccacattacatttgtaattacctaataatccattatactaaataaactgcatttaattttaagaaacgattcatcatttattaaataaccccattgtagtctcagtggcatggtattccttctccatttaccatttctttttgctcaggataacagtttaagtagtttgtaaatcaaagcccacatccttggaagagctcggtgtgaaatgctcaycaaggttatactgtgacctgtgctcttgatctgcacaactgcctcataggagacaaaacaactcttgcatccttactcaagtattaggaggtggtgccatccattctgccagtctcagttcattcattattaagcagctcatatgagcatcctgttgaggctgacctgtgaagcctggaaaggaaaacctaaggtgtttgtaggaaggccgtatccatcttgctgaagattatgggcaattatccaatttttaaaacaaggaaggatctgtttttgggaggcctacctactggtggctaattgcttg

SEQ ID NO: 802278 - DNA, 542 bp, Homo sapiens
agtagatttcctcttctaaagtggatccaacccatgacagttgcttccaaaaaactgcctgtagtgttttgttgtgaaggaatttcattgtattgtttgaaagagaagggcaattaggtgccattaaggtgaaaaacacagagactcttcactgaaatggtatgtattataatgagattcatgtgtaatgaagtcatgtgaaagctatttcagagaatgagctattatattaaaatctctactttgtaagaaatataaaaataacatttcacgacagacattctacatgcaaattaggactctgttaactgattagagctaaatctgctaggaagtgcttaaaaatrgggaagagacacctaaggtgatttgtccaagcagatagaaagaaaagggggaaaaatacaaggaggtgctgggaagaagccagagaagacagtctgctaagtggatatccagatactaacagagttaaacatgcactttgtaagaatccctagagagtgctcagagagatcttaaggctgactgtataggactgt

SEQ ID NO: 802279 - DNA, 622 bp, Homo sapiens
tttttgtgtgaagctttaagaatcagtctgaggaagaggaagggcagagtgagaccagcaacgggccctcctaggcaaagggaggttggttaaggaaagctaagagagagggtgagctgtgacacttcctcacccagtctgccccgttcccctgacctaaagtagatcagaccagtcctttggtttggggtaaggtggatctggagccaggaggtgaacagagcccccaactgtgcagacagcaccctgcccaccttttctagagggacagcattcagcagctggtgctttggaaatccagcccagcctgtgttgagagagttattattggcacattcctgaattttatcgggtgttttaaaacagcaattactgcgaggatacgcagagatctataaacactgggaaatgtatttatctccttgctctgtgacagctgggccagcttccacatgccaaatgttttgsggcagggtcagatcgagacttcagatggttgccagcagggagctactattttgggggcacaggtcatgggaaagtcttatagctcaaagctggcttctgtgcctatcccataacttttccttcggcctcgtgtatcacaattatcaacaagcct

SEQ ID NO: 802280 - DNA, 682 bp, Homo sapiens
tttggatccactgctggtgagcaagagtgatttttggggggtgttaaagagccttgttttgtcatattaccagagttggttttctggttccttctcatttgggtaggctctgtcagagagaaggtttagggctgagggctgttgttcagattcttttgtcccatggggtgttgccttgatgtagtactcttcctcttttcctatgcatgtggcttcctgtgagccaagctgcagtgattgttatctctcttctgggtctagccacttagcaagtctacccggctctgggctggtactggggattgtctgcacatagtcctgtgatgtgaatcatctatgggtctctcagtgtggataccggtacctgttcccatggaggtggcaggggstgaaatggactctacgaggttgtcagctttggtggtttaatgttctatttttgtgctggttggcctactgccaggaggtggtgctttccagaaagcatcagctgtggtagtattgagagaaaatggcagtgggcggggccttaaaactcccaagagtatatgccctttgtcttcagctaccagggtgcataggaaaggcccatcaggtcggggcagggctaagcatgtctgagatcagactctccttgggcaggtcttgctgtggctgctgtggggtatgggggtgatgttgc

SEQ ID NO: 802281 - DNA, 572 bp, Homo sapiens
gttctgggggagaatcagtttccttgccatttcctgcttctaggggaatgtttctagagtatttcttggctcctggacccttccttgaacttcagagccagtagtgcagcatcttctaatttctctgtgactctgacctttgcttttgtcctaacatcacctcctctggctctggcactcctgcctccctcttacaaagatcctgtgatgatcttagacccagctggataatccagggtcatttcatctcatgattcttaaactaatcacatctgcaaaatctttttagccatgacaggtttttacagatttctagaattaggatgtggatwtttttttgagggggggaagggggtgcttactctgtcaaccacatggggattaggatgtagacatccttggggccattatcctgtctgctacctagtattaggacatggacatctttgggaccattattctctgtatcacatgaggattaggacatgggtatctttgggaccattattctgtctcccacatggggattaggatgtggacatctttggggccattattctgtctgccatgtg

SEQ ID NO: 802282 - DNA, 631 bp, Homo sapiens
tgataggtagataattgatacatagattatagattcaatagataaatacatagattagataatacattagatagataggtaggtaagttgatagatagctactgggatagatgataggtagatagataattgatacacagattatagattcaatagataaatacatatatagatacatggatagatggatggatgcatagatggatggatgatagatacatgatggatattagtagatgatagtagagagatgataggtagatagacggctagctagccaaacagttagatgataagtagataattgatacatagattatagattcaatagagaaatacatagattagataatacattagataggtagataggtaagttgatagctacagggatagatgataggtagataattgatacatacrttatagattcaatagataaatacatatatagatggatagatggatggatgcatagatggatggatgatagatgatggatatatagtagatgatagatagatagtagagagatgataggtagatagacagctagctagccagacagatagatgataggtagatagttgatacataggttatagattcaatagataaatacatagataga

SEQ ID NO: 802283 - DNA, 504 bp, Homo sapiens
tgtatggcttttttggtcctgatttcattaccttattctctaacctttgttatttccttctactagctttgggtttggtttgttcttttctagtgtgtttggctattttagcttgttaatttgaggtctttctctctttttatgtaggcatttagtgttataaactctcctcttaacattgttttttctgtatcacagacgttttggtatgttatgtttctattttcatttgtttcaggaatttctttaaatttctgccttarttctgttatttacacaaaagtcattcacgagcagattgtttagtttccatgtacctctgtggttctgcgagttctcgatattgacttctaattttattccacagtggtctgagaagatacttaatatagttgtgatttttaaaaaattattgaggcttattttatgactgagcatgtggtcaattttagagaatgttccatgtgcaaatgagaaaaatgtacgttctatggtttctgggtg

SEQ ID NO: 802284 - DNA, 437 bp, Homo sapiens
agaaaaaaaaaaaaaaaaaaaaaaaaacaaggggaggcaccaagatggccaaataggaacagctctggtctacagcttccagcactatcaacacagaagacagatgatttctgcatttccaactgaagtacctggaactggttggacagtgggtgtagcccacggagagggtgagctgaagcagggtggggcatcacctcatccaggaagtacaaggggttgggggatttccctttcctagccaagggaagccatgacagatggtacctggaaaattgggacacttccacmctaatactgcacttttccaacagtcttagcaaatggcacaccacgagattatatcccacacctggctcggaggatcacacacccatggagccttgctcactgctagtgcagcggtctgagatcgaactgggaggcagcagacaggc

SEQ ID NO: 802285 - DNA, 473 bp, Homo sapiens; identical to SEQ ID NO: 794348

SEQ ID NO: 802286 - DNA, 621 bp, Homo sapiens
ggaagccccagaagatgtttctctaagaaattaaggattcgtttgttggggagggctgctggcatgtttgaaaagtactgtgacggctgaattttgtgggcttggggagattgtgggttctctgatttcaaggggaatgatgtgatcctagaacaagtgacagtggaggcgcttatgctttgtgattgcactagagacaaggaagacacaactagaataatggggagcaggaatggagcggccaacagaatatctgactgctagggatctttgatgaaggctgattctyagggagtgaactagatcagtgaccaactatttgtctttatataactgggtaatgtggatggattctaataaagggactacttacagcacagcaggaaagacacaaagaaaccagacagaagagtgtaagtagtaaggggccaagcagtcacctgactagagagagtgccagcttgccaagaaggcaccagacagaagctgtgatcttcagcaaagggacacagtctgcctgtgctgaccctgcaggggcagaggtgggggataaacacactcttctctcacctatcttctgccaccccctccattagctgaaccccaataaaagcatgaggg

SEQ ID NO: 802287 - DNA, 475 bp, Homo sapiens
atgcatacaatgacatgttatataatagatgttagtcagctgatacttgttcaatgggctcatgaacagatgcacataatattaaggatagaaggtattcacgactttacataatcaaattgtatctggaccaatgtagaacaactaaggctaatatgacagccttccctcaggggctacccagtcaacttgcagattgaygacattgaaacccatccctcagggattttgttctcactgaaatagacacttattctgggtacgaactcaccttttacatttgcaatttttctgctggtactaccatgagtgaacttaaataatttgttattcaccatcatgatatcccatacaacattgtttttgactaaggaattcatttcactgcaaaaaaaatatggtattaggctcatgtttgtgcaattcattggatttacaacataatccctatcacctagaagaatctgacatgatg

SEQ ID NO: 802288 - DNA, 555 bp, Homo sapiens
agactgacatctcacatggccgggtacccctctgagtcaaaacttccagaggaacgatcaggcagcagcatttgcagttcaccaatatccactgttctgcagccaccgctgctgatacccaggcaaatagtgtctggagtagacctccagtaaactccaacagacctgcagctgagggccctgactgttagmaggaaaactaacaaacagaaaggacatccacaccaaaaccccatctgtatgtcaccatcatcaaggaccaaaggaagataaaaccacaaagatgggaaaaaacagagtagaaaacctggaaactctaaaaatcagagtgcctctcctcctgcaaaggaatgcagctcctcaccagcaatggaacaaagctggacggagtatgactttgacgagttgagagagaaaggcttcagaagatcaaagtactccgagctaaaggaggaagttcgaaccagtggcaaagaagttaaaaactttgaaaaaaaattagacgaatggataactagaataacaaatgcagagaagtccttaaaggacctgatg

SEQ ID NO: 802289 - DNA, 492 bp, Homo sapiens
atatccactgttctgcagccaccgctgctgatacccaggcaaatagtgtctggagtagacctccagtaaactccaacagacctgcagctgagggccctgactgttagcaggaaaactaacaaacagaaaggacatccacaccaaaaccccatctgtatgtcaccatcatcaaggaccaaaggaagataaaaccacaaagatgggaaaaaacagagyagaaaacctggaaactctaaaaatcagagtgcctctcctcctgcaaaggaatgcagctcctcaccagcaatggaacaaagctggacggagtatgactttgacgagttgagagagaaaggcttcagaagatcaaagtactccgagctaaaggaggaagttcgaaccagtggcaaagaagttaaaaactttgaaaaaaaattagacgaatggataactagaataacaaatgcagagaagtccttaaaggacctgatggagctgaaaaccatggcacaa

SEQ ID NO: 802290 - DNA, 492 bp, Homo sapiens
atatccactgttctgcagccaccgctgctgatacccaggcaaatagtgtctggagtagacctccagtaaactccaacagacctgcagctgagggccctgactgttagcaggaaaactaacaaacagaaaggacatccacaccaaaaccccatctgtatgtcaccatcatcaaggaccaaaggaagataaaaccacaaagatgggaaaaaacagagtagaaaamctggaaactctaaaaatcagagtgcctctcctcctgcaaaggaatgcagctcctcaccagcaatggaacaaagctggacggagtatgactttgacgagttgagagagaaaggcttcagaagatcaaagtactccgagctaaaggaggaagttcgaaccagtggcaaagaagttaaaaactttgaaaaaaaattagacgaatggataactagaataacaaatgcagagaagtccttaaaggacctgatggagctgaaaaccatggcacaa

SEQ ID NO: 802291 - DNA, 492 bp, Homo sapiens
atatccactgttctgcagccaccgctgctgatacccaggcaaatagtgtctggagtagacctccagtaaactccaacagacctgcagctgagggccctgactgttagcaggaaaactaacaaacagaaaggacatccacaccaaaaccccatctgtatgtcaccatcatcaaggaccaaaggaagataaaaccacaaagatgggaaaaaacagagtagaaaacctggaaactctaaaaatcagagtgcctctcctcctgcaaaggaatgcagctcctcaccagcaatggaacaaagctggacggagtatgactttgacgagttgagagagraaggcttcagaagatcaaagtactccgagctaaaggaggaagttcgaaccagtggcaaagaagttaaaaactttgaaaaaaaattagacgaatggataactagaataacaaatgcagagaagtccttaaaggacctgatggagctgaaaaccatggcacaa

SEQ ID NO: 802292 - DNA, 599 bp, Homo sapiens
cacctgggaagcagaatgggtcagagaattccctttcctagtcaaagaaaggggtgacagatggcacctggaaaatcaggtcactcccaccctaatactgcgcttttccaacaggcttatcaaatggcacaccaggagattgtatccagcacctggcttggaggatcctacacccacggagcctcgctgtttgctagcacagcagtctgagatcaaactgcaaggttacagtggggctgggggaggggckcccgccattgctcaggcttgagtaagtaaacaaagcagccaggaagttcgaactgggtggagcctaacacagctcaaggaggccagcctgcctctgtaggccccacctctgggggcaggacacagacaaacaaaagacagcaataccctctgcagacttaaatatccctgtctgacagctttgaagagagtagtggttctcccagcatgcagcttgagatctgagaacgggcagacagcctcctcatgtgggttcctgacccctgagtagcctaactgggaggcaccccccagtagaggcagactgacatctcacatggccgggtacccctctgagtcaaaacttccag

SEQ ID NO: 802293 - DNA, 503 bp, Homo sapiens
tgtgtttaaggtcccggaagaccatctgtggcagctgtgggcagcagaacagagcagcggcaaaaagtgtgaccttgctaagcctcagtttcctcactcggacaaagaaactcctgggagctggctcctgggatgatgtgattgttaaaaaggcagtggtgtgggcagtgggaacaatgccagcgccctcgcatgtgaatcagcattatcatcatcagggcacctaacgtcaggtaggaaatggtactttaggaaaaggcctttgggacttcgtcaatttagagtctaaattacatgctctctttgctcccttgaagtgaaaacaagcatctatggtacrgcgtggtatgaactaaatattcaggccccaaatctgcatataggaaataaaaaaagattggcaggagaatcaccaagatggtatttttggctggttgaaaaaaggtgttttattctcccttatcgattttaaggtacgtttcaagcttttgtgacttaacaat

SEQ ID NO: 802294 - DNA, 596 bp, Homo sapiens
cacgctttagggcagtcgttattggtgtgggctctgtggtcagagctcaaagatgcaaatcccatctctgccatgactggtacttgtgttgtggattgtggtggagtttagagcctgaagagccagtcgggaccaggtgtggtggctcatgcctgtaatcccagcactttgggaggtcgaggcaggtggatcacctgaggtcaggagtttgagaccagcctggctaacatggtgaaactctgtctctaataaaaacacaaaaatcagctgggcatggtggtgcgtgcctgtagtcccasctactcgggaggctgaggcaggagaattgcttgaacctacgaggcggaagttgcagtgagccaagaccatgccattgcactccagtctgggcaacagagggaggcttcatctcaaaaaaaaaaaaaaaaaaaaaaaaaaaaaaaaaaaaggagccagtcagagtagaagcttcacacatgggcacatgggtagccatgacaataaatataatcattttatggactttgcatattattttttattgggtataagatagtgtttggttttaatttattttttaaattttgtttttttgt

SEQ ID NO: 802295 - DNA, 559 bp, Homo sapiens
tggaaggattccctttagtatttcttgtagtttaggtgcaagtgacagattctttcattatttgtttatctttttttttttttttttttttttgagatggagtctcactctgttgcctaggctagaatgcagtggcccgatcttggctcactgcaagctccgcctcctgggttcatgccattttcctgcctcagcctcccaagtagctgggactacaggcgcccaacaccatgcccggctaattttttatatttttagtagagacgggatttcaccatgttagccaggatggtatcgatctcctgaccttgtgatccgcccgcctcagcctcccaaagtgctgggattacaggtgtgagccacygcacccagcttatttgtttatcttgatgtcttaatttcaccttcatgtttaaggatagttttgctgaatgtaaaattattggttgatagtgtttttttttccttcagaattttgaatatgtcaccctttgccttcccgattccatggattctgatgagaaagttaacattcttgaggatcccttatacatgatgg

SEQ ID NO: 802296 - DNA, 395 bp, Homo sapiens
ttgatttctgtattagtccattctcctgctgctataaagacatacccaagactaggtaatttgtaaaggaaagaggtttaattgactcacagttccacagggttgcggaggcctcaggaaacttaccatcatggtggaaggggaagcagacaygtccttctgcatgtagtggcaggaagtagaagaatgagcaaaagtggggaaagccccttaaaaaaccatcggatctcatgagaactcactcactatgatgagaacagcagcactagggtaaccgcccccatgattcaattacctcccagtgggcccctcccatcacacatgaggattatggggactacaattcaaggtgagatttgggtgggaacacagcaaaaccatatcaatttctttac

SEQ ID NO: 802297 - DNA, 593 bp, Homo sapiens
ataagttcaataatagttttttttttcctaacaattggtgacactggttattttaccaagactgaaactagtatagcctatttttaggtaaagtttcagcaaaatcaactttaaaagaagtctatatggccagtcgatttcttgctgcattttatgcaaatcatcaggcaagcataataagcctaaaactagcattgcacacaaattggcctggctataaaattctctttaataaaaaaggcagcaaaaaaattgtttgaagggcaaagtgtaacacttaatactacatttcaaccctaactttttacatacagatgaaatcattatttcttggctacaataatcctctaaaaagtacctgattataatttttcttcatgttttcagttggtgccctaatggaacaggttcctttttctgttctaacatacaaattactgttataaytgtcaaactataactgttatttatctctttttgttttacttccaagcaaaccaaaatcatggtattctgaagaccagagataggaatctccctcatttgacatccactgggtctggatctgtttcactgctaatgctttgctgcca

SEQ ID NO: 802298 - DNA, 645 bp, Homo sapiens
atatttattatattttaaatgccaaaagcagaccacaaaacaacatggataatatgatctcatttttgcatctggaaaaatacatgccaaaccgttattaataagtatctctgggtggagattaaaggtggtttttattttctcctttgcttgtctgtatttcgtaataataataataaaggatgtgtagtccttgggtaattgctgcaaacctaatgatgtttttgagtgagggtgggcatctgaaagygagacagaagcgagagggaacttagcccccacccccacctgggagactctccagagccttcaaggtcatgtccccatttgtgtctcaccccaactccacctctcgaccaccgtttacatcaacatgcattacttgtattacttagcaaccaggccgtcatgtgttttcatttagcagaagagagaatagatgctaccagactctacagtgactacactatttctgaagttgcctgaaagagtggcaagtcatcaacaaaaagatccaacccaaaatacagtggaactgagaaatagacacttcctttactgttggggttggccagggcggtggtcaatgtacctagtcctccccgtcccagtttggagcaaaaatatcatgcagatggagtcaca

SEQ ID NO: 802299 - DNA, 577 bp, Homo sapiens
acaagtaattgtgagcacgttggccggagtgttacattcagagggaagagaactgggacagcagggaaatttctgtgaaaacttgccaacaattttgaatgataaacttacactcaaaagccttggcatttgctctgatttttcaagggaggtttgaaaaaacaaaaagcacatgttttagagaaaaataatgaccgatcgtagaacatagtgyttctattatggtccagaagtaaagcatcaacgttcgctgtagaaagcctcaacatccctgagacgtaagaaaaatacttatttcaaaagtgaagagaatgctcatttgctcctttaacatcagtgacattgttcatgctcaatgcatcccacaaaagcagaaagctgatcagattgttttaggcataaatactaaagtgactggaaaatgttaaagcctttttttttttaagacggagtcttgctctgtcacccaggctggagtgcagtggtgccatcccggctcactgcaacctccgcctcccaggttcaagtgattctcctgcctcagcctcctgagtagctgggactacaggcacccgcc

SEQ ID NO: 802300 - DNA, 614 bp, Homo sapiens
aggagatcaggaataggtttatactgagaggtacaaggttgctgtatcctccattaaatgggtctagaatgctgtgatttttctaccaggtctcacagtaacagtatagcagtgagttcggttcctttacttccagttgcatttccttatttctggctctcagctgataaagatgactaagatgctagaagtcagatagataagtgaggattttttatactttgtaaaggacgtataacatgttatataatcactcgaattaaaygaatctcttctatacaaaattataaagtcaaaggataaataataaaaagtaaaactgggtcatatacattatgttttaaataccttgtagatttggaataggataagtaaagacttgtaaaaattacaaatgttcaattctaaaactatttcatgtcattacaaaatatcaaacttgtcatatttaaaaatctcaccatcaggtttgaaaatcttgtaaattgttcaacttaacagctacttccaataatttaaaattttttttattatttttaaaataggcattattttacggttcaaaattcaaaaggtacaaaaagatagaaagactcctcctcacctgcctcctg

SEQ ID NO: 802301 - DNA, 644 bp, Homo sapiens
gtgcttctccgagatcttattcctaggtttggactgcccttacgaattggctcacataacgggccggtgtttgtggctgacttggtacagaagacagcaaaggcattaggaatcacttggaaactacatgccgcctactgacctcagagttctggaaaggtggagcgaatgaatcagactatcaaaaatagtttagggaaagtaygtcaggaaacaggattaaaatggatacaggcccttcctatggtattgtttaaaattagatgcatcccttctaacaggatactccccttatgaaatactgtatcataggcctcctcctatactagggggacttccaggcactccccgagagttaggtgaaattgagttacagtgacagctacgggctttgggaaaaattacacaaacaatctcaacttgggtaaatgagaggtgtcccgtcagcttattctccccagttcaccctttctctccaagtgatcgcatgtggatcaaggactggaacgtagtccctttgcggccacagtggaaaagacctcacaccatcatcctgaccacccccacggctgtaaaggagaaggaatcccagcctggatccaccacagccgtgtgaaacctgcagctgctgaaacttgggaggc

SEQ ID NO: 802302 - DNA, 557 bp, Homo sapiens
gaagtaagctctgccgcgtaaacttgaacagagggtgagacattgattcacagcaactgtgactgtattcatgcattcatccctcccttccttccttccttcatttcttcatttcttccttccttctttccttccttccctccttccctccttccctctttccttccctccttccctccttccttccctccttccttccttccttccttccttccttcaactaatgcttattggaagattactaggtggcatgccctctgctagccatgggggtacaactcagaacaagacaacccagggcccagtcctcatagaacttatgtcctaacgaaattgattctgcttccaatgggctggggcgtcatagcccaaagccaggcccgtcctgcatgtgaggatggagaggctatagcagtrgggaggaggcgagaggagggggcaaatgcaggagttaggcagggcccagcctgggctgtgtgccaggccctggcttaggccaagcagaagaaacaaagatacaaaagacctggatcctatcctccaggatttatcctcaa

SEQ ID NO: 802303 - DNA, 597 bp, Homo sapiens
aagagcctcggcaaaacttcctgacactggagctaaataaaccttcgccacggggagaccggctcgccgaaagggctgaatcttgggtgtctttgtattctcagccccttggtgcttgagagggagattttgatttgaaaacaagccctggagagggatgctaagtgatctctcaaggcaaggcctatgattattgcctttggtagtgagtttagcgacacaataatggaaagtttgttggaccccaaatcaggctctaagaagtctcagttttgccgtaactacctaattaatgggactcagatgctcatctgtagacttaggtggactgcatggtaatttcctagggctgttgcaatgaagcactgcaaactgggtggcttcagcaacaaaaatatattgtcttggttctagaggctggaaatccaaratcaaggtgtctgcgcaattggttccatctgaagtcgctgtggtagaatctctttcattcctgtctcccaacttctggtggtttgctggcaatctttgccatttcttcacttatagatgcaacatcccaatctctacctttatcttcacgtggcattctccctgtgt

SEQ ID NO: 802304 - DNA, 562 bp, Homo sapiens
agatttgagtttatgcaaaccaatataatatgacaacatgatatcattatgtctattatatttatagaattatattaactttatgttatgtagttttgcaaacaaggtcctgtctataataatagcaattttattttatttatttatttattttttagacagagtcttactccatcacccgggctggagtatagttggtgccgtctcggctcactgcaaactccacctcccagattcaagcgaccctccagcctcagccwccttagtaactgggattacagacatgcaccaccacatccagctaattgataacagtaattttatttatttatttatttgacagagtctcgctctgtcacccagtctggagtacagtggcatgatcactacaacttctgcctcctgggttcaagcaattcttctgcctcagcctcccaaggagctgggattataggtgcgcaccaccacacccagctaatttttgtatttttagtagagacagggtcttgccatgttggccaggctggtcttgaactcctgatgtcgggtgatccaccgacct

SEQ ID NO: 802305 - DNA, 668 bp, Homo sapiens
cgtgcttggatatctcatgggtggtggagtctgtagcaaggctggaaattttgacttggaatcacttggatttctctaagagaataccccaggttggatgtgttactgtggcagcagagaagacttaaaaattacattgtttttagcttgaacttcgtcttgtgaagtcctaattagggaagaggagtcaggctgggggtctaggggaaagcaaagagataaagcagataagccataggtctaccttgcttcatggtccaggacatacaaacaaaaagaagaagcagataagctataggtctgcctttctttatggcccaggacatacgaccctcctgcacacataactcacaatcttcctgcgtatcatcaaatgcttcaacttatcatcaaacatctcggctgaccgaaaaatgcaagttagctccctgctaccttggcgttgtcagtcctccacatagcactcttcagctyaaattgcattttataaaatccccagcaagcctttgtctcctggcagtcaactcgtctcttactgacctgcccattgctcccttgcaatgtattttcctactttctctaataaatctgcctttcttgacctaaactgtcatggtaaattcttcttactcctatgtcaccagccacagacagtcgccacaagccat

SEQ ID NO: 802306 - DNA, 615 bp, Homo sapiens
acagcctcaagaggtcctggccacatgtgcccaaggtggtcaaggtccagcttgcttttatacattttagggagacatatcaatcagtacatctaagatgtacatttgattggttcgatctggaaaggcaggacaactcaaagcaaggcttccaggtcataggtagatttaaagattttctgattggtaattggttgaaatcaatggaaaggaatgtctgggatgtcctaaggggttgtggagaccaaaattttatcatgcagatcaagcttgtccaacccacagcccactggccgcgtgcagcccatgatggctttgaatgcagtccaacacaaattcgtaaactttcttaaaacatgaggggtttttgytttgtttgttttctttctgtttttttgtttgtttgtttttagctcatcagatattgttagtgtattttgtgtgtggcccaagacagttgttcttccagtgtggcccacggaagccaaaaagagtggacacccttgatgcagatgaggcctgcagatagcaggcttcagagagaatagattgtaactgtttcttgtgaaacttaacgtctgtgttgttgttaatggtggttagctttttctgaat

SEQ ID NO: 802307 - DNA, 553 bp, Homo sapiens
aatggtgaaaccctgtctttactaaaaatacaaaaattagtcaggcctcactccagcctgggtgacagagcgagactctgtctcaaaagaaaaaaaaaaaaattatttgggcttggtgacgtgcacctgtaatctcagctactcgggaggctgtggcacgagaattgcttgaacctgtgaggcagaggttgcagtgagccaagatcgtgccattgcacttcagcctgggcaacaagagcagaactccatcttaaaaaaaaaaaaaaaaaaaaaaaaaaaaaagaattttcaagccacattaggatgcttatcggcatgagttttacataataagacaatctgaaatgtatttgagttttgatgtttctaatctgtaraacttgaaggcctaaggattttgtagttttttagggaacagcattcctctttctctcaggtgatctatgttatgttgacctactcaaacatgttaactttgaaaatgaaccaacgttcaggaacaaatgaaatgacattttcaggacagcattccaaatacatagttagggacagt

SEQ ID NO: 802308 - DNA, 637 bp, Homo sapiens
taaggacatgccgggaggaaataagcacagaatcacagaaactgtgcttttctccaacgatgattttgatggcttcagtatttaaagggaacaggtaggctggagggcaaagagggaggatatggtaatccatatattgccagagaaaaggagcaggcaggggaatagtcagttaggtaatagtaaatcagtaaagtgctcagtaagtcggcactttacataagataaaatggaacataaagtagcctgtagaggtgtttgaccttttatttgtagctccctgcttaggaacaaagggactcagctttcagggactcagctttcagcttacttttctaccttttgcatagtgaattgaagtcctgcgtttttattttcctttcacagtagatttcaagattactttgtagttccttttgtttttaaacagagracatataaagtactatgtgaagttacttggactaggcttttttttctacctcttacgtggatatgttagttatttataatatgattaggtttattttcatttttatttaatttagatatgcctcctcatctttgtggacttaattttattatttaaatacataacagattaaaaaggttctaaaaaccgaaactaacaaaaagg

SEQ ID NO: 802309 - DNA, 606 bp, Homo sapiens
ctctcctttttcttttccccacagtgtcccaccagtggcagagtgggctgttcctcagtcatcaagactgaaatacaggcaattattcaatagtcatgacaaaactatgagtggacacttaacaggtatttacaaataaaaattagtgaaatatgatmtttgttttcaatgtaaactgtttctagatattgggtcatagatattttccatgtctgtgtgcttatttcttggcagtgtttcctttgtctctgttatctcatgttcttatccactgataactctttacatagttatatcattctctcatgccccattgctttgtggtaaaatggaatatagaccagggatactcctgtacgctgaaagccactgatatgcaaatcaaggcactagcaaagaaacacttctttgaacaaaaactagcttcaacttctgaagtccagctttgaacttgatgaacttgaagctgtctgttcactaggttagagttggaggcagcaggcagggtaaaagcagggagttgagaacatggctctgtctcagataactgcctagatagggctcaccactttggatatttctttatctattaatataaaaggccag

SEQ ID NO: 802310 - DNA, 556 bp, Homo sapiens
acggagatccgtgtggcggacatcaagaaagaccagggctccaaaggtccagttacgaagtgtcttctgctgcacgaagtccccacgggagagattgtggtccgcttggacctgcagttgtttgatgagccgtaggcagcgggctcagggtgtgctcagcagggtcccagcccacggccacacatgctgtctggaaattgtattccttttctaagaaaccaccatttggtattcagtcacagggatatgggatggcaaagacaggcccctcaaagctcctaggaatcattctcgacaatcctccctgccccgaaacaatttcctgtttcatgaaacaaagctgtgttttcctttgtcctcactacaggtytcattatggcttctagggtcgctgaaatcccatagccctcaacagggtgcagctgggagtctagccccttcccgggcttgagggatgggtctggttactataaaatagatttataaatgcaatgtctatatttttggagaactcatgtaaccctcctgtttcttacatccaccagtccccaagtag

SEQ ID NO: 802311 - DNA, 607 bp, Homo sapiens
gtaggtgtgatagtcctttgaaaactaagttgccgcaggcatacaggacaacataagaaataacaatagttctgtctctttgaagtggctcctagagaagttggtgaatgaaaaagttccaagtgcattgtacttgtgctctgttctctttggttttccctgaattttcgtgactgcatcgtccatacaaagggcattgagaaatmcacacagttgtgttccttttttaatttaattttatttttttgagacagtttcgctcttgttacctaggctggagtgcaatgacgtgatctcggctcactgcaacctctgcctcctgggttcaagcaattttcctgccttagcctcccgagtagctgggattacaggtgcccgccaccatgcccagctaatttttgtatttttagtagagacggggtttcaccatgttggtcaggctggtctcaaactcctgaccttaggggatccacccactttggcctcccaaagtgctgggattacaggcatgagccaccacatctggcctgtgttctctcctttgcagagtctttaagacagttgtggcagtttgtctgaacaccttttcatcatgtggcaaaagaga

SEQ ID NO: 802312 - DNA, 554 bp, Homo sapiens
acactggctgccatattggaaaggaacaaagcaaccacaggaggaaatctgagctgtcctatacaggctattaaaatacgagctaccctaaagggaattgaactttgaataaatagactcaatgtttaaattgaaaggaggcagtttaaattggaaaaaccctgaactattgtcaattggccaatcttagtagctcctactgcccagcaggctagcgtctcatgagaaatatcagatgaagctatagagacaataaagaatagtttctttgaatctctgagttgtaatgtgaataaattcacggtctccatatatttgcattctgtgtctcctctcccccascaaacattttggatcggattccaccctcctgcaagcttctctgaaaagtggcaactgcctaacctgtgttgctgttcatacttagtgttgtcctaggctaaggtgaaaaaattggctggttatggggctctattggaggtttctattttcccttcgctgacaaaggttagacaggataactgaaagcctcactattagagtcacatattcct

SEQ ID NO: 802313 - DNA, 572 bp, Homo sapiens
ttcagaaaaagccaaggtcaggttccactagctacttcaacttttctgtttcatatatcatagtttttctagatctttccttccctttttcttttctttctcttttatctcagaagaaggaaagaggagtatgtgtcttcatctccctkcagacaagaccctaacctatgtgttggtctcatctgctcctttctcatttggaatctttctccaataattcgtttcacttattcaaattctcccctctactgccttcttctactttatctgcaaatgcctctagctttcccttcatacctcaaacttggcttgtctaaaaatgcagttatgttttacctaacaaaaccagtccatctttccagtgggagaaggttctaagcaactgagaccaaactttggagttatttttgattcatctgccttctctgcatgtctctgcattcagccctcttttccatgaccactgacaaatttagctcaggtccccattatctcacattgggaataccaatgataatgacaattgtttatgaagtgtttactcttggctgggcactgtgctgcatacttta

SEQ ID NO: 802314 - DNA, 660 bp, Homo sapiens
ttcttcaaattctgtctatagggaaacgtagctgtcaatgtctcattcccgaagacttccagatgcctggatctttagagttctccacctcaccccgagttgattacacaaatgttcctggggctttgcttagtgccctgctctgtgccaggccccacaggcagagatggcagggacccaggcctgacgttggagagctcctgacccactgccggaaacacacgcaccatcacaccatgagggagctcccccatgcagatctcatctgtgtcagagtgaagccagaggatggacggtggagagtctagaaggagaagagaaaggaggatgagttctcawacatgagcaagcaggagaggccatttaaaatgcacactctggcctggtgcagtggctcatgcctgtaatcctagtggaggccgagacaggaggatcacctgaggtcaggagtttgagaccagcctggccaacatggtgaaaccctgtctctactaaaagaaaaccaaaaattagctgggcgtggtggtgcatgcctgtaatcccagctcctccggaggctgaggcaggagaattgcttgaacccgggaggtggaggttgcagtgagcagacatcgcaccactgcactccagcctgggtaaaagagtgagactctgtgtcaa

SEQ ID NO: 802315 - DNA, 625 bp, Homo sapiens
gtttgcgaacagcacccgtgggtcactctctaccacatctggtcctggggtttctcagaggatgtggtcaggagcctctgtctgcacagctacctggcctttcttcaggatccgagcctgcacagtgtgcatcacagggctccatgggagcacaaacacagttcaccttctccccatctggagcggctatgctcatttgctagtagcagcatttcccacttccctcctttcctccttctcttcctccttccctcttgcctctcctacttactgagcttctarcgtatgccaagcactatggctgagacggtcttattctcaaggcgagcccactgaaaggaggtcaaacctacagcccggagaattgatgactaggggtgagaaagaagcttatgcaaagttaaagtgttttttatttcatttagatgtatatttttagagacaagctctcactctgtcacccaggttggagtgcagtgttacgatcatggctcactgcagcctcaacctcccgggctcaaacaatctgcccacctcagcctcccaagcaactggggttacaggtgtgtgccaccgtgccaggtgaaagtgtttttcaaaaggcatttaacataggaagattggt

SEQ ID NO: 802316 - DNA, 625 bp, Homo sapiens
gtttgcgaacagcacccgtgggtcactctctaccacatctggtcctggggtttctcagaggatgtggtcaggagcctctgtctgcacagctacctggcctttcttcaggatccgagcctgcacagtgtgcatcacagggctccatgggagcacaaacacagttcaccttctccccatctggagcggctatgctcatttgctagtagcagcatttcccacttccctcctttcctccttctcttcctccttccctcttgcctctcctacttactgagcttctagcgtatgccaagcactatggctgagacggtcttattctcaaggcgagcccactgaaaggaggtcaaacctasagcccggagaattgatgactaggggtgagaaagaagcttatgcaaagttaaagtgttttttatttcatttagatgtatatttttagagacaagctctcactctgtcacccaggttggagtgcagtgttacgatcatggctcactgcagcctcaacctcccgggctcaaacaatctgcccacctcagcctcccaagcaactggggttacaggtgtgtgccaccgtgccaggtgaaagtgtttttcaaaaggcatttaacataggaagattggt

SEQ ID NO: 802317 - DNA, 600 bp, Homo sapiens
acccaggttggtcttgatctcccaacctcgtatctgcccacctcggcctcccaaagtgctaggattacaggcatgagcgactgcgcccagccatttttggatttttttactagacacagggtttagccgtgttgcccaggcttaaactcctgtcctcaagtgatctgctcgccttggcctcccaatgtgctaggattataggcttgcgggattacctggcctgcaagtatatttttgaaaccaccttactgaggtacaactgacatacactaaacatattaaaactgtacaatgtgatgtttcgagagagtgagcatatccttcctcctgsaagtatcttcctgcttctatgtaattcctcccatccccacctccactcccactgtaccccaatctgtttcctgtcactattgataagttgagcaagtatatatttaatctttaagagcttcctcgctttctgttcccttttcataaatttcctgctttttaaagtattgctttattatcttatatctctctggagttttaatttgattaaaatattttttggtccccggagttattctctgcagcctccaaaacagtcttactagttta

SEQ ID NO: 802318 - DNA, 606 bp, Homo sapiens
cctctgataatgcctagtatagattcttcaggattttctaaaacaggtgatctttggtctatcattctctgaactcctgtcatattagtaaagaaaaagtttttgtgagagttataaaggtattcaaatcttctaaaattttccagcattaattttgtttttttttttctgcctgagtgttgatttataaagtgggccctatatctgggcatagttgggggagacattttcttcacaatatagagagtttccaaaagaccacccccatgctttttgtcagcccttttctcctccccacagggagatggtatccaagtccatcttcrgctaaaatccgtgcttgtattgacagccccacttcctccttctgaaagcagcattttaatttggagctgttggtgcttaggtataaaatctatttcatttaatgctgctatgaaaatttcccagttttgaatttaagacagtctcttattgttttttcctgctcttgcatgggggaccatctgctctgccaagctttcaaaactttgctctcaagttaggtggcaaatgggctaacaatttggtatatgttaagagcttgttataaagaatacttttgcc

SEQ ID NO: 802319 - DNA, 619 bp, Homo sapiens
tcacattttcaggtatccttatagcagcatcccactctcttcagtaccaatttactgtgttagtccattctcatactgcaataaagaactgcctgagactgggttatttataaaggaaagaagtttaattgactgacagttccgcatggctggggaggcctcaggaaacttgcaatcgtggcagaaggggaagaaatcatgccctttttcacatgatggtgggaaggagaagtgctgagtgaaggcggaagccatttataaagccatcagatctcataagaactcactcactatcacaagaacagcatgggggaaactgcctccatgattcaattatctctatttgatcctgcccttkacacatggtgattattataattcaaggtgagatttaggtgggaacacagagccaaaccttatcagttgggtagttctggctcatgtggttgcagtgaggatgtcagtcagagctgtgatctcatctgaaggattaattggggctagggctgtggtttcatcagaaggattgattggggctagggccatggtctcatctgaaggacttattagggctggataatccacttccaagatggctggctcacatgtcgtttggcag

SEQ ID NO: 802320 - DNA, 527 bp, Homo sapiens
ctcatgggcagcatgaccaataggtgtagacctattgcaactggtgggtaactttttgcttaagtcagcttgtaatggctgtgttgtgttctctggctagaagggtagataagggataagttaccctgaacctaaagcacgagaactggccccaacaaccaagagtccagatcacgctatgctaaagcccctcactccaatcttcagtcccctggtacctccctatgacacaggtggctcacagaaccatcactggggacagactgctgggtggcatgctgctgcagggctaagaatcgcgtttttaaaggttagttcatttaattaaaagcacagcagggtgctgcctactttcattaagaaaggtcatyttccccagcatattctaatggaaaccagggcagcattcagagataggaaccatcacaagttgattttgctctcttaaggtaagatacggcaaagaatgaccagccacctcctagcagggtgctgaggctggctggtgcagtaggtggagatttagc

SEQ ID NO: 802321 - DNA, 631 bp, Homo sapiens
atacataaattccctcatttgtcatcatcaggagttaacaggcagcatctaaaattagtaaatcaaggccgggtgcagtggctcacacctgtaattccagaactttgggtggctgaggcgggtggatcacttgaggccaggagttcgagatcagcctgggcaaaatggtgaaaccccgtctctactaaaaagacaaaaattagctaggtatggtggtgcacacctgtaatcccagctactcgggaggctgagggaggaaaatcgcttgaacctgggaggtggaggttgcagtgagccgagatcctccactgtactccagcctgggtgacagagygagactgtctcaaaaaaacaaaaaaaaaaaaaaaaaacttgataaatcaagaaatagagaattcctatatatttaaatttatgtaggaaaccactggagaattaacatgaccataaaccttttaaatgaccagaaagagggacacacacatgcatacagaagaaagaaaaccaagttcagtgtcacgttcataggcatggccttaaacaatgtactcaggaatgttaaaataaaaagatgggcaaagaaaaaccaggtacatacaaacaaaagtaaaacggacttcttaacatgagc

SEQ ID NO: 802322 - DNA, 608 bp, Homo sapiens
agctccattttctgtcctaaccactgtttgtactttgcactttccacctgcttctgatatgtgttctcttatcaccatggattccaaaccttacagagcagagctgggtaaaacaaacaaacaaacaaataaacaagccaactcccatcactctgaggaaggaccctgctggccctggggtcccctccatttgtccagggtgggaatgagagaaggatcctagctgactgcctgggttcaaatcctgctttgtgaccttggacaagtttctctacctctctgtgtcttggttttcttaaatggagacagtagtagtacctacacctgatagggttgttgctaggattaaatctgagttgatacaagtgctcagaaccatgagtagtacagagcacatgctccatatgtgttagttgctatcattatcactttcatcattaccattattattttgcaacatarccattttgctcatcatcacatttgtaaaagacagaactggaatctgcgatcttcttaaggcctcaggtgtattattttgagaaatgcatgtaattatgtatctcctttttagaatgagaattgggggcatgttccaaggtggcatg

SEQ ID NO: 802323 - DNA, 590 bp, Homo sapiens
atgggagagattgttctgtactttttcccttcttcttttgcaatgtttgttttaggttttggtattaatgttattttgacttcataaaatgaaatgaaatgttatttcttctaaactctgaagaaatttatgtaaaattggtgttattaattccttaagtgtttgagagaattcagcaaagaaatatcagggcttgaagttttctttayggggaggttttaaatcatggaactaattattttaataattagttattaaattattatttaatctatttagagagtttttattcttctgtcagtttgatatgttgtgtttttccgtgaatttgttcattttatctaaattttcaattaattggcatagggttgcttataatatcttacatctatttaatgtctgtagtgaagtctccctttctttggtcatgacattgatggtttttttccttctttttttcataatcagttttgcctaaagcttatgagtttcacacgttttccaaagaactcatcttggccaattaaaattatcttcattgcatttgttttccatttcattatttctgctcttatctgtatcatttcctt

SEQ ID NO: 802324 - DNA, 578 bp, Homo sapiens
agttattttcttttagcactttgaagatgccactccattactttctgacttctactttttctgtttagaagtcatttgtcttacagttgctctttgaagataatatgtcttttttcttttctctggctttaacagttttttctgtctttggtttccttttttkctttctttctttcgtttttttttggagacagaatctcgctctgtcgcccaggctggagtgcagtggcgctatctcgactcactgcaagctctgcctcccaggttcacgccattttcctgtctcagcctcccgagtaactgggactacaggcgcccgccaccacgcccggctaattttttgtatttttagtagagatggggtttcaccgtgttagccaggatggtctcgatctcctgacctcgtgaaccgcccgcctcggcctcccaaagtgctgggattacaggcgtgagctaccgtgcccggccatgtttttggttttcaatgcagttttactatgatgtacttagatgtagttttcttagtacagtcatgcatcatataaccatgtttcagtcaatgacagaccacttacaca

SEQ ID NO: 802325 - DNA, 578 bp, Homo sapiens
agttattttcttttagcactttgaagatgccactccattactttctgacttctactttttctgtttagaagtcatttgtcttacagttgctctttgaagataatatgtcttttttcttttctctggctttaacagttttttctgtctttggtttccttttttgctttctttctttcgtttttttttggagacagaatctcgctctgtcgcccaggctggagtgcagtggcgctatctcgactcactgcaagctctgcctcccaggttcacgccattttcctgtctcagcctcccgagtaactgggactacaggcgcccgccaccacgcccggctaattttttgtatttttagtagagatggggtttcacygtgttagccaggatggtctcgatctcctgacctcgtgaaccgcccgcctcggcctcccaaagtgctgggattacaggcgtgagctaccgtgcccggccatgtttttggttttcaatgcagttttactatgatgtacttagatgtagttttcttagtacagtcatgcatcatataaccatgtttcagtcaatgacagaccacttacaca

SEQ ID NO: 802326 - DNA, 578 bp, Homo sapiens
agttattttcttttagcactttgaagatgccactccattactttctgacttctactttttctgtttagaagtcatttgtcttacagttgctctttgaagataatatgtcttttttcttttctctggctttaacagttttttctgtctttggtttccttttttgctttctttctttcgtttttttttggagacagaatctcgctctgtcgcccaggctggagtgcagtggcgctatctcgactcactgcaagctctgcctcccaggttcacgccattttcctgtctcagcctcccgagtaactgggactacaggcgcccgccaccacgcccggctaattttttgtatttttagtagagatggggtttcaccgtgttagccaggatggtctcgatctcctgayctcgtgaaccgcccgcctcggcctcccaaagtgctgggattacaggcgtgagctaccgtgcccggccatgtttttggttttcaatgcagttttactatgatgtacttagatgtagttttcttagtacagtcatgcatcatataaccatgtttcagtcaatgacagaccacttacaca

SEQ ID NO: 802327 - DNA, 474 bp, Homo sapiens
gcatatataaaaagccacaggggaaaaaaggaatacggactcagcaactcttaggtgctctgagcctcttcccaagccttctggttctgtgagcatttcattgaaagaaaatggaataacagagttttagaagaaaaactgtatttggtcttgcaagagaaaagtatattcatataaaactcagttctcaactatttgccaaggttacttcttttgtttccaacatttaaaaagggtatctagttgtaggtrgagaaaacattaagatatgtgaatggaaaaaggtaaaatttctaaaagtatggattcacagtggggtctgatttaaatgtttaaattttttctctttaatttcttctcaccaatcctgaaagacacgacgagataatatctactttcaataaatcaattaattttatttaaaatccctaagattttaatatagtacatgcaaaacaataatagattttctat

SEQ ID NO: 802328 - DNA, 600 bp, Homo sapiens
tatcttattgtactgtagtcacctgtttcaaccatggtttattgtgggtaactgagcctgtggaaagtgaaatagtggataagggggagggctgttgtactagttttgaaacagcagattacctatttaacctgtctcagaccctagcacatgctcagcccattctcaggattactacaagactcaaatgagacaatgtacctgaatgcagtttgaaagccacaaagcctggtaaacagcacatgaaacttacagggaaaatgcctagcaggtatcccaagacattctcctgggtcagtgtaaagtgtaaaatcttgttattcttcttagctggacatacttcaagagaatggcaagtccaacttagccaggctttagatytgccacaactaacctcactcctattttagatgtcacctcccctcacttagtttaactcctccccactcactgcaaaaattatgtttgtatttctgaattcaaataagaatcagcaaaattactatgttttctttccatttaacatggtagcctgtgatttaaaacatacacacataaaccctgacttttctttccatatactcagaacaggttcttctc

SEQ ID NO: 802329 - DNA, 469 bp, Homo sapiens
cacctgcatttagctatcttatggccatctcagatttaacacggtcaaaacaggactactgatttgttactatatatgttaaacacacctccatgacatatatatatgtataaacacctataagtgcctgttatatacaaatcagcytcatggctgctatctcgtgtatgctttatctgtgtctacattacagctgtatggatctatgtaccacacagcgtgtatgtgtatgtaaagcatagctaccctgattaacccagatatgctttgcctaagatattccaacaatctcaagatttacaagaaagtgctttttagataacagtagccctgacactaagtgcctccctctttattactgcattcagttatcccttcctttcttgtaagctctggtcctgcttcacttcagacagaagaggaagcaactttcacagctttgccccaacttgttaacaagagtgtttct

SEQ ID NO: 802330 - DNA, 469 bp, Homo sapiens
cacctgcatttagctatcttatggccatctcagatttaacacggtcaaaacaggactactgatttgttactatatatgttaaacacacctccatgacatatatatatgtataaacacctataagtgcctgttatatacaaatcagcctcatggctgctatctcgtgtatgctttatctgtgtctacattacagctgtatggatctatgtaccacacagcgtgtatgtgtatgtaaagcatagctaccctgattaacccagatatgctttgcytaagatattccaacaatctcaagatttacaagaaagtgctttttagataacagtagccctgacactaagtgcctccctctttattactgcattcagttatcccttcctttcttgtaagctctggtcctgcttcacttcagacagaagaggaagcaactttcacagctttgccccaacttgttaacaagagtgtttct

SEQ ID NO: 802331 - DNA, 629 bp, Homo sapiens
gtgtcatagtaaaatcaattctctgtgtacttttggggattacaactatcattttggtgtgatttatttggtgtataacacaaagatggccatttgtttcatcattctgaaagttcatctcaaattgctttgagtttctggttttcaggagtgacatgtctaattgttgtcatctcgcctatgaaatatgagtggagggttgcacagctgctggcctcgttgccttcctggttacctgcrtttgtgcagggcaaggtttactgctttgatttcccttcttttctcatggccctccccactctgaaatccacctttagactgactgatacagggttaaaccctggggctttcttccctgcctgtctttgagaacttctctctcctgcaaagatgggaggtgatctctgaagtatgttggactccccacacactcctgcagccttcgctgatcggggggcactgtccctctcatgcagccgcagtccagatcctggcctttgagcccatttgcacttgggtatagcagataaaaactgcccttggtatcttgggtcaaaaaaggctggtttgagagttgctccaccaattaactggctgtgtggcttcggacaattccctcaacctctctg

SEQ ID NO: 802332 - DNA, 583 bp, Homo sapiens
ataaccatctttaagggttttctctgacttgatccaaatacaggaatcaaataagttgggggctctcctgataattcatgttagataatggatgcatccttatgttgcaggaacatggggtgtccttggtgtgtccaatacatggtctccctaacaaatttcagtagagctatttcctcccctgggaccgatctgtacaggtcaacagacctgtatgcctttcygaatcctgtgggttgtaagcttggtgaacctggctatttgcaggttccatggctcggtgacttttggtcccaccacagggtttctatccggctgatctagggtctctcactcccaagatgtgctgtccttatttgtggttttgtttcaccctggcctggaaaagcaatatcggtgttttcctttgagttgcctccaggcattctcaccttcccagcctgctgtctgctggcatgaggcaggccctggagcttaccatggggtggtgagaggttgggagatggagctgaagctgtgggtgccaaaggcagaatgtgagcaaagtgcaactgaattgtatccctctttgaaggcccagctt

SEQ ID NO: 802333 - DNA, 581 bp, Homo sapiens
ccccccagtgctgctgtccctgcgtgcaaggagcagggaggcgatgatgaatttcccccgaacggcattacagacagtcataaataatgctttgctctttggtgacggcactttccattagagctgcctgcgccgkgctgttgctacccccagtcttctgccggggacttgcagtaaaatttatcagcgagctttctgcacctaataaatcatcccctccgggagccatctggcagataaggccatgagaacccacatgctctgcagaggcggagtcagagtgagaggcggccctagctgggtagccccaggccctgttgagggggactctctttctctccagcagcctggcctgtcagactcttcctggcttatctcatcagactgaggatgggggccctggagagggcagctgctccagctccctgaaccgtgtggcttcccactctggggccaggcctacagatcacctccttctcacactgtctacacccaggtgtccaaaaggtcctggggtctgtcaccaggccagagcaggggtaccctaggccaagacaggtgctgtgatgggcatgactatt

SEQ ID NO: 802334 - DNA, 598 bp, Homo sapiens
atgtgtaattttctagcacatagtaggggatcccacaaattgtaatcactatgatgattatatctttgagggtgaggatgaattttggaaaagcctttgtacacctttcctaagaagtggagaccatatcacctcccacatccagctgaggataaagaaagaaaggatgcttgcaaagcacactgaaccctgagaggatgccaggatttcactgtcatttaatattgccaccatgttggttaataacatattgaccaactctacaaatagtagagtaaatttactatcactcagaaattttgtttttgcagctatgttcttctcccagaaaatatgcaaacagtaaataaatagctcttctctttttctttctttctttctttctttctttctttctttctttctttctttctttctttcttttttcttctttctttcttttttttctttcttttktttttgttttacctcctgcatcatatttataattatcttggcttggtggacaggtgcctgtttgtgctcccacattctcctaggccccaggactcaatgttagtcagctttcatatatctgcatgtggattatccacttaat

SEQ ID NO: 802335 - DNA, 561 bp, Homo sapiens
tgaaacgactagtctggggccatacataaaataagtgaggagagttggggttgaagccaggtggtctggctccagagtctgtgcttttagccaggctattctaccgcactctggagacaccaatgagatgtcccaggtagcagagtctggaaattgggaggctcatctggaagttgttgccagcgtcctgtttggagatgctgggttcttaactagtagtgagcagtgagggtggattccctaaatgttatggaggaagtcttgaggtgttgatgagtgattgccaaaggaattgaaagaggaacaaatgttggacttggttaggggtttggcacaytttatctacaaaagcctacatggcaactcttttaggctttggaggtcatatggtctctgtcacaattactcagccttgccattacagcaggaaagcagccacagaccgtaagtgaatgaatgagtgtggctgtgttctaataaaactttattaatggacactgaaattagaatcgcgtggcattttcacgtcataaaatattcttcttttgatttttttgcaac

SEQ ID NO: 802336 - DNA, 561 bp, Homo sapiens
tgaaacgactagtctggggccatacataaaataagtgaggagagttggggttgaagccaggtggtctggctccagagtctgtgcttttagccaggctattctaccgcactctggagacaccaatgagatgtcccaggtagcagagtctggaaattgggaggctcatctggaagttgttgccagcgtcctgtttggagatgctgggttcttaactagtagtgagcagtgagggtggattccctaaatgttatggaggaagtcttgaggtgttgatgagtgattgccaaaggaattgaaagaggaacaaatgttggacttggttaggggtttggcacattktatctacaaaagcctacatggcaactcttttaggctttggaggtcatatggtctctgtcacaattactcagccttgccattacagcaggaaagcagccacagaccgtaagtgaatgaatgagtgtggctgtgttctaataaaactttattaatggacactgaaattagaatcgcgtggcattttcacgtcataaaatattcttcttttgatttttttgcaac

SEQ ID NO: 802337 - DNA, 620 bp, Homo sapiens
caccagtcaaagtggggtcatggtaatcaggtaatagatggagctttagctaaagcttgactcacagtgggcctagttcatctatagacccaactggtgggttatttccccaggtgttaaatgtataactgtaatatgtatatgactatatatatatatatatatatatatatatatatatatatatatagtcattgttcagtatctatgaaggattttttccaggaccacttggggataccaaaatccatggaagctcaagtccctgatataaactgatgtagcatttgcaaataacctatacacatcctcccatatactttaaaccatctctagattacttataatacctaatactatgcaaaatctatgtaaatagttgctatactgtatgtctaggaaataatgacaagaggaaaagtctgtttatgttcagcacaatttttttttctgaatatttttgatctgtggttggttgaawacatggatgcagaacccatggatggtgaggactgattgtactcagaaactggaagtatcctcatgttggctcttggacccatcggatgagggccatcatggttggaagggctaaataaaaaacccttggaacttctcct

SEQ ID NO: 802338 - DNA, 626 bp, Homo sapiens
ggtgaaagttgaaaattgattagataaaagtattgtgtgaatgttaaaattcctggatttgataactatgaaagaatgtccttgtacttagtgaatacacattgaaagaataaggggaaacaaacacagaaaaacctactcacaaatggttcaggaagaatacgtgtgtgtgaatatgggcagatatagagcagaaatgtggcaaacaactacaaattgatgaatctgggtaaagggcatatggagactttttgtactattctcacaccttttgtaaatttggaattatttcaaaaataaagttaaaaatattaagacatccaaacttttttgtgtgaagttgcctgaggggcagagaaaatatggagttatattattccctgtgtgaactcttatttaatgttattttaccaggtgtttattgtctactttgtgccaggaaatgygccaagttttaggctttgccctgcctgttccctcatgctttctctcatccagtagggggaagagggcactgaacaatttttcgccccctttgtgagtcaaaatctctctgggtcccactcttctgatttgtacaatctatataatgaaccaaaatgatttctagttctaactcaatgatt

SEQ ID NO: 802339 - DNA, 613 bp, Homo sapiens
cacaggccaaattttgccaagtcaatggctgcatatcagttaccaggagattgttaatttgctcaagcaatgaaaccacatctggtacagaagctgcagttggagtcaccacttggtttaaacttatggtaatccactaccattcyccaagatccatctgtcttctgcacaggccaaatgggagagttgaatggggatatggtgggaatcaccacccctgtgtatttcaagtccttgatggtggcactaatctctgcaatctctccagggatgcaatattgtttttgatttactatttttctattagaggaagctctaatggcttctattttgtctttcccaccataatatcactcaccctaccagttcagaagccaatgtgggggttctgtaggctgctaagtatgtctatgtcaattatgcattctggcactggggaaatgaccacaagatgagtctggggacccactggacccactgtaagtaggacttgagctgaaactctattaattacctgaccttcataacccttactttaaccgggggaccacaatgacattttgggtctcctggaatcaacatcagctcagaaccagtatccagtagtccccaa

SEQ ID NO: 802340 - DNA, 613 bp, Homo sapiens
cacaggccaaattttgccaagtcaatggctgcatatcagttaccaggagattgttaatttgctcaagcaatgaaaccacatctggtacagaagctgcagttggagtcaccacttggtttaaacttatggtaatccactaccattctccaagatccatctgtcttctgcacaggccaaatgggagagttgaatggggatatggtgggaatcaccacccctgtgtatttcaagtccttgatggtggcactaatctctgcaatctctccagggatgcaatattgtttttgatttactatttttctattagaggaagctctaatggcttctattttgtctttcccaccataatatcactcaccctaccagttcagaagccaatgtgggggttctgtaggctrctaagtatgtctatgtcaattatgcattctggcactggggaaatgaccacaagatgagtctggggacccactggacccactgtaagtaggacttgagctgaaactctattaattacctgaccttcataacccttactttaaccgggggaccacaatgacattttgggtctcctggaatcaacatcagctcagaaccagtatccagtagtccccaa

SEQ ID NO: 802341 - DNA, 669 bp, Homo sapiens
gcttgtgatttccaaggcttgtggattatgaagcatccggtttgagaatacaaggaatggaaagggaggcattcatatggaaatattctaaactatattcgatttcctgaaattttgagtgcagatgtgtacatgaaaaattgacaaaaaaaaaaaggtggtgggggtaatggagtgtggtgaccaagctctggttcaccctgctatttgaagatgagcaatccacttaacctatatttccctgtatataaaatggaaacttgtagtagcaggtcatctcatgattttctaagtagtgaaaggacatactagataaaacatggctgccctgggagcagagattttcaatgtgatatataatgggtctttcaaatgtgtttcgttccagcctagtctytgagatatcccggatgtgagtttcagaagggaaatgatgtctgcgctactgtgttcagttccctctgtccctagccaggtcctatatgtgtagccctggtggtcaaattagccaaatgtgaagaggatgctggagctttaaacatgtaaatatgcaatgcacatacacacatacacatacgcacacagacaaacacatacatgtacttactctttaatatcaaaaaatattagaattaccaaattattcttagatgtctttttgaaagtaac

SEQ ID NO: 802342 - DNA, 578 bp, Homo sapiens
tatggcataaacaaagggaaatggcagctatttggtgtggtaaatgaacattttaggattatacccactttttcttgggtgatctgttctcaggcactttattccaatattctctaaagtggttttggcatatcttgatggtcaagagggtattggcattcttcgtctctgttcatgcctgctttgccaggaagaatcacattcccagagagggttttgcctgttgagctgtgtgtacagatgtaatgagatgagttggtgggatggctaagcaatggtagcgtcttctttcccyactgtcacctacaggaaaaagaaatcaacattgtgtttcaaaagacccattgaggaaggtctactctgaaagagaaaggataaatcaaactatttttcctcctctcacacacaatacaacacagaacacatctgtgaccagacctacgtagtttttcatacacagcaagcaatccgttctccagtgaacaccagctggatgtcctataattcaattcaattttcacactgtctacctagaagtagcattagattccacaggttcagagttcagtcccataaga

SEQ ID NO: 802343 - DNA, 625 bp, Homo sapiens
gtgaattcatgagaatgaactctagattccaatagagggtggccttcttggcttgagctgatcactgatctacacttcaatacagtaaactactaagtactggagaaataactactgaaaaaaataggccaggccaagcgcagtagctcgtgcctataatcccagcactttgggaggccaaggcggacagatcacctgaggtcaggagttcgagaccaccctggccaacatggtgaaaccccatctctgctttaaaaaaataccaaaattagctgggcatggtgacaggcatctgtaatcccagctacttgggaggctgaggcaggagaatcacttgaactcatgaagcagaggttgcagtgagctgagatcatgctgctgcrctccagcctgggcaatggactgaggctccatctcaaaaaaaaaaaaaaaaaaaaaaaaaaaaaaaaaaaaactggccaaaaaacaattctcggaaagcgttgtgaaaagtttctgttctcattatccagagtgacaaaaaaaaaaaaaaatattaaaccaccataatagacatcaccctgagaagagtatcacactatttttaggtataaattagcctcatttaaagggtgcacaggaccca

SEQ ID NO: 802344 - DNA, 573 bp, Homo sapiens
tagcacgaggcccaagaaagccaagtagggagttaggacttccagcactgttgggccataacaagatgttccctgtggtgtcattagagactacataggttgcctggacttccagccaactgaaaatcaaaacaggagagggcccttctcctccccactgaagtggtatcagaggatatctagcaragagtcaagtttttcatgactagccattagtattaaggtcatccctctgtgatttcagtggagactacatgaggaacagtaacaagtacttgcctcagcctgggtgttatcagtagaggcccagaggaaagccagaactcctcctccacccaacagtaatgagaagctctccccctcactggattcagtggaggccaatgtgaaactgggcttctactcccacctgacagtaacaattcagcactcccaggctctcactgttgaagcagtgtcaaagggaaccagttaaaatagagggtttaaataagattcagaatttcataatatactacctcaaatttccagttctcaattttaaaaatcacttgtaccaagaaccaggaaaat

SEQ ID NO: 802345 - DNA, 640 bp, Homo sapiens
atgttgaccaagaaacatttctgagacagtttctccagggatgagagtaggcagaggcacatcctggtaagtgtctggctgctgctaggactctgaaataggttgatcttcaccaagagaagcaggagtagagccagtggcagtaacaggactaagtggaaacctctttgttttaatttgaagaaggcaaacaagtctacctgtcttctaaaatgtttcctaagttggcaccaaaaccaatgccttgtctaacacacatggggttttggttctacgagtctcttgttgaaatggataagttacatttgggtgtagtcaaactctaacctattcttttrttattgaggctggagtatcttagaagctatctagttccctattccttcattttgaatatttggctgaagatgaaaaataatttgcatgatgtgagactgtcagcacctgaatttagatctcttgatttctcatccagaattcttttcatcttagcacactatcttgtatccagtgataagtattataatattctgaaaaagataaaacacaattctttatcattaaccttgaagatggcatttctgtgcctacaaatagcaacatcacctatgtccttgaatgtagcatatgacattttata

SEQ ID NO: 802346 - DNA, 653 bp, Homo sapiens
acttattttctactatatatctcctttcccaatctagagagccacatcttattctatttccatgtgggtcactgttgattgctgcacaaacatcaaattttaagataatttgtttagggactcctttttcttctcttctagttattactttactcatattggcttttccccagttcccagtcttccaccttatttcaartactgtggccatggggggttcagatgggttataacatacactaggttgtccatcttctggactgcataccttatactgggtgtcattacataatcggattccttttagagttcccatgtattcataattgtaaaacagaaagactgttttaaccttttgccctacctcagtaacttgatgtatacactgggaacagtcctcagtctgaggaaggtctgttgaagtccttactgtacaagtccaaaatttaaggaaaatgagtcccagatgagtttcctcatgctttggctgtgcagggaccagtcatctttctggtgtgactggagcagtgcttgtcgtctttcttgaggtcacttttcagaggttgcctgggcttggtctcgcctcccaggtctcaggtgctgcaggttttacccgtctatggtggatccaggccgggattccctctaccttt

SEQ ID NO: 802347 - DNA, 653 bp, Homo sapiens
acttattttctactatatatctcctttcccaatctagagagccacatcttattctatttccatgtgggtcactgttgattgctgcacaaacatcaaattttaagataatttgtttagggactcctttttcttctcttctagttattactttactcatattggcttttccccagttcccagtcttccaccttatttcaagtactgtggccatggggggttcagatgggttataacawacactaggttgtccatcttctggactgcataccttatactgggtgtcattacataatcggattccttttagagttcccatgtattcataattgtaaaacagaaagactgttttaaccttttgccctacctcagtaacttgatgtatacactgggaacagtcctcagtctgaggaaggtctgttgaagtccttactgtacaagtccaaaatttaaggaaaatgagtcccagatgagtttcctcatgctttggctgtgcagggaccagtcatctttctggtgtgactggagcagtgcttgtcgtctttcttgaggtcacttttcagaggttgcctgggcttggtctcgcctcccaggtctcaggtgctgcaggttttacccgtctatggtggatccaggccgggattccctctaccttt

SEQ ID NO: 802348 - DNA, 653 bp, Homo sapiens
acttattttctactatatatctcctttcccaatctagagagccacatcttattctatttccatgtgggtcactgttgattgctgcacaaacatcaaattttaagataatttgtttagggactcctttttcttctcttctagttattactttactcatattggcttttccccagttcccagtcttccaccttatttcaagtactgtggccatggggggttcagatgggttataacatacactaggttgtccatcttctggactgcataccttatactgggtgtcattayataatcggattccttttagagttcccatgtattcataattgtaaaacagaaagactgttttaaccttttgccctacctcagtaacttgatgtatacactgggaacagtcctcagtctgaggaaggtctgttgaagtccttactgtacaagtccaaaatttaaggaaaatgagtcccagatgagtttcctcatgctttggctgtgcagggaccagtcatctttctggtgtgactggagcagtgcttgtcgtctttcttgaggtcacttttcagaggttgcctgggcttggtctcgcctcccaggtctcaggtgctgcaggttttacccgtctatggtggatccaggccgggattccctctaccttt

SEQ ID NO: 802349 - DNA, 647 bp, Homo sapiens
gcaggttttacccgtctatggtggatccaggccgggattccctctacctttatagctgtgggagtggtcaagacgatggtctggggtcctttccaccatggccacaagggggctactttccaatccttgatacacacctgatcacctgaggagaaagggtgaactggggagaataagctgatggggtacctctcatttacctargctgaaattgtttgtgtaattttccatgaagtctgtagctgtcactgtaactcaatttcacctagctctcaaggagtgcctgggagtccccttagtatgggaagggacccatgatataatatttcataaggggaatatcctgttattttagaagagctacatctaatgttaaacaacaccatagggacagcttatacccactttaatcctgtttcttgacacattttccttaaactatttttggtagtctgattcatccgctccacctttcaggaactttgtagtcggtaggtggtatgtagtttccatgtgatccccaatacctttgctgtcttctgtaccaagtcagccacaaatcccagcccgttgtctgagctgatttgtaagggcagtccaaacctaggaaggagatctcggagaagcacacaggttacttcatgagc

SEQ ID NO: 802350 - DNA, 628 bp, Homo sapiens
ccacaatttgccatctatcagatagacaggaaaaccaatggtgtcgttccagtctaagtctgaaggcttgagaacagggagcaccaatggtgtaagttttcatcaaagttcaaaagtcttaaaaccagagagacaacagtataagttaaagttcaagtacaaaagcctgggaaccaggagcaccaaagatgtaagtctcagttcaagcgtgagaagacagatgtcccaacacaaacaggcaggsaggaaagggatgaatcttcccttcctccactttgtgttctattcaggccctcaacagattgaatgagtccacccatattggagaaagcaatcttctttactcagtctacctattcaaatgctaatctcttctagagacaccctcatagacacacacagaaataatgtttaaccaaatatctgggcacactgtggtctagtcaagttgacacataaaaataatcatcacacacatacatatttatttttagtgatctttatttgtactaatgtgttttgattctagattcatggaatgctctcactctcatttctgaagattcaatgagcaagagatttctggattcatctggctgagtgaaactatactaccgattcttttaat

SEQ ID NO: 802351 - DNA, 553 bp, Homo sapiens
gatagaaagtgtgcatgctaaatcattggccatataaaatctctagtattttaaaggctgaatatcagatcatggtccgtggagaccatttctttctcccagctttgtgggtggtaaaatcgagaaagcttagtaaactcattaataagtagaagcccaaaattatgtggagtgggwtattagttccctgtgtaagaaaaataatacaaaaaaatgcttattcttgcaaattttacaaaatgtgcatgcattgctaagccttccccacccaccctcacttgggccttggtaagtactcttgtaagggttggtcccaaaacttaagccttattaaactcatggtcaacctgtatccctttatgtgcctatttattatatacaacctattttagaaaaagattatctttttctttattttttttttctttgagacagagtcttgctctgtcacccaggctggagtgcagtggcacaatctcagcccactgcaacctccacctcccaggttcaagtgagtctcctgcctcagcctcctgagttgctaggactacag

SEQ ID NO: 802352 - DNA, 622 bp, Homo sapiens
cgaacactaaacaaaaatggctagaaatgtctttttctttcttttctctctttgttgtttaaggtattaagcacgaattattacatgagactggcagatagctattaatcctcttacagatttgagaaagttgattctcaaatatttatgcaccttctccttcattgttttctttaaatctgtcctcttaaaaagcttcttaagagctcagttaatgcttttgacttaactaggagaaaaaggcatgataatacaggcaagatggcattgttagcaattctggtagtggtttggaatgaatcctaagaggcagggatcttaaggacaaggaagagaagagagagagggagggatctttgatctctttctctggtaatcttaatgcataattttactaawacatgttctcaattcattcatattattaagctcttcctgcagttgatatctgagcagagtaagatttgtatttccatttttacttttttgaaagagaatatatggacagattattagtacaatttgggcactgtggttttaagaatatctgagtaaaataacaatatgaaataataaacagaagctctaacgtcaggtaacaaatagacagcaagaaaggttt

SEQ ID NO: 802353 - DNA, 600 bp, Homo sapiens
ctgggtgaagccagctgggctcctgagtctggtggggacttggctaatctttatgtctagctaagggattgtaaatacaccaatcagcactctgtatctagctcaaggtttgtaaatgcaccaatcagcactctgtgtctagctcaggatttgtaaatataccaatccacactctgtatctagctaatgtagtagggacttggagaacttttgtgtctagctcagggttcctaaacgcaccaatcagcaccctgtcaaaatggaccaatcagctctctgtaaaacagaccaatcagctctctgtaaaatggaccaattagcaggatgtgggtggggccagataagagaataaaagcaggctgcccgaatgagcagtagcaactcgctgtggtccgcttctgtagtgtgaggwggtgtgttctttccgtctttgcaataagtgttgctgttgctcactctgggtccagctgcgtttatgagctgtaacactcaccgctaaggtccgcagattcactcttgaagccagtgagaccacaaacccaccaggaggaacgaacaactccagctgcgccaccttaagagctgtaacactcactgaag

SEQ ID NO: 802354 - DNA, 625 bp, Homo sapiens
agcctcccaaagtgctgggattactggtgtgaccgaccgtgcctggccaatgtgtatgatttaatagccagcagcaacaggccactaacatgccatctgctaacaggggctctagctattaacatcaacagagctaaaaactcttatgtctgatcccttgcaaatggcgaagacctggctgagaattattatctcatgctttcagagaaaactttgcttgtcctgcactgaaaaatctggctgcaataatcacatggaagaaggtatgtttgttggcatggttcatgggctggcttatgacttctaagcagaagatacaaaataatataaaawtcctgcaacatgcacaatgtagctgatattcatgttctctttaaatatcttaacactgacttacatatttaagggtgtggagtctttgagcttgggaagcatcttattactgaggtacaaatgctaaaagagggacatttcttctatctaccgcattttcaatgaaaagatgctgaaggtgaataaacagctctgcaaacccagttttgtttaacttggcaacagcagtaagtaagtatcactggacacagagacactggaatagattcagtctttagtcttattcatcacg

SEQ ID NO: 802355 - DNA, 627 bp, Homo sapiens
aatcattttaatttggatttctttttagattttgtttcaaattacagggccatacaaacgagctggtgagttgagaaaatagctttggaactgcattggatcatcaaaagaaacggcagactttggcgtgggagaccatgcctcaggctccatccatttggttgaggtgcccacacatgcacaaaaataaaagaatggcataaaaacagacaaaaactactgacatgtcagtcatcatggcttaaggaaaagctcacaaataatttytctggaatctcaccaaaatttggagtaaaagatgatagcatgctaaatcagttctcttgctacttctaaaatactaacgttcctgaatggggctcaaggtggaatcatttcgaggcaaatatcagttctagtagataaaagtgttgtttaaaacctcattaacattatatataaatattccccaaaatgatctacagatccaatgcaatccgcacttttttttttttttttttttttgcagaaatggtagtgggggcagggggtgaggaagatcttaaaattcatgttgtaatgcaagagactccggatactcaaagtaatattgaaaaagaagaacaaagataacggactcacacttgc

SEQ ID NO: 802356 - DNA, 627 bp, Homo sapiens
aatcattttaatttggatttctttttagattttgtttcaaattacagggccatacaaacgagctggtgagttgagaaaatagctttggaactgcattggatcatcaaaagaaacggcagactttggcgtgggagaccatgcctcaggctccatccatttggttgaggtgcccacacatgcacaaaaataaaagaatggcataaaaacagacaaaaactactgacatgtcagtcatcatggcttaaggaaaagctcacaaataatttctytggaatctcaccaaaatttggagtaaaagatgatagcatgctaaatcagttctcttgctacttctaaaatactaacgttcctgaatggggctcaaggtggaatcatttcgaggcaaatatcagttctagtagataaaagtgttgtttaaaacctcattaacattatatataaatattccccaaaatgatctacagatccaatgcaatccgcacttttttttttttttttttttttgcagaaatggtagtgggggcagggggtgaggaagatcttaaaattcatgttgtaatgcaagagactccggatactcaaagtaatattgaaaaagaagaacaaagataacggactcacacttgc

SEQ ID NO: 802357 - DNA, 627 bp, Homo sapiens
aatcattttaatttggatttctttttagattttgtttcaaattacagggccatacaaacgagctggtgagttgagaaaatagctttggaactgcattggatcatcaaaagaaacggcagactttggcgtgggagaccatgcctcaggctccatccatttggttgaggtgcccacacatgcacaaaaataaaagaatggcataaaaacagacaaaaactactgacatgtcagtcatcatggcttaaggaaaagctcacaaataatttctctggaatctcaccaaaatttggagtaaaagatgatagcatgctaaatcagttctcttgctacttctaaaatactaacgttcctgaatggggctcaaggtggaatcatttcgaggcaaatatcagttytagtagataaaagtgttgtttaaaacctcattaacattatatataaatattccccaaaatgatctacagatccaatgcaatccgcacttttttttttttttttttttttgcagaaatggtagtgggggcagggggtgaggaagatcttaaaattcatgttgtaatgcaagagactccggatactcaaagtaatattgaaaaagaagaacaaagataacggactcacacttgc

SEQ ID NO: 802358 - DNA, 580 bp, Homo sapiens
ttagggactttaaaattttctccttttgccagtgtctctgaattttagtatgctatttgtactgaactgactccaaatctaaaatttgattatatacagaaatagcaaataaatgcaactcagactaatgacaaagcatttaatcagagaatattagaacgactacaagacataacctggaaaaaaaatctatgaagaacctatttagaaagtaagctaaaagcaacactttttattatgagaaattttaaacacatacaaaagtaaaaagaataacatgaggaacctytaataacatttggcttaagcaattagcacccctggccaatcttgaagtttcaactatattcctactaaaaagggacgtattgttttaaatgttccttcaaatgaaaaaggactatagatgacaactaggttcaacccagaaaagctattctccccagcaaaccacttctgtagctttgacactagcagctcagatagtgtacagggttcgttattgcaaacttctctttctatagagaacagtcatttaaaaatggaagcacccaggattccaaatgaaaggtttttaaaa

SEQ ID NO: 802359 - DNA, 638 bp, Homo sapiens
agggatagcagaattcacatcatggaaatttttatgttttcctttagaaaaactacttacggagccctttggttataaaacaaaaaggcccggacccatctagattagagaagaagaaagggagctaaactgatcttcatgatgaacttcaacggagtcattcytgaggatggagggaatgatctatgctggaaagggctatgtgagttttctttaaccaggctccagaaggaataggtttccaatccctggaacttagagaagccagtgcagaaatgggctgaagcaacgtgatgaaagagtgagatgctacagaagagacaaccagggagaggttccctggggcagagaatggtggatgagatttaggatcagtgttgccagattctgtctgttgcagattattgcctttttatcctagtcctttgtatacaatagccttgtgttagtgggtcatgttttaaagcacaagaacaaggcagattggacagacctaaagcagtataaggaggtagagtcagatggcccaaaatgatgaaagagaggattggagtaggagtcgggtctgggactcctcagaattataggtgagtgtgctggatatcctcattcatatgcatggcacttcgagttatttg

SEQ ID NO: 802360 - DNA, 535 bp, Homo sapiens
taattatgttcagcttaaatatttatttcaggatggttctaaatcctatctctggtctggtttagtgattttcataatgcttagacatgatgaccatttcaaactgaaaccaagaaagaatatgaatatttctttataaaaataaaaacacttttctttaattaaaataaaaccaagaagtttcatgtgaaaggtcacatttctagctcgtgctgtgttgtcagcatactcctccagccttcttctctctctstctgtgtgtgtgtgtgtgtgtgtgtgtgtgtgtgtgtgtgtgtgtgtgtgtgttgttttgggaatgtgtatagcatcttatcaggagctgttggtttgaggtcaatgccatctccactgtcatcccgatcaacagtaaatacaagagtagcttcatgttctccacaacaatagaaaaatccctcctgggatgttctttgggaagtacaagaaaaagccattaaaagtttcatgttgacctttcttgctttacagaggtttgttggcaggaagtgtcttggtt

SEQ ID NO: 802361 - DNA, 535 bp, Homo sapiens
taattatgttcagcttaaatatttatttcaggatggttctaaatcctatctctggtctggtttagtgattttcataatgcttagacatgatgaccatttcaaactgaaaccaagaaagaatatgaatatttctttataaaaataaaaacacttttctttaattaaaataaaaccaagaagtttcatgtgaaaggtcacatttctagctcgtgctgtgttgtcagcatactcctccagccttcttctctctctctstgtgtgtgtgtgtgtgtgtgtgtgtgtgtgtgtgtgtgtgtgtgtgtgtgttgttttgggaatgtgtatagcatcttatcaggagctgttggtttgaggtcaatgccatctccactgtcatcccgatcaacagtaaatacaagagtagcttcatgttctccacaacaatagaaaaatccctcctgggatgttctttgggaagtacaagaaaaagccattaaaagtttcatgttgacctttcttgctttacagaggtttgttggcaggaagtgtcttggtt

SEQ ID NO: 802362 - DNA, 586 bp, Homo sapiens
aacttaggagccatctccctgccatctcaggtggaacgaggtaccctttttctgtgctcctatgaaatactgtgcaaatccccattaatgtacctaactcattaaattatctatgattcttactcccctctttaatgtgagatccayagggctggatttggtcttttttctttatttggaaccccaataacacagtgcttgacccagagggtgctctgtatttgcttggtgaatgcctgccacagaggccatgctactgtacttgagaaaacaaatacatatacacaataaaaataaaacaacttgggctcatctgccttcttttttcctaaaagaaatgtgcttctctataatccccagaaagacagccatcacagcttgcaacagttcttggcaacttattacaactctcatctgaactgtgaaatctggttgaatttacaaatcagaggatgaccttttaaatctcagaagaaaagtagtaaaagaggtaatgactgataagctatatctctatatattgaaaagaggataggttatacatgtgaattaaaaaaaaagaacatttgaaaacatcagagattaa

SEQ ID NO: 802363 - DNA, 496 bp, Homo sapiens
aggaaacctctcccaccggctaaaccagtgagaatcactgtaacaaaaggcctttgttccaaaggctgcaggcaacagaattctccattgtgttcgcaatacctgacctaattgactgctttgtttgaaactgaagaagggagtcctttgakccagaagctgcaatcatccaatcagagccagaaaaaaaaaaaaaaaaagcccttgaggttatcagttcctacacctgttcacacatgggactgaagcagtcatctcattcactggcgatggcaggagaccaacaggagcttttccattacattcctcttagatcctgggctcctttacagtgggggtattaatggtgcaggcccttctgttgttttgcttaatcctaagatcttgctgcaaaacaatttatataatccctaggaatctcaggcaggaaatgtggctgccacccttgcaacacagcggagaattaggcaggagtctctcaaaaaagtaatacaca

SEQ ID NO: 802364 - DNA, 624 bp, Homo sapiens
cagcccgactcggcctcccaatgtgctgggattacaggtgtgagccatggcacccggcccaagttctctctttaaaagaggaagaatagtatggggactcatccaatttcttgtttaactgacaatatgtaactcttacaacacttgcctgtgtgtttctatcataaagtgaggatatggtttaagactgtgaggatacagtctaagactgaacaggcagycttcctggactgctcgggtgacaaagagcaatgatgcccttaatacagcacctcaggatatcatgaatgaggggatggacaggatgatctcccacaatgcttttcacactattattttgtaatttgaattccttctctccccaatctaatctactcttggaaacaagctaatttttctaaaagtgtcttgaccagaaagcattcatgctaaaaatctgccatagcttccacctatctccagaataagaccctccaatttgcaacctcattctacctttgcaattttctaaattttcttcacaatttaattgtattaatagatttataaggtccttatgggccaagaatggtatcccgccactcagcaacacctgacacaaaaacctaacagtgcccaataaat

SEQ ID NO: 802365 - DNA, 596 bp, Homo sapiens
gaaaacacaaggaggggcaggactagggcaggagagtagatggagagagctgtgtcccgaaccaacattcttgagattcctttgctagtgttttttcttcagggttcactgagaagaggaaggtcagatggggagggacaaaacccaaggaaatgaggctcatttcaaactctaacaacttgatcacaaacaaaatgtatgtagaattacaaataagttattctgttttcaggcatcaaaaatgttatcaatgaaatgttgagatgctaaagcagtgaaatgtgaaackaagcagtgtcacaggcaactgggcctctcccctggcccatcccaggagggatgaagggtggctgatatgaactctaaggattattctgaaggggccaacaaatgttacaaagaggctcaaaaataaaaatcagaaccatttttccctcattcatccagggcctactcctggccatgttctgtgctttgcactttattcaatttaattcaatttttctcctaagcaatctatttagatactttgtagatgtggaaattggtttagggaagcttacatcattttcttgcagtcatatttctagtaaatt

SEQ ID NO: 802366 - DNA, 596 bp, Homo sapiens
tctgcctacacgagcaatcacagaaccattaaataagaggattgcttgtttgaactactagatcagcctttccttatttttgctaatctgtgtggtgtacgttcattaccttttttttttatgttaaagaccaccatgcgtaacactacttgacagcagcaatttatagcagtggtccccagcctttctggcaccagggaatggtttgatgaaagacaattttgtggtttggtttcgggatgaaactgctccacctcagatcatcaggcattagattctaataaggagtgtgcaacscagctctcactttcttacatgcggttcacaatagggtttgcgctcctatgagcatctaatgccctgctgatgtgacaagaggcagggctcaggcagcaacactcactcacccattgctcacctactgctgtgcagcaaagctcctaacacgccacagaccggtaccagtccatggcccaggggttagggactcctgattcacagcattacaataaataataaataattaaaatattacctgatatttggcaaacaatccctctctaagtcactacttccagcctatgttcaggctagaa

SEQ ID NO: 802367 - DNA, 601 bp, Homo sapiens
aaagaagttggaggcattgtgcccctaccctagagatctatggaactttgaaccagagagtgatgatttaggatatctggcagaagaaatttctaagcagtaaaatgttcaagaagtgacctggctgcttctagcaacctatgyttgtctttgtgagcaaataagtgatctggaactggaacttatattttaaagggaagcagagtataaaagtggaaaatttgtagcccagccatgtggtagaaaagaaaaacccattttctgggaatgaatccaggcgagttgcagaaatttgcataactaaaaagaagtcaaagttaatggccaagacaatgggaaaaaatgccttgaaggaagcatctcctcctgtcacaggcccagagggctgggagagaagaatggttttgcaggctgggcccagggccctactgtcttgtaaaacctcacaacgctgttccctgcatcccagcagctccagctccagccatggctaaaaggaccccagatacacctcaggctactgctccagagtgtacaacccataagatttgatggcttccatgtgctgttaagcctgtggctgtgcagagggcaagagttg

SEQ ID NO: 802368 - DNA, 491 bp, Homo sapiens
cacaacgctgttccctgcatcccagcagctccagctccagccatggctaaaaggaccccagatacacctcaggctactgctccagagtgtacaacccataagatttgatggcttccatgtgctgttaagcctgtggctgtgcagagggcaagagttgagacttgagagcctctgcctagatttcagagggtgtatggaaatgcctggatgtctaggcagaagcctgctacagtgacggagccctcatggagaacttctactagggcaatgtagaggaaaaatgtgggattgcagcccatacacagagtccccaccagggcaatacctagtggagctatgagaagaggrccactgtcctccagacctcggaatggtagatccactgacagcttgcattatacacctggaaaagccacaggcactcaacaccagtccaggaaagcagctgagggggatgcaccctgcagatccataggggtggagatgcccaa

SEQ ID NO: 802369 - DNA, 491 bp, Homo sapiens
cacaacgctgttccctgcatcccagcagctccagctccagccatggctaaaaggaccccagatacacctcaggctactgctccagagtgtacaacccataagatttgatggcttccatgtgctgttaagcctgtggctgtgcagagggcaagagttgagacttgagagcctctgcctagatttcagagggtgtatggaaatgcctggatgtctaggcagaagcctgctacagtgacggagccctcatggagaacttctactagggcaatgtagaggaaaaatgtgggattgcagcccatacacagagtccccaccagggcaatacctagtggagctatgagaagagggccactgtcytccagacctcggaatggtagatccactgacagcttgcattatacacctggaaaagccacaggcactcaacaccagtccaggaaagcagctgagggggatgcaccctgcagatccataggggtggagatgcccaa

SEQ ID NO: 802370 - DNA, 491 bp, Homo sapiens
cacaacgctgttccctgcatcccagcagctccagctccagccatggctaaaaggaccccagatacacctcaggctactgctccagagtgtacaacccataagatttgatggcttccatgtgctgttaagcctgtggctgtgcagagggcaagagttgagacttgagagcctctgcctagatttcagagggtgtatggaaatgcctggatgtctaggcagaagcctgctacagtgacggagccctcatggagaacttctactagggcaatgtagaggaaaaatgtgggattgcagcccatacacagagtccccaccagggcaatacctagtggagctatgagaagagggccactgtcctccagacctcggaatggtrgatccactgacagcttgcattatacacctggaaaagccacaggcactcaacaccagtccaggaaagcagctgagggggatgcaccctgcagatccataggggtggagatgcccaa

SEQ ID NO: 802371 - DNA, 608 bp, Homo sapiens
ttctattcaggccttcaatggattgcaagaggttcatccactttatagagaataatctgctttactcaaagtccatggatttaaatgtcaatcttatctgaaaacaacctcatgggaacatcagtatattgtttgaccacatatctgggcactgaggccaagcccagytgacacataaaagtaaccctcatacccaccttgagatctgagccaattgagagagagtctcaggtatcaaatagatggagattaacagtagtggtgtttgagtagaggccatggcttggaaacgtgatcaaatggacttcctgctactcaaccttccccatagtaatgaccaatatacagatcgtcacccaggaattttgttatgaggaagagagaaaagtgtgtgcagagggcaggaagaaagcccaagctctgtgcattacacttttctcagtctcattatcccatgtcactaccttcctttggagaagagtgcctgtggaggcacagaggaggctccaagttacttgttacattattctaaaagaagcagaaattccttttaaacaagaccaggcaggtttgtgtggggagagagaggatcactccctaaaatagca

SEQ ID NO: 802372 - DNA, 604 bp, Homo sapiens
attgtcttcctttgttctggtttctgacttctgttctccctctccacatcttccttccattctctttctgatcatgtctatgcatctgtcaagtttatctgctgatagtataatctatgattccaaagacttaagaaggatgtaaataaatactgctgtgccaggcactatattcaccaggtgtttcatataaattagtttaactaaccctaacaacaaccttgaaaacatagcattagaaaataagggaactgggyagggcgtggtgtctcacgcctgtaatcccagcactttaggaggccgaggcgggcggatcacgagatcaggagacttgagaccatcctggctaacatggtgaaaccccgtctctactaaaaatacaaaaaattagccgggcatggtggcgggtgcctgtagtcccagctactcgggaggctgaggcaggagaatggcgtgaacctgggaggtggagcttacagtgagccaagattgtgtcactgcactctggtctgggggcagagtgagactcaatctcaaaaaaaaaagaaaagaaaaagaaaagaaaagaagggaactgaagctgttttccaattaagaagatttc

SEQ ID NO: 802373 - DNA, 616 bp, Homo sapiens
agtttatatgattctaaataacattgatatttataaaatagcatcagggactcatgtcaattattcttgttttcccattcaactactaatgtcctggttctaccccacattgattaaagaatttgcttttatacagtctgtgatatatgtgtgtatgtatgtgtacacaggtgcacacatgtttaatttacttagatgaatatcattttacacatatatatatacatatttatggagggaagtgaggatatacatgttttgtgagaccgtgtgtgtgtgtgtgtgtgtgtgtatttgtgtctgtatctatttctttaacagtgtgctttcscaattatctcaaggtttgaattatatctaagttggtacatattatttatccagttcattcatttttcactaaaatctagtattctataattaatccattccaaaagtatttactgaatacctagtatgtggcagacactcttttagacaccaagaatgcaatcaggagcaaagaaaagtcctcactctcatgaaacttatactctagtcagggaaatcagacaaggatcattgaaaaaacaaagctcagaagagggaagggcataccatacaatgcccttaagag

SEQ ID NO: 802374 - DNA, 600 bp, Homo sapiens
agtatgcatgcagttacacatcctaaattacttggcgaataacttcttaacatcataggctttatactagccttatacacgcacatctttataaggagccaagctttgcagatgacacagcatctctaaggatagaggttgaatccaatcactgcacttaatggaaatctctcaggagtaaagagaaccgtgactatctttggtcatcctttgatgcttagatatgaataatatttagctctcatcctcacaacattcctgcactgtagatttttatattcctgcttgacaaatggcaaaatasacctcagttggtttgatcaacttgtccctggtaaaggtgcaggtagatttgaatctggggctgtgggaaaccaaaatccatgctgcttctgttgctgcttctgttctaccatcatgcctccattaaagaaatatgttcagtgtgtttaactgagaaattcaccaagtggtacagtatgatcattgaatatgagtttttccttttcttaggtcctaattttattttacttttcaattttttatttccataagttttaggggaacaggtggtatttggttacataagtaagttattta

SEQ ID NO: 802375 - DNA, 600 bp, Homo sapiens
agtatgcatgcagttacacatcctaaattacttggcgaataacttcttaacatcataggctttatactagccttatacacgcacatctttataaggagccaagctttgcagatgacacagcatctctaaggatagaggttgaatccaatcactgcacttaatggaaatctctcaggagtaaagagaaccgtgactatctttggtcatcctttgatgcttagatatgaataatatttagctctcatcctcacaacattcctgcactgtagatttttatattcctgcttgacaaatggcaaaatagacctcagttggtttgatcaacttgtccctggtaaaggtgcaggtagatttgaatctggggctgtgggaaaccaaaatccatgctgcttctgttgctgcttctgttctaccatcatgcctccattaaagaaatatgttcagtgtgtttaactgasaaattcaccaagtggtacagtatgatcattgaatatgagtttttccttttcttaggtcctaattttattttacttttcaattttttatttccataagttttaggggaacaggtggtatttggttacataagtaagttattta

SEQ ID NO: 802376 - DNA, 635 bp, Homo sapiens
acatattttcttttcactttgtaaacaaaaatataccccattaccttatacacatgagcttgcataaaacaaccccctagagacacatacattctttgaacatcatcttcaaagtggcaaaaccaaaatgctcattaacatgactmtaagttacagtttctctgtaacatatagaaataataagacgtatatagacatttataggtataagcagacatacacacactaatggtaatcatcatgccaatattatctcttaatgagaagcaacccagatatcccaagattatccaccagttaacttcttgattttacattagctcacgatctgaaacgtaatagaaacatggaaattccatgtcaactgataccttataaagtgtaaaaactgtttatataaaaattttgccaaaattctaactcaacataattacatataattttaaatcttcattttaaacattatgtgtcaatgctatcttgtctcattggtaaaccagtataagaagttttaaggagttcagattaactagcctcttttcaggaaaccaaaaacaaatctgtaaaacaaaaaagtacatcagaactctataattcagagtgataatattaagggagagatatgtaatgctatt

SEQ ID NO: 802377 - DNA, 571 bp, Homo sapiens
cagaagagacaacatggaggtaatgaaaacatgacattagcaaacacgggaaaaaggagttcatgaagtctacatgctgtagccaaaggaaaggaagacaggggctttcgagagtcatttcccatggggagccagtttaaagctttaaagttgcaagaaaacgggccaggcaagacgtggctgctgggtcacaggtggagattagtatgggcgaccacacttgtacattttatttcagtggctagacttccttcaccccaacattctttacacggacccaggagatgagaatcagctttctcattagctctcaggcacaaatcaacataaccactattctaaaagctaatayggtgatcaacactcaacctctaggattcactttttttaaattccaaggatgggtgcataaaagatggcccatgggttgtgaatgcgctcagaaaatggatcaaaccacaggaaatgctgcccaaatcctcagttctggaatgcaaaaacttcccacaagggtagtacacataaaactactccaaaaatctccttccacctgccttcacataattagtga

SEQ ID NO: 802378 - DNA, 544 bp, Homo sapiens
gcttttcaactgaggcaaagacgaggagagaggaaagatatcttgaattcacaactccttcatgattttctgatattagtcagtgtgacaagtaataataacaagagataacatttcctgagtgcttagcacactgttaagggctttatgaaaccaagattctgggaagttggtactaccatttacttccgttttattgtcaatgaaaatgagacttaaagaggttaaataatccaycactgcagaatgaaacactaaagttgatttttctaggtgtctacatgtgctcattggcccctcagctctaagaattcttcttttagcctttttccaactctgcccctttgcccaagggtctggctctttcattaattcctgcagggctgtgttaagacttctatttttcttaaccaaactctatagttacagtaaggataaaagaccttgttttcatcccagtaaccccttctcattaattcaaaccaccacctccctttgccagaccagtaactggaagaatctaggaaacatagggtccatcaga

SEQ ID NO: 802379 - DNA, 544 bp, Homo sapiens
gcttttcaactgaggcaaagacgaggagagaggaaagatatcttgaattcacaactccttcatgattttctgatattagtcagtgtgacaagtaataataacaagagataacatttcctgagtgcttagcacactgttaagggctttatgaaaccaagattctgggaagttggtactaccatttacttccgttttattgtcaatgaaaatgagacttaaagaggttaaataatccaccactgcagaatgaaacactaaagttgatttttctaggtgtctacatgtgctcattggcccctcagctctaagaattcttcttttagcctttttccaactctgcccctttgcccaagggtctggctctttcattaattcctgcagggctgtgttaagacttctatttttyttaaccaaactctatagttacagtaaggataaaagaccttgttttcatcccagtaaccccttctcattaattcaaaccaccacctccctttgccagaccagtaactggaagaatctaggaaacatagggtccatcaga

SEQ ID NO: 802380 - DNA, 612 bp, Homo sapiens
tccccactaatattcttcaagcctggacatagttttctctcttaactctccagaaaaacaagaaaagacgtaaaaggaagcctcgggaacccccagggtattcactcccttataggaaatggctcaatcccagcccctacattcaaccattcgtggaatagctttctttatttttagtccacaacttaattttttgagctgctcaaaaaacaaaaccaaaaaaacagtgtagactgttcaaccattcatagtcccatgtgggagacaataagtaaaataagctaatggaaggaggagacaacttctaaaagtcacctttacaacatagcccagataaaaaatactcaatttacatgagcaaacagcagaatctggatggcaacagakggaaatgtcaaggtttcctcctaagaatcatagataactactagtcttccatttacagagcttaaacgacccctttaaagaagacattcagcttcgaaagattgtaggttattttctacaggaacttaaattaccggtaacttccaccctaaaaaggcaattctctgtctatatatttgaaaatgttatttcttcttccccaggcaccccactatggagtttatt

SEQ ID NO: 802381 - DNA, 526 bp, Homo sapiens
attttattcgacaaggtaaattgtctcactatgtgattccaatgaaatccttttcctccttggaacaggtttttaaaaaaaaaaaaatcagcaaaagagaagagtaaaactgttataattaagtttttaaaaaaaaaattatctctggtttttatgttttcatatgaaccctgggagggaaatctgtcttcttgccaatgggatagtacaatattggtgtgaccattggcagtgttgtctattgcttcatttgccatcagggttgatttggctaatcgggttgactaatcctygtttcccctccgtgtgtattttaacagaactagtgggctcagatggacaatctttccaggaaaaggaggccggttctgaaacaagtaaatcagaaagtaaacctccagataattcctacattttgcacttgttgacagaggcgtttctgccctaagatgagttatcatgggaatcttctcctctttctttcctgtctcaatcatgggtttgaattcaaatatcaaaatcctag

SEQ ID NO: 802382 - DNA, 526 bp, Homo sapiens
attttattcgacaaggtaaattgtctcactatgtgattccaatgaaatccttttcctccttggaacaggtttttaaaaaaaaaaaaatcagcaaaagagaagagtaaaactgttataattaagtttttaaaaaaaaaattatctctggtttttatgttttcatatgaaccctgggagggaaatctgtcttcttgccaatgggatagtacaatattggtgtgaccattggcagtgttgtctattgcttcatttgccatcagggttgatttggctaatcgggttgactaatccttgtttcccctccgtgtgtattttaacagaactagtgggctyagatggacaatctttccaggaaaaggaggccggttctgaaacaagtaaatcagaaagtaaacctccagataattcctacattttgcacttgttgacagaggcgtttctgccctaagatgagttatcatgggaatcttctcctctttctttcctgtctcaatcatgggtttgaattcaaatatcaaaatcctag

SEQ ID NO: 802383 - DNA, 647 bp, Homo sapiens
gatagaaatgatcctttcttaacagaactggcattaaacaaataattacaattcctaccaagtgggaaaatacaggatccgatagggagtaaacaaagggagttcagaaaagtcctatcaggaaagtcacctttaagatgtaaagatgcccagtagttaagtgataaatagggacacctatgtttctgcaagacaacacagcatgttcaggaaactgaaggaagacttgatggctacaccaagtgaacaaaaagcagagcatttgaagaaggtggacagttttgtggggcaggaatactgagtgtcccacactgctaattgccatggaggtcaggagatgtatgatcagaattgagttttcaaagaaaaattactctacttctgcatggtctcctttacagaagggagtgggttaaaatggtcaccaggagtctaattattaggccattgcaagtcatctgggagagaagcagtggtagyatggagtaagattgtggcagtgggaacaaaaacaagtggatgtatggcagagctgtctagaaggcaaagccaacaacagtggtgtttggctgcaagagaaagagagggaatggtcaagggtgacaacccagatgattgacaagtgggaggatggtgattaccaatcc

SEQ ID NO: 802384 - DNA, 523 bp, Homo sapiens
cactctaaagcaagagggtcagggcaatcccccaaaactggtggttgtcaagaatacatgatttgggatgtagttttccaggtaggctgatgttttcttactgtctaggcactgggtaatttgtgtcaagctttatgtgaattgggaagtcatgagaacctgaaagatggaatcaaagcaaaagtagccctgatgagaaaaggctactcttttcctgataagttagagccacaagggagctatgaatctcagagtcacacctccatgttagtcacctaagtggactacagggagaatcactggggcctttagccatgaaagagatacatcaacgcagtgmtcagagcatcagggatgcttggggggcatcaggaaaggaaggctgtgcagagaacaggatggagaggataaaggagggcattgattctgactacttcaacaagaggcctgccatccccactgataatatgagcattacccccatggcccgttcaaaacgtcatggcgatagaggtttaggggg

SEQ ID NO: 802385 - DNA, 552 bp, Homo sapiens
cagggcaatcccccaaaactggtggttgtcaagaatacatgatttgggatgtagttttccaggtaggctgatgttttcttactgtctaggcactgggtaatttgtgtcaagctttatgtgaattgggaagtcatgagaacctgaaagatggaatcaaagcaaaagtagccctgatgagaaaaggctactcttttcctgataagttagagccacaagggagctatgaatctcagagtcacacctccatgttagtcacctaagtggactacagggagaatcactggggcctttagccatgaaagagatacatcaacgcagtgatcagagcatcagggrtgcttggggggcatcaggaaaggaaggctgtgcagagaacaggatggagaggataaaggagggcattgattctgactacttcaacaagaggcctgccatccccactgataatatgagcattacccccatggcccgttcaaaacgtcatggcgatagaggtttagggggtatttctggatggtgcttagggcagagacactgtctttaccacttcat

SEQ ID NO: 802386 - DNA, 587 bp, Homo sapiens
cagagcaagactctgtctcaaaaaaaaaaaaaaaaaaaaacctttgcatctaaatccttattttgaatagctagtgcacaatatttattcaaatataatttttttaaagatcataaatataactcacccaataaagatatagaagaatttggcaccaaaagtacaagtgacaattttatgatagggtaaagagtactcactgttagaaaatggtcactaatagttccttagtaagtaaaacctctgaacggcagttcagagaaatctgcaaatggcactgagaaatataagcaaaaatgctcattttcactyataagataaaaataaaagctaccacgagatatcatggtatctcactatcagactggaaaaaacccaaaagctgacaacaaatcttgactgagggtgtggacagacacacacacatatactgctgctggaaggccaaatatgacaattcctaaggaggggaatctgttaatatctaataaaattatgtatgtatttacccttgatccaacaatcccacttctaggaatgtgtcctagagacacagctccttaaacatgaaacagtatacagttatt

SEQ ID NO: 802387 - DNA, 577 bp, Homo sapiens
caggggctgaagatgaggacagagttgttatcagggagcacaagtaaggacataaaggcttctccagaaactgccaaacagcagctagcgctgctctagggatacctatgggtggacagcacaaaagattaatagcactttataacttgaggactccactgtcagttaagcatgtcactttacatctctgtgacttttttcaacttttagaatagacaaataatgagagacttaattataactatagcatagaatgtaaatattattaaccttgacaaaataaagcaggctgggagacagaatcaggaagaatgggaatggtatttccatacaacttacaatgtgcagagtcaaaaggcactgcctcagattaatgagacaagaaaaagaaayagaaaaaaagtgtttagagctggagttgcagaggtgatcaacagtagaagtggaataataagattacaaatacatgtggggggatagtagagtaaacaaaatcatcacccacagtaataccaagtcaacagataatatcttaggttgataaataaactgaggtgtaaacattttagacagaggt

SEQ ID NO: 802388 - DNA, 635 bp, Homo sapiens
tttgcctgtctattagactgtaacttctgaaaagttcattattgccaatatctggaaaagttcctggcttataaaagcctaaacatttgtttcataagttaaatgtaaaccaaatgcctaacatgtaggaatgccacaaatattgacatgaatttagcaaccctactgtccacatacactgaaagttaagtatgygttcatgtgagttgggggagaacagcagcaggaacagggagaaaagagaacacagtgccttagccttgaaacttaaaaacacagtttttcctcactcttcagagattagagagctgttccaagctaattcaacaaaaaagaagaggctgtttccacactggcatctgagaagcagtggtaggatagctctctagaatctcagctcctctgctatttgtgaccactgttgccaacctgctcaaagaagaaaaggtggcccagcctttctggggtctggaaaaagacaaactagtccaaagacaggaggccctcagagacaaaatatactttttagaaatctaaaaaaaaatacctatagtttgaatagcacttgtgacagtcttttaccacaaagagacaacgaagtagggaaagttaatcgtaattacatgctcatcccc

SEQ ID NO: 802389 - DNA, 635 bp, Homo sapiens
atctgcatgatatttttgctccaaactgggacggggaggactaggtacattgaccaccgccctggccaaccccaacagtaaaggaagtgtctatttctcagttccactgtattttgggttggatctttttgttgatgacttgccactctttcaggcaacttcagaaatagtgtagtcactgtagagtctggtagcatctattctctcttctgctaaatgaaaacacatgacggcctggttgctaagtaatacaagtaatgcatgttgatgtaaacggtggtcgagaggtggagttggggtgagacacaaatggggacatgaccttgaaggctctggagagtctcccaggtgggggtgggggctaagttccctctcgcttctgtctcrctttcagatgcccaccctcactcaaaaacatcattaggtttgcagcaattacccaaggactacacatcctttattattattattacgaaatacagacaagcaaaggagaaaataaaaaccacctttaatctccacccagagatacttattaataacggtttggcatgtatttttccagatgcaaaaatgagatcatattatccatgttgttttgtggtctgcttttggcatttaaaatataataaata

SEQ ID NO: 802390 - DNA, 592 bp, Homo sapiens
ctggcagcaaagcattagcagtgaaacagatccagacccagtggatgtcaaatgagggagattcctatctctggtcttcagaataccatgattttggtttgcttggaagtaaaacaaaaagagataaataacagttatagtttgacarttataacagtaatttgtatgttagaacagaaaaaggaacctgttccattagggcaccaactgaaaacatgaagaaaaattataatcaggtactttttagaggattattgtagccaagaaataatgatttcatctgtatgtaaaaagttagggttgaaatgtagtattaagtgttacactttgcccttcaaacaatttttttgctgccttttttattaaagagaattttatagccaggccaatttgtgtgcaatgctagttttaggcttattatgcttgcctgatgatttgcataaaatgcagcaagaaatcgactggccatatagacttcttttaaagttgattttgctgaaactttacctaaaaataggctatactagtttcagtcttggtaaaataaccagtgtcaccaattgttaggaaaaaaaaaactattattgaactt

SEQ ID NO: 802391 - DNA, 574 bp, Homo sapiens
acttcatgctaactgctattctacagacacaatgataaacaagaccaataacttacaatctagtgaacaggcattatcaccttctcactcctgcaaagctgatattaaaaccccatcttggtcatccctgagcactccaaggtctacaaaccaggtagagatgctaggacgggaactaaatgcagaaaacagatcagagttgccagggggtgaggggcagggtggacaactacaaaagagacgcacaggacaatttttagstgaatgtagtgttctacatgtactatggtgatggatacatgcttctatgcattttcaaatgccattgcaatgtatctcacaaagaatgaagttcaatgtaggcaaaaatgttaaaaatcaaccaggaggtcatggaatctcaggaggtaatgcagacagtgataaattgtattacaaatgtatcacataatccagttagcagcaagcacaccaacaccagatattggcttctaaataccattctctgacaaaagaaaccagagcactggagaaatgtttgattctagggctgggacagggaaaatgcaaaatg

SEQ ID NO: 802392 - DNA, 558 bp, Homo sapiens
tccatcatgtataagggatcctcaagaatgttaactttctcatcagaatccatggaatcgggaaggcaaagggtgacatattcaaaattctgaaggaaaaaaaaacactatcaaccaataattttacattcagcaaaactatccttaaacatgaaggtgaaattaagacatcaagataaacaaataagctgggtgcrgtggctcacacctgtaatcccagcactttgggaggctgaggcgggcggatcacaaggtcaggagatcgataccatcctggctaacatggtgaaatcccgtctctactaaaaatataaaaaattagccgggcatggtgttgggcgcctgtagtcccagctacttgggaggctgaggcaggaaaatggcatgaacccaggaggcggagcttgcagtgagccaagatcgggccactgcattctagcctaggcaacagagtgagactccatctcaaaaaaaaaaaaaaaaaaaaaaagataaacaaataatgaaagaatctgtcacttgcacctaaactacaagaaatactaaagggaatccttc

SEQ ID NO: 802393 - DNA, 599 bp, Homo sapiens
gtctcaaaaacaaaaaaacaaaatttaaaaaataaattaaaaccaaacactatcttatacccaataaaaaataatatgcaaagtccataaaatgattatatttattgtcatggctacccatgtgcccatgtgtgaagcttctactctgactggctccttttttttttttttttttttttttttttttttttttgagatgaagcctccctctgttgcccagactggagtgcaatggcatggtcttggctcactgcaacttccgcctcgtaggttcaagcaattctcctgcctcagcctcccgagtagstgggactacaggcacgcaccaccatgcccagctgatttttgtgtttttattagagacagagtttcaccatgttagccaggctggtctcaaactcctgacctcaggtgatccacctgcctcgacctcccaaagtgctgggattacaggcatgagccaccacacctggtcccgactggctcttcaggctctaaactccaccacaatccacaacacaagtaccagtcatggcagagatgggatttgcatctttgagctctgaccacagagcccacaccaataacgactgccctaa

SEQ ID NO: 802394 - DNA, 555 bp, Homo sapiens
aatcttagaattttagaaattgaaatgttctcagagaccatgtggtccagatctctcattttacaggtgaggcaagtggtccagtgactcatctgtgctcactgcatgagagccatgcaagctctagagagcacacacagagtgagagagacaagccgagatcctgtccccgtaggcactagygtatccatggtttggtacaacattgggtgtcatcctggttgtcccaagcctcagcagccggtggatgtcaataaggtcacattattaataaaaataagaatgaataggccgggcgcggtggatcacgcctataatcccagcacattgggaggccgaggcgggtggatcacctgaagtcaggagttcaagaccagcctggccaacatggtgaaaccccgtctctactacaaatacaaaaattagccaggcatggtggcaggcacctataatcccagctactcgagaggctgaggcaggagaatcgcttgaacccaggaggcagaggttgcagtgagctgagattgcaccattgcactccagcctgggggacaa

SEQ ID NO: 802395 - DNA, 555 bp, Homo sapiens
aatcttagaattttagaaattgaaatgttctcagagaccatgtggtccagatctctcattttacaggtgaggcaagtggtccagtgactcatctgtgctcactgcatgagagccatgcaagctctagagagcacacacagagtgagagagacaagccgagatcctgtccccgtaggcactagtgtatccatggtttggtacaacattgggtgtcatcctggttgtcccaagcctcagcagccrgtggatgtcaataaggtcacattattaataaaaataagaatgaataggccgggcgcggtggatcacgcctataatcccagcacattgggaggccgaggcgggtggatcacctgaagtcaggagttcaagaccagcctggccaacatggtgaaaccccgtctctactacaaatacaaaaattagccaggcatggtggcaggcacctataatcccagctactcgagaggctgaggcaggagaatcgcttgaacccaggaggcagaggttgcagtgagctgagattgcaccattgcactccagcctgggggacaa

SEQ ID NO: 802396 - DNA, 555 bp, Homo sapiens
aatcttagaattttagaaattgaaatgttctcagagaccatgtggtccagatctctcattttacaggtgaggcaagtggtccagtgactcatctgtgctcactgcatgagagccatgcaagctctagagagcacacacagagtgagagagacaagccgagatcctgtccccgtaggcactagtgtatccatggtttggtacaacattgggtgtcatcctggttgtcccaagcctcagcagccggtggatgtcaataaggtcacattattaataaaaataagaatgaataggccgggcgcggtggatcacgcctataatcccagcacaytgggaggccgaggcgggtggatcacctgaagtcaggagttcaagaccagcctggccaacatggtgaaaccccgtctctactacaaatacaaaaattagccaggcatggtggcaggcacctataatcccagctactcgagaggctgaggcaggagaatcgcttgaacccaggaggcagaggttgcagtgagctgagattgcaccattgcactccagcctgggggacaa

SEQ ID NO: 802397 - DNA, 506 bp, Homo sapiens
attgttaagtcacaaaagcttgaaacgtaccttaaaatcgataagggagaataaaacaccttttttcaaccagccaaaaataccatcttggtgattctcctgccaatctttttttatttcctatatgcagatttggggcctgaatatttagttcataccacgcygtaccatagatgcttgttttcacttcaagggagcaaagagagcatgtaatttagactctaaattgacgaagtcccaaaggccttttcctaaagtaccatttcctacctgacgttaggtgccctgatgatgataatgctgattcacatgcgagggcgctggcattgttcccactgcccacaccactgcctttttaacaatcacatcatcccaggagccagctcccaggagtttctttgtccgagtgaggaaactgaggcttagcaaggtcacactttttgccgctgctctgttctgctgcccacagctgccacagatggtcttccgggaccttaaacacagat

SEQ ID NO: 802398 - DNA, 614 bp, Homo sapiens; identical to SEQ ID NO: 802300

SEQ ID NO: 802399 - DNA, 644 bp, Homo sapiens; identical to SEQ ID NO: 802301

SEQ ID NO: 802400 - DNA, 557 bp, Homo sapiens; identical to SEQ ID NO: 802302

SEQ ID NO: 802401 - DNA, 597 bp, Homo sapiens; identical to SEQ ID NO: 802303

SEQ ID NO: 802402 - DNA, 562 bp, Homo sapiens; identical to SEQ ID NO: 802304

SEQ ID NO: 802403 - DNA, 668 bp, Homo sapiens; identical to SEQ ID NO: 802305

SEQ ID NO: 802404 - DNA, 598 bp, Homo sapiens
tgattttttatttcgtatcctataactttactgattcattaattagttctaactggtttttggtggagtctgtagggttttctatatataagatcacgtcatctgcaaacagggatggtttgactttcttctttccaattcgaatgctctttctttctttctcttgcctaattgctctggctaggacttctattattatgttgaatagaagtagtgaaagtgggcatccttgccttgttccagattttagaggaaaagcttccaactttttcctgttcagtatgatgttagctgcaggtttgttatacatggcttttattatattgatgtatattcattctatgcctaatttatgtaggatttttatcatgaagggatgttacatttcattatatggtttttctgtatctrttgagatgatcagagggtttatgtccttcattctgttaatgtgatgtatcacatttattgatttacttatgttgaactatccttgcatccctgggatgaacaccactcgatcatggccgtcagggaaatagatatcaaaaccacaggaagatatcccctcatccccattagaatggctattatcaaa

SEQ ID NO: 802405 - DNA, 638 bp, Homo sapiens
taaggacatgccgggaggaaataagcacagaatcacagaaactgtgcttttctccaacgatgattttgatggcttcagtatttaaagggaacaggtaggctggagggcaaagagggaggatatggtaatccatatattgccagagaaaaggagcaggcaggggaatagtcagttaggtaatagtaaatcagtaaagtgctcagtaagtcggcactttacataagataaaatggaacataaagtagcctgtagaggtgtttgaccttttatttgtagctccctgcttaggaacaaagggactcagctttcagggactcagctttcagcttacttttctaccttttgcatagtgaattgaagtcctgcgtttttattttcctttcacagtagatttcaagattactttgtagttccttttgtttttaaacagagracatataaagtactatgtgaagttacttggactaggcttttttttctacctcttacgtggatatgttagttatttataatatgattaggtttattttcatttttatttaatttagatatgcctcctcatctttgtggacttaattttattatttaaatacataacagattaaaaaggttctaaaaaccgaaactaacaaaaaggt

SEQ ID NO: 802406 - DNA, 605 bp, Homo sapiens
tctcctttttcttttccccacagtgtcccaccagtggcagagtgggctgttcctcagtcatcaagactgaaatacaggcaattattcaatagtcatgacaaaactatgagtggacacttaacaggtatttacaaataaaaattagtgaaatatgatmtttgttttcaatgtaaactgtttctagatattgggtcatagatattttccatgtctgtgtgcttatttcttggcagtgtttcctttgtctctgttatctcatgttcttatccactgataactctttacatagttatatcattctctcatgccccattgctttgtggtaaaatggaatatagaccagggatactcctgtacgctgaaagccactgatatgcaaatcaaggcactagcaaagaaacacttctttgaacaaaaactagcttcaacttctgaagtccagctttgaacttgatgaacttgaagctgtctgttcactaggttagagttggaggcagcaggcagggtaaaagcagggagttgagaacatggctctgtctcagataactgcctagatagggctcaccactttggatatttctttatctattaatataaaaggccag

SEQ ID NO: 802407 - DNA, 555 bp, Homo sapiens
cggagatccgtgtggcggacatcaagaaagaccagggctccaaaggtccagttacgaagtgtcttctgctgcacgaagtccccacgggagagattgtggtccgcttggacctgcagttgtttgatgagccgtaggcagcgggctcagggtgtgctcagcagggtcccagcccacggccacacatgctgtctggaaattgtattccttttctaagaaaccaccatttggtattcagtcacagggatatgggatggcaaagacaggcccctcaaagctcctaggaatcattctcgacaatcctccctgccccgaaacaatttcctgtttcatgaaacaaagctgtgttttcctttgtcctcactacaggtytcattatggcttctagggtcgctgaaatcccatagccctcaacagggtgcagctgggagtctagccccttcccgggcttgagggatgggtctggttactataaaatagatttataaatgcaatgtctatatttttggagaactcatgtaaccctcctgtttcttacatccaccagtccccaagtag

SEQ ID NO: 802408 - DNA, 514 bp, Homo sapiens
cttgagtgtgtggtttgtaaattgactccaaagctaaaagaggtggttgtttggtcacgtttaagattattgcgtactactctttgcaggccccgccctgtgtcattgaacttatgacttgaagccctgagtataggagataatttttcttgttccttgtttggttttwgtggcaggtggttttttattttattatttttttgatagagtgcccatatatcctgctgtttacatatagttccagaataagtttctggtttggaagataaattatatggtcacccagacagtactagagagatctggtcatgataactaattacattttggttaacatggttatatcacctgaaggagtgcttatttaaatttggtcttacctttttttctctttctatttggtcaaatgcagcaaatatttatatttacacttctctatttggattaattcttcagttgcaatttaatttatccagatgcgtggaatagaaccaaaactgcattctaattctgt

SEQ ID NO: 802409 - DNA, 549 bp, Homo sapiens
ccacttgaatttaagcatcactgcagttggcctagttgatggacatgctttttgtctgttgttgagcaaattatgcaaatctgacttttttgtcaaagtccatgtttgtcattctaggaatgtatgattttaagaacttctcttaacccagtccaccaggtgatatttttgctaaaccttacatggatatgtagaagattcattttcttataaaccttttgtctctaccatctaaatctttggttgactgttccctcccctggttttcttgtcactccagtgctgtctcccttctaccctgtgaagaggttgaaatataaggygaaggcagggaactgaattgtgcatgaaggcatgcaatcaataaggcaggtggctcagtaatgcctacctgattcctgctcccactatccatttcacaagcttaggcatttcctttacttgctgtcatagtaaccaggactcctgccagtcttcccgtttatcttttatctgtgagtgcatctgaagggggatggggagtatagaaatggaaacctctcagcaaga

SEQ ID NO: 802410 - DNA, 609 bp, Homo sapiens
tagtaggtgtgatagtcctttgaaaactaagttgccgcaggcatacaggacaacataagaaataacaatagttctgtctctttgaagtggctcctagagaagttggtgaatgaaaaagttccaagtgcattgtacttgtgctctgttctctttggttttccctgaattttcgtgactgcatcgtccatacaaagggcattgagaaatmcacacagttgtgttccttttttaatttaattttatttttttgagacagtttcgctcttgttacctaggctggagtgcaatgacgtgatctcggctcactgcaacctctgcctcctgggttcaagcaattttcctgccttagcctcccgagtagctgggattacaggtgcccgccaccatgcccagctaatttttgtatttttagtagagacggggtttcaccatgttggtcaggctggtctcaaactcctgaccttaggggatccacccactttggcctcccaaagtgctgggattacaggcatgagccaccacatctggcctgtgttctctcctttgcagagtctttaagacagttgtggcagtttgtctgaacaccttttcatcatgtggcaaaagaga

SEQ ID NO: 802411 - DNA, 556 bp, Homo sapiens
caacactggctgccatattggaaaggaacaaagcaaccacaggaggaaatctgagctgtcctatacaggctattaaaatacgagctaccctaaagggaattgaactttgaataaatagactcaatgtttaaattgaaaggaggcagtttaaattggaaaaaccctgaactattgtcaattggccaatcttagtagctcctactgcccagcaggctagcgtctcatgagaaatatcagatgaagctatagagacaataaagaatagtttctttgaatctctgagttgtaatgtgaataaattcacggtctccatatatttgcattctgtgtctcctctcccccascaaacattttggatcggattccaccctcctgcaagcttctctgaaaagtggcaactgcctaacctgtgttgctgttcatacttagtgttgtcctaggctaaggtgaaaaaattggctggttatggggctctattggaggtttctattttcccttcgctgacaaaggttagacaggataactgaaagcctcactattagagtcacatattcct

SEQ ID NO: 802412 - DNA, 574 bp, Homo sapiens
ttttcagaaaaagccaaggtcaggttccactagctacttcaacttttctgtttcatatatcatagtttttctagatctttccttccctttttcttttctttctcttttatctcagaagaaggaaagaggagtatgtgtcttcatctccctkcagacaagaccctaacctatgtgttggtctcatctgctcctttctcatttggaatctttctccaataattcgtttcacttattcaaattctcccctctactgccttcttctactttatctgcaaatgcctctagctttcccttcatacctcaaacttggcttgtctaaaaatgcagttatgttttacctaacaaaaccagtccatctttccagtgggagaaggttctaagcaactgagaccaaactttggagttatttttgattcatctgccttctctgcatgtctctgcattcagccctcttttccatgaccactgacaaatttagctcaggtccccattatctcacattgggaataccaatgataatgacaattgtttatgaagtgtttactcttggctgggcactgtgctgcatacttta

SEQ ID NO: 802413 - DNA, 635 bp, Homo sapiens
gtttgcgaacagcacccgtgggtcactctctaccacatctggtcctggggtttctcagaggatgtggtcaggagcctctgtctgcacagctacctggcctttcttcaggatccgagcctgcacagtgtgcatcacagggctccatgggagcacaaacacagttcaccttctccccatctggagcggctatgctcatttgctagtagcagcatttcccacttccctcctttcctccttctcttcctccttccctcttgcctctcctacttactgagcttctarcgtatgccaagcactatggctgagacggtcttattctcaaggcgagcccactgaaaggaggtcaaacctacagcccggagaattgatgactaggggtgagaaagaagcttatgcaaagttaaagtgttttttatttcatttagatgtatatttttagagacaagctctcactctgtcacccaggttggagtgcagtgttacgatcatggctcactgcagcctcaacctcccgggctcaaacaatctgcccacctcagcctcccaagcaactggggttacaggtgtgtgccaccgtgccaggtgaaagtgtttttcaaaaggcatttaacataggaagattggtgactggactt

SEQ ID NO: 802414 - DNA, 635 bp, Homo sapiens
gtttgcgaacagcacccgtgggtcactctctaccacatctggtcctggggtttctcagaggatgtggtcaggagcctctgtctgcacagctacctggcctttcttcaggatccgagcctgcacagtgtgcatcacagggctccatgggagcacaaacacagttcaccttctccccatctggagcggctatgctcatttgctagtagcagcatttcccacttccctcctttcctccttctcttcctccttccctcttgcctctcctacttactgagcttctagcgtatgccaagcactatggctgagacggtcttattctcaaggcgagcccactgaaaggaggtcaaacctasagcccggagaattgatgactaggggtgagaaagaagcttatgcaaagttaaagtgttttttatttcatttagatgtatatttttagagacaagctctcactctgtcacccaggttggagtgcagtgttacgatcatggctcactgcagcctcaacctcccgggctcaaacaatctgcccacctcagcctcccaagcaactggggttacaggtgtgtgccaccgtgccaggtgaaagtgtttttcaaaaggcatttaacataggaagattggtgactggactt

SEQ ID NO: 802415 - DNA, 549 bp, Homo sapiens
ctcatgggcagcatgaccaataggtgtagacctattgcaactggtgggtaactttttgcttaagtcagcttgtaatggctgtgttgtgttctctggctagaagggtagataagggataagttaccctgaacctaaagcacgagaactggccccaacaaccaagagtccagatcacgctatgctaaagcccctcactccaatcttcagtcccctggtacctccctatgacacaggtggctcacagaaccatcactggggacagactgctgggtggcatgctgctgcagggctaagaatcgcgtttttaaaggttagttcatttaattaaaagcacagcagggtgctgcctactttcattaagaaaggtcatyttccccagcatattctaatggaaaccagggcagcattcagagataggaaccatcacaagttgattttgctctcttaaggtaagatacggcaaagaatgaccagccacctcctagcagggtgctgaggctggctggtgcagtaggtggagatttagcagatgacaatgtatttctgaaa

SEQ ID NO: 802416 - DNA, 602 bp, Homo sapiens
ttacccaggttggtcttgatctcccaacctcgtatctgcccacctcggcctcccaaagtgctaggattacaggcatgagcgactgcgcccagccatttttggatttttttactagacacagggtttagccgtgttgcccaggcttaaactcctgtcctcaagtgatctgctcgccttggcctcccaatgtgctaggattataggcttgcgggattacctggcctgcaagtatatttttgaaaccaccttactgaggtacaactgacatacactaaacatattaaaactgtacaatgtgatgtttcgagagagtgagcatatccttcctcctgsaagtatcttcctgcttctatgtaattcctcccatccccacctccactcccactgtaccccaatctgtttcctgtcactattgataagttgagcaagtatatatttaatctttaagagcttcctcgctttctgttcccttttcataaatttcctgctttttaaagtattgctttattatcttatatctctctggagttttaatttgattaaaatattttttggtccccggagttattctctgcagcctccaaaacagtcttactagttta

SEQ ID NO: 802417 - DNA, 604 bp, Homo sapiens
cctctgataatgcctagtatagattcttcaggattttctaaaacaggtgatctttggtctatcattctctgaactcctgtcatattagtaaagaaaaagtttttgtgagagttataaaggtattcaaatcttctaaaattttccagcattaattttgtttttttttttctgcctgagtgttgatttataaagtgggccctatatctgggcatagttgggggagacattttcttcacaatatagagagtttccaaaagaccacccccatgctttttgtcagcccttttctcctccccacagggagatggtatccaagtccatcttcrgctaaaatccgtgcttgtattgacagccccacttcctccttctgaaagcagcattttaatttggagctgttggtgcttaggtataaaatctatttcatttaatgctgctatgaaaatttcccagttttgaatttaagacagtctcttattgttttttcctgctcttgcatgggggaccatctgctctgccaagctttcaaaactttgctctcaagttaggtggcaaatgggctaacaatttggtatatgttaagagcttgttataaagaatacttttg

SEQ ID NO: 802418 - DNA, 606 bp, Homo sapiens
agctccattttctgtcctaaccactgtttgtactttgcactttccacctgcttctgatatgtgttctcttatcaccatggattccaaaccttacagagcagagctgggtaaaacaaacaaacaaacaaataaacaagccaactcccatcactctgaggaaggaccctgctggccctggggtcccctccatttgtccagggtgggaatgagagaaggatcctagctgactgcctgggttcaaatcctgctttgtgaccttggacaagtttctctacctctctgtgtcttggttttcttaaatggagacagtagtagtacctacacctgatagggttgttgctaggattaaatctgagttgatacaagtgctcagaaccatgagtagtacagagcacatgctccatatgtgttagttgctatcattatcactttcatcattaccattattattttgcaacatarccattttgctcatcatcacatttgtaaaagacagaactggaatctgcgatcttcttaaggcctcaggtgtattattttgagaaatgcatgtaattatgtatctcctttttagaatgagaattgggggcatgttccaaggtggca

SEQ ID NO: 802419 - DNA, 633 bp, Homo sapiens
agatacataaattccctcatttgtcatcatcaggagttaacaggcagcatctaaaattagtaaatcaaggccgggtgcagtggctcacacctgtaattccagaactttgggtggctgaggcgggtggatcacttgaggccaggagttcgagatcagcctgggcaaaatggtgaaaccccgtctctactaaaaagacaaaaattagctaggtatggtggtgcacacctgtaatcccagctactcgggaggctgagggaggaaaatcgcttgaacctgggaggtggaggttgcagtgagccgagatcctccactgtactccagcctgggtgacagagygagactgtctcaaaaaaacaaaaaaaaaaaaaaaaaacttgataaatcaagaaatagagaattcctatatatttaaatttatgtaggaaaccactggagaattaacatgaccataaaccttttaaatgaccagaaagagggacacacacatgcatacagaagaaagaaaaccaagttcagtgtcacgttcataggcatggccttaaacaatgtactcaggaatgttaaaataaaaagatgggcaaagaaaaaccaggtacatacaaacaaaagtaaaacggacttcttaacatgagc

SEQ ID NO: 802420 - DNA, 576 bp, Homo sapiens
agttattttcttttagcactttgaagatgccactccattactttctgacttctactttttctgtttagaagtcatttgtcttacagttgctctttgaagataatatgtcttttttcttttctctggctttaacagttttttctgtctttggtttccttttttkctttctttctttcgtttttttttggagacagaatctcgctctgtcgcccaggctggagtgcagtggcgctatctcgactcactgcaagctctgcctcccaggttcacgccattttcctgtctcagcctcccgagtaactgggactacaggcgcccgccaccacgcccggctaattttttgtatttttagtagagatggggtttcaccgtgttagccaggatggtctcgatctcctgacctcgtgaaccgcccgcctcggcctcccaaagtgctgggattacaggcgtgagctaccgtgcccggccatgtttttggttttcaatgcagttttactatgatgtacttagatgtagttttcttagtacagtcatgcatcatataaccatgtttcagtcaatgacagaccacttaca

SEQ ID NO: 802421 - DNA, 576 bp, Homo sapiens
agttattttcttttagcactttgaagatgccactccattactttctgacttctactttttctgtttagaagtcatttgtcttacagttgctctttgaagataatatgtcttttttcttttctctggctttaacagttttttctgtctttggtttccttttttgctttctttctttcgtttttttttggagacagaatctcgctctgtcgcccaggctggagtgcagtggcgctatctcgactcactgcaagctctgcctcccaggttcacgccattttcctgtctcagcctcccgagtaactgggactacaggcgcccgccaccacgcccggctaattttttgtatttttagtagagatggggtttcacygtgttagccaggatggtctcgatctcctgacctcgtgaaccgcccgcctcggcctcccaaagtgctgggattacaggcgtgagctaccgtgcccggccatgtttttggttttcaatgcagttttactatgatgtacttagatgtagttttcttagtacagtcatgcatcatataaccatgtttcagtcaatgacagaccacttaca

SEQ ID NO: 802422 - DNA, 576 bp, Homo sapiens
agttattttcttttagcactttgaagatgccactccattactttctgacttctactttttctgtttagaagtcatttgtcttacagttgctctttgaagataatatgtcttttttcttttctctggctttaacagttttttctgtctttggtttccttttttgctttctttctttcgtttttttttggagacagaatctcgctctgtcgcccaggctggagtgcagtggcgctatctcgactcactgcaagctctgcctcccaggttcacgccattttcctgtctcagcctcccgagtaactgggactacaggcgcccgccaccacgcccggctaattttttgtatttttagtagagatggggtttcaccgtgttagccaggatggtctcgatctcctgayctcgtgaaccgcccgcctcggcctcccaaagtgctgggattacaggcgtgagctaccgtgcccggccatgtttttggttttcaatgcagttttactatgatgtacttagatgtagttttcttagtacagtcatgcatcatataaccatgtttcagtcaatgacagaccacttaca

SEQ ID NO: 802423 - DNA, 476 bp, Homo sapiens
cagcatatataaaaagccacaggggaaaaaaggaatacggactcagcaactcttaggtgctctgagcctcttcccaagccttctggttctgtgagcatttcattgaaagaaaatggaataacagagttttagaagaaaaactgtatttggtcttgcaagagaaaagtatattcatataaaactcagttctcaactatttgccaaggttacttcttttgtttccaacatttaaaaagggtatctagttgtaggtrgagaaaacattaagatatgtgaatggaaaaaggtaaaatttctaaaagtatggattcacagtggggtctgatttaaatgtttaaattttttctctttaatttcttctcaccaatcctgaaagacacgacgagataatatctactttcaataaatcaattaattttatttaaaatccctaagattttaatatagtacatgcaaaacaataatagattttctat

SEQ ID NO: 802424 - DNA, 615 bp, Homo sapiens
ctactggcatctaatgagcagaggccagggatgatgttaaacaccctagtagattgtggttggcagcatccaagattccttcccctggtagccatgccttgcataaccctctcttcctgcatatggacaggacctatgaaaatgatgagatattgctcttatgtttatgttacttcctatggccaatggaacttggcagatgcaattaagatccctaatcagttgactttgaggtaagcaaaatgagactatyctgtgtggacctcacctaatcaggtgaaccttaaaagagacaagaagcagtagtaaacaagctcctgctggccttgcagaagcaaataacccatgcgggggttcttgggaatttttaattcagggggcctcgtggcaggaactgcaggtggcctctaagagctgagagtgactcttatccaataagtcagcaagaaaatagagactcccattttataaccataaggaactgaactctgccaacaatctgagtaagcttgaaagagaatcccaaacctcagatgagaattgcccaagcaacacctcaatttcagccttgtaactccctaagcagggcgcccagcgaggcagcaattggacttc

SEQ ID NO: 802425 - DNA, 615 bp, Homo sapiens
ctactggcatctaatgagcagaggccagggatgatgttaaacaccctagtagattgtggttggcagcatccaagattccttcccctggtagccatgccttgcataaccctctcttcctgcatatggacaggacctatgaaaatgatgagatattgctcttatgtttatgttacttcctatggccaatggaacttggcagatgcaattaagatccctaatcagttgactttgaggtaagcaaaatgagactattctgtgtggacctcacctaatcaggtgaaccttaaaagagacaagaagcagtagtaaacaagctcctgctggccttgcagaagcaaataacccatgcgggggttcttgggaatttttaattcagggggcctcgtggcaggaactgcaggtggcctctaagagctgagagtgactcttatccaataagtcagcaagaaaatagagactcccattttayaaccataaggaactgaactctgccaacaatctgagtaagcttgaaagagaatcccaaacctcagatgagaattgcccaagcaacacctcaatttcagccttgtaactccctaagcagggcgcccagcgaggcagcaattggacttc

SEQ ID NO: 802426 - DNA, 582 bp, Homo sapiens
caatctcaaactttttataaaagtgtactttttccaacacagagattgtttccaagtttgatgcttgacccaaaagccacgctggtataggaaaattgagtccgattagtgttcagcctctaatgcctggaattgttgtgtgtggactagcagcagtgtcatttcctggaatttggggtcccagaccagaatttctcaatcaaatctgtactttaacaagatccccaggtgatctgaatacatattaaatgtgggaaacactgttctagaatttccatctgatatggtttgggtctgtgtccccgcccaaatttcacgttgaattgtaatccccaatgttggaagtggkgcttggtgggaggtgattggatcatgagggccgacttccaccttggtgctcttctggtaatagtgagttctcatgaaatctggctgtttaaaagtgtgtggcacctccttcttttctctcttgctcctgctccaccatgtaggagaccgggctccctcttcaccttccaccatgactgtaagtttcctgaggcctccctggaagccaagcagatgctgcctgtggaaccatga

SEQ ID NO: 802427 - DNA, 453 bp, Homo sapiens
tttttcatatcttcaaaactatgggtaattgctatcacattctgaatatgtttaggattagaggtagcctggactttatgaaatggtgccaccaaggtaagatttcaaaaatgctggtctaggtgtccaacacttaatgttattcatgtccacatcctgtagaatattatttaaggattttttgaatgatggttgaaactgaagcaatagtatttcccttgaaagtgaaattttctcaaaacctgtcttcctcctacgtcgttaaggaaccaagaagctacaaaggaaaggaggctgttacsacattaacctaagggaggagaccacccctcatattgtcttatgcccaatttctgcctccaaagaaagaagtaaaaactaaaaggcagaaatgaaatccacaagcagacagcccggcaccacactctggacctggtagttaaagatcgaccc

SEQ ID NO: 802428 - DNA, 602 bp, Homo sapiens
gaatagtctgtttttaaaaagatttaaaaggattttcttctcttgtgtgtggcgtaggctataagtaaaatttatcaggtcaagatcagcatttggtgtaaccttgatctacctctagtctaagtctaaatttacagggatacagagagcccttgaagctgggcatgattcagactagcagcagggttggagtctccagagaaactaggtccataggtaataaagaattccttacacctgcagggttctgtacatggcatctatctaggatagaggctggaagctgaagggagattcagggagtcctgggttctgcttctggccgaatcccatcctattaaaaatcatacaccaccttgtagagttagttgtctattttaaactctttctaattttactaatagattggaaaccccttgaagagaattatctccctagcaaccatttatcatgccttccacataawaaatgtaaagtgctcaatggtttaaattagaaatgacttcttagtgaaaaaaaaaaatcacatggagaaaaagaaatatcctaaccaaaatatcctgcccaacaagtaaaacaggcaatttaatacagctatgcac

SEQ ID NO: 802429 - DNA, 518 bp, Homo sapiens
tttttgcttcggtagctagtataaatgggattgctttccttttcagattgttctctgttgacatatataaatgctactgatggccaggcatggtggctcatgcctgtaatgcaaaaactttgcaaggccagggtgggaagatttcatgagcttaggagttcaagaacagcctggacaacaaaatgagactttatcactatgaaaattttttwaaaaattagccagctgggactttagtcccagctacttgggaggctgaggtagaaggatcacttgagcctgggatgtctaggcttcagtgagccgtgatcctgctactgcactccagcctgggtgactgagcaagaccctgtctcaaacaaacaaataaacaacaaatgccactgatttttgtatattgattttgtattttgcaacttcaccaaatttgttcactagttctaacagttttttggtggaatctttaagtttttctaaatgtagaatcatgtcatctgtaaacaagaataatttgactt

SEQ ID NO: 802430 - DNA, 511 bp, Homo sapiens
tgcacctcttctgcaattgcaggaaaccccaagtgaaaaggtcctaatgagcacaacagggaaagagcaagggtgggaccttccagttaccgagtccctcactatctatgcatcactgcccgctccttgctcctaaagacctaggagttcctcccactgcccctcctcttcaccactgccacatcccaagtgtggctatcagttattagtagcagagacactgagtacatatctatggaactttattactcttcactttattgctgtcccagaaaatatctatggaaacttatttactcttcactttattactgtcccaggaaacaagcataaacaagtacctgtgtatacgtgtgtgcaaytgaaatttctatgaggaaacaggaactaaaaataataacgaacacaggaagtaaaaatagtatcatgaaatctcaatgttaagcccttgcctatgtttgattttgacattttcgtagattctgacctttcttgtaggcatttctgaacc

SEQ ID NO: 802431 - DNA, 565 bp, Homo sapiens
taaaactgtggaacaaatggacactactgttggttgaggatgggaataaaagccatttccaggcaaaatggaaaaagggaatagaaaataggaaaaaaaacaaacaaactctgacttctattgagaagagacaaaaattcttgttcacttttatctcagcaccagcaaaatacagcatccctctctccaatcaccacattagaactaccccaactcaaagctactggaaatatttgttaatgatttgcatgctgaagtatctaggagtaaagtgtgttaatgtctacatctttgaaatatgtcaaaaataagatgaggtgatggatgacagatggattctaacagatgagtgataatgagaatatagaaaaacattatagaatatagatggtaggtatgaattctttcagctyttctataagtttaaacattttcataagaaaatagatagaacaaagaaaaaaatttttaattgggttattggcaaacgtatagtactttaggctgaatatggaagcagagtatttggctttactatcctagccaaacagaacagagggagaaa

SEQ ID NO: 802432 - DNA, 552 bp, Homo sapiens
tcaaaatgctatgtattgctgccctagactcacaacttacaggtgcctgcaaattcatatataaatcaattttgcaaatcacatcataagtaaaagggcatccggcaaatctctactggaagcttagagagaaaccttctaaaacaaataatcattccaaatatatttgccctacatggtttttgcatttgagttttcctactgtaaggcagaaaaactgtgaaggaagagatgcctcatttaatttggaagagtaactcaaagtgtgcaaaatatggcaagagggttctcctcatgacgttggactagggtgggttggttttctgaggatcasatccagttttactgcttatgacaagtggaaacaaggaggctaaaaaacagaaattggatagtaggaacttgtagatgccaaaagcataaaatagaaattctcttgatcatgcacctgcaggtctctaccaccaaggcttttctttaccaaagctgcacctgctgtccaagtgggacagggaacagatgtggctaaagagtttccatttgactctccag

SEQ ID NO: 802433 - DNA, 526 bp, Homo sapiens
cacagagagagagaaagagaggaaaatgaatctcaagaccccaaaatcgttaagccaagggagaagtcaagctgggaactacatcaggtaaacctgcctcctattttattactaaataagacagctaaaaagattttaaaaagctacatacctccctcacaatttggaatttcctggtgggcctcaagatctttaccckaaaacagttctgaactgaaagctgatcttcacaggtgcaggaatgaaagtcatccctctgctcacctgagacgaaggcatatctgattgcttcctccaccacactgtttatgtaagaatgcagattcactgaaccagactgaattgtgtaaatttacacaaagaacagaaaactttaaagactgatcaaggactcaaaagaatgcaaccttttgtctcttatctacctatgacctggaagcccctcgcttagagttctcccaccttaccagaccaaaccaatgtacatcttacacatattgattgctgtctcatttctccctaaaat

SEQ ID NO: 802434 - DNA, 526 bp, Homo sapiens
cacagagagagagaaagagaggaaaatgaatctcaagaccccaaaatcgttaagccaagggagaagtcaagctgggaactacatcaggtaaacctgcctcctattttattactaaataagacagctaaaaagattttaaaaagctacatacctccctcacaatttggaatttcctggtgggcctcaagatctttacccgaaaacagttctgaactgaaagctgatcttcacaggtgcaggaatgaaagtcatccctctgctcacctgagaygaaggcatatctgattgcttcctccaccacactgtttatgtaagaatgcagattcactgaaccagactgaattgtgtaaatttacacaaagaacagaaaactttaaagactgatcaaggactcaaaagaatgcaaccttttgtctcttatctacctatgacctggaagcccctcgcttagagttctcccaccttaccagaccaaaccaatgtacatcttacacatattgattgctgtctcatttctccctaaaat

SEQ ID NO: 802435 - DNA, 574 bp, Homo sapiens
aagtcctgacaaagagttatgtcaccgacgtatgcttctctcagttgtatgtgaaatcccgaagaatcctgggtcgggcctccccgatcctggactgatcatgtgtaaccttaaaattcaccaaagttccaggaaggcactttgcagaaagggaaaatgtaataatacaaaggaaacattcctaaatgattaaaatgtcccaaacttacacctcgttgctagggcaagggaaaaatattataacaacaaaatttaatttgagaatctatttgaaaaatcagytggaagtgacaggcagaaatagacaagagagacaccatctcagccatgggcacgaaggagagtggcaggttagggtcaagtggcaaaccacagcccgtggcaaactcctgggtatgtcacacacaaaaacgttgacaagacatttacctaagctgcctgggatgcactgaatttccttatcctactgcaatttattttatttgtttattttattttttgagatagggtctcactctgttgcccaggctggagtacagtggtacaatcttggctcactgcagccttgacctcc

SEQ ID NO: 802436 - DNA, 586 bp, Homo sapiens
ttccagggctaagtcatcaaagacattgtggcttccgtcttgctctcttggattactcattctgagggaagccagctgccatgttgcaaggccactcagtgcaccttctgagaggctcatgcagagaggacctgaggcctcccatcaacagccagcaccaaaataccagccacgtggggggaccatcctggaagtgcatgctgcagccccagtccaaccttcaaatgactgcagcccacttcagccaatatctgactacaactttatgagagaatttgaaacggaattgcccagccaacccatgcttgacattctgagccactgaaatcatgacagagaacaagtgatgattgttattataaatcactataaatggagtaatttgttagcagcaataactaatatagaaacattatcttttttawttatttatttatttatttatgttattttattttttgagactgagtcttgctctgtcatccaggctgtagtgcagtggtgcaatcttggctcactgcaacctccgcctcctgggtccaaatgattctcctgcctcaacctcctaactggctgagattacagg

SEQ ID NO: 802437 - DNA, 628 bp, Homo sapiens; identical to SEQ ID NO: 802350

SEQ ID NO: 802438 - DNA, 553 bp, Homo sapiens; identical to SEQ ID NO: 802351

SEQ ID NO: 802439 - DNA, 622 bp, Homo sapiens; identical to SEQ ID NO: 802352

SEQ ID NO: 802440 - DNA, 600 bp, Homo sapiens; identical to SEQ ID NO: 802353

SEQ ID NO: 802441 - DNA, 638 bp, Homo sapiens; identical to SEQ ID NO: 802359

SEQ ID NO: 802442 - DNA, 535 bp, Homo sapiens; identical to SEQ ID NO: 802360

SEQ ID NO: 802443 - DNA, 535 bp, Homo sapiens; identical to SEQ ID NO: 802361

SEQ ID NO: 802444 - DNA, 635 bp, Homo sapiens
cacttcccaatcattttaatttggatttctttttagattttgtttcaaattacagggccatacaaacgagctggtgagttgagaaaatagctttggaactgcattggatcatcaaaagaaacggcagactttggcgtgggagaccatgcctcaggctccatccatttggttgaggtgcccacacatgcacaaaaataaaagaatggcataaaaacagacaaaaactactgacatgtcagtcatcatggcttaaggaaaagctcacaaataatttytctggaatctcaccaaaatttggagtaaaagatgatagcatgctaaatcagttctcttgctacttctaaaatactaacgttcctgaatggggctcaaggtggaatcatttcgaggcaaatatcagttctagtagataaaagtgttgtttaaaacctcattaacattatatataaatattccccaaaatgatctacagatccaatgcaatccgcacttttttttttttttttttttttgcagaaatggtagtgggggcagggggtgaggaagatcttaaaattcatgttgtaatgcaagagactccggatactcaaagtaatattgaaaaagaagaacaaagataacggactcacacttgc

SEQ ID NO: 802445 - DNA, 635 bp, Homo sapiens
cacttcccaatcattttaatttggatttctttttagattttgtttcaaattacagggccatacaaacgagctggtgagttgagaaaatagctttggaactgcattggatcatcaaaagaaacggcagactttggcgtgggagaccatgcctcaggctccatccatttggttgaggtgcccacacatgcacaaaaataaaagaatggcataaaaacagacaaaaactactgacatgtcagtcatcatggcttaaggaaaagctcacaaataatttctytggaatctcaccaaaatttggagtaaaagatgatagcatgctaaatcagttctcttgctacttctaaaatactaacgttcctgaatggggctcaaggtggaatcatttcgaggcaaatatcagttctagtagataaaagtgttgtttaaaacctcattaacattatatataaatattccccaaaatgatctacagatccaatgcaatccgcacttttttttttttttttttttttgcagaaatggtagtgggggcagggggtgaggaagatcttaaaattcatgttgtaatgcaagagactccggatactcaaagtaatattgaaaaagaagaacaaagataacggactcacacttgc

SEQ ID NO: 802446 - DNA, 587 bp, Homo sapiens
attacagggccatacaaacgagctggtgagttgagaaaatagctttggaactgcattggatcatcaaaagaaacggcagactttggcgtgggagaccatgcctcaggctccatccatttggttgaggtgcccacacatgcacaaaaataaaagaatggcataaaaacagacaaaaactactgacatgtcagtcatcatggcttaaggaaaagctcacaaataatttctctggaatctcaccaaaatttggagtaaaagatgatagcatgctaaatcagttctcttgctacttctaaaatactaacgttcctgaatggggctcaaggtggaatcatttcgaggcaaatatcagttytagtagataaaagtgttgtttaaaacctcattaacattatatataaatattccccaaaatgatctacagatccaatgcaatccgcacttttttttttttttttttttttgcagaaatggtagtgggggcagggggtgaggaagatcttaaaattcatgttgtaatgcaagagactccggatactcaaagtaatattgaaaaagaagaacaaagataacggactcacacttgc

SEQ ID NO: 802447 - DNA, 576 bp, Homo sapiens
ggactttaaaattttctccttttgccagtgtctctgaattttagtatgctatttgtactgaactgactccaaatctaaaatttgattatatacagaaatagcaaataaatgcaactcagactaatgacaaagcatttaatcagagaatattagaacgactacaagacataacctggaaaaaaaatctatgaagaacctatttagaaagtaagctaaaagcaacactttttattatgagaaattttaaacacatacaaaagtaaaaagaataacatgaggaacctytaataacatttggcttaagcaattagcacccctggccaatcttgaagtttcaactatattcctactaaaaagggacgtattgttttaaatgttccttcaaatgaaaaaggactatagatgacaactaggttcaacccagaaaagctattctccccagcaaaccacttctgtagctttgacactagcagctcagatagtgtacagggttcgttattgcaaacttctctttctatagagaacagtcatttaaaaatggaagcacccaggattccaaatgaaaggtttttaaaa

SEQ ID NO: 802448 - DNA, 613 bp, Homo sapiens
aagcaacactttttattatgagaaattttaaacacatacaaaagtaaaaagaataacatgaggaacctctaataacatttggcttaagcaattagcacccctggccaatcttgaagtttcaactatattcctactaaaaagggacgtattgttttaaatgttccttcaaatgaaaaaggactatagatgacaactaggttcaacccagaaaagctattctccccagcaaaccacttctgtagctttgacactagcagctcagatagtgtacagggttcrttattgcaaacttctctttctatagagaacagtcatttaaaaatggaagcacccaggattccaaatgaaaggtttttaaaaaagattatctttcagaatgtggcatctggtatatttagaatgatatatatgtcattacttaaaaaaacccaactaatgggtggattgagagcatattacatacatacacacacacacacacacacacacacacacacacattaagagcacatacgtaatatgttctttatttttattatactttaagtttgagggtacatgtgcacaacgtgcaggtctgttacatatgtatacatgtgccatgttggtgtgc

SEQ ID NO: 802449 - DNA, 592 bp, Homo sapiens
ttagttaacttaggagccatctccctgccatctcaggtggaacgaggtaccctttttctgtgctcctatgaaatactgtgcaaatccccattaatgtacctaactcattaaattatctatgattcttactcccctctttaatgtgagatccayagggctggatttggtcttttttctttatttggaaccccaataacacagtgcttgacccagagggtgctctgtatttgcttggtgaatgcctgccacagaggccatgctactgtacttgagaaaacaaatacatatacacaataaaaataaaacaacttgggctcatctgccttcttttttcctaaaagaaatgtgcttctctataatccccagaaagacagccatcacagcttgcaacagttcttggcaacttattacaactctcatctgaactgtgaaatctggttgaatttacaaatcagaggatgaccttttaaatctcagaagaaaagtagtaaaagaggtaatgactgataagctatatctctatatattgaaaagaggataggttatacatgtgaattaaaaaaaaagaacatttgaaaacatcagagattaa

SEQ ID NO: 802450 - DNA, 498 bp, Homo sapiens
ccaggaaacctctcccaccggctaaaccagtgagaatcactgtaacaaaaggcctttgttccaaaggctgcaggcaacagaattctccattgtgttcgcaatacctgacctaattgactgctttgtttgaaactgaagaagggagtcctttgakccagaagctgcaatcatccaatcagagccagaaaaaaaaaaaaaaaaagcccttgaggttatcagttcctacacctgttcacacatgggactgaagcagtcatctcattcactggcgatggcaggagaccaacaggagcttttccattacattcctcttagatcctgggctcctttacagtgggggtattaatggtgcaggcccttctgttgttttgcttaatcctaagatcttgctgcaaaacaatttatataatccctaggaatctcaggcaggaaatgtggctgccacccttgcaacacagcggagaattaggcaggagtctctcaaaaaagtaatacaca

SEQ ID NO: 802451 - DNA, 573 bp, Homo sapiens
tagggcaggagagtagatggagagagctgtgtcccgaaccaacattcttgagattcctttgctagtgttttttcttcagggttcactgagaagaggaaggtcagatggggagggacaaaacccaaggaaatgaggctcatttcaaactctaacaacttgatcacaaacaaaatgtatgtagaattacaaataagttattctgttttcaggcatcaaaaatgttatcaatgaaatgttgagatgctaaagcagtgaaatgtgaaackaagcagtgtcacaggcaactgggcctctcccctggcccatcccaggagggatgaagggtggctgatatgaactctaaggattattctgaaggggccaacaaatgttacaaagaggctcaaaaataaaaatcagaaccatttttccctcattcatccagggcctactcctggccatgttctgtgctttgcactttattcaatttaattcaatttttctcctaagcaatctatttagatactttgtagatgtggaaattggtttagggaagcttacatcattttcttgcagtcatatttctagtaaatt

SEQ ID NO: 802452 - DNA, 598 bp, Homo sapiens
cttctgcctacacgagcaatcacagaaccattaaataagaggattgcttgtttgaactactagatcagcctttccttatttttgctaatctgtgtggtgtacgttcattaccttttttttttatgttaaagaccaccatgcgtaacactacttgacagcagcaatttatagcagtggtccccagcctttctggcaccagggaatggtttgatgaaagacaattttgtggtttggtttcgggatgaaactgctccacctcagatcatcaggcattagattctaataaggagtgtgcaacscagctctcactttcttacatgcggttcacaatagggtttgcgctcctatgagcatctaatgccctgctgatgtgacaagaggcagggctcaggcagcaacactcactcacccattgctcacctactgctgtgcagcaaagctcctaacacgccacagaccggtaccagtccatggcccaggggttagggactcctgattcacagcattacaataaataataaataattaaaatattacctgatatttggcaaacaatccctctctaagtcactacttccagcctatgttcaggctagaa

SEQ ID NO: 802453 - DNA, 626 bp, Homo sapiens
accagcccgactcggcctcccaatgtgctgggattacaggtgtgagccatggcacccggcccaagttctctctttaaaagaggaagaatagtatggggactcatccaatttcttgtttaactgacaatatgtaactcttacaacacttgcctgtgtgtttctatcataaagtgaggatatggtttaagactgtgaggatacagtctaagactgaacaggcagycttcctggactgctcgggtgacaaagagcaatgatgcccttaatacagcacctcaggatatcatgaatgaggggatggacaggatgatctcccacaatgcttttcacactattattttgtaatttgaattccttctctccccaatctaatctactcttggaaacaagctaatttttctaaaagtgtcttgaccagaaagcattcatgctaaaaatctgccatagcttccacctatctccagaataagaccctccaatttgcaacctcattctacctttgcaattttctaaattttcttcacaatttaattgtattaatagatttataaggtccttatgggccaagaatggtatcccgccactcagcaacacctgacacaaaaacctaacagtgcccaataaat

SEQ ID NO: 802454 - DNA, 669 bp, Homo sapiens
atgagggagaaacctccctttttgactttgaataccactgctgagaattgtgcttctatttcactttgtggaatgcttgaagtgatttttacagaattctttttggaaatgttaatacttgtggaacaaatggcttattgttaaacttggagctggaagacctggatttgaatgcggatattgccagttactagcagtgtgacctcagtttcttcagtaaaacaggatattatcattgtctgacaaagttttttgggcctcagttaaaaaaatgttaagttaaagtcatttcggttcttgaaagtgccaagcaaatgtgaggcactattagtattttgtaaaaagccatttctttaaagggaagacaattcatgaagaaaaaattcaaatgaaagcaaagtaataaataaaattaccktaagaactgatgagagaattctgattttgtagatggaaatttgtttttgaatttaatgaatatacatatatttactcctttaagtagttattttatgtttcaaaaagattcaaacattttaattgcaaaaagtctttgccttgctttaaaagcaagtttaatttcagggacaatacacctattcattacccaaaccattcctaagcagtaacagccttaagagcctattaatgtaagggggggtgttaagt

SEQ ID NO: 802455 - DNA, 633 bp, Homo sapiens
cctcccaaagtgctgggattacaggtgtgagccactgtgtttagcctagacttacctttaatagcttttgataagttattttttaatgtaattttgataaaataattgtacctaaaatgtactaatgtgttggtattgtctactatccaatctacgaacaaattttactgattcattcgtaactgaccccagagttggtttgtttgaatcactgtaactgagcctctattataaagatcatacgatgtttgttttacctactttccctttccccttgtccttttcttgctctatgcgtgcttgcttgcatgtcattatttcagtagagggtagtcactaataattgattaacttcatatcctaacctacaggggtgcctggcagattgatgaacttgtttttcttttaaagaaccaygatccttaggttatgcagacctccttgatggtgtccagaaatttgggtagagggatgccaacagctttgatcactgggggagtttcatctcccatatacccaccttactcatacaagtccccagttaaattcaaaggcagggcagatttgagagactgtctctcctgccctcttgctttggtcaaattgaataaacctttctctgttcctgagtgc

SEQ ID NO: 802456 - DNA, 442 bp, Homo sapiens
aaccttgatattattaacatcaagcttgccagttgtgtagaaagaggatccagtttagaatcatgggctgcattttactgccctgtctcttaagcatttgtaggctttggaaagtttaaattttttcttgagtttcataaatttgacaattttgaaactcatagcctagatattttgtggactrtcacttaatatggatttggctgattttatctcatgattaaatccatgcatctttggcagggatatcacagaaataatgctgctccctcattgcatgctgtctgtggtgcatgactgtgacttgttcagttactgatgatgcctctgtgataactgggttaaagtggtgattgccaggtttcttcacagtcgtttactctttcctctttaagaaataataagtatttcatggtgaagtactttaaaactctgcaaacat

SEQ ID NO: 802457 - DNA, 546 bp, Homo sapiens
actgacaaacactttgtatgactctaccattttgtattgccatcagcattatatgagtattccagttgcttcacattttcaccagcattttgtattgctatctgctgaatgtgtccccaaaagtcacgtgttggaaactgaatgcccagtgcaatagtattgggaggtatggtctttgagaggtgactgagtcatgaggactcttctttcaagaatggattaggtctcttataaacagggcttacagaagtgggttcattctccttcattcttctaccatgtgaggacacagtgttccttctctctggaggatacarcattcaaggtaccaccttgaaagcaaagaccagactcttactagacaaggaacctgccagcaccttagtcttgaacttcccagttcccagaactgtgagaaaataaatttctgttattcatacatcaccgtttcaggtatttttattatagcaacacaaaaccaagatgggtattgtcttttaaaaaaaattctagtgagtgttttgtagtatctcagtgtgtttttaa

SEQ ID NO: 802458 - DNA, 524 bp, Homo sapiens
ttgctcttatttgttgctgaggacttagattaaacagtttattgcttttgaagtatattttgtcagtccagttgagggactgagtctcagtccagatgagggactgccagtttgtctagcagttgatacaaactaattacctctggtaactttgcaggagctgaaaacagaagtgtgactagtaaggtgtgaaggtggcttgatttctagatatgaggctcttggtgcttgttggctgacagacactctccctttctttagttcagcagccactctggtagtcttaaacgtcagagtttttaagaggggtattcatagcccaaatctagggataaatgtaggagatggaggaaaggggagttgccrttttattggtgccactgtttagttaaaatacctaaaacattttctcattcccctttttcctgcctccactgcctttggatgtagatttattctggagttctgttgggaaaacacactattttggaatgttttacttgtctactgagagggttcttcgg

SEQ ID NO: 802459 - DNA, 500 bp, Homo sapiens
gactcataaaagaagcagccctctgtgtaatcaggctgtaagctcagactgagagttacatcgtcagcttcttttgttctgaggctttctgacttgggctgacccgtgctgccacctctcctgattctccagcttgcagactccctatggtgggacttcttagcttccatgatcatgtgagccaattcccctaataaatttcctgttatctatgtaactatctgccattggcatccaaaccagagtgattcactcttcaataaaggctgaatgaagtgagaccttctaggttacattcccaggaatttaggtactcttggtcataagatgtttatggttgaaggaacaagttaattatgctaaytaagacccagaacttaaggaaatgtcctgatatccagatatcttaagaacagaccaggcaaggtggtgcacacctacaatcccagcacttttggaggctgaggcaggtggatcacttgaccagactgggcaatata

SEQ ID NO: 802460 - DNA, 589 bp, Homo sapiens
actgcaagttcatgggagggatatcaagattgcattgtaagaaaaacaagcatgttgggagatattgttgtggccacctttggaaattacaatctactgtaagtaaaacaagaatcaatcaatataaatttaggcttgaatcacttctctttttttgaacgaaagataaaactgtaaagaaatatagagatacatggaaggatgatgttaaatcaatacaaaatgatcagtgagttaaaagttacaggttctaggaaacatggctggtgaatacaataataatttattaattttaatgtcagcttcaaatttttggttctttggaaaattgtttaggcccccaaatatataggtctatgtatgtatgtatgtatgtatgtatgtatgtatgtatgtatgcatgcatgtatgcatgcatgyatgtatgtatgtatgtatgtatgtatgtatgtatctatctatctatctatctatctatctatctatctatctatctatctatagctgcattgatgctgtaagtccagagcagttttgcaaaataggctgtgttgctagagagatgctattttccttggcctgtttttaa

SEQ ID NO: 802461 - DNA, 557 bp, Homo sapiens
tatgtgatatttcttctttcatctgttaatatggtgcattatattaactgactgctgaatgttgaaccagccctgcaaatctacaacaaatcccacttggccctggtgtatacgtttttatatatcgttagattttctttgctcatactttgttgagaaaattttcatttatgttcatcagagatattggtcccttgttttccttttctgtaatgtctttatctgattttgagattaagataatgctgcctcatagaatatattaggaagtgtcctttccaattttattttttrgggattgtggtttactatcacttctttcttaaatgtttggtaagatccaacattgaaaccatcagttttagcgctttattttttggaaggttattaattattgattcaattttaaaaatagatatagagctattctaattacatattcttgtgtcagttttgacaaattgtgcttttcagttaattggtacatatcatcaaagttatatgtgtggtcatagaattgttcataatatgcctttattattctttttgcatctatg

SEQ ID NO: 802462 - DNA, 522 bp, Homo sapiens
cacaatagcaaagacatggaatcaatccaaatgcccatcaatgataaactagataaagaaaatgtggtacatacacactatggaatactatgcagccataaaaatgaatgagctcatgtcctttgcagggacatggatggagccagatgctatcatcctcagcacagcaatgcagaaaaccaaacactgcatgttctcacttataagtgggagtcaaaaaatgagaacacatgaacacaggaagragaacaacacacactggggactagtgggagacggggaggagtgagagatcatcaggaaaaacagctaatgcacgcctggcttaataccaaggtgatgggtagataggtgcagcaagccacgtgcacatgtttacctatgtaacaaacctgcacatcctgcacgtgcaccccagaacttaaaataaaataaaatttaaaaaaaagaattacctcagattgggtagtttataaagaaaagaggtttaattggctcatggttctgcaggctgtccaggag

SEQ ID NO: 802463 - DNA, 552 bp, Homo sapiens
agttttgttacactcttcactaataatttgttgcatacttgtactgactcactttaattctattttttttaggttttccagttaatatgtggaccaaaaaagcacaactggaccaatatataaaataaacacactcctttactacaacaattcgggaaactaaattttcaatgatggaaggaatggttatatggttaaaaccaaatgctaatgttggatacwtttattaattcaataaatgaatattcatttatttatttactgagctcctactgtgtgccatgcactattcttggttcttgacatacttctatgaacaaagaaatatagagtttactttctaatgtggatgagaggaaggtataaacaaccaaacaactaaggaaatactttcatactatgtcgggggtgaattgaactaatagaaattaaagcagaataagaggatagagtggcatggaaagatacaatgtaacagtatgcaaaaagcaatgcacaacttggcccggagaagaaaatttccagacaaattatatagataagcctttcctg

SEQ ID NO: 802464 - DNA, 550 bp, Homo sapiens
tgtaagaagtacattggtttggtctgaaaaggcgggacaacttgaagcaaaggcaggaagatttgaaatggagagggagcttccaggtcacagataggtgagacacaaagagttccattcttttgactttctaactagcctttccaaaggaggcaatcacataggcatctattgcagtgagcagagggataactttgaatagaatgggaggcaggtttgccctaagcactttccagcttgagttttccttagtgattctgggcacccaagatattttattttcacactacgtattatgaggtaaatttgcttaatttttatagacattagaaatgtaaagagtttyttgactatcaatcataaccaatatagtacattgaatattatgtatttgaacattcaatgttttctaatttggaaatattttagtttctgattttgttatatttaaagtatagttctaagacctttgcatagaaataaaaaataaaatgaacgttaaaaatgtgaaactatatctcatgtaacaaatagtgtaatggtgtaaaaa

SEQ ID NO: 802465 - DNA, 550 bp, Homo sapiens
tgtaagaagtacattggtttggtctgaaaaggcgggacaacttgaagcaaaggcaggaagatttgaaatggagagggagcttccaggtcacagataggtgagacacaaagagttccattcttttgactttctaactagcctttccaaaggaggcaatcacataggcatctattgcagtgagcagagggataactttgaatagaatgggaggcaggtttgccctaagcactttccagcttgagttttccttagtgattctgggcacccaagatattttattttcacactacgtattatgaggtaaatttgcttaatttttatagacattagaaatgtaaagagtttcttgactatcaatcataaccaatatagtacattgaatattatgtatttgaacattcaatgttttytaatttggaaatattttagtttctgattttgttatatttaaagtatagttctaagacctttgcatagaaataaaaaataaaatgaacgttaaaaatgtgaaactatatctcatgtaacaaatagtgtaatggtgtaaaaa

SEQ ID NO: 802466 - DNA, 581 bp, Homo sapiens
gcttggcttctggggaggcctcaggaaacttacaatcatgtcagaaggtgaagaggaagcaggcacatcttacataaccagagcaggagcaacagagagacaggggaggtactatacacttttaaacaaccagatctcacaactcacccatatcatgagaacagcaccaagggggaagtatgcccccatgatcaaaccacctaccaccaggccccacctctgaaattggtgattataatttgactgagatttgagcagggacacagatccaaaccatatcattccatccatkgtccctcccaaatctcatgtctttctcactttgcaatatgcagtcataccctcccaacagtcccccaaaatcttaactcattctagcactaactcaaaagaccaaagtccaaagtctcatctaagacaaggctagccccgttggcctatgagcctgtaaaataaaaaaaataaaaaaaagttagttactcccaagataaaatggggctataggcattaggcaaatactcttgttccaaaaggaagaaattggccaaatcaaaagggatacaggccccatgcaagtctga

SEQ ID NO: 802467 - DNA, 581 bp, Homo sapiens
gcttggcttctggggaggcctcaggaaacttacaatcatgtcagaaggtgaagaggaagcaggcacatcttacataaccagagcaggagcaacagagagacaggggaggtactatacacttttaaacaaccagatctcacaactcacccatatcatgagaacagcaccaagggggaagtatgcccccatgatcaaaccacctaccaccaggccccacctctgaaattggtgattataatttgactgagatttgagcagggacacagatccaaaccatatcattccatccatggtccytcccaaatctcatgtctttctcactttgcaatatgcagtcataccctcccaacagtcccccaaaatcttaactcattctagcactaactcaaaagaccaaagtccaaagtctcatctaagacaaggctagccccgttggcctatgagcctgtaaaataaaaaaaataaaaaaaagttagttactcccaagataaaatggggctataggcattaggcaaatactcttgttccaaaaggaagaaattggccaaatcaaaagggatacaggccccatgcaagtctga

SEQ ID NO: 802468 - DNA, 618 bp, Homo sapiens
tggtggagttatatcccttggaagattctagtgaagaatgtttctttgcttctttcagcttctggtgactccggatgtttcttgccttataactctagtctttgcctctgtctttacatgaccttctctgtgtctgtgtcttcctctcttttgtctcttctagggattcattataatacttaacacttacctagatcatctcagatgakctcatctcaagatcccaaactgagttatatctgtaaagatacatttttcttttcctaaataagattacattcacaggttccaggggttaggatgtggacatattttttttgcaagggccaccgttcatcccattgcaaccttgtatgtccttgggctgggtgctctccaatggccccctcactgggtgggtaggacaggtgtaacccatggcctgagctgccaagggaaaagccaagtactgttcctcttatgcagaaattgtggtcaaccatcttttaggacaggtgactaaggacttatttgcaaaagtaaaaaaatatcctattgaattactggaattgggtggaggggtatctcacttgctattaccataatgactatacccactattatttcctcatctctgaa

SEQ ID NO: 802469 - DNA, 526 bp, Homo sapiens
gacaggcatatcattcacaatccaggctctgtgaatttgttcggaaaaaagggggcaaagagagacaacttaattttaaatactagctgcaatatggaaccacatcttgctttaagatttagttttttcacacttgccaggggtgttttatgcacgtggcaatcattcagraaggttttttagctggaaattgttttgtgtgtgttacaagaaacataatttttattttcagatatgctttaaggcagttgggagttttccagaggaaagtgtgtagatttgtggtcatgtatgtatggcagaaagaaggtgaaaattgagctacagtcatgtgctgcataatgatggttcagttaaagatggaagacacaaacaacagtggtcccatcaggttctaatggagctgaaaaattcctatcacccagtgacagggtaaccctcataatctcctagcacaaggcattactcgtgtattagtggtgatgctgctattaacaaacctactatgctcccagtcataaaagtg

SEQ ID NO: 802470 - DNA, 606 bp, Homo sapiens
tccaaccaggacttcctgtactatgttgaataaaagtggcgagactgggcatccttgtcttgctcttgatcttacaggaaaagtttttgtttttttatcactgagtatgatgttaactgtgggcttgtcagatatgggcctttatgaagttarggcacgttccttctatatctgatttggttttcaccatgagtgattgttgaattttgtcaaattctttttctgcatctattgactaaaggatatgatttttattcctcagtctgttaatgtagtaaatcacattattgatttgtgtatattgatccatccttggatcccagagataaatatcacttggtcattgtgtatgattgtttcaatgtgctgttaaattaagtttgctagtattttgttgagggtttgtgcatctacattcatcaggcatatttgcctgtagctttctttccttgaagtgtctttgtctgactttagaatcaaagtaatgctggactcataaaataaatttgtaaatgttttctcttgaatcttttttgaagaaattgaaaatgattgacattaagtctttaaatgctttgtagatttctacattgcagccatctcttc

SEQ ID NO: 802471 - DNA, 596 bp, Homo sapiens
tctaacatttattatttactttcttctgctacttttgagcttagcttgttcttctatttctagtttgttgagatggaaagttaggttgtttattgaggtctttattctgtattattgtacacatttattgctataaaatgttctcccagtactgcttttgttgtgtaccataagttttgctatgttgtgyttatatttttgtttgctgaaaatagtttctaatagcacttttgattttcttttaccaattggttactcaaaagtgtgtttttaaatttcccaaatatttgtgacttttctggcttttcttctgatatttatttgtagtttaattctattgtagtcagaaaaggtacttagtaagatttcaatgttcttaaatttgctaagggttgtttttgtgacctatcatttgatgtatcctggaaaattttccatgtgcacgttggaagaatgtatattctgttgctgttgggtggaatgttctctatatgtctattagtttcattgggtttacagtagcagtgcccagcctttttggaccagagactggtttcatgtaagacagcttttccatgcgaagggagggtcggggg

SEQ ID NO: 802472 - DNA, 634 bp, Homo sapiens
atgtggaaaataagaccacagactagggatttttttttttttttttagatgaagtctcacttgcccaggttggagtgcagcgcgatctcagctcactgcaacgtccgcctcccaagttcaagtgattctcctgcctcagcctcccgagtagctgggattacaagcacatgccaccacacctggctaatttgtgtatttttagtagagatggggtttcaccatgttggccaggctggtctcaaactcctaacctcaggtgatcgtcccacctcrgcctcccaacgtgctgggattacaggcgtgagccaccgcgcccggtcagactagggatttagaagcaagactttgtcatttataagaacactgcagaaaggaacaagaatgacccagctagccactgaagaccacctctgaaacccatcaacatgaccggctttctataggaaaagtctccacagactcaaaaagtctctagtttcttgcccttaggaaggcatgccctgggaataatagtttggggacaagagagagtagagtgtttactgtcctatcccccattaaatacatggcagaacttccccagggaaagcctatcatactgacattaactcagtacctgtttgaacttggagag

SEQ ID NO: 802473 - DNA, 598 bp, Homo sapiens
ggtgcaccactgccagccctgacagcctttgtatccaggtcagttgaacaggccgggattgtccccaacttggacacatctaaaaagctgcaggtgggatgtcatcaaaatcacctgggaaaacaacctgctctgaaaacagaggcatgatccaaaagacaaagaggtttgtgataccctttctgtacaatagctgactatcartaagtcattactgttttaaggaagtcagtcacacacacacacacacgcatacacacacagaaaaatacaagttagctgggcgtggtggtgtgcacctgcaatcccagctactcgggaggctgaggcagcagaatcatttgaacccgggaggcagaggttgcagtgatccaagattgcatcactacactccagcctgggcaacagagccagactgtctcaaaaaataaataacaataataataataatgttgcaccaatgtcagttttggtaaatccatggttgtgtaagatgttagcattagaggaagctgggtgaagtttcaaagaactctctgtactatttctcttttgtaagcctaaaattatttcaaaataataggtgataaaaattaga

SEQ ID NO: 802474 - DNA, 585 bp, Homo sapiens
aaaatcaggtcctggttgggcgaagggagaaatctgtgagcagtttcctgcctatcagacaggccctccagaggggtgatcagtaccataagcttccaggtaagcacatggggccactgcccccaccctccaaaacaccctcaaaagtctaaaccacctcaatggatgggagattgctctgcaaatgggggagccccactcctaatatgttcatcattgtcttcctaacaatcgtgactcatttcttgaacaaatgtttcacttttaaagggtttgcayagaggcagctttaagaggtcaaataaatgaatgtggaaagaaattaaaacttttacaaccacatgaaaaaggcattagccagtcatcctgcccagcagcccaatattgagcctgtgtgagttgccgtttgtgtagtgaagcaatagaggccatggtctggaatcagaaaccctgggttcagatactgcctctgaccccccaactccccaacaaaatgcacacattcagtggccatgtgaccagggcaaatgcctctcgttccacagctccaatgcaggaataataatagcatccacctggtgtggg

SEQ ID NO: 802475 - DNA, 676 bp, Homo sapiens
gtcctgattaaactgcagcctgaggactgctgggtgggatcctgtagagcacactgagccctgagaagggggcaagaagagccccagggtgcaaggccagagactagctggggcagagaagagtgcgaagctggcaggactgaagggtcgggagacccttaaagagaccctgtagcagacgccttgggaatgtacgtgtcaccgagcaaagcacatgaagagaactgttcaacagcggactcagctgggaactccagacactgcggcaaaaccagcacagatgcatcctctcctgtggctaaaagctccatgaggggccagtgagtcacatgacaaccgaatttctcctctgccaatctgaacatattctgggactgagacttccgtactcagggaaaaccaatcacactgcttaaaagaaaaaaaaattggccaggtgcggtggctcacgcctgtaatcccagcactttgggaggctgaggcgggcagatcatgaggtcaggagatygagaccatcctggctaacacagtgaaaccccgtctctactaaaaattcaaaaaaaaattagccgggcatgatggcgggcgcctgtagtcccagctactggggaggctgaggcaggagaatagcatgaacccaggaggcggagcttgcagtgagccaagatcgcgccac

SEQ ID NO: 802476 - DNA, 676 bp, Homo sapiens
gtcctgattaaactgcagcctgaggactgctgggtgggatcctgtagagcacactgagccctgagaagggggcaagaagagccccagggtgcaaggccagagactagctggggcagagaagagtgcgaagctggcaggactgaagggtcgggagacccttaaagagaccctgtagcagacgccttgggaatgtacgtgtcaccgagcaaagcacatgaagagaactgttcaacagcggactcagctgggaactccagacactgcggcaaaaccagcacagatgcatcctctcctgtggctaaaagctccatgaggggccagtgagtcacatgacaaccgaatttctcctctgccaatctgaacatattctgggactgagacttccgtactcagggaaaaccaatcacactgcttaaaagaaaaaaaaattggccaggtgcggtggctcacgcctgtaatcccagcactttgggaggctgaggcgggcagatcatgaggtcaggagattragaccatcctggctaacacagtgaaaccccgtctctactaaaaattcaaaaaaaaattagccgggcatgatggcgggcgcctgtagtcccagctactggggaggctgaggcaggagaatagcatgaacccaggaggcggagcttgcagtgagccaagatcgcgccac

SEQ ID NO: 802477 - DNA, 633 bp, Homo sapiens
gccatgttgctcaggctggtctcaaactcctgggctcaagtgatcctcttgctttggcttcccaaagtgctgagattacagacatgagccactgtgtcccaccccagcatattctaaagccaatctcagacatgctaggaattcacctgtgaatacttcagcataaatacctaattgtaaacatggctaaaaatggaactatgctcatatttctgtcttagatgaacatacacattctgtctgctgcagaattcctcaacctcagcactattggcactttgggctggataattcttcacagtgggarctatcctgggcctcgtagggtgtttaccagtattcctggcctctactcactaaatgtcagtagcttaccctccattgtgacaaccaaaaatgtctccagacattgccaaatgtcccctcgaggtcgagaaccattggtctattggatatcttatgaagtaaaaaactatcatccattatttatagaagggtgttttctctctcccttttctcttctatctgaaaaaaaaggatattgaaatcagctttgcaaataagcagtgatcaattgacaaactcacttcttcagaagaccacagagaaaaatgcaaataagttaatgaatga

SEQ ID NO: 802478 - DNA, 565 bp, Homo sapiens
tggcagtggcagtgatgattttaatgccaaaatagtcatacagtttgtaaatccaaccacttttgggtgaatataagttaggccaagagcctttcaaaacccccctgggcctgcgaatgttgcgcttggaaaacgcaggagatggggttggaatgaggcaggggttggggaactgcgctgcctcctgcgccccmactcctgccgcagcctctccccttcaaatcttcacattgaggattgtgtttatcccaggacacctggcttagaagatgagatgtccgttttattctgctccttctcaaagtgtacttttcaaatatgagttggtaactatagggcatttgagagtgatcattgtaattatagtaatcagaacttttcagtttagtcaagaatctggacaaaggaatcagtcatatctgtaccttctgcagttccaacagcttatgtaatgtacatggattaggctttgcccacttaggtgttcagttgcatccttgtgagactcgtggaaaattcagatccttcggtgggatgtgatgaactgtgtaagggcaaatgttaa

SEQ ID NO: 802479 - DNA, 589 bp, Homo sapiens
gggcagaatgtagcatattttatatgcagtaatggggaggggctggagaaataaaaacacttccctatgtaagagcaataagttggagcacctggactagaactctctttcttactctgtttaatactcaccatgtcacacagtcttcaagagtaaataaccgtttgcatctggagtcttgtcccattttcatacatctcttgcacaggggattgctgctaccaaaagtcaaacctgattatttagaccctgggctgcagtgrtctggatgagcaatagcatcatgtaattgactatgcccacttgcctagttgtagatgtggtcatatgccagtaaatgtgaaattttaattagtattaatattaattgcattcatatactaattgtgatatttataatatatgctaattataacgctgtttgtagtgctatatattataagtaagttcagcattgattcaacaaatattggggttctgttgatggataatgtcagaaatgagcaaaaacagcctctgtgtttcagacagtgggctggcattgtgagggccttgtagtgggaaggaatttgttgcatttgtggaactg

SEQ ID NO: 802480 - DNA, 654 bp, Homo sapiens
tggattttaaaaagttaaatgaaaaagtcaataaaacataggctggaaaaatatctatcgagttcatgatagtgtttgcttctgggcagtaagagagggaaaggagattggagagggtacaaaggagatttcagccatatctgtatcatcagaaatagttttatttatttcatttaaaaatcagaagcaaatataacaaaatgttaacagttaattctgggtatctgtgtattagtctctgtattttcctaaattataaaaatattttttttttaagtgaagctttagatgccaggcatgatggctcacacctgtaatcctagcacttcaggaggctgaggcgggcagatcacttgaagtcaggagttccragaccagcctggccaacatgtgaaaccccgtctctacaaaaaaattttaaaaaattactggatgttgtggtgcattcctgtctagctactcaggagtctgaggcaggagaatcacttgaacccaggagatggaggttacagtgagctgagatcacaccactgcattccagcctggtcacaggtgaaactccatctcaactaaaaaaataaaaataaataaattttttttaagtggagctttaaataagacatagaaaggcacatgtatttcatacttcattcc

SEQ ID NO: 802481 - DNA, 689 bp, Homo sapiens
tatgtttttcatactctcttttgttgccttgttttcaatgtcttgcaagctgtggtttcttatcttttgtctttgttttaggtaggagggaaaaatcaagtccttattacttcattttggtcagaagtggaggttagagtgtaggcgctcttgsttttatttttaaaaagacttttaccatgtagtgggatctgcaaactgatgtcatgagtagctgttaattctaggaaaaggagaccctctctcagtgtgtgtacagtagaccttagggatgcctcagactgattctgattgagtcatgtgcccacctgtggatttattgctttgacctagaaagtagtgcatttcaattggccagtctcctgggttacagccacacttccaccgtgccgtccattgttgggtggagcactggaactgacagtcctgctgttactgtgagagtgggaacatggtggtctcctaagtgaggggagactagagagatgagcaagagggaatttccacatgtgtgatagagaatgagatagtgaaaagacccttttattgtaattgggtttcagaaactctgagatacctttaatttaagcttcattgaaataacttcagtagggaggtctgaattaagtcttttctcaactaacaggagttacattatgttttatagggttcagggaaaaggatccaat

SEQ ID NO: 802482 - DNA, 619 bp, Homo sapiens
cctgcagtcccttctctaaggcctcctccaggaatacactgttaacagtttcatgactattgggaaacttactctgcatacgcagacatgggtatgcatatttcagatgcccttttgagtaattattgttagaggaaaatctttcctaatgaattctgactacttctaaaatgaattctatcaaacatccccatgaaaattaacagtaattaattgcctcctatctttttttttgtttttttgagatagggtcttgctctatcacttaggctgcggtgcagtggtgtaaccctagctcactgcagscttgaactcctagactctagtgattctttttgcctcagctcccaagtagccaggactactactgctactatggtgcacgtcaccatgactggataactaaaactaaatgttttttagagacagggtcttgctctgttgcccaggctggtcttgaactcctggcctcaagtgatccttctgccttggcctcccagagtgctgggattgcaggcgtgtgcctggccttgcctcctgtctttattgttaacaccccattgacaacaagatataaattgattacaatgtgaaattgtaaatcttttaatacagaagt

SEQ ID NO: 802483 - DNA, 620 bp, Homo sapiens
ctttttagtattagccagcacacgccaggcccttagtgcgtactagtaaatgcttataggttgattgtctgatgtgttcagcaggattggtttggttgtgtctctgactatccatatgatcagaaatttatataattcctaagaaagtgaaacacagaggtataattttgccacaggaatttggggatatgcagttgttattttaatattataaaaaaaatcaacctttagataaaatttatttcagtatttctctttgtatgtaagtgatcattgttttcactgctattcaaggaattatctgaagccgaaaaccagtttaagaggattattgaacactaccccagtgagggccttgattgcttggcctactgtggaattggaaaagtrtatttgaaaaaaaacaggttagtagaaatgacactactttaagctctaggctggtaactcatttaaaatccaatgtgataatgatccattttctagaattattttgatatctcctctgtagcacactatcataattgtgatttactttgaggacctgaaatttcactatcagtattaattgttaaagcaaggccagtcattgcagttcttggtacttcctgattttaaat

SEQ ID NO: 802484 - DNA, 593 bp, Homo sapiens
ttgaaatgaattaggcccagaggagatcagaccataggaatttaaagttagatcttgagagaaaacttaggtaaaaaagaaaaacaaaattaaaggaggactgtgtgtgagagttgaaagatataagttccagaatgttgtggcaggacagtgaaatcttctggttcctaaagacggaggagactctctcccagcacctgacttccaccctcccactactgccagacctttgcctgggctgttcctagcctggagcactgtccccgctctgcatcctgcyttcccctgaaaccccgtcaggcgtgccctcttttggcctcccactgtgtcccttctctcatgtgcattagatctcagcctggccttgaatgtctctttctcaccagtaccttgcacagtaaacattcaaacttactgtgaattcatctgaaaaaaaaaaaattaagtgtggaaaaagtgtgaccaccctgaactgagtaaaatattctgttgagatccagttttttctctccattgaatgtgcagttttagttagaattacactaaagggcacttatcatttatcgtttttccaagttcttgtaacagatatg

SEQ ID NO: 802485 - DNA, 612 bp, Homo sapiens
acaaagagctcacagaaaagggaatgcagattgttcctaaacacagaaaaatatgctcaatttcaacaaaaatatgataaatagcaattaaaacaaagataaaaaaatgtcattacattgtgttgccagaggggaggcaataagccttctctgcattgctggggataacctgaaatgttgcaacctcgtgcyggctatttggcaagaccaaaaacattttacaaacacatgggcccagcagatacatttgcagatgtgagatgacttatgaacatagttattcactgcaacactgtttgtaaataacaaaagatggtcgacaaactaaattccaacaataggaaaattgtgagttttctttcaacaatgtggagatcatttacactagtacatatggggatgcagggctagtttccttcatttatcttaagaactgactccttattgcatatgaatcagcatgtccagtctacgccccctcactcccatacattctacttttttttaaaatttaagctgtatattgcaccatttgtgaaaaagaggaagaaaaagcacatttgtacatatttacttgtagatgcatacagtatctttggaaggaatcacaag

SEQ ID NO: 802486 - DNA, 609 bp, Homo sapiens
ttcattcttctgcatatggatgtccagttttcccagcaccatttattgaagagactcttctttccccagtgtaggtccttggcacttttgtcaaaaatgaattcactgtatatgtatggatttatttctgggttctctattctgttccactgtctgtgtgtctgtttttatgccagtaccatgcctttctggtttctacagctctgcagtataatttgaagtcaggtaatgtgattcctccagttttgttctttttggttaagatagttttggcttttctgggtgttttgtgatcccatatraattataggattgttttttctatttctgtgaagaatgtcatttgtattttgatagggattgcattgaatttgtagattgctttgggtagatgaacatcttaaacaatattgattcttccaatcaatgaacatgaaatatctttccttttggtatgtgtatcctcttcagtttcttacatcaatgttttatagttttcattgtagagatcttttacctttttaattaattcccaggtatcttattttattcataactattgtaaacataattactttcttgattttttttcagattgttcactgttag

SEQ ID NO: 802487 - DNA, 558 bp, Homo sapiens
taaacaagttgttcgaatcaggatccaaaaaagttcccattcattgtgattgattgaggtgtctctttagattttttaagcctggaggtactggcacaacctccttctctctctctccctcctcctcccactctttctctcccaccccctccaccctcaaacccagcaggtctgaccaggcagcagtggtcatctgattgacgcgcattgaactctctgcctgaaaagatgctgtacttcgttgagttccttccttttctgttctgcccaagctgtaatggctctgaggatttggaaaaggttttagaatctaggaatgaatgasaaaactgttttaaagggcccctccacactactgaggtcatttactttttcttactctttaccaaaacctgtatagatcactgatataatagatgcgaaagatactctagtggaaaatgtcatgtaaatgtaaaggactgctgatggttatgttatcattcaagaatgttttacagggggagatcttagcaagcggaagtacaagtaaaactgaatcatgagcaatttatgtta

SEQ ID NO: 802488 - DNA, 644 bp, Homo sapiens
gggagtgaaggggacacttgtggacatgagagtggggttgagtcttaatattataaagatatgaatttggggcgattgagggtttttcagcagggattaggacagatctgtgggttggagggaggtgacactgtaagaaggagggtttggaaggcaggaccattctagatgtaatgtataggcatgagggaatacgaagaggtgaaaagtggaagacagatgggaaaaccttaaaaatattcttaattatactttaatttccaacagaccaaagtgagtatttctggattcaaacagcaacatggccaagtttttggagataggaaaaagagtattaagctttgttggcagtatactaaaaggttctaggaatgcagtgattaggttttagtgggacatggagaatatgtcctactgaggacctgaaggaactgttgaggaactgaagataraattattattgtagttcagaccttacattagggacaggtggaaataatttgcagcaccattaaatatgagctaaaaaatagggcagtgggagagggcaatgtttgaagctgtgaatctgtaaaggaaaaggttgtatcataattcatggtttggaaaatggagagtagctgagcatgtgagcagtttcattt

SEQ ID NO: 802489 - DNA, 632 bp, Homo sapiens
ggagggtaagtgacaaaaacttcaggccgttgatctgggattcccccagatggggttcaggggcctcttccttcttactccagaatttatcacgttatagtttctttgacccatttggtcttccctactggtcttggacgttttcaggactggggtccaatctcaaccatctttgcatccccagcaccgatcagagtaactgacacagtgcagacactcaacgagtgcatgtggtataaatgaatagctatgcacttcactgcaggtaacctgtgactcaactgtagaaagattttacaggttatggggtttgagagaatggtgactgcatccacgaaggcaccgtctaagacagccggttttgggaaaaggtgatctctrgtgtgacaagttgagacctctgggctttttgttccatttgttttggttctcactgtcttgacctccttcttggaaaaccctttaacatgcaaaattgcgagtggcacatgatacttgcttttctctctccaaggcaaataatgtcagtccctttggtgatccagggatcagaaactagactacgctctgataaggacatcacccgtatgatggaaggattaactcctggccattctattttaattttactg

SEQ ID NO: 802490 - DNA, 618 bp, Homo sapiens
tggggtatgtgtttaccttcacaagaaaacaccagttctccaaagttgttttattttatattcccatgatgtatgagggttccagttgcgtgacatcctcaccattttgtatggtttgtctgttgggttttagccattctgtagtggatatgtagtggtttgcatttgcatttcttcatggctaataccaccttttcatatgcttattagcctttcatacatattctttgtcacaggtctttcccatcttttgcttgtgttactgrgttgtttaataattgagtagtcctttgtcattaagttttttgtcacatgtatgtcagtgtatttccctagactgtggctttgccttttcctttcttaatatggtatcttttgatgaatagggagttttaatattgatgaagttgtatttgtcaactttttttgtttggtactttttttatcctgaaaaatctttgccatctccaagtttgtgaagatattctgtgttttcttctaaaagttttttatttttattttttagtctgcttttacagttaggattctgtggtccatcttgaattaatttttgagcgtggaacagggtgaaggggttgaagttcattttcttccata

SEQ ID NO: 802491 - DNA, 606 bp, Homo sapiens
ggatggcgatgtaggtccacaaggtggatggggtcctgagtgaggaccgcctcagagagacagccagggcttgtggtcggtgactagaccgaccagtgttcagagagtgagacagcagcattcccgcatatggctgggctgggaaagctgggagactgtgtgctctgtcgtggatatgatgagcggttatgcgggctctgcttcttgccacctacttgcaggttgaaggatgtgcctattccacatcgctgatggggcatccgagctttccytggaggtgggcagctctttcggggttggtacccatcaggtgctgtggccagaactcagattcggagtctaaattcatactcacactctatacacctggattgagatcacagtattattattttcacaatcgaactgagcaaagatacggcagccactgaagactcactgtgaggtgcgtctaagggagaaaccatgggctgttgccgaagatctgggagaaaaagtgtggaaaaggcaaaaccgcgcctgggagctcctgcaggaggcgccccgggacactaggacgctgcctctccagcgggggtttgcagttttcatggtcctgtgtggcgt

SEQ ID NO: 802492 - DNA, 432 bp, Homo sapiens
tgagagtcctggtcccgacctggtgagccctgctcccgccccagatgacccctcatgacccctaatctttggggacaagcctgctgacactgaccaggctggaggacatttgtttgctcccctcctccagcacccagggcagccctggagttttttctagctttcccygattcttttttcagccctattttattttctgcatctttttttcctatatctcaagtagcctgcaatcaaaccaaagccacggtctgaatgttgtggttattgagagggtaaagttttttatttttatttttagagatggcatctctcactgttacccaggctggagtgcagtggtgtgatcctttggactcagttgatcctcccgcttcagcctcttgagtagctgagtctacaggcatgcaccactgtggagtccaaattagt

SEQ ID NO: 802493 - DNA, 432 bp, Homo sapiens
tgagagtcctggtcccgacctggtgagccctgctcccgccccagatgacccctcatgacccctaatctttggggacaagcctgctgacactgaccaggctggaggacatttgtttgctcccctcctccagcacccagggcagccctggagttttttctagctttccccgattcttttttcagccctattttattttctgcatctttttttcctatatctcaagtagcctgcaatcaaaccaaagccacggtctgaatgttgtggttattgaragggtaaagttttttatttttatttttagagatggcatctctcactgttacccaggctggagtgcagtggtgtgatcctttggactcagttgatcctcccgcttcagcctcttgagtagctgagtctacaggcatgcaccactgtggagtccaaattagt

SEQ ID NO: 802494 - DNA, 700 bp, Homo sapiens
tgtagagggaggggacagtgtggaaactgggctgagggagttaacccctctcaccaggccccttcccagcccagcgtccgcagaagtggaagggaaatggcagtgaggcctcatgtggcaggtggttttccaaagctaactacaaagctgttgccacgcctatggtcttctgtgaacttgccaccctgtgatggtggagcctctgcgtggtggaatcctggaatccgactgcatggagcatcggaatatggtgaaaaatcactccgttcctcgtgtggataggtaaaccaaaaataaaattcyaaccccgccccccgccctccccatctgaaggtacccctccccttggcaagggtattggaaggctaacctgagggactggttcaggccacgatgtggggcgggggctggacatgcctcactatcccctcctccctttcagaatgactgatagaacaggctctttcagtctaatgagaaacatttacaatctcttctctctgaagcctgctacctggtagcttcagctgcataataaaactttggtttccacaaccccttaacataacccagacactcctttctattgatgccaggtctttagatagtaacttaactccttcaaccgattgccaatcagaaaaaatttaaatctaactataacctggaagtcccctccccgcttccagttgtcccgcct

SEQ ID NO: 802495 - DNA, 700 bp, Homo sapiens
tgtagagggaggggacagtgtggaaactgggctgagggagttaacccctctcaccaggccccttcccagcccagcgtccgcagaagtggaagggaaatggcagtgaggcctcatgtggcaggtggttttccaaagctaactacaaagctgttgccacgcctatggtcttctgtgaacttgccaccctgtgatggtggagcctctgcgtggtggaatcctggaatccgactgcatggagcatcggaatatggtgaaaaatcactccgttcctcgtgtggataggtaaaccaaaaataaaattctaaccccgccccccgccctccccatctgaaggtacccctccccttggcaagggtattggaaggctaacctgagggactggttcaggccacgatgtggggcgggggctggacatgcctcactatcccctcctccctttcagaatgactgatagaacaggctctttcagtctaatgagaaacatttacaatctcttctctctgaagcctgctacctggtagcttcasctgcataataaaactttggtttccacaaccccttaacataacccagacactcctttctattgatgccaggtctttagatagtaacttaactccttcaaccgattgccaatcagaaaaaatttaaatctaactataacctggaagtcccctccccgcttccagttgtcccgcct

SEQ ID NO: 802496 - DNA, 619 bp, Homo sapiens
gtgtaaaactaggctgtgccctgactaccttgggcacatgttctcagggtctcctggggctgtgttatgggcagagtttggctcttttcactgacagacattaacattaactgaggtgctttggcttctagccccttggaagmtgccgtcctgtaaggaggggcacctggagacttcccgactgggaagagctcacatcttgtggagtttgggggctgcggagacagagcaagacaaggaggctgaggcacccgctgatggtgcttgggtcagagacacatcctctgtgcctgtcctcccaatccctgacctgtaaaataatgagaaaataaaggatgatttgaagccttgaagtgtggggaggctgcctatggagcaaccacatcaccggagcatccagccaagacaaggctgggatgcggatgaggttgtaagatgagctgcccaatagcctggtggatggggatttcagcggctctcccaggcaaagagaggggcatctggcagggcccagtgaggactctggcttcctgtgcagcctggtggaggcccccatctcactgcctctgggtgtgagaggggactgagcaagagcaactcactgtccgcttgctgggaa

SEQ ID NO: 802497 - DNA, 619 bp, Homo sapiens
gtgtaaaactaggctgtgccctgactaccttgggcacatgttctcagggtctcctggggctgtgttatgggcagagtttggctcttttcactgacagacattaacattaactgaggtgctttggcttctagccccttggaagctgccgtcctgtaaggaggggcacctggagacttcccgactgggaagagctcacatcttgtggagtttgggggctgcggagacagagcaagacaaggaggctgaggcacccgctgatggtgcttgggtcagagacacatcctctgtgcctgtcctcccaatccctgacctgtaaaatmatgagaaaataaaggatgatttgaagccttgaagtgtggggaggctgcctatggagcaaccacatcaccggagcatccagccaagacaaggctgggatgcggatgaggttgtaagatgagctgcccaatagcctggtggatggggatttcagcggctctcccaggcaaagagaggggcatctggcagggcccagtgaggactctggcttcctgtgcagcctggtggaggcccccatctcactgcctctgggtgtgagaggggactgagcaagagcaactcactgtccgcttgctgggaa

SEQ ID NO: 802498 - DNA, 632 bp, Homo sapiens
cagctgctctgcagtgcagcggtgacacaggtgccaaaaactgagagagagcctgtctttttggaccgagtattgggaaaggggaattccagggaccagagtttgtggctgcattttcctctttcctctgactgctttaccctaagagtggccccgattgtgtaaaacaatgcagcagcccaggtggctcaaatgctgagcaagtcttggctttagagaaagaagtatcagaaaaggaggcccgggagctgaaagtgggggccgaccggggggaggggtggatctcacagaggagagaactggagaagaggatttccagattctgtgtatgaattgatataatcgtragctttgcatgcacaggacggaaaacaataagaaaagatgaacttaaaaattacctcgttttggaatatatgaccacacttctaaatgtcaaagaagaaaccataatggaaatttgatagtacttaggactgagtgatattgaaattctaaatataaaaattaaagggcatatagaaagtaagaaaaatttatatgcctaaatgcatatattagaaaacaagaaagtctgaacattaatgtttagaatattcaactgaagacattaggaaatgaacaacagaatt

SEQ ID NO: 802499 - DNA, 513 bp, Homo sapiens
aaggaagggaggaacaagactaaaatacagttttaggtcgaccaagtgtctgctcgctgacatcattcatccctccctcaagtatcacagacaatttttgtagccgagcgttgctgctgtttagtaattcaaagtgtatctgagaaacacaattatctcgacagagagttggacagcagctgagggtgatgtgtgagctggtgccagaggtttgctkgtttagttactccaagcagggagttgtcataaggcttcctggaggagtggagctgggggcagagagtggcctctcactggatgcaggtagaaaaaggagccagaaatgagcaggcccagctagttgctggattggctagttgctaccatgatgtcatttcatacccacagccaccctgaaacctgaaagcaaggttttatcacttcccatgttgcaggttagaagacatggcttgcacaggtggagtgatccttcccaaaccacagaagcgggagtgaagggatcctatccttggg

SEQ ID NO: 802500 - DNA, 513 bp, Homo sapiens
aaggaagggaggaacaagactaaaatacagttttaggtcgaccaagtgtctgctcgctgacatcattcatccctccctcaagtatcacagacaatttttgtagccgagcgttgctgctgtttagtaattcaaagtgtatctgagaaacacaattatctcgacagagagttggacagcagctgagggtgatgtgtgagctggtgccagaggtttgcttgtttagttactccaagcagggagttgtcataaggcttcctggaggagtgsagctgggggcagagagtggcctctcactggatgcaggtagaaaaaggagccagaaatgagcaggcccagctagttgctggattggctagttgctaccatgatgtcatttcatacccacagccaccctgaaacctgaaagcaaggttttatcacttcccatgttgcaggttagaagacatggcttgcacaggtggagtgatccttcccaaaccacagaagcgggagtgaagggatcctatccttggg

SEQ ID NO: 802501 - DNA, 528 bp, Homo sapiens
gagtattttcttgaaatttcggcatggtgccacagctaccaaccatgacacctggctcagtgaatatctatggccacagccagggcacaaatgtgaattttaaaaattccacaaagcccctccttttccaaacagaaattggacataaatattcgtacatcaaagtaacatattaatgggtgatacttcaggttacttcttttttcttttcttttttttttttttttgagatagagtcttgctctgttgcccaggctggagtgcagtggcgtgatcttggctcactgcaacctctgcttcctaccgggatcaagcaattctcttcctcagtctcctgagtagctgggattgcaggcatctgccaccatacccggctaagtttkgtatttttagaagagaccaaggtttcaccatcttggccaggctggtcttgaactcccaacctcgtgatccacctgcctcagcctcctaaagtgctgggattacaggcatgagccaccgtacctggcccaggttactttttcaatt

SEQ ID NO: 802502 - DNA, 528 bp, Homo sapiens
gagtattttcttgaaatttcggcatggtgccacagctaccaaccatgacacctggctcagtgaatatctatggccacagccagggcacaaatgtgaattttaaaaattccacaaagcccctccttttccaaacagaaattggacataaatattcgtacatcaaagtaacatattaatgggtgatacttcaggttacttcttttttcttttcttttttttttttttttgagatagagtcttgctctgttgcccaggctggagtgcagtggcgtgatcttggctcactgcaacctctgcttcctaccgggatcaagcaattctcttcctcagtctcctgagtagctgggattgcaggcatctgccaccatacccggctaagtttggtatttttagwagagaccaaggtttcaccatcttggccaggctggtcttgaactcccaacctcgtgatccacctgcctcagcctcctaaagtgctgggattacaggcatgagccaccgtacctggcccaggttactttttcaatt

SEQ ID NO: 802503 - DNA, 606 bp, Homo sapiens
aagggcaaagagccactagaaagggatcccactggccagatctgggataatgtgagcatcacaaataatatcagtagcagattataactcattgaatacaagaggaatccatgaatccatactgatatagatagatcaatagataactaagggaggggaaaagctcttccttatagctgaaagagaacacatcaatgtagaaagaaccatgcattcagaggtaaccatcgtagaaataaccgattcaggttagaattatcgatgaatgctaaaagcaaagtttgaggaggaataagatatttacatggcctcaaagtaactgctctgagatacttcttacaaggtgaaaactagtaattttaaagtkaagaaacctggcagacaccacctgagccagagatagaagttaacatcattcaaattaggaaaagctgaccttatgtgcctcctgatataatgcactgggagggacacagcaccactttgtattcttgccccacagacataacctaaatctaatcatgaaaagaacattaaaaaccttaagttgaggcacatgctacaaaataactgctctatagtcttcaaaaaattaatgtcatgaaa

SEQ ID NO: 802504 - DNA, 411 bp, Homo sapiens
tggctttcctggatatagaggaaatgtacccacaggcttgtgacttgtaatgtgttgtgcagacttagtcagaagcaagaccagaaacccctccacacgttttatggacagtgtaagtttctagggccatttatacaaccccaggtacgggtggtgtccctcaataatggtggatacgtgaacacttccaaccctggacagcaggtgctcagagccagtttaattggatctaggaaaattaagggttgtgrtgtatcttgcacctgagggtggtgagcagattcacagctgctctgctcatcaagatttttctaaaagaatatgttaattgccgcagaactgcacttgtcagagcaagctcataaaagagatgagttttcagttgtgtttggaacagggtaggagtgggtg

SEQ ID NO: 802505 - DNA, 643 bp, Homo sapiens
gaacttcatttgataccgtgtcttagtttaaaaaagtgaaaaagtggagtctgcaggtgtgcctctctcacttggaatctcatcatctatttccttatgataattaagtcttgttcaaagtagtgtttaactttttatgtcagactcacaggtatggctcctgttttgtaacttacctcttcccccctccctcatggtacctactgataaatacttagygactacttggttatttccaatttattaaaaaaaaaaacagatttttaaaaagagaatgcaaggaagaatcgtgtaaaataattctgatgaatgcaactctcgatttactcaaagaaagatttctttcttccttgatggccttagagtaacatttccaaatctgacaagagaaaataatgagaaaacctccatgggagagattagagatgggtctgaaacctttcctcttattaaagccaaggaaacagggtggggaacacacacaagcagagagtagcctggatttctttcttaaatccagactcgttttgtccttttcacgtcttactgagagtgttcttgttaagaatgcgtggtggaagaagggaccgcaaaggcttgtccctgggatgtggggactcagcgactctcaggagaaaataat

SEQ ID NO: 802506 - DNA, 578 bp, Homo sapiens
attaaaatgcatgacacaattaaaatatggggacacatgcggcctgtgttaaaattagattatcaatactgcttagcagccttggaacctcaggcgaggcactgaagcagttagggtttcctcttctgtaattgagtgattttaactgtatctctctcataggattgttgagaggattaaaagagatgatgcttataaaaacatgagactgcttggacctattctgaatgcttaatgagatctagctgtgaaaatatgtgtctacatacatatttaataagcacacgcgcgcgcgcgcrcacacacacacacacacacacacacacacaggaatgctgtactccgtcacgtggtgaccaatggaacaaaccctctctgtcccggacctccaccgcccacggcagctgaactgggcccggggtcttgactcctcacaggcttcccctctcactggcttctcttcttgccgctcttcttttctctttgtcttctttgtaggtttctcaaatatccctttttctctttggtccttttcttatgttaacctcttgcctccttggtgtctacatttattcatt

SEQ ID NO: 802507 - DNA, 578 bp, Homo sapiens
attaaaatgcatgacacaattaaaatatggggacacatgcggcctgtgttaaaattagattatcaatactgcttagcagccttggaacctcaggcgaggcactgaagcagttagggtttcctcttctgtaattgagtgattttaactgtatctctctcataggattgttgagaggattaaaagagatgatgcttataaaaacatgagactgcttggacctattctgaatgcttaatgagatctagctgtgaaaatatgtgtctacatacatatttaataagcacacgcgcgcgcgcgcgcacacacacacacacacacacacacacacaggaatgctgtactccgtcacgtggtgaccaatggaacaaaccctctctgtcccggacctccacmgcccacggcagctgaactgggcccggggtcttgactcctcacaggcttcccctctcactggcttctcttcttgccgctcttcttttctctttgtcttctttgtaggtttctcaaatatccctttttctctttggtccttttcttatgttaacctcttgcctccttggtgtctacatttattcatt

SEQ ID NO: 802508 - DNA, 578 bp, Homo sapiens
attaaaatgcatgacacaattaaaatatggggacacatgcggcctgtgttaaaattagattatcaatactgcttagcagccttggaacctcaggcgaggcactgaagcagttagggtttcctcttctgtaattgagtgattttaactgtatctctctcataggattgttgagaggattaaaagagatgatgcttataaaaacatgagactgcttggacctattctgaatgcttaatgagatctagctgtgaaaatatgtgtctacatacatatttaataagcacacgcgcgcgcgcgcgcacacacacacacacacacacacacacacaggaatgctgtactccgtcacgtggtgaccaatggaacaaaccctctctgtcccggacctccaccgcccacggcagctgaactgggcccggggtcttgactcctcacaggsttcccctctcactggcttctcttcttgccgctcttcttttctctttgtcttctttgtaggtttctcaaatatccctttttctctttggtccttttcttatgttaacctcttgcctccttggtgtctacatttattcatt

SEQ ID NO: 802509 - DNA, 504 bp, Homo sapiens
agttcctaacaggccatggtccatagcctgggggctggggacccctggtctaaaacatggggagataaaagcatgaaggctgccttacacaccttcactagtctgtgctcacactcaacacgtgtgggactaaaggagtgtccctactagatttttgactgtttccctggttgctctggggaagaggggttggggaggatgctggcatgaccttgcaattcttgctatgggaggaatacactggtacaacaactatgtattttttttctttctttcccaaatcatctcagaaaaatgtcttgtttttttttttctcccttacytgatgcggtggtcctagaaccagaggtgcaactgcaagttctggaagcaggaatgatttctaagcaagaaactgtcactgtgtttttaaactttgtcagaattcctaacaattctgggggtggaccgtgtctttatctcgtctggcaaaagtggggttaggactaaatacaatgcacatac

SEQ ID NO: 802510 - DNA, 502 bp, Homo sapiens
accctgggaatgggaccttatttggaaatagggtctttgtagatatcatcaagtaatgaggtcttactggagtagggtgagccctaatgcaatgactggtatatttataagaagaggaagatttagacacagacacacagggggagaaggccatgtgatgattgaagcagagttggagtgtctacaagtcaagcaatgccagcaatcaccagaagctaggcgggaggcacccaacagactctccctcacaccccccagaaggaaccaaccctgcaaatgctttcatatagaaggcctctccagaactgtgaaggactttctsctgtttcaagccacccagttagtggtgatttgttaaggcagccctaggaaactggtacacccagtcagtgcaataactttcaaatagttctgcttgcctccaacactcacactccatgtgttcccatccttgattactgtggcattctgcacatggcactcaaagctgggtcaatgtgag

SEQ ID NO: 802511 - DNA, 598 bp, Homo sapiens
ctcaatatattttatttttagagcagtttatgttcacagcaaaattgagaagaaagtacagaaagtttccacacacccccagtctccatacatgatggcatcaccctagtcagcagtccacaccagagtggtacatttgttacaaatgatgaatccgcactgacaacttataatcacccaaagcccatagtctaagttagggtcactctcagtgccatatattttatgtgatttgactatatgtaatgacaggtatccacagagatacctgtatgacagagtgccatrcagaacagtttcactgcactgaaaatcctctgggatcctcccattaatcactccctcccaccaacctcttttcattgtttccatagttgtgcccttttacagaatgccagaccattataacaacacagtatggagcctttttagattggcatctttctgagttttggaaattatgtaaaaacctgctctacatgtccctgagaaggttttgattggatataagttttcaactcgcttgtgaaaataccaagaagtatccttgatgaattgtatggtaggaatctgtttagttttgtaagtaacagccaaa

SEQ ID NO: 802512 - DNA, 465 bp, Homo sapiens
tgacaattttttctgggactggagaggaaccagaaagggaatggagttggggattgaggaaagaggggagaaacaagagaagggaataccttgggcagctgggcaagaagaaacaaagccacaccatccagagacagggattttggaataactgcaaagtcacaaaagtattgggaagatgacttaatgcccttgaattcaagtcctcagacatacacagatattrtggtgatcatcatagcaaagctagccttcccaggaaagagaatgccagaggttttcctcagaggaggcatagaattagcctagccagtgaccagttagccagtgaccagttaaaggacaagtgttgactttgactttaccccagtccactcacgctgccacccccatgccctacagacccagccatgtccttgtgtaaagcacaccaggagacaccaaaggtatcacagagcaggtcca

SEQ ID NO: 802513 - DNA, 517 bp, Homo sapiens
tccctttcttcccttcagctacatagaagaaagaaattattgcaggtccagtagaatctacctttcccattccattctcctactgcaaacacctatcctgaagttagtagctagtggttagaagtaaccactatcctgaagttagtacgtgtatcactcctatacatattttaatatttttaccatttaaactacatatattgttttgtgtttttaaagttaacataaacgatatatgatttgctattggcactcaatgttataatttcaagatgtagccaartgaattcacaaagatatactcaatcattaagcagctcttaggcctcccccatgtgaataatctcaatttatttagtgaatgtcccctgtccatctccatgcatacgcgtgaatgagtccgcattggtccagggcctggggtcctttctggaatcatctggggagactgaaaaactagtgatgcctggtctcccctgggagagtctgcttcaattaggctggagggcagttgggc

SEQ ID NO: 802514 - DNA, 491 bp, Homo sapiens
tataaaattgctgtcaagagtataaaaagttaagtttcagtttcttttatattttgttaatatagactgcttcatctgaaaagagtaaaattacatgaagtcagaacactcccacatccttttagcatttgatctccacacctctgccctataaatttctaagcaaacaatggtgaaaacaaaacatggccactcggtagaagaaatgagggcattccttttctcctgagcactcgcaccactctcccagacccactccrgaggtgttgcaatagaggacagtttgcaggggaaaaacccagattccccagcatgaagcacacagtcctttgttccatgggtgtcattcccaaccattccccctccaccctacatttcctgagccaatgcctccatgcctgtgccacatgccacccacagcgtgaaggactagcaccttcttgtgccctcacctacactcacgacctcctttgggcatctgtcctagatgt

SEQ ID NO: 802515 - DNA, 491 bp, Homo sapiens
tataaaattgctgtcaagagtataaaaagttaagtttcagtttcttttatattttgttaatatagactgcttcatctgaaaagagtaaaattacatgaagtcagaacactcccacatccttttagcatttgatctccacacctctgccctataaatttctaagcaaacaatggtgaaaacaaaacatggccactcggtagaagaaatgagggcattccttttctcctgagcactcgcaccactctcccagacccactccggaggtgttgcaatagaggacagtttgcaggggaaaarcccagattccccagcatgaagcacacagtcctttgttccatgggtgtcattcccaaccattccccctccaccctacatttcctgagccaatgcctccatgcctgtgccacatgccacccacagcgtgaaggactagcaccttcttgtgccctcacctacactcacgacctcctttgggcatctgtcctagatgt

SEQ ID NO: 802516 - DNA, 543 bp, Homo sapiens
ccacttgaatttaagcatcactgcagttggcctagttgatggacatgctttttgtctgttgttgagcaaattatgcaaatctgacttttttgtcaaagtccatgtttgtcattctaggaatgtatgattttaagaacttctcttaacccagtccaccaggtgatatttttgctaaaccttacatggatatgtagaagattcattttcttataaaccttttgtctctaccatctaaatctttggttgactgttccctcccctggttttcttgtcactccagtgctgtctcccttctaccctgtgaagaggttgaaatataaggygaaggcagggaactgaattgtgcatgaaggcatgcaatcaataaggcaggtggctcagtaatgcctacctgattcctgctcccactatccatttcacaagcttaggcatttcctttacttgctgtcatagtaaccaggactcctgccagtcttcccgtttatcttttatctgtgagtgcatctgaagggggatggggagtatagaaatggaaacctctca

SEQ ID NO: 802517 - DNA, 603 bp, Homo sapiens
gtgtgatagtcctttgaaaactaagttgccgcaggcatacaggacaacataagaaataacaatagttctgtctctttgaagtggctcctagagaagttggtgaatgaaaaagttccaagtgcattgtacttgtgctctgttctctttggttttccctgaattttcgtgactgcatcgtccatacaaagggcattgagaaatmcacacagttgtgttccttttttaatttaattttatttttttgagacagtttcgctcttgttacctaggctggagtgcaatgacgtgatctcggctcactgcaacctctgcctcctgggttcaagcaattttcctgccttagcctcccgagtagctgggattacaggtgcccgccaccatgcccagctaatttttgtatttttagtagagacggggtttcaccatgttggtcaggctggtctcaaactcctgaccttaggggatccacccactttggcctcccaaagtgctgggattacaggcatgagccaccacatctggcctgtgttctctcctttgcagagtctttaagacagttgtggcagtttgtctgaacaccttttcatcatgtggcaaaagaga

SEQ ID NO: 802518 - DNA, 550 bp, Homo sapiens
tggctgccatattggaaaggaacaaagcaaccacaggaggaaatctgagctgtcctatacaggctattaaaatacgagctaccctaaagggaattgaactttgaataaatagactcaatgtttaaattgaaaggaggcagtttaaattggaaaaaccctgaactattgtcaattggccaatcttagtagctcctactgcccagcaggctagcgtctcatgagaaatatcagatgaagctatagagacaataaagaatagtttctttgaatctctgagttgtaatgtgaataaattcacggtctccatatatttgcattctgtgtctcctctcccccascaaacattttggatcggattccaccctcctgcaagcttctctgaaaagtggcaactgcctaacctgtgttgctgttcatacttagtgttgtcctaggctaaggtgaaaaaattggctggttatggggctctattggaggtttctattttcccttcgctgacaaaggttagacaggataactgaaagcctcactattagagtcacatattcct

SEQ ID NO: 802519 - DNA, 660 bp, Homo sapiens; identical to SEQ ID NO: 802314

SEQ ID NO: 802520 - DNA, 629 bp, Homo sapiens
gtttgcgaacagcacccgtgggtcactctctaccacatctggtcctggggtttctcagaggatgtggtcaggagcctctgtctgcacagctacctggcctttcttcaggatccgagcctgcacagtgtgcatcacagggctccatgggagcacaaacacagttcaccttctccccatctggagcggctatgctcatttgctagtagcagcatttcccacttccctcctttcctccttctcttcctccttccctcttgcctctcctacttactgagcttctarcgtatgccaagcactatggctgagacggtcttattctcaaggcgagcccactgaaaggaggtcaaacctacagcccggagaattgatgactaggggtgagaaagaagcttatgcaaagttaaagtgttttttatttcatttagatgtatatttttagagacaagctctcactctgtcacccaggttggagtgcagtgttacgatcatggctcactgcagcctcaacctcccgggctcaaacaatctgcccacctcagcctcccaagcaactggggttacaggtgtgtgccaccgtgccaggtgaaagtgtttttcaaaaggcatttaacataggaagattggtgact

SEQ ID NO: 802521 - DNA, 629 bp, Homo sapiens
gtttgcgaacagcacccgtgggtcactctctaccacatctggtcctggggtttctcagaggatgtggtcaggagcctctgtctgcacagctacctggcctttcttcaggatccgagcctgcacagtgtgcatcacagggctccatgggagcacaaacacagttcaccttctccccatctggagcggctatgctcatttgctagtagcagcatttcccacttccctcctttcctccttctcttcctccttccctcttgcctctcctacttactgagcttctagcgtatgccaagcactatggctgagacggtcttattctcaaggcgagcccactgaaaggaggtcaaacctasagcccggagaattgatgactaggggtgagaaagaagcttatgcaaagttaaagtgttttttatttcatttagatgtatatttttagagacaagctctcactctgtcacccaggttggagtgcagtgttacgatcatggctcactgcagcctcaacctcccgggctcaaacaatctgcccacctcagcctcccaagcaactggggttacaggtgtgtgccaccgtgccaggtgaaagtgtttttcaaaaggcatttaacataggaagattggtgact

SEQ ID NO: 802522 - DNA, 531 bp, Homo sapiens
ctcatgggcagcatgaccaataggtgtagacctattgcaactggtgggtaactttttgcttaagtcagcttgtaatggctgtgttgtgttctctggctagaagggtagataagggataagttaccctgaacctaaagcacgagaactggccccaacaaccaagagtccagatcacgctatgctaaagcccctcactccaatcttcagtcccctggtacctccctatgacacaggtggctcacagaaccatcactggggacagactgctgggtggcatgctgctgcagggctaagaatcgcgtttttaaaggttagttcatttaattaaaagcacagcagggtgctgcctactttcattaagaaaggtcatyttccccagcatattctaatggaaaccagggcagcattcagagataggaaccatcacaagttgattttgctctcttaaggtaagatacggcaaagaatgaccagccacctcctagcagggtgctgaggctggctggtgcagtaggtggagatttagcagat

SEQ ID NO: 802523 - DNA, 632 bp, Homo sapiens
tattttttgtagagatgggattgcaccacattacccaggttggtcttgatctcccaacctcgtatctgcccacctcggcctcccaaagtgctaggattacaggcatgagcgactgcgcccagccatttttggatttttttactagacacagggtttagccgtgttgcccaggcttaaactcctgtcctcaagtgatctgctcgccttggcctcccaatgtgctaggattataggcttgcgggattacctggcctgcaagtatatttttgaaaccaccttactgaggtacaactgacatacactaaacatattaaaactgtacaatgtgatgtttcgagagagtgagcatatccttcctcctgsaagtatcttcctgcttctatgtaattcctcccatccccacctccactcccactgtaccccaatctgtttcctgtcactattgataagttgagcaagtatatatttaatctttaagagcttcctcgctttctgttcccttttcataaatttcctgctttttaaagtattgctttattatcttatatctctctggagttttaatttgattaaaatattttttggtccccggagttattctctgcagcctccaaaacagtcttactagttta

SEQ ID NO: 802524 - DNA, 598 bp, Homo sapiens
cctctgataatgcctagtatagattcttcaggattttctaaaacaggtgatctttggtctatcattctctgaactcctgtcatattagtaaagaaaaagtttttgtgagagttataaaggtattcaaatcttctaaaattttccagcattaattttgtttttttttttctgcctgagtgttgatttataaagtgggccctatatctgggcatagttgggggagacattttcttcacaatatagagagtttccaaaagaccacccccatgctttttgtcagcccttttctcctccccacagggagatggtatccaagtccatcttcrgctaaaatccgtgcttgtattgacagccccacttcctccttctgaaagcagcattttaatttggagctgttggtgcttaggtataaaatctatttcatttaatgctgctatgaaaatttcccagttttgaatttaagacagtctcttattgttttttcctgctcttgcatgggggaccatctgctctgccaagctttcaaaactttgctctcaagttaggtggcaaatgggctaacaatttggtatatgttaagagcttgttataaagaata

SEQ ID NO: 802525 - DNA, 623 bp, Homo sapiens
tcacattttcaggtatccttatagcagcatcccactctcttcagtaccaatttactgtgttagtccattctcatactgcaataaagaactgcctgagactgggttatttataaaggaaagaagtttaattgactgacagttccgcatggctggggaggcctcaggaaacttgcaatcgtggcagaaggggaagaaatcatgccctttttcacatgatggtgggaaggagaagtgctgagtgaaggcggaagccatttataaagccatcagatctcataagaactcactcactatcacaagaacagcatgggggaaactgcctccatgattcaattatctctatttgatcctgcccttkacacatggtgattattataattcaaggtgagatttaggtgggaacacagagccaaaccttatcagttgggtagttctggctcatgtggttgcagtgaggatgtcagtcagagctgtgatctcatctgaaggattaattggggctagggctgtggtttcatcagaaggattgattggggctagggccatggtctcatctgaaggacttattagggctggataatccacttccaagatggctggctcacatgtcgtttggcaggagg

SEQ ID NO: 802526 - DNA, 608 bp, Homo sapiens; identical to SEQ ID NO: 802322

SEQ ID NO: 802527 - DNA, 633 bp, Homo sapiens; identical to SEQ ID NO: 802419

SEQ ID NO: 802528 - DNA, 476 bp, Homo sapiens; identical to SEQ ID NO: 802423

SEQ ID NO: 802529 - DNA, 588 bp, Homo sapiens
acatttgagcccatttgccccatcctgctcgttctcctcctcttcctctttttctctcccatatatacagtgatatgcagggcataccactacatcatagatctcagtcctcaaagcttacaaaattacttccatttgtgaggtaaactaactcttgttcctcagtcttgaatttacccaccaggcttgctgcaaagaatgagcttaaaaataacctgatgatttccacgtggcagggccacgggttacagagcacagcctgtgcccctaggacaggcacccacattgttctttttggaaggagtggatctgatgccagggaaaggtgacacaagaaagaagctggccacgaagcctctgagctttgtgacctgatgctcacctgacgcatggccaggctgtctcctctctgccaaayagggagagaaactctgacttggccgacatcgtgggtgtgttaggtaatatttgccaactgctttgaagatgaaaagcgttatggggcactaaatgtgataattatcaattataaaacctcactactccctggaacactaggggcgaatgagcaggaaatataaatgtttg

SEQ ID NO: 802530 - DNA, 635 bp, Homo sapiens; identical to SEQ ID NO: 802389

SEQ ID NO: 802531 - DNA, 592 bp, Homo sapiens; identical to SEQ ID NO: 802390

SEQ ID NO: 802532 - DNA, 574 bp, Homo sapiens; identical to SEQ ID NO: 802391

SEQ ID NO: 802533 - DNA, 558 bp, Homo sapiens; identical to SEQ ID NO: 802392

SEQ ID NO: 802534 - DNA, 599 bp, Homo sapiens; identical to SEQ ID NO: 802393

SEQ ID NO: 802535 - DNA, 506 bp, Homo sapiens; identical to SEQ ID NO: 802397

SEQ ID NO: 802536 - DNA, 614 bp, Homo sapiens; identical to SEQ ID NO: 802300

SEQ ID NO: 802537 - DNA, 644 bp, Homo sapiens; identical to SEQ ID NO: 802301

SEQ ID NO: 802538 - DNA, 557 bp, Homo sapiens; identical to SEQ ID NO: 802302

SEQ ID NO: 802539 - DNA, 597 bp, Homo sapiens; identical to SEQ ID NO: 802303

SEQ ID NO: 802540 - DNA, 562 bp, Homo sapiens; identical to SEQ ID NO: 802304

SEQ ID NO: 802541 - DNA, 668 bp, Homo sapiens; identical to SEQ ID NO: 802305

SEQ ID NO: 802542 - DNA, 598 bp, Homo sapiens; identical to SEQ ID NO: 802404

SEQ ID NO: 802543 - DNA, 638 bp, Homo sapiens; identical to SEQ ID NO: 802405

SEQ ID NO: 802544 - DNA, 605 bp, Homo sapiens; identical to SEQ ID NO: 802406

SEQ ID NO: 802545 - DNA, 551 bp, Homo sapiens
gatccgtgtggcggacatcaagaaagaccagggctccaaaggtccagttacgaagtgtcttctgctgcacgaagtccccacgggagagattgtggtccgcttggacctgcagttgtttgatgagccgtaggcagcgggctcagggtgtgctcagcagggtcccagcccacggccacacatgctgtctggaaattgtattccttttctaagaaaccaccatttggtattcagtcacagggatatgggatggcaaagacaggcccctcaaagctcctaggaatcattctcgacaatcctccctgccccgaaacaatttcctgtttcatgaaacaaagctgtgttttcctttgtcctcactacaggtytcattatggcttctagggtcgctgaaatcccatagccctcaacagggtgcagctgggagtctagccccttcccgggcttgagggatgggtctggttactataaaatagatttataaatgcaatgtctatatttttggagaactcatgtaaccctcctgtttcttacatccaccagtccccaagtag

SEQ ID NO: 802546 - DNA, 588 bp, Homo sapiens
cttatttatgccccattctgtccctctctctcgttgcctttgttctgtggtctcctgggtgatggagttattgtttgtgtgtagggatgtgtggataaaagggagctgatttctagaggtgagatggccctgtggttaacggttggaggctgctgttgacaaggcctgttgctgtggcagttttgctccggaagtggccattttctgggcagggctccaccagagcaccatctgtctgtgccttttacttcctgtcaagaggcagcaggcttcgtgagctggggaagtgccagaagcagccttcgaattagacagacctggacccaaaccctttctcttcccccmacccattttggcatcttggcacgagactgtccccatttctggaaagggtgttcacaagaacagtctggctgggttgttgggatgaccgagtgtgatcatgcgtctctatggctggccatggtgtttattcgatggcaggtattaccaggatggagcgagtcccagtaggaagggcctttaggatgtcatctggttccacccaacagggatgggaactgtaattccccactctccctgtggaga

SEQ ID NO: 802547 - DNA, 588 bp, Homo sapiens
cttatttatgccccattctgtccctctctctcgttgcctttgttctgtggtctcctgggtgatggagttattgtttgtgtgtagggatgtgtggataaaagggagctgatttctagaggtgagatggccctgtggttaacggttggaggctgctgttgacaaggcctgttgctgtggcagttttgctccggaagtggccattttctgggcagggctccaccagagcaccatctgtctgtgccttttacttcctgtcaagaggcagcaggcttcgtgagctggggaagtgccagaagcagccttcgaattagacagacctggacccaaaccctttctcttccccccrcccattttggcatcttggcacgagactgtccccatttctggaaagggtgttcacaagaacagtctggctgggttgttgggatgaccgagtgtgatcatgcgtctctatggctggccatggtgtttattcgatggcaggtattaccaggatggagcgagtcccagtaggaagggcctttaggatgtcatctggttccacccaacagggatgggaactgtaattccccactctccctgtggaga

SEQ ID NO: 802548 - DNA, 629 bp, Homo sapiens
ctgcttttatgaagtgtttgttcaagtattttgctcattttttctattgggtcatctgtatttttcttactgatttacagtttatacttgatttatagatttgtttgaaatataaatcctggtgaccataaatatattgcaaatatcttctcccattctttagcttgccttttcactctttttttttcttcctttattgagacggcgtctcactctgttgcccaggctggagtgcaatggcgagatctcggctcactgcaaccactgcctcttgggttcaagcgattctcctgcttcagcctcctgagtagctgggattacaggcgcccgccaccatgcctggctaattttttgtatttttagtagasacggggtttcaccatgttggccagactggtctaaactcctgacctcagatgatccactcacctcggcctcccaaagttctgggattacaggcatgagccaccacgcccggcctcgttctcttaatggtgtttttgataagcagatgtccttgattttattaaagttcaagtctcttattttttccttatagttattactttgtgagacctacttaagaaatattgcttagtccaaaataatatattttcctgtgatttctt

SEQ ID NO: 802549 - DNA, 551 bp, Homo sapiens
agtaaaataaaactggattagcataaggcagacaatcataaaaagagaagagttttatatgtagagagaaaaatacacagattgttgataatagtgcataaaaacaaacctaaacactagaacattaaattctgaggagcacagtcttrtgaattaaaagacttgatttgaatcctagctttggctcttattggctactaatttttgtcagtttgcttaactttcctgtaactccaactagtcatctgaaaaaggtgagtaacgattatagtacctcacaggatttctgtgaagatttaaagagataatgcatataaagtaactggtacatattaaattcaataaaaattaactttcaatattattattggcacagtggtagtgataaattccgagtccaaaactctcctaccctaccatgctctccatcccaagacagtagtggcaccacacacgagtggtgataactaacatttaaatccatatctaagctgtaattaccacaataaattaaaaacttccctcttttcattagtatgttaaaaataatt

SEQ ID NO: 802550 - DNA, 551 bp, Homo sapiens
agtaaaataaaactggattagcataaggcagacaatcataaaaagagaagagttttatatgtagagagaaaaatacacagattgttgataatagtgcataaaaacaaacctaaacactagaacattaaattctgaggagcacagtcttatgaattaaaagacttgatttgaatcctagctttggctcttattggctactaatttttgtcagtttgcttaactttcctgtaactccaactagtcatctgaaaaaggtgagtaacgattatagtacctcacaggatttctgtgaagatttaaagagataatgcatataaagtaactggtacatattaaattcaataaaaattaactttcaatattattattggcacagtgrtagtgataaattccgagtccaaaactctcctaccctaccatgctctccatcccaagacagtagtggcaccacacacgagtggtgataactaacatttaaatccatatctaagctgtaattaccacaataaattaaaaacttccctcttttcattagtatgttaaaaataatt

SEQ ID NO: 802551 - DNA, 704 bp, Homo sapiens
ttacatgataggcactcaataaataattgatgaatgattggatgaatgaattaatgatttagttgtatcaaatttaaatttaaccgctagatagttggtgtacgtttagagcaactgtgaatcttaattgcttacaaggtctggttggatatgccagatcaagttctagtgtattcagtcagctctgagcactggacacagataggctgatcctctatggttgcacataaggaaggaaggtgtgtgtttgtgtgtgtgtgtgtgtgtktctggattcatgtatatagcgtggaaaagaattaacagaatagatggattgaaaatgagcacatatacatgaagaattttctatcactaaagtcttcattaattaattgacagtcattttttgatgatacttttgggtgcatcacctatatttctttagaaattatgtaaaaaacatatttcatccttttggattctcttacaataaaaaatataaataattcaaatgaaagtggcttaacaatagggatttatttatttggcaagtaatttaaaggcagatgtgtcagtgtggtttaataatgctcccgtaacaaagaacaccctgatctcaatggcttacagccacaagggcttattttttttgcacccacaaaacactcaatacaaatttacagggtttcctacaatggggacttaaggatccaagcagatgt

SEQ ID NO: 802552 - DNA, 601 bp, Homo sapiens; identical to SEQ ID NO: 802367

SEQ ID NO: 802553 - DNA, 608 bp, Homo sapiens; identical to SEQ ID NO: 802371

SEQ ID NO: 802554 - DNA, 616 bp, Homo sapiens; identical to SEQ ID NO: 802373

SEQ ID NO: 802555 - DNA, 600 bp, Homo sapiens; identical to SEQ ID NO: 802374

SEQ ID NO: 802556 - DNA, 600 bp, Homo sapiens; identical to SEQ ID NO: 802375

SEQ ID NO: 802557 - DNA, 635 bp, Homo sapiens; identical to SEQ ID NO: 802376

SEQ ID NO: 802558 - DNA, 571 bp, Homo sapiens; identical to SEQ ID NO: 802377

SEQ ID NO: 802559 - DNA, 612 bp, Homo sapiens; identical to SEQ ID NO: 802380

SEQ ID NO: 802560 - DNA, 647 bp, Homo sapiens; identical to SEQ ID NO: 802383

SEQ ID NO: 802561 - DNA, 523 bp, Homo sapiens; identical to SEQ ID NO: 802384

SEQ ID NO: 802562 - DNA, 552 bp, Homo sapiens; identical to SEQ ID NO: 802385

SEQ ID NO: 802563 - DNA, 587 bp, Homo sapiens; identical to SEQ ID NO: 802386

SEQ ID NO: 802564 - DNA, 577 bp, Homo sapiens; identical to SEQ ID NO: 802387

SEQ ID NO: 802565 - DNA, 635 bp, Homo sapiens; identical to SEQ ID NO: 802388

SEQ ID NO: 802566 - DNA, 613 bp, Homo sapiens
gcagcatgactgctaacaagtacagggtttctttggcaactgatgaaaatattttaatattagatagtggttatgttttaacacccctgcatgtattagtccattttcacacagctataaagaactatctgagactgggtaatttatgaagaaaagaggtttaatggactcacagttctgtaggctgtacaggaagcatacttgggaggcctcaggaaacttataatcgtggtggaaggaaaagggtaagcaagcacatctttactatggcagatcaggagagagaaagagcaaagggggaagtgccacacwcttttaaaccaacagatcgtgggagaactcattcactattgtgggaaaagcaaagggggtgctcgcctccatgattccatcacctcccactaggccactcctctgccacgtggggattacaatttgacttgagatttaagtagggacacagagtcaaaccgtatcactggatatactaaaattcacatataaagcgcactgaattgtgcactttaaaaggctgaatttgatggtgtgtgaatcatttcaagtttttaaagcaataccatgggtaagtttgaaaaacaggaaaaacaccgga

SEQ ID NO: 802567 - DNA, 567 bp, Homo sapiens
aatcttcaaatatacaacaccacaggcaatgtttcctgctccaacttttaaaatcataaacactataaaacagggttttttttcctagtaaggaaaagtatccacgcttttattttcaaatgctaatgttcagcatatctgataatttaatgctaacttctttccttgtacttcctatatcttgcctattatttttatctttatggacccaattatagtttgttttctaagcagatcactgtgactagctcacaaaattgttgtatatcttctccgaggtacagaatatcattatcactgctgttccctaatgacagwtaaatcacagttgaatatatacagaaaaagagggatcactccaagagtttgtttttcttacagtaaagggaataccaaagctcaacaatatcgattatcgatactcaatacaaagccttaagttctcattcatttgtataaatgtcttattagtaaatcatgattggtaaactttgataatttttatcctcaaaaaaagccatcctcccagcattctgccagaagccaataatttttctgcatttgttt

SEQ ID NO: 802568 - DNA, 622 bp, Homo sapiens
gaggttgctactggcatctaatgagcagaggccagggatgatgttaaacaccctagtagattgtggttggcagcatccaagattccttcccctggtagccatgccttgcataaccctctcttcctgcatatggacaggacctatgaaaatgatgagatattgctcttatgtttatgttacttcctatggccaatggaacttggcagatgcaattaagatccctaatcagttgactttgaggtaagcaaaatgagactatyctgtgtggacctcacctaatcaggtgaaccttaaaagagacaagaagcagtagtaaacaagctcctgctggccttgcagaagcaaataacccatgcgggggttcttgggaatttttaattcagggggcctcgtggcaggaactgcaggtggcctctaagagctgagagtgactcttatccaataagtcagcaagaaaatagagactcccattttataaccataaggaactgaactctgccaacaatctgagtaagcttgaaagagaatcccaaacctcagatgagaattgcccaagcaacacctcaatttcagccttgtaactccctaagcagggcgcccagcgaggcagcaattggacttc

SEQ ID NO: 802569 - DNA, 622 bp, Homo sapiens
gaggttgctactggcatctaatgagcagaggccagggatgatgttaaacaccctagtagattgtggttggcagcatccaagattccttcccctggtagccatgccttgcataaccctctcttcctgcatatggacaggacctatgaaaatgatgagatattgctcttatgtttatgttacttcctatggccaatggaacttggcagatgcaattaagatccctaatcagttgactttgaggtaagcaaaatgagactattctgtgtggacctcacctaatcaggtgaaccttaaaagagacaagaagcagtagtaaacaagctcctgctggccttgcagaagcaaataacccatgcgggggttcttgggaatttttaattcagggggcctcgtggcaggaactgcaggtggcctctaagagctgagagtgactcttatccaataagtcagcaagaaaatagagactcccattttayaaccataaggaactgaactctgccaacaatctgagtaagcttgaaagagaatcccaaacctcagatgagaattgcccaagcaacacctcaatttcagccttgtaactccctaagcagggcgcccagcgaggcagcaattggacttc

SEQ ID NO: 802570 - DNA, 587 bp, Homo sapiens
caatctcaaactttttataaaagtgtactttttccaacacagagattgtttccaagtttgatgcttgacccaaaagccacgctggtataggaaaattgagtccgattagtgttcagcctctaatgcctggaattgttgtgtgtggactagcagcagtgtcatttcctggaatttggggtcccagaccagaatttctcaatcaaatctgtactttaacaagatccccaggtgatctgaatacatattaaatgtgggaaacactgttctagaatttccatctgatatggtttgggtctgtgtccccgcccaaatttcacgttgaattgtaatccccaatgttggaagtggkgcttggtgggaggtgattggatcatgagggccgacttccaccttggtgctcttctggtaatagtgagttctcatgaaatctggctgtttaaaagtgtgtggcacctccttcttttctctcttgctcctgctccaccatgtaggagaccgggctccctcttcaccttccaccatgactgtaagtttcctgaggcctccctggaagccaagcagatgctgcctgtggaaccatgaaccaa

SEQ ID NO: 802571 - DNA, 513 bp, Homo sapiens
gtctaaatgagcctaatgagatgggacaacaaagcgaaatgcaggatcctggacaagaaaaaaggaggttcagtaaaaatttaggaagtgaaagaagggtggactttagttaatatcaatgtatcgatgttggtttattagctgtgacaggtgaaccacagtaatgtgagataaggatagccaggccttggrtctatgagaacaccctgaactacctatctttgcagcttttctttaaatctaaaactgagccaggcacggtggctccacctgtaaacccaacacttagggaggccgaggcaggtgaatcacctgaggtcaggagttcgagaccagcctggccaacatggcaaaatcccatctctactggaaatacaaaaaattagccgggcgtggtggcatgtacctgtaattccagctactcggaaggctgagacaggagaatcgcttgaacccgggaagcggaggttgcagtgagcagagatcccacctttgcaccccagactgggcaac

SEQ ID NO: 802572 - DNA, 513 bp, Homo sapiens
gtctaaatgagcctaatgagatgggacaacaaagcgaaatgcaggatcctggacaagaaaaaaggaggttcagtaaaaatttaggaagtgaaagaagggtggactttagttaatatcaatgtatcgatgttggtttattagctgtgacaggtgaaccacagtaatgtgagataaggatagccaggccttgggtctatgagaacaccctgaactacctatctttgcagcttttctttaaatctaaaactgagccaggcacggtggctccacctgtaawcccaacacttagggaggccgaggcaggtgaatcacctgaggtcaggagttcgagaccagcctggccaacatggcaaaatcccatctctactggaaatacaaaaaattagccgggcgtggtggcatgtacctgtaattccagctactcggaaggctgagacaggagaatcgcttgaacccgggaagcggaggttgcagtgagcagagatcccacctttgcaccccagactgggcaac

SEQ ID NO: 802573 - DNA, 446 bp, Homo sapiens
tttttcatatcttcaaaactatgggtaattgctatcacattctgaatatgtttaggattagaggtagcctggactttatgaaatggtgccaccaaggtaagatttcaaaaatgctggtctaggtgtccaacacttaatgttattcatgtccacatcctgtagaatattatttaaggattttttgaatgatggttgaaactgaagcaatagtatttcccttgaaagtgaaattttctcaaaacctgtcttcctcctacgtcgttaaggaaccaagaagctacaaaggaaaggaggctgttacsacattaacctaagggaggagaccacccctcatattgtcttatgcccaatttctgcctccaaagaaagaagtaaaaactaaaaggcagaaatgaaatccacaagcagacagcccggcaccacactctggacctggtagttaaaga

SEQ ID NO: 802574 - DNA, 603 bp, Homo sapiens
tgaatagtctgtttttaaaaagatttaaaaggattttcttctcttgtgtgtggcgtaggctataagtaaaatttatcaggtcaagatcagcatttggtgtaaccttgatctacctctagtctaagtctaaatttacagggatacagagagcccttgaagctgggcatgattcagactagcagcagggttggagtctccagagaaactaggtccataggtaataaagaattccttacacctgcagggttctgtacatggcatctatctaggatagaggctggaagctgaagggagattcagggagtcctgggttctgcttctggccgaatcccatcctattaaaaatcatacaccaccttgtagagttagttgtctattttaaactctttctaattttactaatagattggaaaccccttgaagagaattatctccctagcaaccatttatcatgccttccacataawaaatgtaaagtgctcaatggtttaaattagaaatgacttcttagtgaaaaaaaaaaatcacatggagaaaaagaaatatcctaaccaaaatatcctgcccaacaagtaaaacaggcaatttaatacagctatgcac

SEQ ID NO: 802575 - DNA, 519 bp, Homo sapiens
gtttttgcttcggtagctagtataaatgggattgctttccttttcagattgttctctgttgacatatataaatgctactgatggccaggcatggtggctcatgcctgtaatgcaaaaactttgcaaggccagggtgggaagatttcatgagcttaggagttcaagaacagcctggacaacaaaatgagactttatcactatgaaaattttttwaaaaattagccagctgggactttagtcccagctacttgggaggctgaggtagaaggatcacttgagcctgggatgtctaggcttcagtgagccgtgatcctgctactgcactccagcctgggtgactgagcaagaccctgtctcaaacaaacaaataaacaacaaatgccactgatttttgtatattgattttgtattttgcaacttcaccaaatttgttcactagttctaacagttttttggtggaatctttaagtttttctaaatgtagaatcatgtcatctgtaaacaagaataatttgactt

SEQ ID NO: 802576 - DNA, 566 bp, Homo sapiens
ctaaaactgtggaacaaatggacactactgttggttgaggatgggaataaaagccatttccaggcaaaatggaaaaagggaatagaaaataggaaaaaaaacaaacaaactctgacttctattgagaagagacaaaaattcttgttcacttttatctcagcaccagcaaaatacagcatccctctctccaatcaccacattagaactaccccaactcaaagctactggaaatatttgttaatgatttgcatgctgaagtatctaggagtaaagtgtgttaatgtctacatctttgaaatatgtcaaaaataagatgaggtgatggatgacagatggattctaacagatgagtgataatgagaatatagaaaaacattatagaatatagatggtaggtatgaattctttcagctyttctataagtttaaacattttcataagaaaatagatagaacaaagaaaaaaatttttaattgggttattggcaaacgtatagtactttaggctgaatatggaagcagagtatttggctttactatcctagccaaacagaacagagggagaaa

SEQ ID NO: 802577 - DNA, 616 bp, Homo sapiens
tttcaggaacgtctctgacgtcctgcatcgctctcagcatctttgccctggcggtgctgttgcatctgggcgtccgttgtcgctgtttctccgatgctttctctgcttgtcctctgctgtccgggggcagcctcatggtcgggcccctccctgtagactctgctgccccatttccagtgtcttcgcgcccagccagccggcgctgggccacaccccgccgggggagaccacctggtgtttcatcacctcgagcccttggacttcagccagtcacttcgtttgtcaggcctccgggcagataaaggggtgtgtggcctgcattctgttgaacggcccggtgaggccggggccctgtggctagcgcccccgtgtcaggtgcctgtgtcgtgccctgggcctgagcacgtgggtctgagcactgcagggcttcttcccaaggctgtggtggcccgtctgctgccttgcctctggttcayctcctgccacaaagcctggcccaccagggagtgtcgtgacaggtggatgtgggccctgggtgtccatagcctggctgggctccctgcaggccccaggattgaagctgaggcttaccatgggccttgcagtggcaggcgcc

SEQ ID NO: 802578 - DNA, 610 bp, Homo sapiens
tcagaataattaaagttctaaatatgtttttaattataaaaacatacaattcaggagactatttgaacacccctttgagtaggaattgtcttcataggcaagataggagacctgggagctagaacagaaaagatggacaggtgcgataggctccctagaaatgagaacatttcagaatgactgagctgctactcgccaggccacagctctgtatgtgtacacagttcagggtgtccacagcagacaaggagtgaggcttcctggtcttttagtgagggtctktagttgggtaaagtagcagaaatccaaaggagaggaaatgtggatgggcaataaatattaaattatgttcaacctcagtggtagatatggaaatgcaaattaaagggcaccatttttctcttatcacattggcaaaattctagaactttttataacatctagtgctgacagagagtggagaaatggcacttttcatacattgcttgtaggagtgtgaattactgtaacctttttggaaagttatctcttcatatctgttaagttaaaaatatatctactccttcatccaataatttcacattgggttttgtatctatctttgttgaat

SEQ ID NO: 802579 - DNA, 592 bp, Homo sapiens
actatatgctgtccacaggagatacaccttttattcaaagatacaaatagactgacagtaaaaggatgagaaaaggtacatcattcaaacagcagccacaagaaagctggagtggctatactaatctcatacaaaatagacataacaaaaaattcctagagacattttataactatagaagggtcaatctatcaggaaaagctaacaattacaaatatgtatgcacccaacaacaaaacactacaatacacaaagcacacaactgacagaaataagagttggagacttcartgtctcactttctataatgaataaccaagcagaaaatcaactaggaaataaaagatataacattataaacaactagacctaacaaacatctataaaacactccacacaacaagaaagtatacattcttctcaactgcacatagaacattctctagaacacaccaccatatgctaggctataaagcaaacctctctaaatttaaaaggatataatacataaattatgttctcctacacaatagaatgaaattaggaattgatatagtttgaatttttgttcactccaaaactcatactaaaa

SEQ ID NO: 802580 - DNA, 646 bp, Homo sapiens
acagacagttaacatcacaggactctgtgcagacaacccccagtatcagcctggagcctggttgacttgctgggtggctagatccagaaaacagataacaatcactatagcttggttctcaggaaaccacatcattaggaaaagggggagagtactacatcaagggaatatcccatgggacaaaagaatctgaacaacagccttcagctctagaccttccctctgagagaggctacccaagtgagaaggaaccagaaaaccaactccggtaatatgacaaaacaaggttctttaacaccccccagaatcacactagctcaccagcaatgggcccaaacgargaagaaatccctgatttacccaaaaaagaattcaggaggtttgttataaagctaatcagtgaggtaccagagaaaggcaaagcccaatctaaggaaatccaaaaactgatataagaagtgaagggagaaatattcaaggaaatagatagcataaataaaaaacaatcaaagctacaggaaacaatggacacatttatagaaatgcaaaatgctctggaaagtctcagcagtagaattaaacaagtagaagaaagaaattcagagctcaaagacaagatctttgaattaacccaatccaacagaga

SEQ ID NO: 802581 - DNA, 646 bp, Homo sapiens
acagacagttaacatcacaggactctgtgcagacaacccccagtatcagcctggagcctggttgacttgctgggtggctagatccagaaaacagataacaatcactatagcttggttctcaggaaaccacatcattaggaaaagggggagagtactacatcaagggaatatcccatgggacaaaagaatctgaacaacagccttcagctctagaccttccctctgagagaggctacccaagtgagaaggaaccagaaaaccaactccggtaatatgacaaaacaaggttctttaacaccccccagaatcacactagctcaccagcaatgggcccaaacgaagaagaaatccctgatttacccaaaaaagaattcaggaggtttgttataaagctaatcagtgaggtaccagagaaaggcaaagcccartctaaggaaatccaaaaactgatataagaagtgaagggagaaatattcaaggaaatagatagcataaataaaaaacaatcaaagctacaggaaacaatggacacatttatagaaatgcaaaatgctctggaaagtctcagcagtagaattaaacaagtagaagaaagaaattcagagctcaaagacaagatctttgaattaacccaatccaacagaga

SEQ ID NO: 802582 - DNA, 619 bp, Homo sapiens
aaaaagctggacaaaaaaaggcgcaagccagatggtgctgaagaggccacaggaggctggcagccagggggtctggcacctcactcggaggcgcagtgggcccgtccggaattagtggccatacggcaagtgccgagtggacatcaaaccgtcacttcagactcctgcgcttcactgcctgtcggttatgcctgggttttgaaatcaagtcacagaacacctggaatgtggtgtttacgcagaacaaagcgggtgcctcggaggagagagccyagggacaggggcacctcccggtgtgggtgcccagggttgcagggtggcttcctctgtctgcgcggttttcagagccccagggtcctgcctgcccggctgcctggaggcggcccacatcctgctctgcgccgccgaatctcagcctgaacagcttcgctggtgtttgtgttgacttatttgttctttttttttttttttttttttaaataaaggattccgatgctgttacagtcaataaaagccacaggtctgggtgacctacaaatgtgtgtgtctgactttctgcagtttaaatcgccactgagccttaaggcgtctggcccgcgcattgaggaatccacgtggg

SEQ ID NO: 802583 - DNA, 653 bp, Homo sapiens
caagattttaatgccccaaaagttattttccatccattaaataaaaggaaagcactagtattctttttgctttgttaaattattatccttttgttcttgtatttgtactatatgaaagttcaataagttagtagaataaaatacattcctcaaaaaaaaaataggtgtggaattttaggtcaaaagtcaagtacattatcctgacttctgaaatgtatcaccaattactcccccaaaactttggaccaatttatatgccyaccaggggctcatgaatgctttcatttttctgaaggcttacctactgtagatattatttttgcttatctaaaccaagattttaaaaaccagattctttaaacagaggttgtaatgacagagaaagtaaataacaacaaattataatgacaaatcatctgagctactttagagtatatataccttcattcaaatccaactctcactatacgtggttaaatcaagccaggatctgattatatttatgattttgtcagattgtagcatttagaaaaatggttagcttgttcttttgaaatatcatggtgaataccatgaagcaatgaattttgctaccacaacttctttttacatatttcccaatgtgacaggtaaaatattagagtataataatt

SEQ ID NO: 802584 - DNA, 504 bp, Homo sapiens
taaaagaaggaatatgttttgattcttctgttggattttaatttcccctgggaatggtcaggaagctgctatgtgcaagccatcctcctctattttgaaaaactctgtattttccaatactctataagtcaatgagatagttccctccccaacccccaccttgaatttcccttattgactycaggggcaaccacatggtacacatgcatatatgtacacaagtgtgcacactccaatgaacacatatgcataggctgcattgccatccctatgctagcatatagcatatttcctcaaattaaaaaaaaaaaaactagttctgatgccccaaaatgcagaatctgaacctcagtggtagccttggaattacaaaaaaaagaaattaattaaaaacagagaccagtctcagttacagaatctcaagttttattgataacacaatgtataggcatcacagaagtaaataaagtgggccgtttctggtgactcatgcctataattcca

SEQ ID NO: 802585 - DNA, 634 bp, Homo sapiens
ccacaatttgccatctatcagatagacaggaaaaccaatggtgtcgttccagtctaagtctgaaggcttgagaacagggagcaccaatggtgtaagttttcatcaaagttcaaaagtcttaaaaccagagagacaacagtataagttaaagttcaagtacaaaagcctgggaaccaggagcaccaaagatgtaagtctcagttcaagcgtgagaagacagatgtcccaacacaaacaggcaggsaggaaagggatgaatcttcccttcctccactttgtgttctattcaggccctcaacagattgaatgagtccacccatattggagaaagcaatcttctttactcagtctacctattcaaatgctaatctcttctagagacaccctcatagacacacacagaaataatgtttaaccaaatatctgggcacactgtggtctagtcaagttgacacataaaaataatcatcacacacatacatatttatttttagtgatctttatttgtactaatgtgttttgattctagattcatggaatgctctcactctcatttctgaagattcaatgagcaagagatttctggattcatctggctgagtgaaactatactaccgattcttttaatgccatg

SEQ ID NO: 802586 - DNA, 621 bp, Homo sapiens
aacctttcttgctgtctatttgttacctgacgttagagcttctgtttattatttcatattgttattttactcagatattcttaaaaccacagtgcccaaattgtactaataatctgtccatatattctctttcaaaaaagtaaaaatggaaatacaaatcttactctgctcagatatcaactgcaggaagagcttaataatatgaatgaattgagaacatgtwttagtaaaattatgcattaagattaccagagaaagagatcaaagatccctccctctctctcttctcttccttgtccttaagatccctgcctcttaggattcattccaaaccactaccagaattgctaacaatgccatcttgcctgtattatcatgcctttttctcctagttaagtcaaaagcattaactgagctcttaagaagctttttaagaggacagatttaaagaaaacaatgaaggagaaggtgcataaatatttgagaatcaactttctcaaatctgtaagaggattaatagctatctgccagtctcatgtaataattcgtgcttaataccttaaacaacaaagagagaaaagaaagaaaaagacatttctagccatttttgtttagtgttcg

SEQ ID NO: 802587 - DNA, 592 bp, Homo sapiens
atcttggttcactgcaacctctgcctcctaggttcaagcgattctcccacctcagctcctgagtagctgtgattacaggcacataccaccacgcctggctaatttttgtatgttttggtagagatggggtttcaccatgttggccaggcttgtctcgaactcctgaacttaggtgatccgcctgcctcggcctcccaaagtgctggggttatatgcatgagccgccacacttggccatgtcatcttccttctgttgcttgtctgtatcsgaagttcctcccgttattaaggataccagtcaaaaggtgggttattaggcccaccctaataacctcattttaattaatttacctttttaaagactctatcttcaaatacagtcacattctaagtttctggggtttggacctcaatatatgaatcaggggcttggggacagggggaacataattcagcccatagtaagctacaacaacaaacccacaagccaacaacctgaggtggatgacacatgctttcaaaatttgtattttgtaaaatcagaattaaaaaacatggctgggtgcagtggctcatgcctgtaatcccgaca

SEQ ID NO: 802588 - DNA, 618 bp, Homo sapiens
ctgggtgaagccagctgggctcctgagtctggtggggacttggctaatctttatgtctagctaagggattgtaaatacaccaatcagcactctgtatctagctcaaggtttgtaaatgcaccaatcagcactctgtgtctagctcaggatttgtaaatataccaatccacactctgtatctagctaatgtagtagggacttggagaacttttgtgtctagctcagggttcctaaacgcaccaatcagcaccctgtcaaaatggaccaatcagctctctgtaaaacagaccaatcagctctctgtaaaatggaccaattagcaggatgtgggtggggccagataagagaataaaagcaggctgcccgaatgagcagtagcaactcgctgtggtccgcttctgtagtgtgaggwggtgtgttctttccgtctttgcaataagtgttgctgttgctcactctgggtccagctgcgtttatgagctgtaacactcaccgctaaggtccgcagattcactcttgaagccagtgagaccacaaacccaccaggaggaacgaacaactccagctgcgccaccttaagagctgtaacactcactgaaggtttgcagcttcactcct

SEQ ID NO: 802589 - DNA, 628 bp, Homo sapiens
gaattcacatcatggaaatttttatgttttcctttagaaaaactacttacggagccctttggttataaaacaaaaaggcccggacccatctagattagagaagaagaaagggagctaaactgatcttcatgatgaacttcaacggagtcattcytgaggatggagggaatgatctatgctggaaagggctatgtgagttttctttaaccaggctccagaaggaataggtttccaatccctggaacttagagaagccagtgcagaaatgggctgaagcaacgtgatgaaagagtgagatgctacagaagagacaaccagggagaggttccctggggcagagaatggtggatgagatttaggatcagtgttgccagattctgtctgttgcagattattgcctttttatcctagtcctttgtatacaatagccttgtgttagtgggtcatgttttaaagcacaagaacaaggcagattggacagacctaaagcagtataaggaggtagagtcagatggcccaaaatgatgaaagagaggattggagtaggagtcgggtctgggactcctcagaattataggtgagtgtgctggatatcctcattcatatgcatggcacttcgagttatttg

SEQ ID NO: 802590 - DNA, 530 bp, Homo sapiens
actcataaaagaagcagccctctgtgtaatcaggctgtaagcctcagactgagagttacatcgtcagcttcttttgttctgaggctttctgacttgggctgacccgtgctgccacctctcctgattctccagcttgcagactccctatggtgggacttcttagcttccatgatcatgtgagccaattcccctaataaatttcctgttatctatgtaactatctgccattggcatccaaaccagagtgattcactcttcaataaaggctgaatgaagtgagaccttctaggttacattcccaggaatttaggtactcttggtcataagatgtttatggttgaaggaacaagttaattatgctaaytaagacccagaacttaaggaaatgtcctgatatccagatatcttaagaacagaccaggcaaggtggtgcacacctacaatcccagcacttttggaggctgaggcaggtggatcacttgaccagactgggcaatatagtgcaactccatctctccaaaaaatacaaa

SEQ ID NO: 802591 - DNA, 638 bp, Homo sapiens
tgagggagaaacctccctttttgactttgaataccactgctgagaattgtgcttctatttcactttgtggaatgcttgaagtgatttttacagaattctttttggaaatgttaatacttgtggaacaaatggcttattgttaaacttggagctggaagacctggatttgaatgcggatattgccagttactagcagtgtgacctcagtttcttcagtaaaacaggatattatcattgtctgacaaagttttttgggcctcagttaaaaaaatgttaagttaaagtcatttcggttcttgaaagtgccaagcaaatgtgaggcactattagtattttgtaaaaagccatttctttaaagggaagacaattcatgaagaaaaaattcaaatgaaagcaaagtaataaataaaattaccktaagaactgatgagagaattctgattttgtagatggaaatttgtttttgaatttaatgaatatacatatatttactcctttaagtagttattttatgtttcaaaaagattcaaacattttaattgcaaaaagtctttgccttgctttaaaagcaagtttaatttcagggacaatacacctattcattacccaaaccattcctaagcagtaacagccttaag

SEQ ID NO: 802592 - DNA, 589 bp, Homo sapiens
acttacctttaatagcttttgataagttattttttaatgtaattttgataaaataattgtacctaaaatgtactaatgtgttggtattgtctactatccaatctacgaacaaattttactgattcattcgtaactgaccccagagttggtttgtttgaatcactgtaactgagcctctattataaagatcatacgatgtttgttttacctactttccctttccccttgtccttttcttgctctatgcgtgcttgcttgcatgtcattatttcagtagagggtagtcactaataattgattaacttcatatcctaacctacaggggtgcctggcagattgatgaacttgtttttcttttaaagaaccaygatccttaggttatgcagacctccttgatggtgtccagaaatttgggtagagggatgccaacagctttgatcactgggggagtttcatctcccatatacccaccttactcatacaagtccccagttaaattcaaaggcagggcagatttgagagactgtctctcctgccctcttgctttggtcaaattgaataaacctttctctgttcctgagtgctgatg

SEQ ID NO: 802593 - DNA, 546 bp, Homo sapiens; identical to SEQ ID NO: 802457

SEQ ID NO: 802594 - DNA, 524 bp, Homo sapiens; identical to SEQ ID NO: 802458

SEQ ID NO: 802595 - DNA, 588 bp, Homo sapiens
actgcaagttcatgggagggatatcaagattgcattgtaagaaaaacaagcatgttgggagatattgttgtggccacctttggaaattacaatctactgtaagtaaaacaagaatcaatcaatataaatttaggcttgaatcacttctctttttttgaacgaaagataaaactgtaaagaaatatagagatacatggaaggatgatgttaaatcaatacaaaatgatcagtgagttaaaagttacaggttctaggaaacatggctggtgaatacaataataatttattaattttaatgtcagcttcaaatttttggttctttggaaaattgtttaggcccccaaatatataggtctatgtatgtatgtatgtatgtatgtatgtatgtatgtatgtatgcatgcatgtatgcatgcatgyatgtatgtatgtatgtatgtatgtatgtatgtatctatctatctatctatctatctatctatctatctatctatctatctatagctgcattgatgctgtaagtccagagcagttttgcaaaataggctgtgttgctagagagatgctattttccttggcctgttttta

SEQ ID NO: 802596 - DNA, 557 bp, Homo sapiens; identical to SEQ ID NO: 802461

SEQ ID NO: 802597 - DNA, 534 bp, Homo sapiens
cacaatagcaaagacatggaatcaatccaaatgcccatcaatgataaactagataaagaaaatgtggtacatacacactatggaatactatgcagccataaaaatgaatgagctcatgtcctttgcagggacatggatggagccagatgctatcatcctcagcacagcaatgcagaaaaccaaacactgcatgttctcacttataagtgggagtcaaaaaatgagaacacatgaacacaggaagragaacaacacacactggggactagtgggagacggggaggagtgagagatcatcaggaaaaacagctaatgcacgcctggcttaataccaaggtgatgggtagataggtgcagcaagccacgtgcacatgtttacctatgtaacaaacctgcacatcctgcacgtgcaccccagaacttaaaataaaataaaatttaaaaaaaagaattacctcagattgggtagtttataaagaaaagaggtttaattggctcatggttctgcaggctgtccaggaggcatagcagctt

SEQ ID NO: 802598 - DNA, 552 bp, Homo sapiens; identical to SEQ ID NO: 802463

SEQ ID NO: 802599 - DNA, 550 bp, Homo sapiens; identical to SEQ ID NO: 802464

SEQ ID NO: 802600 - DNA, 550 bp, Homo sapiens; identical to SEQ ID NO: 802465

SEQ ID NO: 802601 - DNA, 569 bp, Homo sapiens
gcttggcttctggggaggcctcaggaaacttacaatcatgtcagaaggtgaagaggaagcaggcacatcttacataaccagagcaggagcaacagagagacaggggaggtactatacacttttaaacaaccagatctcacaactcacccatatcatgagaacagcaccaagggggaagtatgcccccatgatcaaaccacctaccaccaggccccacctctgaaattggtgattataatttgactgagatttgagcagggacacagatccaaaccatatcattccatccatkgtccctcccaaatctcatgtctttctcactttgcaatatgcagtcataccctcccaacagtcccccaaaatcttaactcattctagcactaactcaaaagaccaaagtccaaagtctcatctaagacaaggctagccccgttggcctatgagcctgtaaaataaaaaaaataaaaaaaagttagttactcccaagataaaatggggctataggcattaggcaaatactcttgttccaaaaggaagaaattggccaaatcaaaagggatacaggcccc

SEQ ID NO: 802602 - DNA, 569 bp, Homo sapiens
gcttggcttctggggaggcctcaggaaacttacaatcatgtcagaaggtgaagaggaagcaggcacatcttacataaccagagcaggagcaacagagagacaggggaggtactatacacttttaaacaaccagatctcacaactcacccatatcatgagaacagcaccaagggggaagtatgcccccatgatcaaaccacctaccaccaggccccacctctgaaattggtgattataatttgactgagatttgagcagggacacagatccaaaccatatcattccatccatggtccytcccaaatctcatgtctttctcactttgcaatatgcagtcataccctcccaacagtcccccaaaatcttaactcattctagcactaactcaaaagaccaaagtccaaagtctcatctaagacaaggctagccccgttggcctatgagcctgtaaaataaaaaaaataaaaaaaagttagttactcccaagataaaatggggctataggcattaggcaaatactcttgttccaaaaggaagaaattggccaaatcaaaagggatacaggcccc

SEQ ID NO: 802603 - DNA, 559 bp, Homo sapiens
tctggtgactccggatgtttcttgccttataactctagtctttgcctctgtctttacatgaccttctctgtgtctgtgtcttcctctcttttgtctcttctagggattcattataatacttaacacttacctagatcatctcagatgakctcatctcaagatcccaaactgagttatatctgtaaagatacatttttcttttcctaaataagattacattcacaggttccaggggttaggatgtggacatattttttttgcaagggccaccgttcatcccattgcaaccttgtatgtccttgggctgggtgctctccaatggccccctcactgggtgggtaggacaggtgtaacccatggcctgagctgccaagggaaaagccaagtactgttcctcttatgcagaaattgtggtcaaccatcttttaggacaggtgactaaggacttatttgcaaaagtaaaaaaatatcctattgaattactggaattgggtggaggggtatctcacttgctattaccataatgactatacccactattatttcctcatctctgaag

SEQ ID NO: 802604 - DNA, 524 bp, Homo sapiens
gacaggcatatcattcacaatccaggctctgtgaatttgttcggaaaaaagggggcaaagagagacaacttaattttaaatactagctgcaatatggaaccacatcttgctttaagatttagttttttcacacttgccaggggtgttttatgcacgtggcaatcattcagraaggttttttagctggaaattgttttgtgtgtgttacaagaaacataatttttattttcagatatgctttaaggcagttgggagttttccagaggaaagtgtgtagatttgtggtcatgtatgtatggcagaaagaaggtgaaaattgagctacagtcatgtgctgcataatgatggttcagttaaagatggaagacacaaacaacagtggtcccatcaggttctaatggagctgaaaaattcctatcacccagtgacagggtaaccctcataatctcctagcacaaggcattactcgtgtattagtggtgatgctgctattaacaaacctactatgctcccagtcataaaag

SEQ ID NO: 802605 - DNA, 604 bp, Homo sapiens
tccaaccaggacttcctgtactatgttgaataaaagtggcgagactgggcatccttgtcttgctcttgatcttacaggaaaagtttttgtttttttatcactgagtatgatgttaactgtgggcttgtcagatatgggcctttatgaagttarggcacgttccttctatatctgatttggttttcaccatgagtgattgttgaattttgtcaaattctttttctgcatctattgactaaaggatatgatttttattcctcagtctgttaatgtagtaaatcacattattgatttgtgtatattgatccatccttggatcccagagataaatatcacttggtcattgtgtatgattgtttcaatgtgctgttaaattaagtttgctagtattttgttgagggtttgtgcatctacattcatcaggcatatttgcctgtagctttctttccttgaagtgtctttgtctgactttagaatcaaagtaatgctggactcataaaataaatttgtaaatgttttctcttgaatcttttttgaagaaattgaaaatgattgacattaagtctttaaatgctttgtagatttctacattgcagccatctct

SEQ ID NO: 802606 - DNA, 598 bp, Homo sapiens
cctctaacatttattatttactttcttctgctacttttgagcttagcttgttcttctatttctagtttgttgagatggaaagttaggttgtttattgaggtctttattctgtattattgtacacatttattgctataaaatgttctcccagtactgcttttgttgtgtaccataagttttgctatgttgtgyttatatttttgtttgctgaaaatagtttctaatagcacttttgattttcttttaccaattggttactcaaaagtgtgtttttaaatttcccaaatatttgtgacttttctggcttttcttctgatatttatttgtagtttaattctattgtagtcagaaaaggtacttagtaagatttcaatgttcttaaatttgctaagggttgtttttgtgacctatcatttgatgtatcctggaaaattttccatgtgcacgttggaagaatgtatattctgttgctgttgggtggaatgttctctatatgtctattagtttcattgggtttacagtagcagtgcccagcctttttggaccagagactggtttcatgtaagacagcttttccatgcgaagggagggtcggggg

SEQ ID NO: 802607 - DNA, 551 bp, Homo sapiens; identical to SEQ ID NO: 802549

SEQ ID NO: 802608 - DNA, 551 bp, Homo sapiens; identical to SEQ ID NO: 802550

SEQ ID NO: 802609 - DNA, 704 bp, Homo sapiens; identical to SEQ ID NO: 802551

SEQ ID NO: 802610 - DNA, 603 bp, Homo sapiens
ttctattcaggccttcaatggattgcaagaggttcatccactttatagagaataatctgctttactcaaagtccatggatttaaatgtcaatcttatctgaaaacaacctcatgggaacatcagtatattgtttgaccacatatctgggcactgaggccaagcccagytgacacataaaagtaaccctcatacccaccttgagatctgagccaattgagagagagtctcaggtatcaaatagatggagattaacagtagtggtgtttgagtagaggccatggcttggaaacgtgatcaaatggacttcctgctactcaaccttccccatagtaatgaccaatatacagatcgtcacccaggaattttgttatgaggaagagagaaaagtgtgtgcagagggcaggaagaaagcccaagctctgtgcattacacttttctcagtctcattatcccatgtcactaccttcctttggagaagagtgcctgtggaggcacagaggaggctccaagttacttgttacattattctaaaagaagcagaaattccttttaaacaagaccaggcaggtttgtgtggggagagagaggatcactccctaaaa

SEQ ID NO: 802611 - DNA, 604 bp, Homo sapiens
gcatttcatgcagagtcaaagaaatgtgacatatttttctgaggataaagtacaaaaatggttgtcgctttggggattaaaagcaaatatgtcacctttgtaaaagtaattctcaatgaattagaaaaacagaacatttctgyttcttttcagatactcatccttaagctgagcttgccctgtgctcagctgggtagcctatctgtgagatcaccatgtactcagaccaaataggaagacttattttcttgggggcattatctcacaattcgaaatagaagatttcaaggaagaggaccttaaaatattttcccaaatcattttgaattagtataattccctttttttcgaaaagccctctggttaagagtaagagtgttagaggaataactcaggaaggaccagaagccaatgatctcttagaagtggtcaagccagcaagtgcttcattgaagttgggactctgggtcaaggatttccatctgtgaggtcatatctgtttcagaataacttattcacccaccagtaactgacccgaaaaactagagattaatttttgtcacatttttattggtgtggggagcacagagcaatggccaacaga

SEQ ID NO: 802612 - DNA, 604 bp, Homo sapiens
gcatttcatgcagagtcaaagaaatgtgacatatttttctgaggataaagtacaaaaatggttgtcgctttggggattaaaagcaaatatgtcacctttgtaaaagtaattctcaatgaattagaaaaacagaacatttctgtttcttttcagatactcatccttaagctgagcttgccctgtgctcagctgggtagcctatctgtgagatcaccatgtactcagaccaaataggaagacttattttcttgggggcattatctcacaattcgaaatagaagatttcaaggaagaggaccttaaaatattttcccaaatcattttgaattagtataattccctttttttcgaaaagccctctggttaagagtaagagtgttagaggaataactcaggaaggaccagaagccaatgatctcttaraagtggtcaagccagcaagtgcttcattgaagttgggactctgggtcaaggatttccatctgtgaggtcatatctgtttcagaataacttattcacccaccagtaactgacccgaaaaactagagattaatttttgtcacatttttattggtgtggggagcacagagcaatggccaacaga

SEQ ID NO: 802613 - DNA, 535 bp, Homo sapiens
tggctctttgcacaattttagtatttgaaccttttaaggatctcttttttgggtttcacatacgcaaatttacaaactggttttaaacagtgctctattttaatgaggaaaattttagaactgcaattagtttttgttcaaaaaagggtgggggggatgacaaatagttaattgwgttcctctccaaaaggatatgaaagataaaactttgtccttgattacatagaagactatgtctttgtagtttaaaacattttgctattgatttttggttctgttgaaatagtatgtaagaaatggtttacactagtgtattggaaagttagaaattagcttcaagagggcaggaaacggttgtccctgagtgttgatgctgttgtagacaaataacacactttcaaaaactatttttatctaaagtcattttttcatagtataactcaaaaagggcagcaaacacttcttaaatatgagttacagccttcttcaataatgaacaaaaattgtattcagttgattttcttacctatggacc

SEQ ID NO: 802614 - DNA, 608 bp, Homo sapiens
aaagaagttggaggcattgtgcccctaccctagagatctatggaactttgaaccagagagtgatgatttaggatatctggcagaagaaatttctaagcagtaaaatgttcaagaagtgacctggctgcttctagcaacctatgyttgtctttgtgagcaaataagtgatctggaactggaacttatattttaaagggaagcagagtataaaagtggaaaatttgtagcccagccatgtggtagaaaagaaaaacccattttctgggaatgaatccaggcgagttgcagaaatttgcataactaaaaagaagtcaaagttaatggccaagacaatgggaaaaaatgccttgaaggaagcatctcctcctgtcacaggcccagagggctgggagagaagaatggttttgcaggctgggcccagggccctactgtcttgtaaaacctcacaacgctgttccctgcatcccagcagctccagctccagccatggctaaaaggaccccagatacacctcaggctactgctccagagtgtacaacccataagatttgatggcttccatgtgctgttaagcctgtggctgtgcagagggcaagagttgagacttg

SEQ ID NO: 802615 - DNA, 496 bp, Homo sapiens
aacctcacaacgctgttccctgcatcccagcagctccagctccagccatggctaaaaggaccccagatacacctcaggctactgctccagagtgtacaacccataagatttgatggcttccatgtgctgttaagcctgtggctgtgcagagggcaagagttgagacttgagagcctctgcctagatttcagagggtgtatggaaatgcctggatgtctaggcagaagcctgctacagtgacggagccctcatggagaacttctactagggcaatgtagaggaaaaatgtgggattgcagcccatacacagagtccccaccagggcaatacctagtggagctatgagaagaggrccactgtcctccagacctcggaatggtagatccactgacagcttgcattatacacctggaaaagccacaggcactcaacaccagtccaggaaagcagctgagggggatgcaccctgcagatccataggggtggagatgcccaa

SEQ ID NO: 802616 - DNA, 496 bp, Homo sapiens
aacctcacaacgctgttccctgcatcccagcagctccagctccagccatggctaaaaggaccccagatacacctcaggctactgctccagagtgtacaacccataagatttgatggcttccatgtgctgttaagcctgtggctgtgcagagggcaagagttgagacttgagagcctctgcctagatttcagagggtgtatggaaatgcctggatgtctaggcagaagcctgctacagtgacggagccctcatggagaacttctactagggcaatgtagaggaaaaatgtgggattgcagcccatacacagagtccccaccagggcaatacctagtggagctatgagaagagggccactgtcytccagacctcggaatggtagatccactgacagcttgcattatacacctggaaaagccacaggcactcaacaccagtccaggaaagcagctgagggggatgcaccctgcagatccataggggtggagatgcccaa

SEQ ID NO: 802617 - DNA, 496 bp, Homo sapiens
aacctcacaacgctgttccctgcatcccagcagctccagctccagccatggctaaaaggaccccagatacacctcaggctactgctccagagtgtacaacccataagatttgatggcttccatgtgctgttaagcctgtggctgtgcagagggcaagagttgagacttgagagcctctgcctagatttcagagggtgtatggaaatgcctggatgtctaggcagaagcctgctacagtgacggagccctcatggagaacttctactagggcaatgtagaggaaaaatgtgggattgcagcccatacacagagtccccaccagggcaatacctagtggagctatgagaagagggccactgtcctccagacctcggaatggtrgatccactgacagcttgcattatacacctggaaaagccacaggcactcaacaccagtccaggaaagcagctgagggggatgcaccctgcagatccataggggtggagatgcccaa

SEQ ID NO: 802618 - DNA, 590 bp, Homo sapiens
catcataacaatcacaactgacattcctataacaaaagacaggttaacaagagaaaatcatagcaaatttgtttaaccaaagttttacatgactcaggaggcttcaaaaatgaagaccaaagacctagggaaaactgtctatttctatgcttagattccatgaagaatgaacaacatgtggaaatgtgattggacaaaagggtagaatcagtggtaataggctgagggggaaagcccagcaaggcctgtgtgttcggattcttcttagcctctctgtgcagtgttccttcctcctgagcatgggtcagggcccctatgaaataagagtcttcaagggaaaagagaatctttctagattttatatcttgcttttggggagaggagttmtagcttctatgctccacttagggaagtgaaattctactttctatgactcacgtcagtggattaagaggggtaggataccgggggtcaggagaaagtcagaaagaccttgtttctgagaactttccagtctttttcagttcaaagtagtcagcatgccaaggtgccatattttggggtgtcatgttctgagccccaacagtgtt

SEQ ID NO: 802619 - DNA, 620 bp, Homo sapiens
agtttatatgattctaaataacattgatatttataaaatagcatcagggactcatgtcaattattcttgttttcccattcaactactaatgtcctggttctaccccacattgattaaagaatttgcttttatacagtctgtgatatatgtgtgtatgtatgtgtacacaggtgcacacatgtttaatttacttagatgaatatcattttacacatatatatatacatatttatggagggaagtgaggatatacatgttttgtgagaccgtgtgtgtgtgtgtgtgtgtgtgtatttgtgtctgtatctatttctttaacagtgtgctttcscaattatctcaaggtttgaattatatctaagttggtacatattatttatccagttcattcatttttcactaaaatctagtattctataattaatccattccaaaagtatttactgaatacctagtatgtggcagacactcttttagacaccaagaatgcaatcaggagcaaagaaaagtcctcactctcatgaaacttatactctagtcagggaaatcagacaaggatcattgaaaaaacaaagctcagaagagggaagggcataccatacaatgcccttaagagggaa

SEQ ID NO: 802620 - DNA, 586 bp, Homo sapiens
tattagcatttcataatgtcatcaatattcaaattattaatgagcaattgtactttttttcataagtctttttaatccactgtgtcttttacacttatggtacatctcagttctgactagccacatttcaagtgctcaacagccacctccagctaccataatgaacagctgtcttagcttgggctgctataacaaaatcctttagactgggtggcttaaacaaaaggcatttatttctcatagttctggaggctaaaaagtccatgatcaaagtgccatcatggtcaagttccrgtgagggccctcttcttggcttgtagatggttatctttccattgtattctcacataataaagagaagcagcactgctgtatgtctcttcttacaaggacactcatcccaccatggggactctacctcatgacctcatctaagcctaattttcatctaaagacctcacctgctagtaccatcacattgggggttatggcttcaacatataaatgtgggggtacacaattattcaatctgtaacaacaacccagcttgagaccatacacctagaagtaggactgctgcttgtat

SEQ ID NO: 802621 - DNA, 610 bp, Homo sapiens
aataaactccatagtggggtgcctggggaagaagaaataacattttcaaatatatagacagagaattgcctttttagggtggaagttaccggtaatttaagttcctgtagaaaataacctacaatctttcgaagctgaatgtcttctttaaaggggtcgtttaagctctgtaaatggaagactagtagttatctatgattcttaggaggaaaccttgacatttccmtctgttgccatccagattctgctgtttgctcatgtaaattgagtattttttatctgggctatgttgtaaaggtgacttttagaagttgtctcctccttccattagcttattttacttattgtctcccacatgggactatgaatggttgaacagtctacactgtttttttggttttgttttttgagcagctcaaaaaattaagttgtggactaaaaataaagaaagctattccacgaatggttgaatgtaggggctgggattgagccatttcctataagggagtgaataccctgggggttcccgaggcttccttttacgtcttttcttgtttttctggagagttaagagagaaaactatgtccaggcttgaagaatattagtggg

SEQ ID NO: 802622 - DNA, 534 bp, Homo sapiens
cctatgtttcctagattcttccagttactggtctggcaaagggaggtggtggtttgaattaatgagaaggggttactgggatgaaaacaaggtcttttatccttactgtaactatagagtttggttaagaaaaatagaagtcttaacacagccctgcaggaattaatgaaagagccagacccttgggcaaaggggcagagttggaaaaaggctaaaagaagaattcttagagctgaggggccaatgagcacatgtagacacctagaaaaatcaactttagtgtttcattctgcagtgrtggattatttaacctctttaagtctcattttcattgacaataaaacggaagtaaatggtagtaccaacttcccagaatcttggtttcataaagcccttaacagtgtgctaagcactcaggaaatgttatctcttgttattattacttgtcacactgactaatatcagaaaatcatgaaggagttgtgaattcaagatatctttcctctctcctcgtctttgcctcagttgaaaagc

SEQ ID NO: 802623 - DNA, 558 bp, Homo sapiens
taccatatgaagtggtaaagacagtgtctctgccctaagcaccatccagaaataccccctaaacctctatcgccatgacgttttgaacgggccatgggggtaatgctcatattatcagtggggatggcaggcctcttgttgaagtagtcagaatcaatgccctcctttatcctctccatcctgttctctgcacagccttcctttcctgatgccccccaagcayccctgatgctctgatcactgcgttgatgtatctctttcatggctaaaggccccagtgattctccctgtagtccacttaggtgactaacatggaggtgtgactctgagattcatagctcccttgtggctctaacttatcaggaaaagagtagccttttctcatcagggctacttttgctttgattccatctttcaggttctcatgacttcccaattcacataaagcttgacacaaattacccagtgcctagacagtaagaaaacatcagcctacctggaaaactacatcccaaatcatgtattcttgacaaccaccagttttgggggattgccctg

SEQ ID NO: 802624 - DNA, 643 bp, Homo sapiens
gggaatagtttgcctgtctattagactgtaacttctgaaaagttcattattgccaatatctggaaaagttcctggcttataaaagcctaaacatttgtttcataagttaaatgtaaaccaaatgcctaacatgtaggaatgccacaaatattgacatgaatttagcaaccctactgtccacatacactgaaagttaagtatgygttcatgtgagttgggggagaacagcagcaggaacagggagaaaagagaacacagtgccttagccttgaaacttaaaaacacagtttttcctcactcttcagagattagagagctgttccaagctaattcaacaaaaaagaagaggctgtttccacactggcatctgagaagcagtggtaggatagctctctagaatctcagctcctctgctatttgtgaccactgttgccaacctgctcaaagaagaaaaggtggcccagcctttctggggtctggaaaaagacaaactagtccaaagacaggaggccctcagagacaaaatatactttttagaaatctaaaaaaaaatacctatagtttgaatagcacttgtgacagtcttttaccacaaagagacaacgaagtagggaaagttaatcgtaattacatgctcatcccc

SEQ ID NO: 802625 - DNA, 635 bp, Homo sapiens
gcagcatgactgctaacaagtacagggtttctttggcaactgatgaaaatattttaatattagatagtggttatgttttaacacccctgcatgtattagtccattttcacacagctataaagaactatctgagactgggtaatttatgaagaaaagaggtttaatggactcacagttctgtaggctgtacaggaagcatacttgggaggcctcaggaaacttataatcgtggtggaaggaaaagggtaagcaagcacatctttactatggcagatcaggagagagaaagagcaaagggggaagtgccacacwcttttaaaccaacagatcgtgggagaactcattcactattgtgggaaaagcaaagggggtgctcgcctccatgattccatcacctcccactaggccactcctctgccacgtggggattacaatttgacttgagatttaagtagggacacagagtcaaaccgtatcactggatatactaaaattcacatataaagcgcactgaattgtgcactttaaaaggctgaatttgatggtgtgtgaatcatttcaagtttttaaagcaataccatgggtaagtttgaaaaacaggaaaaacaccggacagaagatataattttttggag

SEQ ID NO: 802626 - DNA, 446 bp, Homo sapiens; identical to SEQ ID NO: 802573

SEQ ID NO: 802627 - DNA, 587 bp, Homo sapiens; identical to SEQ ID NO: 802570

SEQ ID NO: 802628 - DNA, 513 bp, Homo sapiens; identical to SEQ ID NO: 802571

SEQ ID NO: 802629 - DNA, 513 bp, Homo sapiens; identical to SEQ ID NO: 802572

SEQ ID NO: 802630 - DNA, 520 bp, Homo sapiens
tgtttttgcttcggtagctagtataaatgggattgctttccttttcagattgttctctgttgacatatataaatgctactgatggccaggcatggtggctcatgcctgtaatgcaaaaactttgcaaggccagggtgggaagatttcatgagcttaggagttcaagaacagcctggacaacaaaatgagactttatcactatgaaaattttttwaaaaattagccagctgggactttagtcccagctacttgggaggctgaggtagaaggatcacttgagcctgggatgtctaggcttcagtgagccgtgatcctgctactgcactccagcctgggtgactgagcaagaccctgtctcaaacaaacaaataaacaacaaatgccactgatttttgtatattgattttgtattttgcaacttcaccaaatttgttcactagttctaacagttttttggtggaatctttaagtttttctaaatgtagaatcatgtcatctgtaaacaagaataatttgactt

SEQ ID NO: 802631 - DNA, 604 bp, Homo sapiens
gtgaatagtctgtttttaaaaagatttaaaaggattttcttctcttgtgtgtggcgtaggctataagtaaaatttatcaggtcaagatcagcatttggtgtaaccttgatctacctctagtctaagtctaaatttacagggatacagagagcccttgaagctgggcatgattcagactagcagcagggttggagtctccagagaaactaggtccataggtaataaagaattccttacacctgcagggttctgtacatggcatctatctaggatagaggctggaagctgaagggagattcagggagtcctgggttctgcttctggccgaatcccatcctattaaaaatcatacaccaccttgtagagttagttgtctattttaaactctttctaattttactaatagattggaaaccccttgaagagaattatctccctagcaaccatttatcatgccttccacataawaaatgtaaagtgctcaatggtttaaattagaaatgacttcttagtgaaaaaaaaaaatcacatggagaaaaagaaatatcctaaccaaaatatcctgcccaacaagtaaaacaggcaatttaatacagctatgcac

SEQ ID NO: 802632 - DNA, 567 bp, Homo sapiens
tctaaaactgtggaacaaatggacactactgttggttgaggatgggaataaaagccatttccaggcaaaatggaaaaagggaatagaaaataggaaaaaaaacaaacaaactctgacttctattgagaagagacaaaaattcttgttcacttttatctcagcaccagcaaaatacagcatccctctctccaatcaccacattagaactaccccaactcaaagctactggaaatatttgttaatgatttgcatgctgaagtatctaggagtaaagtgtgttaatgtctacatctttgaaatatgtcaaaaataagatgaggtgatggatgacagatggattctaacagatgagtgataatgagaatatagaaaaacattatagaatatagatggtaggtatgaattctttcagctyttctataagtttaaacattttcataagaaaatagatagaacaaagaaaaaaatttttaattgggttattggcaaacgtatagtactttaggctgaatatggaagcagagtatttggctttactatcctagccaaacagaacagagggagaaa

SEQ ID NO: 802633 - DNA, 570 bp, Homo sapiens
cctgacaaagagttatgtcaccgacgtatgcttctctcagttgtatgtgaaatcccgaagaatcctgggtcgggcctccccgatcctggactgatcatgtgtaaccttaaaattcaccaaagttccaggaaggcactttgcagaaagggaaaatgtaataatacaaaggaaacattcctaaatgattaaaatgtcccaaacttacacctcgttgctagggcaagggaaaaatattataacaacaaaatttaatttgagaatctatttgaaaaatcagytggaagtgacaggcagaaatagacaagagagacaccatctcagccatgggcacgaaggagagtggcaggttagggtcaagtggcaaaccacagcccgtggcaaactcctgggtatgtcacacacaaaaacgttgacaagacatttacctaagctgcctgggatgcactgaatttccttatcctactgcaatttattttatttgtttattttattttttgagatagggtctcactctgttgcccaggctggagtacagtggtacaatcttggctcactgcagccttgacctcc

SEQ ID NO: 802634 - DNA, 581 bp, Homo sapiens
cgtgggggcgggtgcctgtagtcccagctactcaggaggctgaggcaggagaatcacttgaacctgggaggcggaggttgcagtgagccgggatggcaccactgcactccagcctgggtgacagagcaagactccgtcttaaaaaaaaaaaggctttaacattttccagtcactttagtatttatgcctaaaacaatctgatcagctttctgcttttgtgggatgcattgagcatgaacaatgtcactgatgttaaaggagcaaatgagcattctcttcacttttgaaataagtatttttcttacgtctcagggatgttgaggctttctacagcgaacgttgatgctttacttctggaccataatagaarcactatgttctacgatcggtcattatttttctctaaaacatgtgctttttgttttttcaaacctcccttgaaaaatcagagcaaatgccaaggcttttgagtgtaagtttatcattcaaaattgttggcaagttttcacagaaatttccctgctgtcccagttctcttccctctgaatgtaacactccggccaacgtgctcacaattactt

SEQ ID NO: 802635 - DNA, 640 bp, Homo sapiens
actccatctgcatgatatttttgctccaaactgggacggggaggactaggtacattgaccaccgccctggccaaccccaacagtaaaggaagtgtctatttctcagttccactgtattttgggttggatctttttgttgatgacttgccactctttcaggcaacttcagaaatagtgtagtcactgtagagtctggtagcatctattctctcttctgctaaatgaaaacacatgacggcctggttgctaagtaatacaagtaatgcatgttgatgtaaacggtggtcgagaggtggagttggggtgagacacaaatggggacatgaccttgaaggctctggagagtctcccaggtgggggtgggggctaagttccctctcgcttctgtctcrctttcagatgcccaccctcactcaaaaacatcattaggtttgcagcaattacccaaggactacacatcctttattattattattacgaaatacagacaagcaaaggagaaaataaaaaccacctttaatctccacccagagatacttattaataacggtttggcatgtatttttccagatgcaaaaatgagatcatattatccatgttgttttgtggtctgcttttggcatttaaaatataataaata

SEQ ID NO: 802636 - DNA, 586 bp, Homo sapiens
ctggcagcaaagcattagcagtgaaacagatccagacccagtggatgtcaaatgagggagattcctatctctggtcttcagaataccatgattttggtttgcttggaagtaaaacaaaaagagataaataacagttatagtttgacarttataacagtaatttgtatgttagaacagaaaaaggaacctgttccattagggcaccaactgaaaacatgaagaaaaattataatcaggtactttttagaggattattgtagccaagaaataatgatttcatctgtatgtaaaaagttagggttgaaatgtagtattaagtgttacactttgcccttcaaacaatttttttgctgccttttttattaaagagaattttatagccaggccaatttgtgtgcaatgctagttttaggcttattatgcttgcctgatgatttgcataaaatgcagcaagaaatcgactggccatatagacttcttttaaagttgattttgctgaaactttacctaaaaataggctatactagtttcagtcttggtaaaataaccagtgtcaccaattgttaggaaaaaaaaaactattatt

SEQ ID NO: 802637 - DNA, 552 bp, Homo sapiens
acttcatgctaactgctattctacagacacaatgataaacaagaccaataacttacaatctagtgaacaggcattatcaccttctcactcctgcaaagctgatattaaaaccccatcttggtcatccctgagcactccaaggtctacaaaccaggtagagatgctaggacgggaactaaatgcagaaaacagatcagagttgccagggggtgaggggcagggtggacaactacaaaagagacgcacaggacaatttttagstgaatgtagtgttctacatgtactatggtgatggatacatgcttctatgcattttcaaatgccattgcaatgtatctcacaaagaatgaagttcaatgtaggcaaaaatgttaaaaatcaaccaggaggtcatggaatctcaggaggtaatgcagacagtgataaattgtattacaaatgtatcacataatccagttagcagcaagcacaccaacaccagatattggcttctaaataccattctctgacaaaagaaaccagagcactggagaaatgtttgattctagggct

SEQ ID NO: 802638 - DNA, 556 bp, Homo sapiens
tccatcatgtataagggatcctcaagaatgttaactttctcatcagaatccatggaatcgggaaggcaaagggtgacatattcaaaattctgaaggaaaaaaaaacactatcaaccaataattttacattcagcaaaactatccttaaacatgaaggtgaaattaagacatcaagataaacaaataagctgggtgcrgtggctcacacctgtaatcccagcactttgggaggctgaggcgggcggatcacaaggtcaggagatcgataccatcctggctaacatggtgaaatcccgtctctactaaaaatataaaaaattagccgggcatggtgttgggcgcctgtagtcccagctacttgggaggctgaggcaggaaaatggcatgaacccaggaggcggagcttgcagtgagccaagatcgggccactgcattctagcctaggcaacagagtgagactccatctcaaaaaaaaaaaaaaaaaaaaaaagataaacaaataatgaaagaatctgtcacttgcacctaaactacaagaaatactaaagggaatcct

SEQ ID NO: 802639 - DNA, 510 bp, Homo sapiens
attgttaagtcacaaaagcttgaaacgtaccttaaaatcgataagggagaataaaacaccttttttcaaccagccaaaaataccatcttggtgattctcctgccaatctttttttatttcctatatgcagatttggggcctgaatatttagttcataccacgcygtaccatagatgcttgttttcacttcaagggagcaaagagagcatgtaatttagactctaaattgacgaagtcccaaaggccttttcctaaagtaccatttcctacctgacgttaggtgccctgatgatgataatgctgattcacatgcgagggcgctggcattgttcccactgcccacaccactgcctttttaacaatcacatcatcccaggagccagctcccaggagtttctttgtccgagtgaggaaactgaggcttagcaaggtcacactttttgccgctgctctgttctgctgcccacagctgccacagatggtcttccgggaccttaaacacagattttt

SEQ ID NO: 802640 - DNA, 614 bp, Homo sapiens; identical to SEQ ID NO: 802300

SEQ ID NO: 802641 - DNA, 556 bp, Homo sapiens
aagtaagctctgccgcgtaaacttgaacagagggtgagacattgattcacagcaactgtgactgtattcatgcattcatccctcccttccttccttccttcatttcttcatttcttccttccttctttccttccttccctccttccctccttccctctttccttccctccttccctccttccttccctccttccttccttccttccttccttccttcaactaatgcttattggaagattactaggtggcatgccctctgctagccatgggggtacaactcagaacaagacaacccagggcccagtcctcatagaacttatgtcctaacgaaattgattctgcttccaatgggctggggcgtcatagcccaaagccaggcccgtcctgcatgtgaggatggagaggctatagcagtrgggaggaggcgagaggagggggcaaatgcaggagttaggcagggcccagcctgggctgtgtgccaggccctggcttaggccaagcagaagaaacaaagatacaaaagacctggatcctatcctccaggatttatcctcaa

SEQ ID NO: 802642 - DNA, 582 bp, Homo sapiens
aagagcctcggcaaaacttcctgacactggagctaaataaaccttcgccacggggagaccggctcgccgaaagggctgaatcttgggtgtctttgtattctcagccccttggtgcttgagagggagattttgatttgaaaacaagccctggagagggatgctaagtgatctctcaaggcaaggcctatgattattgcctttggtagtgagtttagcgacacaataatggaaagtttgttggaccccaaatcaggctctaagaagtctcagttttgccgtaactacctaattaatgggactcagatgctcatctgtagacttaggtggactgcatggtaatttcctagggctgttgcaatgaagcactgcaaactgggtggcttcagcaacaaaaatatattgtcttggttctagaggctggaaatccaaratcaaggtgtctgcgcaattggttccatctgaagtcgctgtggtagaatctctttcattcctgtctcccaacttctggtggtttgctggcaatctttgccatttcttcacttatagatgcaacatcccaatctctacctttatcttcacgtg

SEQ ID NO: 802643 - DNA, 490 bp, Homo sapiens
taaaatatgagactatgaaagacaaagaaaattctgcagagtaaatcatacaaaggaccaacatcgagaatgacaccagatttccccacagcatcagtggatccaggaaaacaatggagcagtatcagcaaagtactgaaggatatgaccttagaacctagaaatatacatccagccaaactgccctttaattaagtatcagggcatgaaacaaatattctcagtcatataaracctcaaaacttgaataagtagagaaacaaatcaaagagttgctggagaaacaaataaaaataatcaaataccttacaaaagttggttgtagtaaacaacaaatttttaaaattctaagaccaggctgggtgtggtggctcatgcctataatcccagcacttatggaggccaaggcaggagaatcgcttgaggccaggagtttgagaccaccctggccaacatggcaaaacctcatctctactaaaaatacaaaaat

SEQ ID NO: 802644 - DNA, 495 bp, Homo sapiens
tgcaaataatcacccaatttatcttcagcatgacttcaacttctgctcacagtcaccttggaataaacacactgaagatttaaaaaccttctattccaaacttactcttcttcctatgttaatgatgttaccgcctactcacctgcttaactagaaacctgagacttctttttacttctaagcataaaatgattctccaatgtgcctcccttctctatgccktggtttaggtccttttatctcgaatatggattacttaatagctaacatttcctttcctggtgtgtagggctccatcttaatagagcttgaagttaccaatccccttggaggacctacttatcgagtacttcaactttatgtaagccaattacatgacaatattttatgtcttataaatacagataatgaagcaaaaagagatagaaaagggtcgagtttttccctcccaaaacccccaatgattaagaattttccatgtgtaatcatgtgtac

SEQ ID NO: 802645 - DNA, 554 bp, Homo sapiens
aatggtgaaaccctgtctttactaaaaatacaaaaattagtcaggcctcactccagcctgggtgacagagcgagactctgtctcaaaagaaaaaaaaaaaaattatttgggcttggtgacgtgcacctgtaatctcagctactcgggaggctgtggcacgagaattgcttgaacctgtgaggcagaggttgcagtgagccaagatcgtgccattgcacttcagcctgggcaacaagagcagaactccatcttaaaaaaaaaaaaaaaaaaaaaaaaaaaaaagaattttcaagccacattaggatgcttatcggcatgagttttacataataagacaatctgaaatgtatttgagttttgatgtttctaatctgtaraacttgaaggcctaaggattttgtagttttttagggaacagcattcctctttctctcaggtgatctatgttatgttgacctactcaaacatgttaactttgaaaatgaaccaacgttcaggaacaaatgaaatgacattttcaggacagcattccaaatacatagttagggacagtt

SEQ ID NO: 802646 - DNA, 637 bp, Homo sapiens; identical to SEQ ID NO: 802308

SEQ ID NO: 802647 - DNA, 606 bp, Homo sapiens; identical to SEQ ID NO: 802309

SEQ ID NO: 802648 - DNA, 551 bp, Homo sapiens; identical to SEQ ID NO: 802545

SEQ ID NO: 802649 - DNA, 598 bp, Homo sapiens
cttatttatgccccattctgtccctctctctcgttgcctttgttctgtggtctcctgggtgatggagttattgtttgtgtgtagggatgtgtggataaaagggagctgatttctagaggtgagatggccctgtggttaacggttggaggctgctgttgacaaggcctgttgctgtggcagttttgctccggaagtggccattttctgggcagggctccaccagagcaccatctgtctgtgccttttacttcctgtcaagaggcagcaggcttcgtgagctggggaagtgccagaagcagccttcgaattagacagacctggacccaaaccctttctcttcccccmacccattttggcatcttggcacgagactgtccccatttctggaaagggtgttcacaagaacagtctggctgggttgttgggatgaccgagtgtgatcatgcgtctctatggctggccatggtgtttattcgatggcaggtattaccaggatggagcgagtcccagtaggaagggcctttaggatgtcatctggttccacccaacagggatgggaactgtaattccccactctccctgtggagaatcagggcgg

SEQ ID NO: 802650 - DNA, 598 bp, Homo sapiens
cttatttatgccccattctgtccctctctctcgttgcctttgttctgtggtctcctgggtgatggagttattgtttgtgtgtagggatgtgtggataaaagggagctgatttctagaggtgagatggccctgtggttaacggttggaggctgctgttgacaaggcctgttgctgtggcagttttgctccggaagtggccattttctgggcagggctccaccagagcaccatctgtctgtgccttttacttcctgtcaagaggcagcaggcttcgtgagctggggaagtgccagaagcagccttcgaattagacagacctggacccaaaccctttctcttccccccrcccattttggcatcttggcacgagactgtccccatttctggaaagggtgttcacaagaacagtctggctgggttgttgggatgaccgagtgtgatcatgcgtctctatggctggccatggtgtttattcgatggcaggtattaccaggatggagcgagtcccagtaggaagggcctttaggatgtcatctggttccacccaacagggatgggaactgtaattccccactctccctgtggagaatcagggcgg

SEQ ID NO: 802651 - DNA, 543 bp, Homo sapiens; identical to SEQ ID NO: 802516

SEQ ID NO: 802652 - DNA, 607 bp, Homo sapiens; identical to SEQ ID NO: 802311

SEQ ID NO: 802653 - DNA, 554 bp, Homo sapiens; identical to SEQ ID NO: 802312

SEQ ID NO: 802654 - DNA, 572 bp, Homo sapiens; identical to SEQ ID NO: 802313

SEQ ID NO: 802655 - DNA, 660 bp, Homo sapiens; identical to SEQ ID NO: 802314

SEQ ID NO: 802656 - DNA, 626 bp, Homo sapiens
gtttgcgaacagcacccgtgggtcactctctaccacatctggtcctggggtttctcagaggatgtggtcaggagcctctgtctgcacagctacctggcctttcttcaggatccgagcctgcacagtgtgcatcacagggctccatgggagcacaaacacagttcaccttctccccatctggagcggctatgctcatttgctagtagcagcatttcccacttccctcctttcctccttctcttcctccttccctcttgcctctcctacttactgagcttctarcgtatgccaagcactatggctgagacggtcttattctcaaggcgagcccactgaaaggaggtcaaacctacagcccggagaattgatgactaggggtgagaaagaagcttatgcaaagttaaagtgttttttatttcatttagatgtatatttttagagacaagctctcactctgtcacccaggttggagtgcagtgttacgatcatggctcactgcagcctcaacctcccgggctcaaacaatctgcccacctcagcctcccaagcaactggggttacaggtgtgtgccaccgtgccaggtgaaagtgtttttcaaaaggcatttaacataggaagattggtg

SEQ ID NO: 802657 - DNA, 626 bp, Homo sapiens
gtttgcgaacagcacccgtgggtcactctctaccacatctggtcctggggtttctcagaggatgtggtcaggagcctctgtctgcacagctacctggcctttcttcaggatccgagcctgcacagtgtgcatcacagggctccatgggagcacaaacacagttcaccttctccccatctggagcggctatgctcatttgctagtagcagcatttcccacttccctcctttcctccttctcttcctccttccctcttgcctctcctacttactgagcttctagcgtatgccaagcactatggctgagacggtcttattctcaaggcgagcccactgaaaggaggtcaaacctasagcccggagaattgatgactaggggtgagaaagaagcttatgcaaagttaaagtgttttttatttcatttagatgtatatttttagagacaagctctcactctgtcacccaggttggagtgcagtgttacgatcatggctcactgcagcctcaacctcccgggctcaaacaatctgcccacctcagcctcccaagcaactggggttacaggtgtgtgccaccgtgccaggtgaaagtgtttttcaaaaggcatttaacataggaagattggtg

SEQ ID NO: 802658 - DNA, 549 bp, Homo sapiens; identical to SEQ ID NO: 802415

SEQ ID NO: 802659 - DNA, 607 bp, Homo sapiens
ccacattacccaggttggtcttgatctcccaacctcgtatctgcccacctcggcctcccaaagtgctaggattacaggcatgagcgactgcgcccagccatttttggatttttttactagacacagggtttagccgtgttgcccaggcttaaactcctgtcctcaagtgatctgctcgccttggcctcccaatgtgctaggattataggcttgcgggattacctggcctgcaagtatatttttgaaaccaccttactgaggtacaactgacatacactaaacatattaaaactgtacaatgtgatgtttcgagagagtgagcatatccttcctcctgsaagtatcttcctgcttctatgtaattcctcccatccccacctccactcccactgtaccccaatctgtttcctgtcactattgataagttgagcaagtatatatttaatctttaagagcttcctcgctttctgttcccttttcataaatttcctgctttttaaagtattgctttattatcttatatctctctggagttttaatttgattaaaatattttttggtccccggagttattctctgcagcctccaaaacagtcttactagttta

SEQ ID NO: 802660 - DNA, 605 bp, Homo sapiens
tcacattttcaggtatccttatagcagcatcccactctcttcagtaccaatttactgtgttagtccattctcatactgcaataaagaactgcctgagactgggttatttataaaggaaagaagtttaattgactgacagttccgcatggctggggaggcctcaggaaacttgcaatcgtggcagaaggggaagaaatcatgccctttttcacatgatggtgggaaggagaagtgctgagtgaaggcggaagccatttataaagccatcagatctcataagaactcactcactatcacaagaacagcatgggggaaactgcctccatgattcaattatctctatttgatcctgcccttkacacatggtgattattataattcaaggtgagatttaggtgggaacacagagccaaaccttatcagttgggtagttctggctcatgtggttgcagtgaggatgtcagtcagagctgtgatctcatctgaaggattaattggggctagggctgtggtttcatcagaaggattgattggggctagggccatggtctcatctgaaggacttattagggctggataatccacttccaagatggctggctcac

SEQ ID NO: 802661 - DNA, 625 bp, Homo sapiens
aaattccctcatttgtcatcatcaggagttaacaggcagcatctaaaattagtaaatcaaggccgggtgcagtggctcacacctgtaattccagaactttgggtggctgaggcgggtggatcacttgaggccaggagttcgagatcagcctgggcaaaatggtgaaaccccgtctctactaaaaagacaaaaattagctaggtatggtggtgcacacctgtaatcccagctactcgggaggctgagggaggaaaatcgcttgaacctgggaggtggaggttgcagtgagccgagatcctccactgtactccagcctgggtgacagagygagactgtctcaaaaaaacaaaaaaaaaaaaaaaaaacttgataaatcaagaaatagagaattcctatatatttaaatttatgtaggaaaccactggagaattaacatgaccataaaccttttaaatgaccagaaagagggacacacacatgcatacagaagaaagaaaaccaagttcagtgtcacgttcataggcatggccttaaacaatgtactcaggaatgttaaaataaaaagatgggcaaagaaaaaccaggtacatacaaacaaaagtaaaacggacttcttaacatgagc

SEQ ID NO: 802662 - DNA, 457 bp, Homo sapiens
caggggaaaaaaggaatacggactcagcaactcttaggtgctctgagcctcttcccaagccttctggttctgtgagcatttcattgaaagaaaatggaataacagagttttagaagaaaaactgtatttggtcttgcaagagaaaagtatattcatataaaactcagttctcaactatttgccaaggttacttcttttgtttccaacatttaaaaagggtatctagttgtaggtrgagaaaacattaagatatgtgaatggaaaaaggtaaaatttctaaaagtatggattcacagtggggtctgatttaaatgtttaaattttttctctttaatttcttctcaccaatcctgaaagacacgacgagataatatctactttcaataaatcaattaattttatttaaaatccctaagattttaatatagtacatgcaaaacaataatagattttctat

SEQ ID NO: 802663 - DNA, 609 bp, Homo sapiens
acatttgagcccatttgccccatcctgctcgttctcctcctcttcctctttttctctcccatatatacagtgatatgcagggcataccactacatcatagatctcagtcctcaaagcttacaaaattacttccatttgtgaggtaaactaactcttgttcctcagtcttgaatttacccaccaggcttgctgcaaagaatgagcttaaaaataacctgatgatttccacgtggcagggccacgggttacagagcacagcctgtgcccctaggacaggcacccacattgttctttttggaaggagtggatctgatgccagggaaaggtgacacaagaaagaagctggccacgaagcctctgagctttgtgacctgatgctcacctgacgcatggccaggctgtctcctctctgccaaayagggagagaaactctgacttggccgacatcgtgggtgtgttaggtaatatttgccaactgctttgaagatgaaaagcgttatggggcactaaatgtgataattatcaattataaaacctcactactccctggaacactaggggcgaatgagcaggaaatataaatgtttgtgacaggaagccaggagccag

SEQ ID NO: 802664 - DNA, 482 bp, Homo sapiens
aagctgaggctttcatggatagaatcaatcaaaggttaaggtcaaagacattctgagacttgcccagccttaagatgaagcaatagagggccctttggtgcttggtggctgcaaccgtggctgagttctaggaggcagtttattttttgttgcttgtgtataatttttaccccaagaatcccttatggtgctggctgtgaccgatgaacaaactcttagtgtttaatgtgtgtgtctgtaaacacarggagaagggaaagctgcctgaagattggacaaagagccttgtaaatgtcttggggtgaatgacaatgggaagattaggaggagtctgctggggagctgcctgcaaaggtcccctcttattcaggaattgtatcatcagctgagtcctttggaattagcagacagttgtgaagataaaatagtcttgtagcataagaagccgtaggtagtctgggagctataaaagctcctcatta

SEQ ID NO: 802665 - DNA, 616 bp, Homo sapiens; identical to SEQ ID NO: 802577

SEQ ID NO: 802666 - DNA, 572 bp, Homo sapiens
ctgcattgggcactgagtttcttcctttttcttaatattcatgtctttttttttttttttttttttttttttcaagaaaacacacaacaaatgtcagaatatgagatagggaagttctcctggaacagcatgtagattattttctagagcactttagttaaatggtacttaatgatgataattcttctgaacacaattcagaatttgaaccaatatttgttgtttcaggaaagcagaatttcctttgaatgatggataagaatggtgaggatctttataatatagaataaattgctgaaaagaaactttgagggaatattcaaagcaccctcttattttgaaccttccttgatcatctctaatgtgactgctttctcaraacttccatatcatttgtcccctcttttggagttcttgctgctttttgtttttgtatttgttttcacttattcagtaattattcagtgtccactgcatcctaggtaatatttcagctgtcaaaagtcagattttggctgggcatggtggctcactcctgtaatcccaacactttgggaggccgaggtggttgg

SEQ ID NO: 802667 - DNA, 600 bp, Homo sapiens
taaagttctaaatatgtttttaattataaaaacatacaattcaggagactatttgaacacccctttgagtaggaattgtcttcataggcaagataggagacctgggagctagaacagaaaagatggacaggtgcgataggctccctagaaatgagaacatttcagaatgactgagctgctactcgccaggccacagctctgtatgtgtacacagttcagggtgtccacagcagacaaggagtgaggcttcctggtcttttagtgagggtctktagttgggtaaagtagcagaaatccaaaggagaggaaatgtggatgggcaataaatattaaattatgttcaacctcagtggtagatatggaaatgcaaattaaagggcaccatttttctcttatcacattggcaaaattctagaactttttataacatctagtgctgacagagagtggagaaatggcacttttcatacattgcttgtaggagtgtgaattactgtaacctttttggaaagttatctcttcatatctgttaagttaaaaatatatctactccttcatccaataatttcacattgggttttgtatctatctttgttgaat

SEQ ID NO: 802668 - DNA, 468 bp, Homo sapiens
tccctcacagcaagtaccttacgccacagcctacgaaccaaggaaatatctggtcagtctgggaatgaggcgcattttacaaaggttgccttgtcagttgtttcacaaaacagatgcgcagtcagagaaatttaccagcttttggccttgarttctaatcattaaataagaacgtttgcgctgtcataattaaaaacaaattaataaatcaaatagtgttgaaaaatcattcccatgttgaatatataacttacatcttaaaaataatttggaattattttatttatttctgatcctccgaaggaaacaggattgaagatttttttatactggccagatctttgctaaagtcattctattaataatcagtgtactttattttgctcttgagtccctaaaaatttgataattcacaaatagaacaattaagatggattaaaatctttaacatttcatgctttcttattc

SEQ ID NO: 802669 - DNA, 468 bp, Homo sapiens
tccctcacagcaagtaccttacgccacagcctacgaaccaaggaaatatctggtcagtctgggaatgaggcgcattttacaaaggttgccttgtcagttgtttcacaaaacagatgcgcagtcagagaaatttaccagcttttggccttgagttctaatcattaaataagaacrtttgcgctgtcataattaaaaacaaattaataaatcaaatagtgttgaaaaatcattcccatgttgaatatataacttacatcttaaaaataatttggaattattttatttatttctgatcctccgaaggaaacaggattgaagatttttttatactggccagatctttgctaaagtcattctattaataatcagtgtactttattttgctcttgagtccctaaaaatttgataattcacaaatagaacaattaagatggattaaaatctttaacatttcatgctttcttattc

SEQ ID NO: 802670 - DNA, 590 bp, Homo sapiens
tatatgctgtccacaggagatacaccttttattcaaagatacaaatagactgacagtaaaaggatgagaaaaggtacatcattcaaacagcagccacaagaaagctggagtggctatactaatctcatacaaaatagacataacaaaaaattcctagagacattttataactatagaagggtcaatctatcaggaaaagctaacaattacaaatatgtatgcacccaacaacaaaacactacaatacacaaagcacacaactgacagaaataagagttggagacttcartgtctcactttctataatgaataaccaagcagaaaatcaactaggaaataaaagatataacattataaacaactagacctaacaaacatctataaaacactccacacaacaagaaagtatacattcttctcaactgcacatagaacattctctagaacacaccaccatatgctaggctataaagcaaacctctctaaatttaaaaggatataatacataaattatgttctcctacacaatagaatgaaattaggaattgatatagtttgaatttttgttcactccaaaactcatactaaaa

SEQ ID NO: 802671 - DNA, 644 bp, Homo sapiens
agacagttaacatcacaggactctgtgcagacaacccccagtatcagcctggagcctggttgacttgctgggtggctagatccagaaaacagataacaatcactatagcttggttctcaggaaaccacatcattaggaaaagggggagagtactacatcaagggaatatcccatgggacaaaagaatctgaacaacagccttcagctctagaccttccctctgagagaggctacccaagtgagaaggaaccagaaaaccaactccggtaatatgacaaaacaaggttctttaacaccccccagaatcacactagctcaccagcaatgggcccaaacgargaagaaatccctgatttacccaaaaaagaattcaggaggtttgttataaagctaatcagtgaggtaccagagaaaggcaaagcccaatctaaggaaatccaaaaactgatataagaagtgaagggagaaatattcaaggaaatagatagcataaataaaaaacaatcaaagctacaggaaacaatggacacatttatagaaatgcaaaatgctctggaaagtctcagcagtagaattaaacaagtagaagaaagaaattcagagctcaaagacaagatctttgaattaacccaatccaacagaga

SEQ ID NO: 802672 - DNA, 644 bp, Homo sapiens
agacagttaacatcacaggactctgtgcagacaacccccagtatcagcctggagcctggttgacttgctgggtggctagatccagaaaacagataacaatcactatagcttggttctcaggaaaccacatcattaggaaaagggggagagtactacatcaagggaatatcccatgggacaaaagaatctgaacaacagccttcagctctagaccttccctctgagagaggctacccaagtgagaaggaaccagaaaaccaactccggtaatatgacaaaacaaggttctttaacaccccccagaatcacactagctcaccagcaatgggcccaaacgaagaagaaatccctgatttacccaaaaaagaattcaggaggtttgttataaagctaatcagtgaggtaccagagaaaggcaaagcccartctaaggaaatccaaaaactgatataagaagtgaagggagaaatattcaaggaaatagatagcataaataaaaaacaatcaaagctacaggaaacaatggacacatttatagaaatgcaaaatgctctggaaagtctcagcagtagaattaaacaagtagaagaaagaaattcagagctcaaagacaagatctttgaattaacccaatccaacagaga

SEQ ID NO: 802673 - DNA, 619 bp, Homo sapiens; identical to SEQ ID NO: 802582

SEQ ID NO: 802674 - DNA, 646 bp, Homo sapiens
ttttctatttccatgaaaaatgtctttgtagtttaacatagattgcactgattctgtagatcacattgagtgatagagatattttaacaatattcttctagtgcatggacgtgggatatctttccatttacttgtgtctgctttaatatctttgatctatgttttatagttttcattgtaggatctttcttggttatgtttatccctaggtatcattattttggagggcgggagtgggtagctactgtaattaaacagctttcttgattttttttaatgtgtttcactgttggtkcatgtgtgtgctactcatttttgtatattgatattgtatcttgcaactttactaaatttattatttctagtagttttttttgtagaatctttagggttctctctctaggtatatatgatcatgtcacttgcaaacagaagcaatttgactttttttcccccaaatttggatgggttttattgcattctgctgtctaattgctctagctaggacttccattaccacgatgaataaaagtggtaaaattagccacactttaacaagatcctagaggaagagcttttaatttttccccattgattacgatgttagctgtgggtttgtcatatatggcctttattgtgctatgtt

SEQ ID NO: 802675 - DNA, 583 bp, Homo sapiens
aacagtgggcttaaaatattcagtgcactgtgctacgtttgaacagatgtgctgtcatccaggcttcgttgttccactgatagagcacagacagagaagacttagcatcattcttaagggccccaagagctcatttaccatctccatattagcagtaagcctgttctgctttcttawcattcatgtgttcgctggaatagcccttgtgatttcctttacgaacttctcctttgcaggctagctgtgtggtgcaagagacctagcttttggcctcagttttcaacatgccttcctcactaaacttaattatctctagcttttgatttaaagtgagagacatgtgagtcttctttcacttgaacacctagaagccattctagggttattaatgggcctggtttcaatattgttgtgatggtcgtgtctcagggaatggggaggcctaaggagaaggagagagatgggggatggctggtcagtggagcagtcagaacacacacatttatcagttaagtttgctatcttatgggcactgtttgtggagctccgagaccattacaatggtgacatcaaagatcacaga

SEQ ID NO: 802676 - DNA, 583 bp, Homo sapiens
aacagtgggcttaaaatattcagtgcactgtgctacgtttgaacagatgtgctgtcatccaggcttcgttgttccactgatagagcacagacagagaagacttagcatcattcttaagggccccaagagctcatttaccatctccatattagcagtaagcctgttctgctttcttaacattcatgtgttcgctggaatagcccttgtgatttcctttacgaacttctcctttgcaggctagctgtgtggtgcaagagacctagcttttggcctcagttttcaacatgccttcctcactaaacttaattatctctagcttttgatttaaagtgagagacatgtgagtcttctttcacttgaacacctagaagccattctagggttattaatgggcctggtttcaatattgttgtgrtggtcgtgtctcagggaatggggaggcctaaggagaaggagagagatgggggatggctggtcagtggagcagtcagaacacacacatttatcagttaagtttgctatcttatgggcactgtttgtggagctccgagaccattacaatggtgacatcaaagatcacaga

SEQ ID NO: 802677 - DNA, 582 bp, Homo sapiens
ctgttctcgaactcctgacctcaggggatccatccacggcctcccaaagtgctgggattacaagcatgagccactgcgcctggcctagaatatcttgatgaataatttatgtagatagaaaaaaactgtttaaggcygaacctataactgaattccattttacataaagggtttttttaaatgtaattttagtagaaatggaaatttcaggaaatgggattaatctagactttgaagggaaattatctcattttgttcttggttttactaagtgtattactagtcttggttctctcaagaaacagaaccgatagcatatatatatatatgtctccagtaggaaagagtgagatatgtttatatatatatagtatatttaactatatttaaccaatatatatgattgtatcatgtgcatcctattggttctgtttctctggagaaaatacaagtattcaccagttgccctttatctatggttttgctttccatgctttgagtacctcatggtcaaccaaggtctgaaaatattaaatggaaaaattcctgaaacaaacagttggtaagttttaaattgtggac

SEQ ID NO: 802678 - DNA, 604 bp, Homo sapiens
ttttctatttccatgaaaaatgtctttgtagtttaacatagattgcactgattctgtagatcacattgagtgatagagatattttaacaatattcttctagtgcatggacgtgggatatctttccatttacttgtgtctgctttaatatctttgatctatgttttatagttttcattgtaggatctttcttggttatgtttatccctaggtatcattattttggagggcgggagtgggtagctactgtaattaaacagctttcttgattttttttaatgtgtttcactgttggtkcatgtgtgtgctactcatttttgtatattgatattgtatcttgcaactttactaaatttattatttctagtagttttttttgtagaatctttagggttctctctctaggtatatatgatcatgtcacttgcaaacagaagcaatttgactttttttcccccaaatttggatgggttttattgcattctgctgtctaattgctctagctaggacttccattaccacgatgaataaaagtggtaaaattagccacactttaacaagatcctagaggaagagcttttaatttttccccattgattacgatgt

SEQ ID NO: 802679 - DNA, 530 bp, Homo sapiens
cagaaaaatgcaagatgaagcagcaagtgctgaggtagaagctgcagtaattacccaaaagatctagctgagttcactgatgaaggtggtgacactgaacaacagattttcaatgtagacaaaacagccttttattggargaagatgcaatctaggactttcctagctagagaaggaaagtcaatgcctggcttcaaagcttcaaaggacaggctgattctcttgttaggggtgaatgcagctggtaactttaaatggaagccaattcttatccatcattcccaaaactctagggcccttaagaattgtgccagatccactctgcctgtgctctataaataatcaacaaagcctggatgacagcatatctgtttacagcatggtttactgtaagccctctctgagacccactgctcagagaaaaggatacctttcaaaagattactgctcactgacaatgcacctggtcacccaagagctctgctggagatgtacaaggagacaagtgttgttttcatacctgctaacac

SEQ ID NO: 802680 - DNA, 572 bp, Homo sapiens
acatgtttcactgatgggaaagccgaggctcagagacggccagcaacttctccaaggtcacacagctttcacatgctagatctgggacaccagcccaggcaccttggtctgactccagagtttggcacctttgcccatgtccctaccctgagcatctccccctgaaggtgacggcagggcagaaagcgccgtcagcactcgcctcttaggcagctttggaggttcatgcagccattcagttaacaaatacttatccactccctctctgggttaggcccctcccctccttcytggggctccctggtgggggctgctgtagggactgatctcagctggcaaagccccgcttcacccaggctcaaaaaatagtcctgctgctgtccagcctgaagagtgggggccacaggctcccagaaccaaggctggggaggcaggaggcagagctgtgagctcggagcaggctccattagcatggggctccagcctcctagcttaaagatcgcctcgggtgctctcttaaagaggttaacgttgcagctgacaattgggagatctggcagctgatcaaatcg

SEQ ID NO: 802681 - DNA, 572 bp, Homo sapiens
acatgtttcactgatgggaaagccgaggctcagagacggccagcaacttctccaaggtcacacagctttcacatgctagatctgggacaccagcccaggcaccttggtctgactccagagtttggcacctttgcccatgtccctaccctgagcatctccccctgaaggtgacggcagggcagaaagcgccgtcagcactcgcctcttaggcagctttggaggttcatgcagccattcagttaacaaatacttatccactccctctctgggttaggcccctcccctccttcctggggctccctggtgggggctgctgtagggactgatctcagctggcaaagcccygcttcacccaggctcaaaaaatagtcctgctgctgtccagcctgaagagtgggggccacaggctcccagaaccaaggctggggaggcaggaggcagagctgtgagctcggagcaggctccattagcatggggctccagcctcctagcttaaagatcgcctcgggtgctctcttaaagaggttaacgttgcagctgacaattgggagatctggcagctgatcaaatcg

SEQ ID NO: 802682 - DNA, 528 bp, Homo sapiens
ccagtgactcagccacagaggtcaggaagctggagacatgagcaggcggctcaccccatggtcccctccccctccccacctgatattttcattaggacacatcttctgcaccaggcccctcagctcctgccctgcaaagctgcagatgcctctgctggctttattaaggccctattagcccagcagccccagggaaggctaaagatgctgtcactgcagacactggtttggtagcctcagaggrgctcagtagggagggccaggaacctaaggttacagcgaggtctttagagctgcacaggcctgcctggtttaatcccagttcttctgctaattggctgtgtggccttgggcaacttacttcccttctcggagtggcggcttctccacctataaaacagggtcattaacgtgcttgtttgaggatttgctgagctaaagcatttacaacacctagcccgaagtaagcacttgttacatatcccaggatccctgggagccaggtccacggtggagcgctcatacaca

SEQ ID NO: 802683 - DNA, 642 bp, Homo sapiens
ggacagggacagggaagagctgcagttggactagctaaagccttatgactttctcaatcactagagctgctaagctgacactatctttattacctggttcctctcagagttgacatttggaataaagtacatggccttccctttatttctgtgaaatgacatcttgatctagttgtcccagtccactgcatttggtgcaattgtccaaggtactcatgaactctgccagctctgcgatatgagctgagtgagttgggcgggtcgcctcaccactctggcctctatctctatttgtacaatggggatcacagcaggacctgactatgaggtcactgagatggaggttctgtccctgaaatgattatcacctggggtataaagttcrccagtgatgaacaggccattgtgacccagaaggttgtaaatgaacccagatgctcagtgctttggggacctcccaccacacacagagggcaaggactggggtcacacaaggagaggggccgcaccatgtccccccaacaggtcctccccagggcctttccctcagaggcaccagcaccgtgtaggcttaggtttcctaggggtcagtcctaggaggtgactctggctgaggtctagtgacccacagaccccagggaa

SEQ ID NO: 802684 - DNA, 579 bp, Homo sapiens
ggattgctggctagctatatttataccccctgctaattatatgctaaataagaggcaggttattcataaactaggaacaggaagttcctggaaccatataagataattcctgggttattgccgtgggatcatttgtaaactgtcatggccctggtgggagtatcttatgcaaatgcattttaattcctattccgagctggttttggccattctttgttattgttatgttctgttttgatcagcagggttttgacaggtgcttggaaaaatcctgctgatctcctccctcacagggacatgcctactgccaaaggagagacggaattatctttctattctccccatagraaatattacaaaatcactgtcacacgaaaatgtgatcaaagagtctgcagccaagaaatatgggggggacagagtgttttaaaggcgaaggtgtgtctgtcacttagtaaaaatgtcaggattcttttttttctggagtttgtggtgtttgtcggcttttcaaaatttgtcattccttttcttaatctaaataatcattttatagagaaaaaaaattactcatcagtgttg

SEQ ID NO: 802685 - DNA, 551 bp, Homo sapiens
ttcagggtggtatgtgaaagattctccccggggcctgaaagtttggggggatgaataactcctcccttctcaggcccagtcccaaggcacaagaccacttgtgctagcagcgtgtgtcagcaagatagcagaagcaggaagagagctggccaggagacacgtacccctgaagatcaagagagaggccatctgggtaccatgtagcagttacatcagactgggacacttcctgtttacaggagactataaaacccctgccccgtcctcacctggggctgacgccattttaggcctcagcccatctgcacccaggtgctcattaaaacagcgtgttgctccacactgccttgtgttctttgytggcaagctctcggggttcgaaccaacacaagagccttacagtatggccgcagatgtctcccaacatttcacagaacctggtcagaataaaacattccatgggggttcaggtcataaaaaaatactgcctaaccacctaaccacaggaacatctctattacatcctgctggatgaagggcccaaggaacat

SEQ ID NO: 802686 - DNA, 628 bp, Homo sapiens
caacaggtaaaaagggcatagcttctgccaactaacaagccttgccatcctttttgaccaggagattaggtgtaaatcaaggcttttagaagaaagcatgcactgtcaccaatgttttggtcaacgatggaccgaatatacaatggtgtccccatcagattataatgccggtgagccaccgcacctgtcatcctagcactttggtaggcagaggcgggtagatcattgagcccaggagtttgagaccagtctgggcaacatggtgaaatcctgtctctacaaaaaatacaaaataaaccagtcatggtgatgcgcacctgtagtcccagctacttagaaggctgaggtgggagactcacctgagcccaggaaagtygagactgcggtgagccatgatcatgctactgcactccagccagggcaacagagtgagatcctgtctcaaaaaaaaaaaaaaaaaaaagaaagaaagaaaaaaaagattataataccatatttttactgtagcttttctatgtttagatatgtttacatacaaaaatacttatcattgtgtgggctgggtgggcagccgattgcgcagtgcggggactgataggcgagccagtctggacccccatccactcac

SEQ ID NO: 802687 - DNA, 628 bp, Homo sapiens
caacaggtaaaaagggcatagcttctgccaactaacaagccttgccatcctttttgaccaggagattaggtgtaaatcaaggcttttagaagaaagcatgcactgtcaccaatgttttggtcaacgatggaccgaatatacaatggtgtccccatcagattataatgccggtgagccaccgcacctgtcatcctagcactttggtaggcagaggcgggtagatcattgagcccaggagtttgagaccagtctgggcaacatggtgaaatcctgtctctacaaaaaatacaaaataaaccagtcatggtgatgcgcacctgtagtcccagctacttagaaggctgaggtgggagactcacctgagcccaggaaagtcgagactgcggtgagccatgatcrtgctactgcactccagccagggcaacagagtgagatcctgtctcaaaaaaaaaaaaaaaaaaaagaaagaaagaaaaaaaagattataataccatatttttactgtagcttttctatgtttagatatgtttacatacaaaaatacttatcattgtgtgggctgggtgggcagccgattgcgcagtgcggggactgataggcgagccagtctggacccccatccactcac

SEQ ID NO: 802688 - DNA, 628 bp, Homo sapiens
caacaggtaaaaagggcatagcttctgccaactaacaagccttgccatcctttttgaccaggagattaggtgtaaatcaaggcttttagaagaaagcatgcactgtcaccaatgttttggtcaacgatggaccgaatatacaatggtgtccccatcagattataatgccggtgagccaccgcacctgtcatcctagcactttggtaggcagaggcgggtagatcattgagcccaggagtttgagaccagtctgggcaacatggtgaaatcctgtctctacaaaaaatacaaaataaaccagtcatggtgatgcgcacctgtagtcccagctacttagaaggctgaggtgggagactcacctgagcccaggaaagtcgagactgcggtgagccatgatcatgctactgcactccagccagggcaacagagtgagatcctgtctcaaaaaaaaaaaaaaaaaaaagaaagaaagaaaaaaaagattataataycatatttttactgtagcttttctatgtttagatatgtttacatacaaaaatacttatcattgtgtgggctgggtgggcagccgattgcgcagtgcggggactgataggcgagccagtctggacccccatccactcac

SEQ ID NO: 802689 - DNA, 547 bp, Homo sapiens
tttgtgataaatcctacaatgcaagatataagtaaaagaaaatacttatcattgtgttacaccatgtacattattcagtatactaacatgctgtatgggtttgtagcctaggagcaggtgggctacacaatatagcctaggtgtgtagtaggctatatcatctaggtctgtgtaagtacactctgtgatgtctacacaacgacaaaagtacctaaagatgcatttctcagaatgcatccctgtcattaagcaatgcctgactgcactgctaaccacctacactgccatcaagttggggaaaagtcctcctggattcatgtgaattacaccaagatagacccagatcagcactctgaggacaactggaagaccctccctayaggtgaccttaaagtaacgatttcccagactggttcccaggcctcagaagcagatgacattttaaagtagacagctttcctcaagatcatggatcaagaaacttcacttccacctgttttctcacattgggcctccttgtccaaaaagcaaaaaccaaaagaacctc

SEQ ID NO: 802690 - DNA, 522 bp, Homo sapiens
aacacgaagaatcagactctccggtgtggaaactattacataattatctatgttattatttttactttttggagacagcatctaactctgtcactcaggctggagtgcagtggcacaatcatggctcactgcagcctcgaccttccaggcttaagcgatcctcccgcctcagcccctcaagtagctgggactacaggtgcccacckacatgcctggccaatttattattattattattattgagaggaggtcttgctgtgtttccgaggctggcctagaactcctgggctcaagtgatcctcttgccttggcctcccaaagtgttgggattacaagcatgagccgccatgccccactggttgtctattttaatagaggcttgatctttgcttgtgaatacaaaacattcttcaaaatacaggtttagagagggcacagcaggcacagaacgagggtagggaaatggagtggggcaagaatatcttcaccccatgtgcttggaaaaaacaatgaaactgcctc

SEQ ID NO: 802691 - DNA, 522 bp, Homo sapiens
aacacgaagaatcagactctccggtgtggaaactattacataattatctatgttattatttttactttttggagacagcatctaactctgtcactcaggctggagtgcagtggcacaatcatggctcactgcagcctcgaccttccaggcttaagcgatcctcccgcctcagcccctcaagtagctgggactacaggtgcccaccgacatgcctggccaatttatkattattattattattgagaggaggtcttgctgtgtttccgaggctggcctagaactcctgggctcaagtgatcctcttgccttggcctcccaaagtgttgggattacaagcatgagccgccatgccccactggttgtctattttaatagaggcttgatctttgcttgtgaatacaaaacattcttcaaaatacaggtttagagagggcacagcaggcacagaacgagggtagggaaatggagtggggcaagaatatcttcaccccatgtgcttggaaaaaacaatgaaactgcctc

SEQ ID NO: 802692 - DNA, 604 bp, Homo sapiens
ccctcaaaatatgagaaatcactggaagagagagccagaatgggacctaagacagaagccaccaccaggcacccttaaggcaggacagttgcaatggttacttggaatacttccggctaggagtggtgttgcgggaagtcagggaccccaaacagagggaccggctgaagccatgacagaaaaacgtggattgtgaagattttatggacatttattagttccccaaattaatacttttataatttcttatrcctgtctttactgcaatctctaaacataaattgtaaagatttcatggacacttatcacttccccaatcaataccgttgtgatttcctatgcctgtctttactttaatctcttaatcctgtcaaccaaggaggatgtatatggcctcaggaccctgtaataattgcattaactgcacacattgtacaggatgtgtgtttgagcaatatgaaatgtgggcaccttgaaaaaagaacaggataacagcaattgttcagggaataagagagataaccttaaactctgactgctggtgagccaggcggaacagagccacatttctcttctttcaaaagcaaataggagaaatatcgct

SEQ ID NO: 802693 - DNA, 518 bp, Homo sapiens
caaggagctagccctgggccaggaccggtgcgtaggggtagtaggggatccatgtgggactgccgcagactggagccactgatcctgcctcagggggaaaaacccatttcttgccctgcccagtaaggacacatcarggtctggagctttggggccccctgaccccttaggttcctgctgttaggaccatcttcaaagtgcgagcaggattgaatgaatttctggctctgctcctcagtgtgtaagtctgtgaaccgggaaggctctcttttaacacccccggggcagtgcaagggtcatgtgggattgtctgtgtgctgtacctgccttggcacctgacagggtaggtacacgtggctgaagtgtgattttctagaacttttccaggctggtcagaaggaattctgggtatgttctgaagttacgtattttggacctgtgtcccagccaggttccaggtgaagttcacgggagactcacagagtagtgaaagaccattggcctggatgtctagacat

SEQ ID NO: 802694 - DNA, 579 bp, Homo sapiens
tcctgcaggttcaaactgagcatacatcttccccaaacctgcatgtcctcctgagtccctaatctcagcagatgactccatcttccacctagtgatggggggtcagccttgactcttctcttcatctcttggacactaagtccttcctaactacctctggaatccagccacttctccccatgtttccaccacattcccagttctggcccagcctcctcactggcctccttgccttcagcctctccccaccttgatctcttcaagtcactcccctgctcagaaattttttttttttttcgagatggagtttcgctcttgttgcccaggctggagtgcaatggcaygatcttggctcaccacaacctccgcctaccaggttcaagcgattctcctgcctcagcctcccgagtagctgggattgcaggcatgtgccaccatgcccagctaattttgtatttttagtagagacggggtttctccctgttggtcaggctggtctcaaactcccaacctcatgtgatccgcctgcctcagcctcccaaagtactgggattataggcatgagacaccgtgcccggt

SEQ ID NO: 802695 - DNA, 516 bp, Homo sapiens
aacacgaagaatcagactctccggtgtggaaactattacataattatctatgttattatttttactttttggagacagcatctaactctgtcactcaggctggagtgcagtggcacaatcatggctcactgcagcctcgaccttccaggcttaagcgatcctcccgcctcagcccctcaagtagctgggactacaggtgcccacckacatgcctggccaatttattattattattattattgagaggaggtcttgctgtgtttccgaggctggcctagaactcctgggctcaagtgatcctcttgccttggcctcccaaagtgttgggattacaagcatgagccgccatgccccactggttgtctattttaatagaggcttgatctttgcttgtgaatacaaaacattcttcaaaatacaggtttagagagggcacagcaggcacagaacgagggtagggaaatggagtggggcaagaatatcttcaccccatgtgcttggaaaaaacaatgaaac

SEQ ID NO: 802696 - DNA, 516 bp, Homo sapiens
aacacgaagaatcagactctccggtgtggaaactattacataattatctatgttattatttttactttttggagacagcatctaactctgtcactcaggctggagtgcagtggcacaatcatggctcactgcagcctcgaccttccaggcttaagcgatcctcccgcctcagcccctcaagtagctgggactacaggtgcccaccgacatgcctggccaatttatkattattattattattgagaggaggtcttgctgtgtttccgaggctggcctagaactcctgggctcaagtgatcctcttgccttggcctcccaaagtgttgggattacaagcatgagccgccatgccccactggttgtctattttaatagaggcttgatctttgcttgtgaatacaaaacattcttcaaaatacaggtttagagagggcacagcaggcacagaacgagggtagggaaatggagtggggcaagaatatcttcaccccatgtgcttggaaaaaacaatgaaac

SEQ ID NO: 802697 - DNA, 581 bp, Homo sapiens
ttcttatgccaaactctcaaggctccctccccactgggggttcccaggtctgactcactttagcattctaggccagtgctagaggccgcattaggtgcctggtgtttggatcagaggacctcagtcaagccaggctccagtctgatcataggcctacatgtgggcctctttgcccttctactgaatggacatrcacacccctgcccattctccctccacagactgcttctgtgtccagcccctgttctgtagcaggtgactcaagctggttgtaccaagggcagcagttgggaagagtcagctgagcagggtcctccctctggcctgcccagggggctctggctctgctctctgccctactgcttagttatagccctgcctcctccactgaattgtgctccagctgcatctctgtatgccagccagaccagcaaacgctggagctcagggtgagggtgctggcctcccccactgccctgccacagggccctccagcctctagcctctaggagtagccccttcagctgggtgagaagccccatgggatagagcaagtcagatgcaggaaaaagaaaagacag

SEQ ID NO: 802698 - DNA, 622 bp, Homo sapiens
aggggtagacagggactattttacttaggaaacaacgaggcagtttgttttttccaagcacatggggtgaagatattcttgccccactccatttccctaccctcgttctgtgcctgctgtgccctctctaaacctgtattttgaagaatgttttgtattcacaagcaaagatcaagcctctattaaaatagacaaccagtggggcatggcggctcatgcytgtaatcccaacactttgggaggccaaggcaagaggatcacttgagcccaggagttctaggccagcctcggaaacacagcaagacctcctctcaataataataataataataataaattggccaggcatgtcggtgggcacctgtagtcccagctacttgaggggctgaggcgggaggatcgcttaagcctggaaggtcgaggctgcagtgagccatgattgtgccactgcactccagcctgagtgacagagttagatgctgtctccaaaaagtaaaaataataacatagataattatgtaatagtttccacaccggagagtctgattcttcgtgttagtctgcattcttggcccgactgcaaagcagcggggacaggcagggattcgtggccaatatcccc

SEQ ID NO: 802699 - DNA, 489 bp, Homo sapiens
acaagcaaagatcaagcctctattaaaatagacaaccagtggggcatggcggctcatgcctgtaatcccaacactttgggaggccaaggcaagaggatcacttgagcccaggagttctaggccagcctcggaaacacagcaagacctcctctcaataataataataataataataaattggccaggcatgtmggtgggcacctgtagtcccagctacttgaggggctgaggcgggaggatcgcttaagcctggaaggtcgaggctgcagtgagccatgattgtgccactgcactccagcctgagtgacagagttagatgctgtctccaaaaagtaaaaataataacatagataattatgtaatagtttccacaccggagagtctgattcttcgtgttagtctgcattcttggcccgactgcaaagcagcggggacaggcagggattcgtggccaatatcccctgggcctgcctgcccagcccagctttg

SEQ ID NO: 802700 - DNA, 554 bp, Homo sapiens
caaatatatgctctatactggagaatattccatgtgctctttagaagaatgcttattctgctcctgtcgggtggaacgttctgttcatgtctagtgtatgcgattggttaatcgtgcttttcaaattccctatttccttgatggtcttctgtagtttttctattactgaaagtggrgtattgaagtcaccaactattattactcacaatgtaaccatatttaaccctttacttttaaaattctttttggaaactggaaggatctgtaaccaccacccactcccacatcagaccctatgcatatgccaactgtctgctgctcagcagctgtgatggttgttccagttctttattaggcaaagaacagttgtttttttgtttttttgtttttttttttttaacatttcctttaaggaaggtggctcagattgctaagccagccaggccctgcgggacaggctgcgcctagggtcacctgctcttcttcagcaactcagaaatattctccttgaccattgaatccaatgttgaaaagtcccagtcggccaactgcat

SEQ ID NO: 802701 - DNA, 554 bp, Homo sapiens
caaatatatgctctatactggagaatattccatgtgctctttagaagaatgcttattctgctcctgtcgggtggaacgttctgttcatgtctagtgtatgcgattggttaatcgtgcttttcaaattccctatttccttgatggtcttctgtagtttttctattactgaaagtggggtattgaagtcaccaactattattactcacaatgtaaccatatttaaccctttacttttaaaattctttttggaaactggaaggatctgtaaccaccacccactcccacatcagaccctatgcatatgccaactgtctgctgctcagcagctgtgatggttgttccagttctttattaggcaaagaacagttgtttttttgtttttttgtttttktttttttaacatttcctttaaggaaggtggctcagattgctaagccagccaggccctgcgggacaggctgcgcctagggtcacctgctcttcttcagcaactcagaaatattctccttgaccattgaatccaatgttgaaaagtcccagtcggccaactgcat

SEQ ID NO: 802702 - DNA, 610 bp, Homo sapiens
gagtgtccctcaaaatatgagaaatcactggaagagagagccagaatgggacctaagacagaagccaccaccaggcacccttaaggcaggacagttgcaatggttacttggaatacttccggctaggagtggtgttgcgggaagtcagggaccccaaacagagggaccggctgaagccatgacagaaaaacgtggattgtgaagattttatggacatttattagttccccaaattaatacttttataatttcttatrcctgtctttactgcaatctctaaacataaattgtaaagatttcatggacacttatcacttccccaatcaataccgttgtgatttcctatgcctgtctttactttaatctcttaatcctgtcaaccaaggaggatgtatatggcctcaggaccctgtaataattgcattaactgcacacattgtacaggatgtgtgtttgagcaatatgaaatgtgggcaccttgaaaaaagaacaggataacagcaattgttcagggaataagagagataaccttaaactctgactgctggtgagccaggcggaacagagccacatttctcttctttcaaaagcaaataggagaaatatcgct

SEQ ID NO: 802703 - DNA, 582 bp, Homo sapiens
ttcttatgccaaactctcaaggctccctccccactgggggttcccaggtctgactcactttagcattctaggccagtgctagaggccgcattaggtgcctggtgtttggatcagaggacctcagtcaagccaggctccagtctgatcataggcctacatgtgggcctctttgcccttctactgaatggacatrcacacccctgcccattctccctccacagactgcttctgtgtccagcccctgttctgtagcaggtgactcaagctggttgtaccaagggcagcagttgggaagagtcagctgagcagggtcctccctctggcctgcccagggggctctggctctgctctctgccctactgcttagttatagccctgcctcctccactgaattgtgctccagctgcatctctgtatgccagccagaccagcaaacgctggagctcagggtgagggtgctggcctcccccactgccctgccacagggccctccagcctctagcctctaggagtagccccttcagctgggtgagaagccccatgggatagagcaagtcagatgcaggaaaaagaaaaggcaga

SEQ ID NO: 802704 - DNA, 620 bp, Homo sapiens
agacagggactattttacttaggaaacaacgaggcagtttcattgttttttccaagcacatggggtgaagatattcttgccccactccatttccctaccctcgttctgtgcctgctgtgccctctctaaacctgtattttgaagaatgttttgtattcacaagcaaagatcaagcctctattaaaatagacaaccagtggggcatggcggctcatgcytgtaatcccaacactttgggaggccaaggcaagaggatcacttgagcccaggagttctaggccagcctcggaaacacagcaagacctcctctcaataataataataataataataaattggccaggcatgtcggtgggcacctgtagtcccagctacttgaggggctgaggcgggaggatcgcttaagcctggaaggtcgaggctgcagtgagccatgattgtgccactgcactccagcctgagtgacagagttagatgctgtctccaaaaagtaaaaataataacatagataattatgtaatagtttccacaccggagagtctgattcttcgtgttagtctgcattcttggcccgactgcaaagcagcggggacaggcagggattcgtggccaatatcccc

SEQ ID NO: 802705 - DNA, 596 bp, Homo sapiens
accctttcaaagtatactttaaaattcaattggtttaaagccaattcagtggtgtttagtatattaacaaagttttgtcaccatcacagttatctaattctagatcattttcatcacccaaaaagaaactctgtacccaataaagagtcactccccattcccctcttcccctagcccctggttaccattcatctactttctacctctgtggataggaagtagctgcctattctggagatttcattcaaatgkaataatgaaatatgtggccttttatgactggcttctttcatttagcataatggtgtcaaggttcatccatgttgtagcatataacggtacttcatcccttcttatggctgaataatattcaattttatggactttttagcaaaacattctaatttttacttctctactgtgcttattgtttgtctttctccacaacaatgtgagcactaaaggcagacatttttgcctattttgttcactactgctttttctgcaccaaacgcattgcctggttgtgggtacttttctagttttaggaaggagaagacaagatataggtcctgactctggttctgcctctcatt

SEQ ID NO: 802706 - DNA, 596 bp, Homo sapiens
accctttcaaagtatactttaaaattcaattggtttaaagccaattcagtggtgtttagtatattaacaaagttttgtcaccatcacagttatctaattctagatcattttcatcacccaaaaagaaactctgtacccaataaagagtcactccccattcccctcttcccctagcccctggttaccattcatctactttctacctctgtggataggaagtagctgcctattctggagatttcattcaaatgtaataatgaaatatgtgrccttttatgactggcttctttcatttagcataatggtgtcaaggttcatccatgttgtagcatataacggtacttcatcccttcttatggctgaataatattcaattttatggactttttagcaaaacattctaatttttacttctctactgtgcttattgtttgtctttctccacaacaatgtgagcactaaaggcagacatttttgcctattttgttcactactgctttttctgcaccaaacgcattgcctggttgtgggtacttttctagttttaggaaggagaagacaagatataggtcctgactctggttctgcctctcatt

SEQ ID NO: 802707 - DNA, 503 bp, Homo sapiens
gctaatattttgctgaggatttttacatctatatttataaggatattgctttgtaactttattttcttgtaatgtctttttctgtctttggtatcagagtaattctggcctcatagtatgagttgaaaaatatttcttcctgttttatttttttggaagagtttgtgaaggctttgtgttagttcttcaagcttttggttgaattcaccagggaagccatctsgtcctgggcttttctttgtggaatttttaaaaataattaatattttaatctctttatttgttacaggcctattaaaattttatctttcttcttaagtcagttttggtagattgtgtgtttctaaaattttcccatttcatctaggttgtctaaattgtccacatatagttattcatagtatttctaaacttttgaatttctctatgaccaatgtgatgtctccattttctttctttctggtttccatttcattttttcatttttgtttttgtttgttttt

SEQ ID NO: 802708 - DNA, 558 bp, Homo sapiens
caaatatatgctctatactggagaatattccatgtgctctttagaagaatgcttattctgctcctgtcgggtggaacgttctgttcatgtctagtgtatgcgattggttaatcgtgcttttcaaattccctatttccttgatggtcttctgtagtttttctattactgaaagtggrgtattgaagtcaccaactattattactcacaatgtaaccatatttaaccctttacttttaaaattctttttggaaactggaaggatctgtaaccaccacccactcccacatcagaccctatgcatatgccaactgtctgctgctcagcagctgtgatggttgttccagttctttattaggcaaagaacagttgtttttttttttttttttttttttttttttttttttaacatttcctttaaggaaggtggctcagattgctaagccagccaggccctgcgggacaggctgcgcctagggtcacctgctcttcttcagcaactcagaaatattctccttgaccattgaatccagtgttgaaaagtcccagtcggccaactgc

SEQ ID NO: 802709 - DNA, 678 bp, Homo sapiens
ggtcacagactatgtaatagatgtaggtggggatggaggatccagaatccctcagagtcctcagtcactggtcttcttgctccaagccttctgaaccatgctgagagggctcctggcccaggcacttcccacttctccagcctgcgacctcgcatgaatcctgccttcttccagggaraccccttatcccaggtgtgtatatgtggatgagggagagaactcaggttttttcctccatgtttagcctcccactgtgatcaagctcaggggctaggatgggagacctggcgggcagtctaccctgcagtttcgctggcttactaagagtttggtttgcacccaagatctttgggaagcccaagaatgggtgtgtgtgggtgaaatgtaaggggtggggacgaagcatatggctgaacccttggggcaggccagaatgatttttcctggtgctggtctgccctgcaaacagaccaaggagactaattttcatatcagccagagatctctgggataaggaaaagaatactgcattttctggtcaatccaccaggaccccaggtccctcctctcgggcatatctctggctgatatgcaaattagtctctttggtcagtgtgcagtgccctagctggtgtgcaggatggccagttgagaccctggccagtgtcttgacaagca

SEQ ID NO: 802710 - DNA, 613 bp, Homo sapiens
ccacttttaatttttttagccgttgtctttagggtttgatggtacaaggttgataatacaagaataaccaactggaatagggaaagtatttatactttcagtaaacttttctttggttttagattttatatctaagagcttgtgttgcatcactgttttcttgccctggaaaaccctaactgaatgtaatcaggatgcccccaaaggttgatttgagagctttattttgaatgaaaaatctcawtgttttctgataaaatgctagacctagaaatggattggttaaatctaaagaataatgaaatcacttaatctagtacaaaatagtttaaataaatgaacaaaatattttagtgctgcctgaggtaatttaatctcagattaacattgagaatacagttttattgggggatgtacttcattaatatgtgggccactgaagaaaagattggatattccttactggagataagtggaattaaaagaattaatgggttggactggtttagcaggcgtatatttatgtgttatgctttacttgaattctaaggtttttttcctaatataaaagctaataattgccggggcgtggtggctcatgcctgtaatccca

SEQ ID NO: 802711 - DNA, 507 bp, Homo sapiens
atcctcccaacagcctgcaagacagaacttctgggaagcagaccaggtggctggcagggaggggaggcttgccctggcttttgtgggcccagtgggaggcagggagcaggaaggggcatcctgtatgtgtcctctgcagcagcagcagcggaggcctcccttgggctgggcttcctggaagagggtcaggaaacacccgctgtggcccctctccaycacgccctcatccaggacaccaagtatcagtcactcagctcacgagacccaggccctgactcagggagagaggatgtgaggggtggggcaccgggctcctcaggactgagagacccgagatgtggccccaggctgggtgttggggcagactggctatggcagcattgtgtgtaccccagcaggccagtacccacgcagggagcctccaaaccccttcacccatgaccctgggagaagaccgcagccttggagaattggcctcactgaaggggcctgcaccggccagcaggg

SEQ ID NO: 802712 - DNA, 517 bp, Homo sapiens
catttagaaagactgcatttaaggatcctggccttctatataccaaagaacattcttagagaccagtggtttatcttggcctccacagtgtcctggccaccaaggacctttaaggaccataaagccctcatctttgcccattgagggttatctgtaaatggggcatccatttgacatgcctgtgaaaatattgctggackcttacaaaatattaattttagatacatgactcagtgggtcccttcatttcaggcagataagtggttctgtcagtggggttgggcacagaacaaaagaaattttggaggggtctaggacccaactctgctaggtcacataagtcatgacctcagtgactggacctcagttagcccatctataaaatggggacaataagcattaccctccctgcaaggctgttgtggagataaaatgagatcatgaatgggaaagtaatttgaaatgcaagtgctttgccaagcactttagtcccaactctgtttctaattttgtatga

SEQ ID NO: 802713 - DNA, 545 bp, Homo sapiens
agttagaaaaggccctctgagccaggcgcggtggctcacgtctgtaatcccagcactttgggaggccgaggcgggtggatcacctgaggtcaggagttcaagaccagcctggccaacatggcgaaaccctgtctctactaaaaatgcaaaattagtcaggcatggtaggttgtgcctgtaatcccagctacttgggaggctgtgccaggagaatcgctagaacctggggggctgaggttgcagtgagccgagattgcaccactgcactccacagagtgagattccatctcaaaaaaaaaaaaagaaagaaagaaaaggccctctgaggccaagcttggtgtctcatgcctgtaatcccaacactttgggaggctgaggtagaagttgaggycaggaggtccaagacaagcctgggcaacatagtgagtctacaaaaaaaatattgagaaactacataaatatagtgggggtgggggtggggaacaagaaaacaaaaaattcaaagcatagtgaaaagaaatatagcaaaacccggccgggcatgg

SEQ ID NO: 802714 - DNA, 582 bp, Homo sapiens
tctagtatgtccacattcagttccttcatccaggtctctgggagggctcctagtccagaaaccttctaaccccctctggagaataagcttccaacttttttgccaagattggggaagtcaggtcatgtggaaatatgaatgtttcagcatgcttttgctttttttctttgaaaatatattactttaaaatgaagaataagactgggggtggtggcttatgcctgtaatcccagcactttgggaggctgaggtgggcagatcacctgaagtcaggcattcaagaccagcctggccaacatgacaaaaccstgtctctactaaaaatacaaaaattagctgggtgtggtggcacatgcctgtaatctcagttactggggaggctgaggcaggagaatcgcttgaacccaggaggtggaggttgcattgagctgagatcgcaccactgcacaccagcctgggcaacagagcgggactctgtctcaaaaagaaaaaaaaaagaataactcagatttaaagaagatatagactaaaggatgatgtcataaaggtaattagaccagtatttaacatgaattctgagca

SEQ ID NO: 802715 - DNA, 650 bp, Homo sapiens
ttgaaaatacaaaaaattagccgggcgtggtggcgggcgcctgtaatcccagctattcgggaggttgaggtaggagaatcaattgaacctgggaggcggaggttacagtgagccgagatggcgccaccgcactctaccctgggtgacagagcaaaactctgtctcaaaaaaaaaaaaaagaaaagaaaagaaatctctgcagctggcagttgtggtgtaggacctgctcacgctacatggacactcctgcactggcaaatatttactgcctcctgcttcttggtttggggcaggcccccacctctgaccccagcctgggaaataaaccggaygaagagtcaggttaaccgttaagcccagctctgggcaagctggcagcaggcgggctgtatctgccgctggcttcagtctgcctccctgacaaggggtgggggtggcggcaggcagagtgagatgggggccctggctcctctgaggaccagggtgaggtacggacccacccagctcaaggtgtatcccacttcccagggctccctcagcagaagcctaggtctctgctgcaggcctgctgggcccctgcagccccaatcccggctctgggacgctcacatctcctgcgtggggaacgtttgaggcactgatctgcagtt

SEQ ID NO: 802716 - DNA, 610 bp, Homo sapiens
attcaggcagctgacattgatacctgatctgaatcctacaaacacattgtgctttctggagggtctactatgtatcctggcctgtcatcaaggttggaacgagaacttaaacagctttacttagaacgagttttaaagggtgatgtggaaaaactttttaaatttaagatccgcatygaagacctacccctcagaaagcacatgggtggtgcagttctagcagataccatgaaagacaaagacaacttttggatgacccgacaagagtaccaagaaaggggtgtccgtgtgctagagaaacttggtgtgactgttcgataaactccaaagcttgttcccatcacacccgtaatgctttcttttttcctttattgccaatcttttgaactcattcaacgcctggacatggaagaggcctctgtgtgccttttgactggaaaggtcaagttttattctggtgtcttgaggaagctttgttaaatttttgttaatgtgggtaaatctgaatttagttcaactgcttccctacatagacaagcgggctaagggtcctgtctgctgctttgtttcttctaagtaggcatttagatcattcctgtaggcttcctat

SEQ ID NO: 802717 - DNA, 610 bp, Homo sapiens
attcaggcagctgacattgatacctgatctgaatcctacaaacacattgtgctttctggagggtctactatgtatcctggcctgtcatcaaggttggaacgagaacttaaacagctttacttagaacgagttttaaagggtgatgtggaaaaactttttaaatttaagatccgcatcgaagacctacccctcagaaagcacatgggtggtgcagttctagcagataccatgaaagacaaagacaacttttggatgacccgacaagagtaccaagaaaggggtgtccgtgtgctagagaaacttggtgtgactgttcgataaactccaaagcttkttcccatcacacccgtaatgctttcttttttcctttattgccaatcttttgaactcattcaacgcctggacatggaagaggcctctgtgtgccttttgactggaaaggtcaagttttattctggtgtcttgaggaagctttgttaaatttttgttaatgtgggtaaatctgaatttagttcaactgcttccctacatagacaagcgggctaagggtcctgtctgctgctttgtttcttctaagtaggcatttagatcattcctgtaggcttcctat

SEQ ID NO: 802718 - DNA, 598 bp, Homo sapiens
ctgacattgatacctgatctgaatcctacaaacacattgtgctttctggagggtctactatgtatcctggcctgtcatcaaggttggaacgagaacttaaacagctttacttagaacgagttttaaagggtgatgtggaaaaactttttaaatttaagatccgcatygaagacctacccctcagaaagcacatgggtggtgcagttctagcagataccatgaaagacaaagacaacttttggatgacccgacaagagtaccaagaaaggggtgtccgtgtgctagagaaacttggtgtgactgttcgataaactccaaagcttgttcccatcacacccgtaatgctttcttttttcctttattgccaatcttttgaactcattcaacgcctggacatggaagaggcctctgtgtgccttttgactggaaaggtcaagttttattctggtgtcttgaggaagctttgttaaatttttgttaatgtgggtaaatctgaatttagttcaactgcttccctacatagacaagcgggctaagggtcctgtctgctgctttgtttcttctaagtaggcatttagatcattcctgtaggcttcct

SEQ ID NO: 802719 - DNA, 598 bp, Homo sapiens
ctgacattgatacctgatctgaatcctacaaacacattgtgctttctggagggtctactatgtatcctggcctgtcatcaaggttggaacgagaacttaaacagctttacttagaacgagttttaaagggtgatgtggaaaaactttttaaatttaagatccgcatcgaagacctacccctcagaaagcacatgggtggtgcagttctagcagataccatgaaagacaaagacaacttttggatgacccgacaagagtaccaagaaaggggtgtccgtgtgctagagaaacttggtgtgactgttcgataaactccaaagcttkttcccatcacacccgtaatgctttcttttttcctttattgccaatcttttgaactcattcaacgcctggacatggaagaggcctctgtgtgccttttgactggaaaggtcaagttttattctggtgtcttgaggaagctttgttaaatttttgttaatgtgggtaaatctgaatttagttcaactgcttccctacatagacaagcgggctaagggtcctgtctgctgctttgtttcttctaagtaggcatttagatcattcctgtaggcttcct

SEQ ID NO: 802720 - DNA, 582 bp, Homo sapiens
ttgatttttcaggctgtttaaaagaattttagtgtggacctgccttaactgttttttgttttttgtttttttcctttctcctctctcagtgatagtcctgtaaatggtgactgtcctgatcattgtatccttcagcctgattttaacccatccttgtcaacatggtgataagttcctggaacctgaataactaggatggaaatgatattgcaggcttaagcaattgatgtaatttataattgtaatttataacaatgttaactataatttacaacactataatttaaacacttataacaatttaatgttaattatagtttataatgttaattataatttgtttcttctacacattcacccttccaattaagtaataactaatgtaataattttytaataaatacatataagttgatataattatgttataattaataacatggctctagacccttcgccctcttgggctcatatattttcttaataaattgactctagcttgttagtcttccacctaagttgcctgctccagatggtttttctttcctgtatcactgttgttgtatcttagggaatgtcatg

SEQ ID NO: 802721 - DNA, 634 bp, Homo sapiens
gcaactgcaaacaaaaagtttaagcgatttctgcaaagagcaataaaagccatagagcagcttgggacaaggtcaggtcaggatgagcagaagttgggaaggaaagaaggaagccaggatggacttggagagtttttaccagttcctcaggcaggaagaattgtatggtaggtcagagcatatttctaggaagacctcggttgacaaatttctctgccactgagagatgacaatttaccttggtarctaatctctctcctcatgttcccatctatttgatattgatttaatatgagtagctacctcccatgtgtataataggaaatgtatgggagaatgcatattaattcctgaatagaatatctggttccatgaatgatggaagttggttagaatttattattggaaactcaccctgcactacctatagttggtttattttaattatacttatattcattatatagtaactcatatatatttgtcatttcttttcttatattcaaaaagtctctacataaataaactctgcacctatggtcattgctgggtatctgttctatacacagcaaggagccagacgccctatcttacttgttcactttccagcttctccttagaaaaaaaaatacaa

SEQ ID NO: 802722 - DNA, 630 bp, Homo sapiens
tggttgaactagtttacagtcccaccaacagtgtaaaagtgttcctatttctccacatcctctccagcacctgttgtttcctaactttttaatgattgccattctcaaagaacagtatgtttttaagtctctgcagtcttgggccaagctcgttctattccccactctacaagaatcacaagagcgccaggattctgtttggggttgccgtggacacagagttcttattacagaactgacattytcaatacgaggtaaagacctagaggtgaggtctctgagcaagggagtcccatcccatcctctgccctctgttggctgttgtcctctcatcttcatcaggagaattaaaatcatgtaaagttttggcgggggaactagatggtggtctctggggcccatagacaggaaagtttgcttatacccagctggggggaccactaattgacattcctttcccctcccagggaccttacagagtccccttaccctcacggtactgggggacaaccagtgggtgtcaggccaaatagcagtaaccttgttacttgccaggaattgggtcaagatttgatttaacaagcttggttttgggaactaaaaaatgaaaaaaggaaaagccataatctt

SEQ ID NO: 802723 - DNA, 563 bp, Homo sapiens
tgtaatattgaatttgaaagtgaatgtacgaagaaatgaacatgtgaatgctggaatgtcccaagacttggttctcagtctcttctcaatgtacaagtgtatctcattattattcccagttatttaagttgtggcagattacataactggaggcaattaagccaaatttgaacacatctgtaggatctcaaagctcactgtctaatgcatgtatcgataatctctcattttcaagtatatctccaaatggacatataaaaataatatatttatgtaactactgtaaaatatatgtgacttttggaagcaataaggatgatcagaaaacacagcttcaagtagctccaattgcaagctttaccacatatgatctwtgtggctttgagcttctacagacattgcttctttaataggcaaaatgagactattaataccttcctggaagattggttaaaaaagttaaatgataaacggattcaatatatgagaaaacatcctagagtgtgttaagtaccatgcacatacactatatttttattattttaagaatataaatgcagggc

SEQ ID NO: 802724 - DNA, 601 bp, Homo sapiens
atgttgctgcaaaagacataatttcattattttttatagctgcctaatattccattatgtatatgtaccacattttctttatccaatccactcaagttgatgaacacctaggctgattccatgtctttgctactgtgaatagtgttgcaatgagcatagaagtctgtgtctttttggtagaaccattcattttcctgtgtgtatatccccactagtgggattgctgggtcaaatggtagctctgttttaagttttttgagaaaattccaaactgcttttcacagtggctgaactaatttccgttcctaccaacagtatgtaggtatcatmttttctctgcagtctcacaggcctctgcattttttgacattttagtaacagtcactctgactggtgggaaatggtatctccttgcaattttgatttgcatttcactgatgattaatgatgttgaacattttttcatatgtttactggccatgtgtatgccatcttttgagaagtgtctgttcatggcctttgcccactttttaatggggttatttgttttttgtgtgtttaattgtttaagttccttatagattctggatgttagactttt

SEQ ID NO: 802725 - DNA, 589 bp, Homo sapiens
aggcatgagccaacacacccggcccgattgaagagatattatgattgaggtagaaaatgtttgtatcatcaaaaaagacatgcaccatatacgtgtgcagatgattatgatgagaagaatgtggggtctattaccagttatatatgaattcaagggtatcataagaactctgaactaccaagtgtggttaaaaaaaagagaaacaactggtctattgcctgccyatgatataagcagagtctctcctgtagtcaaggagaaatcatgattaagatttgcagctctatggaatcagaatcaaggcaagggcagcttttacactctgatggaagactaattcatgtctgaagtttgtggcatagttaattttttactgctcttgctagggtgaatgatatgatactgtaagtcttctgcacatttatcacatggaatctttcctttagaagtgtaaaaaacatacagaattcaatacttgaacatacatattaaaatatataaatacacattaaaatatgtaaatacatgtattttttaatattcatactaaaaattaggcaactaatagtaacaatttaaaaccctacta

SEQ ID NO: 802726 - DNA, 630 bp, Homo sapiens
ttgagtggaaagaacagactacggactgaatcagtaaatcattaaatggatactttaagaaaacaaattcattatttttgtttttatattacccagattttgacaaaatatatgcctttttcatatcatgatcattttaatgaagagttttctctcacacaaacacttactaatgaatataacaggatctttgtttctgctgaattcagacaaaaattgtacattttcaaccaaatttcctgaaagaaatgtgaaaacatttaggcaacagaagttgcctgacattgatgcctcactcatttgtgaaatgtcttattatttagtctatcaatcarggccatagattttattggatttagctacctaatgtctgcacctcatttcattttggtaatttatttatttatttttaaatgggtaaataaaaattgtatatatttatcaggtacaacatgttttgaaatatgcatacattgtggaatccctaaatcaaactaattgacatatatattttctcacataccattttgtgggaacagttaaaatctattctttcagcagttttcaagaatatattgttattagctataattcactatatattatctctggaacttgtttctcttgcct

SEQ ID NO: 802727 - DNA, 623 bp, Homo sapiens
aagtgattacttgttcacttctgtgaaatgagttacttaagatgccatatgccatagccatatgtgtgaaaggaatataatatgaagtatgtagaactgtttaagaaaacatttgggagttcttttggctataaaaagctcagattatgtggattaatttgttgacatcataaattgcaaagaaaattaaaaacaaggtgatatgtrtatgactatgtatttatatatacatacacaagcatacctcaaatatattgctggtgtggtttcagaccaccacaatagagagaatattgcaataaaacaagtcacatgtaatttttggcttcccactgcctataaaagttatgtttacactatacacaatagtctattaagtgcgcaatcacattatttgtttaaaaagtacatactttaaaaatactttattgtttaaaaatgctaataatcatctgagctttcaatgagtcaaaatctttttgctgttggagggtgttgccttcatgttgatggctgcggactggtcagaatggtggttgctgaaggtggggttgctatagcaatttcttaaaataagacgacagtgatgttttcctcattgattgactcttaccatcatgaaa

SEQ ID NO: 802728 - DNA, 625 bp, Homo sapiens
aaataaataaaggccatccgaattggaaagaaagaagtcaaattatccttgtttgtagataataggatcttacatttggaaaaaccaattccactgaaaaactattagaactgataaacaaattcagtaaagttgcatacctgtatctacgtatctcacaaatatactggaagcagaaccagagacaggaataaagatatacctgaattttggtggaaatgtttttcaggaaaaaactgaagcgggatagagaagagaaaaataagaacaaagatattttgatccacagggaraagaccctggagaatgcattactcccagaagatggttccttttttaggccagagggtgagatgttggaaaccatatactgttaatcagggctaaaggtcactccctggggaaggagcagtggtgtatgttttttagggcagtgactcctatcagtcaagtgcatttctatgtagataggtgacagctcctagccattaccagtcaaaagagatacaaaggaaatctaggtagggcaaccacatctaccactacccacaaaaatgtctctatgtgtagactctatgtctaggcttttatacgacaaaggctggatatagtaaatatccatatt

SEQ ID NO: 802729 - DNA, 601 bp, Homo sapiens
gcaagttactccacattatttaaaaaccaaatgaaatgccacatccacagagaagctctccctgaacactttccttaaattagcctcttctcatcatgctcaactataacactatttcacttcctttatagtattcattcctatctgaggctcactcacttatttatccattcaccattgcatactttccaacataagaaacgttacaataaagtttcttgcatctttttctttgccatttatcaaattatttctagagcatgtatttgccacacatcaacttgtatattaaagtctatgctgcattttttctttcactcattttgctatcctttcasagaaagattttactaacgtgtgtctataccaacagtatgtgtgctacagtttgaatgcttgtgttcctccaaaattcattttgaaacagaatctctaatgcagtagtattaacaggtggggctttttaggaggttatcaagtcatgagtgctcttctctctgaatgcgattaatgcccttattgaagaaagaggcttcacaccgtgttcagccctgtagcccttttgtccctgccaccatgtgaggacacagggttcctcccc

SEQ ID NO: 802730 - DNA, 587 bp, Homo sapiens
tgatcgtccttttaccacaaaatcattttaagatgatgactgcactgataagaccaaccagtttttaggttgattccattacctgtacatatgctctgcatttatccttaaaaagattttcaaagttatttgatcgccagtaaaatggtacatcataaaacacaaaaayagcaattaagtaaaacctattttattgttgtttcttgagaaagtgtaatgcatagatgattttagagacttgtgttttccttggtgaatttcaaacataaaaataggatgtaatttatatactatgaaaacttatttccatttatgaagcaatactttgaaatggtgaaatattaaatgacagtcccttttggttcatgaaggaggtggatggctctgttacattacactaactttgtaaattaagcattatgatgctcactttaccccctttgcttaatctccttctctgtcagctgtgcgttttgcatttgagtaataaaactcacagaatattagctactcagaaggttttatttcatatctgagaggctctccaatttttaaaatcacagagatttcctatttaaggtcagtta

SEQ ID NO: 802731 - DNA, 535 bp, Homo sapiens
ctacccattaagcttattttgattaagcattagatagtttataacctgcagtttgaaaaataaatttgtctgtctagatgtagaatcttaaataattcacatttagaatcaagaagttgtataacaagatagcagaggtcccttctggctctgaaaacatgatttcaagacaattaaaatcacctcagcttctgtaaatttttgtagaaatagatgtagagagaatgagtcaccctttctaactttacaataagtgyacacattacctttggcctttagtaaaatgtcacatttttgcttctgaaatgccaccaccagtcaattagtcttacagggatcagcaacatgacaatgtgtattagccaacagatgaagctgtacttctaaactatacgagtcctagatgttccaattcacagtttgttgattccatttagtgtaatcattttaaatggcaaaacaaacatggaaattgcttaacttcaatgcttagaagacagaatcccagtgaatgaaaaattttaagatgtctcat

SEQ ID NO: 802732 - DNA, 610 bp, Homo sapiens
cttttttaatttctactaaacactatttttttcacaaaagttaaaaccaatgaaaaatgaaattccttcattcaatcaatcattgatttattcattcaataattatttattaaatgcacattatatgtgagatactgtgccgggtattagttacacagtagagagcaaaacaaagttcttcctcttgagaaatttactgcttagtataagcaaaaggcattaagtaattgcatttggaaaggagtttttaatggcaatagaatacgtttgcatttcaattgctgtagcaccatgaagatgtctaagtaccacattggcaaataacttttatttcttgcttttttcattattttgctaaatcttayatgttaagcatattaataattcattatctatagtctgtaataagggatcccaccatagtatttgttttcaaaataactggaaaatgtaggtttcaaaactgaaaacattttagctattttgaaagaaaggcttccaaagtgtattatattcttttttgccatcttaaaatatataggagataatttatacattagcaaaatgtttgtgttagcggagggtaaattgttataaaccctgacttaga

SEQ ID NO: 802733 - DNA, 603 bp, Homo sapiens
acagtggctcacgcctgtaatcccagcactgtgggaggccgaggcaggtgaatcacaaggtcaggagatcgagaccatcctggctaacatagtgaaaccctgtctctactaaaaatacaaaaaattagctgggcgtggtggcgggcgcctgtagtcccagctrctctggaggctgaggcaggacaatggcatgaacccaggaggtggagcttgcagtgagccgagatcgagtcactgcactccagcctgggtgacagagggagactccgtctcagaaacaaacaaacaaaaaaaaccatgcaattgaatttaaaaaaagttcaaattacttgaatagacatttaacaaaagaggatatacaaatacatgacaggcacataaaaagatgtgtgacattattatcagtgaagttaacaattaataataaaataatttcagtgaaacaatgggagtttttaagtaatttcagccacagcatccaagtcacatgttgatattttgaaaaattcttgaggcttcaaaaagaagatgtttagtattttgttatataccacataagcgattatgaggtatattaatttattggttattaagaagtatgtt

SEQ ID NO: 802734 - DNA, 603 bp, Homo sapiens
acagtggctcacgcctgtaatcccagcactgtgggaggccgaggcaggtgaatcacaaggtcaggagatcgagaccatcctggctaacatagtgaaaccctgtctctactaaaaatacaaaaaattagctgggcgtggtggcgggcgcctgtagtcccagctgctctggaggctgaggcaggacaatggcrtgaacccaggaggtggagcttgcagtgagccgagatcgagtcactgcactccagcctgggtgacagagggagactccgtctcagaaacaaacaaacaaaaaaaaccatgcaattgaatttaaaaaaagttcaaattacttgaatagacatttaacaaaagaggatatacaaatacatgacaggcacataaaaagatgtgtgacattattatcagtgaagttaacaattaataataaaataatttcagtgaaacaatgggagtttttaagtaatttcagccacagcatccaagtcacatgttgatattttgaaaaattcttgaggcttcaaaaagaagatgtttagtattttgttatataccacataagcgattatgaggtatattaatttattggttattaagaagtatgtt

SEQ ID NO: 802735 - DNA, 606 bp, Homo sapiens
atagacagaacccagggttgagaacagaaggtgggcggcaggatcagagtgaaatcagaggcgtgaggagaggaaatcagggaggtctcctgggctgccaggtcagcctctctggcaaggctttcttgagccccgcccctttctttccccggagtcctccaccccataacaatacctcgaatttccmaaagaggtcaccagatgcacatgggccgcaaaacacacagtcaggcttccagcacattctcccccatttggaggatactcgaatgtcaggtttttggttttattattatttcagaactagctcagcccatctctaattataaaacatggttttgttttttttttttcctttttttcttgattaggtctggaacagctctagaatgaacacataaaatttagcaatttaaaatctttctttactgcaagtttaaatagttgtacagatagtttataagcacaatattttaagaaaaaaaagtggctggtctactaggcagcctttgtgccacttcagtgctagaaagttaaagaaaaaaaaacttttgtgatttaataatactatttctgtggaataattataaaagtatgaccttttta

SEQ ID NO: 802736 - DNA, 606 bp, Homo sapiens
atagacagaacccagggttgagaacagaaggtgggcggcaggatcagagtgaaatcagaggcgtgaggagaggaaatcagggaggtctcctgggctgccaggtcagcctctctggcaaggctttcttgagccccgcccctttctttccccggagtcctccaccccataacaatacctcgaatttcccaaagaggtcaccagatgcacatgggccgcaaaacacacagtcaggcttccagcacattctcccccatttggaggatactcgaatgtcaggtttttggttttattattatttcagaactagctcagcccatctctaattataaaacatggttttgttttktttttttcctttttttcttgattaggtctggaacagctctagaatgaacacataaaatttagcaatttaaaatctttctttactgcaagtttaaatagttgtacagatagtttataagcacaatattttaagaaaaaaaagtggctggtctactaggcagcctttgtgccacttcagtgctagaaagttaaagaaaaaaaaacttttgtgatttaataatactatttctgtggaataattataaaagtatgaccttttta

SEQ ID NO: 802737 - DNA, 627 bp, Homo sapiens
agaatccattaggaacttaaacagattaacaagcaaaaaaaacaagcaaccccattaaaaagtgggcaaaggacatgaacaaacacttttcaaaagaagatatacacatggccaacaaggatatgaaaaaatacctgatatcactaatcattagagaaatgcaaatcaaaaaaatgccatcacactaatcagaatggctgttattaaaatgccaaaaaattacagatgctggcgaggttgcagagaaaggggaatgcttatacactgctagtgggaaaataaattagttcagccattgtggaaagcagttkggtgatttctaaaagaacttaaaacagctaccattcaagccagcaatctcatgactgggtatatgtccaaaggaatataaattgttctaccataaagacatgcacatatatgttcactgcagcactattcacaatagcaaaacatgaaatcaacctaaatgcccatcaatggtagactggataaagaaaatgtgacacatatacaccatagcatactacacagccataaaaaagtacaagatcatgtgctttgcagcaacatggatggaactgaaggtcattatcctaagcgaactaatgcaggaacagaaagcca

SEQ ID NO: 802738 - DNA, 627 bp, Homo sapiens
agaatccattaggaacttaaacagattaacaagcaaaaaaaacaagcaaccccattaaaaagtgggcaaaggacatgaacaaacacttttcaaaagaagatatacacatggccaacaaggatatgaaaaaatacctgatatcactaatcattagagaaatgcaaatcaaaaaaatgccatcacactaatcagaatggctgttattaaaatgccaaaaaattacagatgctggcgaggttgcagagaaaggggaatgcttatacactgctagtgggaaaataaattagttcagccattgtggaaagcagttgggtgatttctaaaagaacttaaaacagctaccattcaagccagcaatctcatgactgggtatatrtccaaaggaatataaattgttctaccataaagacatgcacatatatgttcactgcagcactattcacaatagcaaaacatgaaatcaacctaaatgcccatcaatggtagactggataaagaaaatgtgacacatatacaccatagcatactacacagccataaaaaagtacaagatcatgtgctttgcagcaacatggatggaactgaaggtcattatcctaagcgaactaatgcaggaacagaaagcca

SEQ ID NO: 802739 - DNA, 645 bp, Homo sapiens
gcaggaagggccctgcttagctttatctgtatccctaataacacacttagggaatttgtgcttcctgtctctccctctgccatccatgcccctgccagcccccaggtcagggctctgtaggatgaaaggtcctgattccctgtgggggcacacttctgccaggggacacggaaagagtcctgctgaactctaagctatagcttctgcctgtcactgcaaagactttgtatccagagaccagtatgcaagaagagtcaytgcctgggctcaggcaattaacccagttcttcaggaggaggaagtgcttatgtgacacagtaagggcagggagaaatgtgtttgccactcacatgatccatttggaccctacttgaccaaatttgatagtaaacagacaattacaccaccatagcttgaaaatagcatggcagccagggtctcagacccctcagaaatgaagatttgggtcctgccaccaggtaagacaccaatactaggagaagcattacctgaggctgaggctgatatagaatggacaccagagaagggagagagtaaaaatcagttacatcccctaaatcaattgctgtgagaaaaatgagaattctctccgaaattccaaataaaataaattctccctttatt

SEQ ID NO: 802740 - DNA, 553 bp, Homo sapiens
agacccctctcatttgtgtgtatatgtgtgtatgtgtgtgtgtgtattcacttcctcttgcaaatgaatcagactacatacaaaccttctcacatgtcataagatatttttattctgctgtaatactctgttgtgtttaacatggaagatacaagaagaccagatacaaaactaggctggacataggcaggtaggcgtcagtttccttctgccttccattcgcctttcaaacagctcatctaacatttgctggtagccygcttatctagtttagatttttttcaccttggaatttctggcttagctggtcaggtgctatattttcgctggtacttccaatatccccttgaatcattactcttcactttttgattcatacttaccaagactataagaaagtttcctgagttttgatactttccatttttatgactagaaataaaagtagcccaataaatttttaaattactttttcttcagtttgccttctgtttcttttccagaaaattctacccccattttctcccttcccttctttcacactgagacactt

SEQ ID NO: 802741 - DNA, 520 bp, Homo sapiens
ataattagtcgaggtatccttgttttctttttgttcttctaattctgaaactcgacattttaatgagtggtattgtttaggttggattaggaacagtccccaaataagggagaggccgactaggcattttggaggccaagctgtgcaagaagaccagaaagaacaaagctcagaggttccttgagcctggtgcctttaggggcctgaagaagaacagatctcacactttttcttttgctttgtatttagaactctgttgggagaaagataaaggtagaaggatgcaaaattctaacaatgggagaaatgacagctgcaaggagagggagggggaagcaactcttctaaaacataaaaggrtcatatgatatttatgaaaaaattgattatttcaaaaagattcacaatcccattctctaacacataatctatttttactttcccgcatcctataacttggatcttgataagactcgattcgttgttttatgtggtttgcaatctcaacaaaacaaaattt

SEQ ID NO: 802742 - DNA, 629 bp, Homo sapiens
tgtccctacccaaaatctcatcttgaattgtttgtaactaacctgcacgttgtgcacatgtaccctaaaacttaaagtataaacaaaaaaaaaagaattgtaatacccataatctccacatttcaagggagaggccagttggaggtaattgaatcatacccacycatgatgttctcgtgatagtgagttctcacgagatctgatggttttataagtgtttggcagttcctcctgcgttcattctccttcctgctaccttgtaaagaaggtgcctgcttctctttcaccttccaccatgattgtaagtttcctgagacctccccagccatacggaactgtgagtcaattaaacttctttataaattacccagtctctggtatgtctttttagcagtgtgagaacagactagtacaacaaataacttgaaaagacactgaaaaaacaaaaaaggccaatattcccaacctggttctaatctctaaagctcagtcttttgaaagtttcctgccctactccaaccaaattcagcaatacatattgacatctgctttaggccagtactaagagtacagaaattaataataataggagcaaatatttatatggtgtttactatgttccagtaatt

SEQ ID NO: 802743 - DNA, 626 bp, Homo sapiens
tagaatattttgaggcagtgaaaactaagttttattcatctttgtatttatgatagcacttacaatggacaaaaatggggctcaaaacgggtttatgaatgaaataataatacacttaagaatccaagaggggcaggtcatttaaaagaatccaatagctggttcctatcacctgaggcttcataagacctctttctggttttctctcattcattcagctaacttttagagcacatacctctaaamtttacagcacctatctcagagttctgtctgatgctctgaggctgagccctggcagtaactacaataaggacaacaccaaccctccccacactaaaagagctcttagtcaaattggaaaaagaactcatgccaagtgacatgctcatataaacatactgctaaggttgggtggtcgtcaagaggagtaagagatgctttcttcctgggagattgaaggagtatgtgtgtgtgagaaggaggggcaggtaaagacatattctcaagggagctgacatctgaacccagtcttgattaatgagttagacttcatcaggcaaaggcacagccaggaatcaccatgacacatcaggggatcagtgtgtggaacatattgggagtgt

SEQ ID NO: 802744 - DNA, 605 bp, Homo sapiens
ggctggcatggagtgtctgcagcttttccaggtgcacagcgcaagctgttagtggatctaccattctgggatctggagaaggatggtggtcctcttctcacaggtctactaggcagtactccagtagagactctgtgtggggcctccaaccccacatttacattctgcactgccccagtagaggttctccatgagggctctgcccctgtagcacacctctgcctggacatccaggcattttcatacatcctctgaaatctagggagaggttcccaaacctcagtttttaacttctgtgcacccacagggccaacaccatatgtaagctrccaaggcttggggcttgcaccctctgaagcaatggccagagctgtacattggtttttttagccacagatgggacacagagcaccaagtcctgagactgtacaaagcagaaaggcccagggcttagcacacaagaccattttttcctcctagctctccaggcctgtgatgggaggggctgccatgaagacttctgacataccctggaggcattttccccattgtcttggcaattaacatttggatccttgatacttatgcaaatttgcaaatttctg

SEQ ID NO: 802745 - DNA, 506 bp, Homo sapiens
ctgtctcagtaggctggcaaccggcactctgtcagggtcagctgggaaatcttccaactgtagtgttttttggcaatgcttttcaggtgatagtttctgcgtaattaccgggaaaaaaaacctatggcaattaataacaccgggatgtgttacagatccctcatcctcctagctatgaaattttttgggtttatctcattttagctacagggagtccatctcgtcttctgttggggtatattttaacttagctaataagtgttgctttttattaaaactcaactactgggaaactgtgacctcaggacwctgtggccagaacacttgtgaatgagagaatgacaagtgggaggtccaacctgttcaaggaagagttctcaaagtgggcactgcaacaaaaaccaagtccattccttaaaggtgacttccttgttccacaggcatctctaattgtaatagatttaaatgttaagtctccaccccaaggtgaacgtgggacacgtgta

SEQ ID NO: 802746 - DNA, 632 bp, Homo sapiens
cacaaggcctgctcatgggctacaaatctaaccatttatcccaggaatccatcttcaggaaaatgccacgccttttcacaagtaaaagaacctggtaactttttcaattatgcctatattctattccattttcccttctttttaactctctcactgatattttttctcaccccaaatacatcgatggagggtaaaataacataacttttttcattccaatttgggttcctcaaaatggtcttccatctgggatgattaatagttaacatgtatgtagctatcactgtgtgccaagcacggtgctatatgctccacagatcttactcgtgaatcataatcgtgaggttaaacttgtgtaggtcccattgctgtccattctatagctgaggaagccaagattcagtagagttcaatcagctacccaagttctcatagatggttagtgacagkgtaaggatccagatctactctactccaaagctgcattccactactagcccagtgattctccaagtgtggttcctgcatacacagcatcagtatcaactaggaacttgttaaaaatgcaacttttcaggccccatcccagaccttctgaatcaaaagctctctaaatggcaatctgtgtcaga

SEQ ID NO: 802747 - DNA, 632 bp, Homo sapiens
cacaaggcctgctcatgggctacaaatctaaccatttatcccaggaatccatcttcaggaaaatgccacgccttttcacaagtaaaagaacctggtaactttttcaattatgcctatattctattccattttcccttctttttaactctctcactgatattttttctcaccccaaatacatcgatggagggtaaaataacataacttttttcattccaatttgggttcctcaaaatggtcttccatctgggatgattaatagttaacatgtatgtagctatcactgtgtgccaagcacggtgctatatgctccacagatcttactcgtgaatcataatcgtgaggttaaacttgtgtaggtcccattgctgtccattctatagctgaggaagccaagattcagtagagttcaatcagctacccaagttctcatagatggttagtgacagggtaaggatccakatctactctactccaaagctgcattccactactagcccagtgattctccaagtgtggttcctgcatacacagcatcagtatcaactaggaacttgttaaaaatgcaacttttcaggccccatcccagaccttctgaatcaaaagctctctaaatggcaatctgtgtcaga

SEQ ID NO: 802748 - DNA, 591 bp, Homo sapiens
gctgaaatttgacaaccactagtgcaagccaggggtctgcaaaccgcaagccgagagacaaatccagcccacaacctcttactgcctgaattagtccgctttcacgctgctgataaagacatacccgaaactgggtaatttataaagaaaaagaggtttaatggactcacagttccacgtggctggggaggcctcacaatcatggtgaaaggtgaaaggttcctcttayatggtagcaggcaagagcgaaaacatgcgcaggggaactgccctttataaaaccatcagatctcgtgagacttactcactaacaaaagaacagcacaggaaaaacctatccccatgattcaattacctcccaccgcatcactcccatgacacgtggggattattacaattcaaggtgagtttgggtggggatacagagccaaaccatatcactgccccaagctaagaatggtttttacaactttaaaaagtggtcaaaataaaaacaagaaaaatatctaacagagaacgtatgtggacggcaaagcttaaactatttatcatctggcccttcacaaacaaagttttctaagccctactcaa

SEQ ID NO: 802749 - DNA, 491 bp, Homo sapiens
catcttcctcaccatcatgctgtttatattaggctttaaaaatattacttaatggcaatatgctgaaacctgtcaatgagaacatttcagatggttcaagatattttatataacacaattttattttgctctatattcccttataccatgcaatcagcaaaaaatatatgtggtctcttaaataacatctaagttgtgatctagctctgatttcttgagaaatcagatggcacyatgtgtcatcccattatttagctttatcaaatattattttcgtcatatttgtttccactcactctctttaaatatatattaaaccaataccgacaaagtgataccttctagatacccatgtctgaacgtatttatcaccaggggttgtcaatattgtgaatttatccgtctttatacatccatttttccttctagctaattagaattatattgtatgactatattacatttttaaactatttttatacatgtctcct

SEQ ID NO: 802750 - DNA, 635 bp, Homo sapiens
aaaaatatttttgtaactattgtggagtactgaaaagataataaaatatccatgatcctaccatagttaaacactttatattttgcttcagatatttcttaataaaaatgaacaaaacattttctttgtaattttctcartctttcattgtgacatcctaatgagtttggtgtgtttcaaaggcccgtgttttgtttttccttcttttttttgagacgagtcttactctgtcgcccaggatggagtgcagtggcacaatctccgctcactgcaacctccgcctcccgggttcaagggattctcctgccttagcctcccaagtagctgggactacaggtgcgtgccaccacacctggctaattttttgtatttttagtagagacggggtttcatctttttagccaggatggtctccatctcctgacctcgtgatctgccctcctcggcctcccaaagtgctgggattataagcctgagccactgcgccctgcctcagtcccatgttctatatattaactttctacatatgtatccatgaacaatataattttattttacatgttttaattttcataaatggtattttactgtatgactgttatcactaactttggtttcttttaaacacaatttaa

SEQ ID NO: 802751 - DNA, 539 bp, Homo sapiens
ctttttcccctagatccagaggtgtataccatagggaagggaaatacatgattcagaagagatgtgtaggacaactgaagtacgatgacatgaaggttgttttgacctaaaggcaggatttacacactcttacctagggagcaatagataaactggaaatcttaagaggccttcttagaaccagggttaatcaaaagtcaacatggcaaattagcattcaagatgtagttgctttatctccacaactgttatccaaaatatgcaaagtactcaaagttaacaataaagaatcaaacaatgcaattaaaaatgggccaaataccyggacacctcacctaataagatatgcagatgacaaataaacatatgagaggatgctgcatgtcacatgtcatcagggaaatgcaaattcaaagaatgagataccactacacacctattagaatggctaaaatccagaacacttgcaacaccagttagttgctggtgaggatgtagagcaacagaagttctcactcagtgctggtgggaataggaaa

SEQ ID NO: 802752 - DNA, 505 bp, Homo sapiens
aatgattcccagcttcatcccagatctacttaatcgggacttctatgagtagaactgaggtatccatattttttaaaggctctccaggatattttggggaacaggcagatttggaaactgtgccctagacctctcaatatgcctcacttttctcatatattcctttggtttcctatatatcctaaaactctctcttcatttttcttcccacctaaccacatttttaactcctttttcccaacattttactatgaaaaatttcaaaacatacagaaaagttgaaagaattatacatcarccatgcatatgccctatctctagattatacatttgttaacatttcactgtagtatttgcttatcctttatctatccgaccatctatccaaacatccttccgtcctaactttttgatgcatttctaagtgagtggcagacctcagtatccttgacccataaacactttagcatgcgtatcattatctaaagttcaatgtttgtgaatg

SEQ ID NO: 802753 - DNA, 621 bp, Homo sapiens
atcataaagatccggcacagcatacatgcttgagatatgtttgcaggaaggaaggggtcccttctggctgacaaccccaggatgaaaaggcctgatgacgtgggcacagaggtcccctatttaaagtgataagggggcccgaagaaagcagggctatggctgggagtgctggtggaccaggccacattttgccttgtgggtgtgccccttacatctggactccagagctttgcataaggtgtgcaagagacaaccactaagagagcccccaggtccctctggtcacatctattgctcaytgcaactttcctgtcactctgaccccagggacatggccttgggggaaaagtgctgggagtccaacgtcattgtacttctgaggtggtctgtgactggctcacttagacattgattaacttttcaaggaaacacaatcattaggcaaattccatccacctatcaggaaagatataaacatcagcaaacattaacccagacccatgggtttacagctcacagctgcccctgggcacactggcggtaccagcttgccccaggtccaggtagctgcttggttgaagggaatgaaactcacagtcatgtgcaacagatacaggaatg

SEQ ID NO: 802754 - DNA, 468 bp, Homo sapiens
agatttgggtggggacacagagctaaatcatatcatatccttactttgatggataagaggtgaaggaattggaaaataggggaagaaacacatttcatcccccacaccactccatttcccacaaacgtttaaactactcaggcaaactttcttttttttcttttctgtttgaggcagggttttgctctgttacccaggctggagtgcagtggtgcaatcacagctcactgcaacctcaacctcctaggctcaagtgatcctyctgcctccacctcccgagtagctgagaccacaggttcgtgccacccaccgcagctaatttttatttttttgtagagacagggtctcactatgttgctcaggctggtctcaaactcctaggctcaagcaatcctcctgcctcagtctcccaaagtgctgggatcatgggaataagccaccatgcccaacctaggcaaactttcttaa

SEQ ID NO: 802755 - DNA, 563 bp, Homo sapiens
ttacaacaaagttaaccatagttgaaaggtaatgcttttttgcagtgtcatgttatttagcccacttatttttaaatgtctccgtctatattctcatgagaagtaagcaataataaacaattaagtcacttgtttattctgtcatttatgaatgcctgtgtgtaccatgtgatggctaaacctgaggatccagagtcaaagagctaatatgttggaggagaaaggcgattaatacagagacgttgacaattgtagggtaaataaatactgcaacttgcttgagttatgtacctaacgcacatagcagttcttttctttcccattaagaagagtctaagaactctttccccmaaaagcctggctaggtggtgtttactaggtgtgccaggcactctgcctttccagattcactcccactctgctctgtgccctgggagactgtgtactacaaccttaccctcaatgggataactcaagcttgtccaacccacagcctgcgggctgcatgcagcccaggacatgtctgaatgtggcctaatgcaaattcataaactttcttaaaa

SEQ ID NO: 802756 - DNA, 548 bp, Homo sapiens
ggtggtttcttaaaaaaactaaacatactcttaccatccagcaatcatgctccttggtatttacccaaaggagtgaaaaactgtccacacaaaaacctgcatgtgggtgttcatgtcagccttattcataattgccagaacatggaagcaaccaagatgtccttcagtaggtgaacagataaactgtaatacatacagagaatgacatattatgcagtcctaaagagaaactatgaagccatgagaagatacagaaaacacgtattaygagggaaagaagccaatctgaaacagctgcataccgtatgatttcagttatatgacattctggaaaaggcaaaattatagagacaataaaaatatcaggggttgggtagagagagggatgaataggcagagcccagaaaatttttagggcagtgaacctaatctgcctgatgctataatgatgaatacatgtcattgtaaatttgtctaaacccatagaatgtataacaccaagagtgaaccctaatgcaaactatggactctgggtgataatgatgtgt

SEQ ID NO: 802757 - DNA, 534 bp, Homo sapiens
ccccagcctaaacagcaatatttaaggcgtatttagcttttcattcttctctgggagataaagcatagcctgccaatatcactgagggatgtagcagataggcttatgttcagactaaggtgaaaataagcacctgatgattggcaaagaattgctgggcattgccatatgtaagacactgggcaaggcacactgagacgacgggcgcrgggtcttcccttagggattgacagcctaactgagggacaatggccaattctgccccgtcatgacaagttagagcagcacaggccgagtgtgtgtggctgaggaggtggacagctgattccacggcctccccagggccagactggctaaaggggaagggagctgggtgccaagaggagagagaaagagcacaggaaaaggtgcctgctcagggagggtaggctgagacaacaggctttgttacttccacgtttcatgttgcttcaccatagtcctgacgtgcttccacagggggccattgccttcaaggcgatttctgcctttgag

SEQ ID NO: 802758 - DNA, 625 bp, Homo sapiens
ataggggttcctcatggagcttgggcctaggggagaagcgtgttcatgtgtcttctccgactcctattggacatctttgttttgtttgtttgtttgtttgtttttgagatggagttgcgctccatcacccaggctggattgcagtggcacaatctcagctcactgcaagctccacctcctcggttcaagccattctcctgcctcagcctcccgagtagctgggactacaccgggctggtgcccaccaccatgcccggctaattttttgtatttttagtagagatggggtttcaccatgttggccaggatggtctcgawctcctgacctcgtgatctgcccgcctcggcctcccaaagtgctgggattacaggcgtgagccaccatgcccagccattattggccatctttgaaacataactttcttagctgtgaatggtaagtaccttgaagaatttttgttgggattaaatgagataatgcatgtaaaggccttagcggagtgtctggcacacaagaaacgttcattaacaatttgctattaccacctttatcctagtttatgaaactgattcgatcccagtcactgtcaccttaacaacagtaacaaagaacgtgggcgaaata

SEQ ID NO: 802759 - DNA, 586 bp, Homo sapiens
aacatcaacaccaaccagaaacctgttagaaatgcacattctcaggtggctcacacctgtaatcccagcactttgggaggccaaagcaggcggatggcttgagtctaagagtttgagaccagcctgggcaacatggctagaccccatcttcacaaaaaattagccaggcgtggtggccagcgcctgtagccccagctactcaggaggtaaggctgaggtgggaggatcatctgagcctgggaagtgaaggttgcagtgagccaagatagcaccacatactccagcytgggtgacagagtgagatccggtccaaaaaaaaaaaaaaaaaaaaagaagaaagacaaaaaagcatactcttgcgcttactgacccaatctctgggaaaggaaaccaacaatctgtgttttaacaagctctccagatgattccgatgcatgataaagtttgagaacccgtaacctccagtgaagtcaatatttgttaatatgagacagaattaaatcaggaaattcaaaaaaatggagtggctgaatttttaccacattactgtgcattagatggaagaaactgttatttatattatccc

SEQ ID NO: 802760 - DNA, 619 bp, Homo sapiens
acatatttccatagatttattcctaggtaatatacttttgatgctttgttatggtactatcttttctatttttcctcttttaactaatatttaactgatattttaatagctggtatacagaaatataactgatttttgtaagctgactgtgtatctatatagcagtcttgtaaaatacatttattaaagcgaataattacaaattttggaaaggattgtttatgtacacatttatttactaaaaatgacatcttcctttccaatcataactttttcccctttttcttgtcttttagcacyagccagaactttgattccatgttaaatggaagtggtgacaaatatagtgggtatgcttgtcttattctgcacagtaagattttaaacatttactcaagaagtatgacttttatgggtaaatatctttatcagattaggaagtttccttctaatcctaattggctacaagattttaatcataaataaatattgatttctgtcaaattctttttatgcatctattaaccttatcctaccagctttcttttttattatgacatcataaataggttgatttttacacgttaaacaaaactcgcattcttagaataaagccagt

SEQ ID NO: 802761 - DNA, 556 bp, Homo sapiens
gtgctactattcctctctggaatagttgtgtagggttggtgttagttctcctgatgactggtatcatcaagaattggtataattcaacgatgaaatcatctgggcctggagtttcctttggacgaggttttaaatttaaaaaagcaatttatttaacaattataagtccatgtagatcatttcatctagtattaattttcttaagcttcattttctaggaatttgtgtatttcatctaaattcccaaattaattggcataaagtaattcaaaatatcctatctttttaatgtctataggatctatagtgatgtttcattttcatttctaacattacttatttgtaccatctctcattttattgattaaacttgccaggtaatcatcagttttgtaagattttttgaataaccaacttycgcttttttataatcctattttatggatattttttatttccttaatttctgctctttttgtttccttccaagtacttactctatgtttaatctactgctcttttcttttttaaaaaaaaaaaaaacattgtgggtacc

SEQ ID NO: 802762 - DNA, 513 bp, Homo sapiens
aaggacaggagggaagaatcaggattattttgttattgtaaggaggctgggcacagtgggtcaagcctataatcccagcactttgggaggccgaggaaggcggatcacttgaggtcaggagttcaataccagcctggccaacatggtaaaaccctgtctctaataaaaatttaaaaaattagccaagtgtaatggcgagtgcctgtaatccctgctacttgggaggctgagataggcaaattgcttgaacctgggaggcrgaggttgcagtgcgccaagatcaggccactgaactccagcctggatgacagagtgagactcaatctcgaaaaaaaaaaaaaaagaaaaaagattattttgttatcataaagtacttgtcctactcaggaagaaatatagtgttctttgaaaatggacttcaattactggtagacctatattacaaactctagggaaaacactaaaaaaaaacaagtgaagtatgattaatatgctaagaaaggagagaaaatg

SEQ ID NO: 802763 - DNA, 626 bp, Homo sapiens
tagcatctactatgtcttataagatcagacattcagaaggaagtaacagcttgagtcaatttaaaggaaaagttttaagagcagcatcctgccacacatcttctctcacaaggcaacaaaaacaatgccaagaacgagaaacaacaactctaattgctacaaaatgctcagaaagtcactgccctaatgtgtgggcagtttaaattgcccaaagaaacattccaacaagaattacatagagacaataatgacttctatttaagatgctcctgggttgaaattattttctaactttaagttactgcattactgtcatgagcaaacccagagtrattacaattgaattcatcacccaaaggccagtgacttcaaggtaagaattcagtttttggaacattttgaccaaagacaggaagtaaactattaagctattgtgttaatgtttccttgtcattttccatactcaaagaacacagcctagataacaatgtcagatgggcctgactttgcaagctcctgctgtttactcccatttaaatccattctaatttttatgctatgtaaatccaagaccgcttagaaactaaagaggcctttttgcatttcttaaataacatcagtattaa

SEQ ID NO: 802764 - DNA, 626 bp, Homo sapiens
tagcatctactatgtcttataagatcagacattcagaaggaagtaacagcttgagtcaatttaaaggaaaagttttaagagcagcatcctgccacacatcttctctcacaaggcaacaaaaacaatgccaagaacgagaaacaacaactctaattgctacaaaatgctcagaaagtcactgccctaatgtgtgggcagtttaaattgcccaaagaaacattccaacaagaattacatagagacaataatgacttctatttaagatgctcctgggttgaaattattttctaactttaagttactgcattactgtcatgagcaaacccagagtgattacaattgaattcatcacccaaaggcyagtgacttcaaggtaagaattcagtttttggaacattttgaccaaagacaggaagtaaactattaagctattgtgttaatgtttccttgtcattttccatactcaaagaacacagcctagataacaatgtcagatgggcctgactttgcaagctcctgctgtttactcccatttaaatccattctaatttttatgctatgtaaatccaagaccgcttagaaactaaagaggcctttttgcatttcttaaataacatcagtattaa

SEQ ID NO: 802765 - DNA, 546 bp, Homo sapiens
gcattttccagtggcagtgaccaacagcagcatttggtacaggggatccccccttcctccttgctgtgatactccccttggtcatgacaccacactttcttggcttcctcctatctcgacagctgctccttctcaatgtctgcagccaaagtctctgatctttagatgttggaggattcagtaattgttcctctttcctatcaatactgattccctcaatgagcacatccagtcttatggctttgaatacagtttttgtgccagtgattcccaaatatatagtaccagttttcaactcagtcccaattccagactcagatccgtccacctactactcgactagaatatctaatgggcatcccaagctcagtgcattatttaaggttctcttgagagacagaccaatagggkgtgtgtgtgtgtgtgtgtgtgtgtgtgtgtgtgtgtgtgtgtgtgtgtggagagagagagagaaatttgtcataaagaattggctcatctgattgtggaggtgtgcaagtcccaagatctgcagggtgacttggc

SEQ ID NO: 802766 - DNA, 664 bp, Homo sapiens
tgttaattattacttttacacatcacaatagctacacacctaccatgtcttaactctggttccaatgctgttcatgtcactcattcaaactctagtgagatgtgtaagagcaaaagatgcagaccttgggcctcaagtttgtacaataacacagggtgagccaacacagagaagtcaaaccaatggagttacaagtaggtcgatggccatctaactgcagtcagcttgcaaggaaggacagtttgaggtgagacagatttacaactgaggcctgcacatcaaggagcattcaggatctcaggcccttctcactcataatactaagttttcccatgagaacaatagcatgttagtgttggatggaatcttcgagatcttacgcaagatsctcaatgtcaaattaaggaaaccaaagcccagagatcaaggagctggcccaaggcttcacactggtaggcggcagtccaggagtggaacttgggcttcctgagctcagagtcaatgttgtttctgtgacgccacattgtgcctcattaaacatgggaattactgattagaattgacagtgctagtcatttatgttcattctaaccgctgggaatgtattatctatgtgccaagataaaaagaacagtctaattaggcatttagaaaatttagaact

SEQ ID NO: 802767 - DNA, 664 bp, Homo sapiens
tgttaattattacttttacacatcacaatagctacacacctaccatgtcttaactctggttccaatgctgttcatgtcactcattcaaactctagtgagatgtgtaagagcaaaagatgcagaccttgggcctcaagtttgtacaataacacagggtgagccaacacagagaagtcaaaccaatggagttacaagtaggtcgatggccatctaactgcagtcagcttgcaaggaaggacagtttgaggtgagacagatttacaactgaggcctgcacatcaaggagcattcaggatctcaggcccttctcactcataatactaagttttcccatgagaacaatagcatgttagtgttggatggaatcttcgagatcttacgcaagatgctcaatgtcaaattaaggaaaccaaagcccagagatcaaggagctggcccaaggcttcacactggtaggcggcagtccaggagtggaacttgggcttcctgagctcagagtcaatgttgtttctgtgaygccacattgtgcctcattaaacatgggaattactgattagaattgacagtgctagtcatttatgttcattctaaccgctgggaatgtattatctatgtgccaagataaaaagaacagtctaattaggcatttagaaaatttagaact

SEQ ID NO: 802768 - DNA, 506 bp, Homo sapiens
aatactaaccacccaccattttttccaggttgatgataatgatgttaagagggtgtatatgagttatactaacacttggaatttataaggcttaaaaaaaaaaaagctaatttattcagtgtcttcttaccagatgctcatatacaagagggggaggatgtaatttataggaaatatatccagagagaaatacatccaggctaacatttccctgccttcagccctccatgctgctcaacacagcacaacctcacagtaaagagagttgggttcaggagtccgacgccctggggtagatcctggttccctcaccttttagctatgtaaccttggccggttactagtttctgaaactttatcaccaagtttccttatctgtaatatcataaaaacagcagtgcctttttcataggrttgttgtcagtttcagtgagttactagacagatggcacctaatacaatacctggcgcttgaagataataaatataaattgttattttatgac

SEQ ID NO: 802769 - DNA, 635 bp, Homo sapiens
tatctccatagacaatggagccactagcggtacatttatactcatcaatgaggccacttctgatctgattttctgacatttgtcttgatttaaaaaaaaaaaaggtgggggaagggagatggacaaaaacttaatctctggcaggtcccgtctgatgacagctcagcacacagtgtgtgtttaggaattgttctgcttcttattctccccacatcagtcatgattccagaacttgaagtggttcaaagtgagctcatagtagcatttaacctgttgagaatctcttgtcaccactatatgttttcactggtaaaagagtcatctgatttactgtgtgtccccacattcmcaatgcatacatattcacacaggacatggaagccaaaagtaaatggttagtcacaaaaggtttgttttctcctattttgctgtttacaaaggagtgttatcttatgttggaaaggatttcagccaagaacagcagtgaggctgtaggagcaatgttacaatgtatttccctggctttttaaaacctattccctggtttctgcctgcaagccttaggatgtgagatgcgggctggaaaagctgctggagggtaaagcagtaatagaaaaaagaagatattttgagag

SEQ ID NO: 802770 - DNA, 623 bp, Homo sapiens
ttgactcaggattagcatagtgctctgtatcattttatacattgttgcacatcataattcatgatgaatggaaagagaaaactagcaaatttatcttcacagttattcaaatggaatacttacatatagcatccttcctttaytgctttcttcttcaataaaattatgtggatgaatttcctttttctttctttctttttttttttctttgagacagagtctcactcccaggctggagtgcagtggtgcaccacttcaggggttcaagcgattttcctgcctcagcctcccacatagctgggattacaggtgcccaccaccacgcccagctaatttttttttttttcagtagagacagagtttcgctatgttggccaggctggcctcaaactcctgacctcgtgatcctcccacctcagcctcccaaagtgctgggattacaggtgtgagccaccgcacccggccctttttttttttcttttctttttttttttttttttgagacaggctttcgctgtattgccaaggctggagtgcagtggtgccatcatggcttgctgcagccttgacctcctgggctaaagtgattctcacacctcagcttcctgagtagctgagaccac

SEQ ID NO: 802771 - DNA, 592 bp, Homo sapiens
cagatgcatgccaccatgcttggttaattttttttttttttttttttttttgtagagatgaggtctccctatgctgcttaggctggtctcgaacttctggactcaagtgatcctcctgcctcagcctcccaaaatgctgggaaaatgagccaccatacctagcccctcctttttttttttcctttcactgtaatcatttttgtttcaatcccatccataaagctgaatttgattataggagtaagcatgtttgaaactttagctgtatcttcaatgaggaaggcttaggttgtcagtcccagccatttattacatgactatatttgtgcttctgatgatatactgtatgtcatttgtataaatttaaggkgtttgctagctacacatgataaacgcatagctgtaaagtctcctcttcttagatcacctctatggagctgtgtttgctgacatcataactgctgagctatgtgtactaataagcttgtctgtgctgcaagattaaatagataaggccagaagtcacattattcaggaaaaagcagaatgtaattttctttgcaatttcttttaatggagttagcacatcttg

SEQ ID NO: 802772 - DNA, 592 bp, Homo sapiens
cagatgcatgccaccatgcttggttaattttttttttttttttttttttttgtagagatgaggtctccctatgctgcttaggctggtctcgaacttctggactcaagtgatcctcctgcctcagcctcccaaaatgctgggaaaatgagccaccatacctagcccctcctttttttttttcctttcactgtaatcatttttgtttcaatcccatccataaagctgaatttgattataggagtaagcatgtttgaaactttagctgtatcttcaatgaggaaggcttaggttgtcagtcccagccatttattacatgactatatttgtgcttctgatgatatactgtatgtcatttgtataaatttaaggtgtttgctagctacacatgataaacgcatagctgtaaagtctcctcttcttaratcacctctatggagctgtgtttgctgacatcataactgctgagctatgtgtactaataagcttgtctgtgctgcaagattaaatagataaggccagaagtcacattattcaggaaaaagcagaatgtaattttctttgcaatttcttttaatggagttagcacatcttg

SEQ ID NO: 802773 - DNA, 605 bp, Homo sapiens
ccaaaaagtcaaaacacgattatcaagagaaataagtcattttattagtgccaagttcactctgttccaggaattgagatattttgtaattgaaaaatgaaataaaggccaaaaaatgaagcaatggtaattctttctttagatggattctagcaatcagcatgttttattcaggcttagttctgtttctatctttattcaagctgtagagttttaagatagcctttggtagatggcacattattttagttcccgtaatattcacaagatgtctgaaaagttattagtactgaatgtctttatttgttctttgtctaatgagttactaaagtaactctggcatcaaaacatcttcatataataaagattatttagtaaagtaaatttacsactaactgatcagtttgagtagatgtacttttaagtaatactgatttggctttgaggtccaatacagttctgctcatcaaaatataaataaattaaccaactatcctaagtactttaataaatgtggaacgcatttataggagtcagcagtatgactttcctgtttccataataagcatctatgtaggtcacttcatatcgtgcatattaactta

SEQ ID NO: 802774 - DNA, 576 bp, Homo sapiens
atttttccatcagtaggtacataatgtatgattgtttctcttcttacaatgttaatagctactaattaacattgcctagattcattaaatcattaaggtttaaaatttccttctcatttataataaagaaaatctcccctaaacaactatttgactgcactgaaaaatagttcatataggaaacacaggaaaaaatgcttgatttttcctcatattgactaggtttcaagataatgtgttggttcccaagcatcctccaaaggtgacagggagtttttattgttttgtttttagtatcattatgtgctcctggatcaaaacatatttgacctgttcaaatccattgtgattgttaatctgattaatactcagaatgctccattattgactttcagaaccttttcatgttgatgcctgtcctcttgacatgacttagttttctaagcttctttactttctgatacrgcaagcacatattgtaatttttttctaagactggaactcattgttcctccaagtaattctggttctttttattggaagatgttatttggatcccacaatctgggtactagg

SEQ ID NO: 802775 - DNA, 649 bp, Homo sapiens
tgtgctaggcagtgaccaggcactgggtacaacaataaactaggggatccctgtatgttgtgatatgtttcaggaggaagcgtagtgtccagtgggagcccagaggatgaccatgttacctagactctggggtctgggaaggrtcccaggaaaagtaatgcaatattgatacttataaagggtaaaactgtatttttaaggcaaagacacttagggatttgaacttcacatgcaatcgttgttaacttaaatactatgtatgcccttagaggcagtgtttttttttaaattctattgttatggtaaccatgttatatttaataataattttttagatggctcctttctctactagaatgtgaacctgtctaggaataagatcacgttttcttttttctttcttttcttctttctctcctctctttctttatttctctctgataagcatttgttttaaattcagttttgctgcttcccttatttctttataaatactacatataatgtgatgcataaagagaatgtatgtgacatatgcgtgagctgggtagaataataataaagcaaaacttgtgatttcaccttccactttaagatttaccaccagggaagctgcctgcacactcctcccagatcctattctctgact

SEQ ID NO: 802776 - DNA, 581 bp, Homo sapiens
aaggaaaaaaggtcaaaaatggatttctgaggtacttctatatttagatagaggtggaggatgaagaaccaacaaaacagccagagaaatgacagcccaaaatgtaggagcaaaactaggtgattagtagtataaaaaccaagagaagagagtaattcaagaagaatggagcagtcaattgtgttgaagtcccaccaagagattaatrtgagaatagttacatattcaccggctttgacagcaaggtcttaatgactgtgtcaacatcattccttggagaaatggggatgggaggccaattggagcaggttgaagagtgaatggaagcgagaaagtgaaatatgtgctgctgaatttttttgttttattaagttttacaattaaggagaataggaaattgagtggtagttaaaaggagacataaggtcaaaggttaatttttcaatattgagaagagacagaacatgtttgtatgcttttgttattaggccaatgaagaaaaacaaattaacgacttagcagggaaaaaataagaaaaaattataaattaattgaagaaggagagcctttgaaaagaaggg

SEQ ID NO: 802777 - DNA, 694 bp, Homo sapiens
atagaaatgctgattaattcgattcgaggtgtgagaaaatttgagaaacaaaattttggcatgatcaaatgggtgtattaaaattgtttacttatgtatctgtctcccctaccagattataagtagcattgacaaacagcaggagttcaacacacatttcttgtatggataaccttgagcaaaccactgtgatttagtaataatgcctctcacctctacatattctattctcccagttaccatgttagcaccaggtacaggagcatgaaacataacgcagcctccaaattggtcacttcctatttcttctccaaactttccttggagacaggtctgtgtagcaaattctccttcaaaacagtttttaaagcatcattaaaaaaaaatgtcggaatcctcttatattgaagattttctcataactaagtgtatcatytgattcacgtatgatctcaacctcatcctagaacatagttatttgcattcacatcatttcctcttttagatagcaagataggtaagtaccttgtcttgttcaactttgtattccctaaagtacttatacagtatttttcagagaagatactaaacaaatatttgaatgatcaagggaatattgataatgggatttagttttattatttatgaagccttccccaagatttgaggattaacataatcaatgcaattttat

SEQ ID NO: 802778 - DNA, 694 bp, Homo sapiens
atagaaatgctgattaattcgattcgaggtgtgagaaaatttgagaaacaaaattttggcatgatcaaatgggtgtattaaaattgtttacttatgtatctgtctcccctaccagattataagtagcattgacaaacagcaggagttcaacacacatttcttgtatggataaccttgagcaaaccactgtgatttagtaataatgcctctcacctctacatattctattctcccagttaccatgttagcaccaggtacaggagcatgaaacataacgcagcctccaaattggtcacttcctatttcttctccaaactttccttggagacaggtctgtgtagcaaattctccttcaaaacagtttttaaagcatcattaaaaaaaaatgtcggaatcctcttatattgaagattttctcataactaagtgtatcatttgattcacgtatgatctcaacctcatcctagaacatagttatttgcattcacatcatttcctcttttagatagcaagataggtaagtaccttgtcttgttcaactttgtattccytaaagtacttatacagtatttttcagagaagatactaaacaaatatttgaatgatcaagggaatattgataatgggatttagttttattatttatgaagccttccccaagatttgaggattaacataatcaatgcaattttat

SEQ ID NO: 802779 - DNA, 619 bp, Homo sapiens
ttgaagtaccagtgtttactggataaaggctgtgtgcacagctcttgtgcatgatatcactgtgtgcacaaagagaaagtaacagcctcaatagcagagacaagacaacctatggaaaatgttattcactacatgttggtctataagaatgtggtgaaacaaggctgggcacagtggctcatacttgtaatcccagcattttgggcggctgaggcaggtggatcacctgaggtcaggagttggagaccagcctggccaacatggcaaaaccctaactctactaaaaatataaaaaaattagctgggcatggtggtgkgcaactgtaatcctagctactcaggtggctgaggcaggagaatcgcttgagcctgggaggtggaggctgcagtgaactgagatcccaccactgcactccagcctgcgtgacagaacaagactctgtcaaaataaataaataaatacgtatgtaaataaataaataaataatgtgaaacaaaagtgcaggtcatatcagaactctttttgagttgcaagatgcagattcttagcttgaattgatctagctagtaaagtgatcacttagaagtccagaagttgtctggtttctcaaacagttgg

SEQ ID NO: 802780 - DNA, 594 bp, Homo sapiens
aaagcccataccgttgtctcttgtataacatctcctagtacattcacctcagatcattgttagtcttacttagcagaaaatgtataaacacttaccaggtagtaaaatcaaatatcttggtataaatgtggcatttcattcayttgagcagtatctgttgggtgttctagtaagtaggaaggctacaagaaataagatgctatgccttccctcgaagagttttcaggatatttggggaaagaatggaaacagaccatttcaatacaacatgatcactgtctcagggagagagagacagagaaagacagagagatagagacagagacagagagggagggggagagagagatagatagagagagagagaaagcatgaggttgctagcaatatggaggccttaagccttgttcaggagggctacctagaagagcagtggaagaaaactgggagaggaccactgaaggcctaggggctacagaaaaaattcaaatgaacagctggaatggaaatagtcacaattttaagggaattgcaggtaagaggtccctgacaaggtagtcttcaaagtatacatgaaagccccttcatgaggaa

SEQ ID NO: 802781 - DNA, 563 bp, Homo sapiens
attgcttcataagggaataggacaagtattcattttgcaaggttttcagattctaatactgacttgaagatatgtttcaacaaattttccttttaagatattctaacactatgctaaactttcagtagtaacttggcctgcacataccagtcccaaaagctgtgacacctggtttgttaaagaaacaacaggcatttcaatgaaatgccgaggmctcacatggggtataacccttatgagttgtcattgtgattccattgttgaacttgcttccaagttttatttcatcatccatatttgtgctagaacagtagtttattcataattgttaaaagagaaacctcaaataatctaaacaacctacttagatcccaaatacaaaactcaaagtgcatctttttggaacaaatgttctatttcacattttgattcgaaaagtgtagaaaatcatgaacatcaataagttaaagatgttagaaaggaatggattcattttctaagtcacatagaaaatttattgggacgaaaatactaggggaaacattcttggcaaaaatatattc

SEQ ID NO: 802782 - DNA, 622 bp, Homo sapiens
tcacttgattgacaatggatcataagcacgcagtagttttatctgtagagggacaatcagagatcagctagtgtggattgggctcagtgctctggagaagggatgtcacacagaacaggaaaaaaaagtaaattctcaaaaagtagaccttaaaatactaagcaaaagatatatatgatcaaggttttttgagttcttgaagcctagctttggttgaccaaaatccaacttattgtataaaaacaatagaaatgagaagaatgtatatgagagtcaatttttctaacctgaagttaattaaaaagaaaaagctgaggagggagaagaaaagcctaagaagagagcaacaggartataggtcgggtaggggctttacgccatcttctccagattgtcctcactctaaaagaggtttagaataataggagagtacattaaatgtgcctagtctctaagtgagcctaaggaggcaggaagcctttctgagagcctcacactcaggggcgattggcagtggaagagaagacacaataccttgatgtctaggcagaagggatgtatgcggccttccaagttttgattatatagcagagaatcaggaagtttctcaaattcttagaag

SEQ ID NO: 802783 - DNA, 608 bp, Homo sapiens
taaactggtaaagatgcaaatgttctatttgaccatttgatggggccaaggaagactagctaaaagcaatgtctatcccatggcctgtatatttaagagaaaacccacattttaacacaaattaagggaaagaaaattggaattcttgagttctactttaatgtgaatttagccagataccaatagacatttttcattatccccttctagtttgtctgtttttaaaaataatgtggcagattaaaacactcagataatgtgttcaatgtaaaatgtgacaccaagcaaaacattgtggttgctctctttttataaggcaccatgtttccaaactactagatttatggtaatttacctagtgggaaaatacccttccaaaattktagtataaatgttagtttaataatatctgattatttacagtatatggcattgggaaggcttaaatcatgttaaaaaatatctttatacttaagcatcaccttagcagaatttaaataactgaatatatataaatgttaataatctcactttctatagagaaagtgtatcaatcatttggaacaaagaataaacataccatactactttattttcaaggaattatt

SEQ ID NO: 802784 - DNA, 609 bp, Homo sapiens
gtgagacatggagtcaaaggagatcattttggagctttaatgtttagtgactgccctattagattttgcattttacatttccaccaacaatatatgaggagactcataggcccaacaccatgtgtaagccaccaaggtttggagcttgcaccctctgaagtaacagcctgcggcccttttgttttggccaatttctcccatttggaatgggtgtatttacccaatgcctgtaccaacattgtaactaggaagtaactaacttgttttgatattacaggctcataggcagaagggacttcccttgttccagatgagactttggacttggaagtttgggttaatgctrgaatgagttgagactttgggggacagtggggaaggcatgattgtgttttgaaatgtgaggaaatgagattgggggggcagggtggaatgatatggtttgtccccacccaaatattatttggattgtagtttttataatctttacatgtcatgggagggatgcagtgggaggtaattgaatcatggaagtgattacccccatgctgctgttctcatgatagtgagtgagttctcataagatctgatggttttataagggacttt

SEQ ID NO: 802785 - DNA, 593 bp, Homo sapiens
gatcacctgaggtcaggagttcgagaccagcctggccaacatggcaaaaccccacctctactaaaaaaaatacaaaaattagccaggcgtggtagcggatgcctgtagtcctagctactcaggaggctgaggcaggagaatggcttgaacccgagaggcggaggttgcggtgagccaagattgtgccactgcactccagcctgggtgacagagtgagactccatctcaaaaaaaacaaaacaaaacaaaamaaaaaacagaacaaaacaaaacaaaaaaacatttgagacattttatcagttgtcccaatagcagagggtaacttttttttcaatcctttgcttgcatcattgagttctttcaggcttgaagtgccttccctaaatgaattgctctaggatatttcttatttgttattcccaagcataaacaaaatacaaagtcagtgttttcccaggattgcacagaatatataattcagctattcagaatcttatcagagaggaactgtaaactcaggcatactcttctgtatattcatagaacatcttcatcccatgcagatttaccatatgtactgagtatctatgatc

SEQ ID NO: 802786 - DNA, 640 bp, Homo sapiens
tttatttactaagggcttaaatatcctatcataatggtatacacatttgcctaacaaattttgaattagctcagtatctaaatgactctaggtaatgccataagccatgggtttatgtcaacattttcaggttattaaagagccattatgatccagtgtttatgacatgaagtaccaggaagttttgtcaacctgccacagggcccaaaattctcctatttggtattaatctaagatggctttaagagttcaccaaaaatgaaatatcttcagaagagaaagctgaagtcaatatctggggcttgccagtgtcccttccccaaagtaataaaagatttagtgggtagagggggcaagacactccacctgatgttagttaaagacgggtaacwtaatttgattccaattcatcagtttgaatgtaggcacaagtctatatttgaaatgtgaaagtgaggtagcaatatgttacaaagggattggtgggtttgttatgcaaaagcaaatgaatcccttaatgactagagtcagatctactgcttcaatagggagtgattcataagactatcatccagggtaccctgatggaacacaatcaagtctctgaatctgtcattggaattgctgaatctctacaata

SEQ ID NO: 802787 - DNA, 629 bp, Homo sapiens
gggaaggaattcagttcatggtttgactctgaaacaaaattgataacagcccttttccaaaaagacccacttcttgcctggggtccaatctgcctttgcaggactaacaaattagcgacaagatttgaaatcacaatttaggagtcatgcagcctctggctccaagagtccgaacctccccaaattgctcctgggggtaacatcactaatgtaaaacctaagatcactgcttgagatgttttgctgaccctgmactggatgaatcagctgacaccactcagattgataatctggcccaatcagttctgccatcacacccaggaacagaagacattatgaaaacctaactttggccccctatgattcaatctccaacctgaccaatcagcactccccacttcccaagcccctatctaccaaattatgtttaaaaactctgatccccaaatggggaaactgatttgagcaataataaaactccggtctcgcgcacagccagctctgagtgaattactctttatccattgcaattctcgtgtcttcataaatcagttctgtctaggcagcaggcaaggaaaacccattgggcagttatagatcaatctcaatatggacatactttgacatga

SEQ ID NO: 802788 - DNA, 629 bp, Homo sapiens
gggaaggaattcagttcatggtttgactctgaaacaaaattgataacagcccttttccaaaaagacccacttcttgcctggggtccaatctgcctttgcaggactaacaaattagcgacaagatttgaaatcacaatttaggagtcatgcagcctctggctccaagagtccgaacctccccaaattgctcctgggggtaacatcactaatgtaaaacctaagatcactgcttgagatgttttgctgaccctgaactggatgaatcagctgacaccactcagattgataatctggcccaatcagttctgccatcacacccaggaacagaagacattatgaaaacctaacttyggccccctatgattcaatctccaacctgaccaatcagcactccccacttcccaagcccctatctaccaaattatgtttaaaaactctgatccccaaatggggaaactgatttgagcaataataaaactccggtctcgcgcacagccagctctgagtgaattactctttatccattgcaattctcgtgtcttcataaatcagttctgtctaggcagcaggcaaggaaaacccattgggcagttatagatcaatctcaatatggacatactttgacatga

SEQ ID NO: 802789 - DNA, 610 bp, Homo sapiens
tctgatattttcccttttatttacatgtattttctaagtttttctgtaaagaatcagactgggtgtggtggctcatgtttgtaatcccggcagtttgggaggctgaggggggtggatcacttaaggtcaggagtttgagaccagcctggccaaaatagtgaaaccccatttctactaaaaatacaaaaaattagctgagtgtggtggcaaacgtctgtagtcccagctacttgggaggctraggcagaagaatcacgtgaactcgggaggcagaggttgcagtcagctgagatcatgccactgcattccagcctaggccacacagcgagactctgtctcaaaaaaacaaaaacaaacaaaaaatcaagactagttaggaaagaaatgattattctatttaaaagactgcttggaagaaggttgagattttacattttccctatattttagctaaagtgatatgatgggattatatttctctcagcagaggctcctgaaggaggataagattcattactcagaaaaaggagagctaactcttaagagatgtatggtttttcattttgtcttcatctccagtggtttaaatactgcccacgtgcacaaatca

SEQ ID NO: 802790 - DNA, 606 bp, Homo sapiens
ttttatctggtagtgattttagcttttatctgatagtgataaatctggctcccatgatctaaaacatacacatacatcaaaacacataacatggtttcagaactgccagaaggtatcgctatgcacagttccttttgtttttagcttttcagtttccagtgaaaacaatgtcaatgttttctaaagttattcaggtcaattacttttccccccactacttttagtgaggttataacatacatttgtaaacgttagatttctttctcagtctgcattccatcctgagatccttaggttgatccttttgaaaatttatttgcatatctaaagttcacactcacgatgcacagttctgtggacttcgagaaatgtatagagtcatatttctgccacccaagtagcatgygaaacagtcccattacaccagagttcatctgtgcagcctcttttggtcaactattgtcctctccctcaaaccttggcaaccaccaaattgctctccatccctaaaataagtgaagtcaaatatgtagcttcctgggtctagcatctttaagttgacaaaatatatttaagagtcatccatgatattgttaaaatcaatag

SEQ ID NO: 802791 - DNA, 483 bp, Homo sapiens
taaatatactacaatttatctatgcaaatattaatttgaatctctttttatttaaaatttcaatttaaaatgttaataggaattcttcacaaatagcactgtaatggttatttaacatttaacaacgtgaacataatataagatgcctaatgaktctccattattagatatttgggttaacgtactctctccacttctcccaagaatttagaatattatatagtgcataatagatgcttagtaaaaacatttattttcaaagaataactttctaggttttcattgttataattaataattcaaataaattatacgttacttttcatgtgattatctgacaatttttatgctatattagagagaaggttgttgtaggaaaaaatatacaattatgtaattttctttcctgttcttacactttagaggtagaatttgggaattacatcagctctgcttagcccaaaactttggaaaagagaaatt

SEQ ID NO: 802792 - DNA, 620 bp, Homo sapiens
aaatggcgtgaacctgggaggcggagcttgcagtgagccgagattgtgcctctgcactccagcctgggtgacaaagcaagactccatctcaaaaaaaaaaaaaaaaaaaaaagatgtcctccctataccagaaagaagcaatattcttcaaagagaaatcagagctaagaaaattctgtataaacagactgttaaagtaattattatattcctttagcctgttgtggaaaattcagttactttttcacaattctcccttttgttcaacctaatataaaagcatttaggttttgctagttctttgagtctttatttcattatgatggttcccatgtcatataaacttatattcaatttgtatgcttttcttctgttaatctatcttatgtcaatttaatttttaggctcagtcaggrtcccaagaagttaaaagtaaaatttgcctcccctgtctatgcatactaccctgcattaaaaatgtggattttgtaacttcgtgtttctcttctataatataatccactttgtgggtaggtgtcacttgtctttttgcctcagctggtgaaaattgaaatgcaaatgctaatattctggttattggtgttggagtgagtaataaa

SEQ ID NO: 802793 - DNA, 577 bp, Homo sapiens
tatgatgttggctgtgggtttgttatagatggtgctaattattttgaggtatattcctttgatgcatagtttgttgagggtttttaacatgaaaggataatggactttatgaaaacctttctctacatttgcagaaataatcttatggttttgttataaattctgcttatgcgaagatcacattcattgatttgcatatattgaaccaaacttgcatcccaggaataagccctacttgattgtggtgtattacctttttgatgtgctgctggattcggtttgctacaattttgttgaggattttcaaatctatgttcgkcagggacattggcctgtagtttcatttttcttgtgtctttgccagttgttgatatcagggtaatgctggttttgttgagtaagttaagtaagggttgatcttcctcaaattcttggagtacttttagtataattagtaccagctctcctctgtgtgtctggtctaattcgggtgtgaatccactcatacaggatttttttttttggttggtagtctttcttgactgactcaattgtggaattctattgttctgttcag

SEQ ID NO: 802794 - DNA, 622 bp, Homo sapiens
caatgataagatcacccactttatagttacaaagtcagaaactagtacacctgtatggaaatggaatatagaaatgttgatcttaataggtggcttaaaaaatacatcagcataggaattattattcctattctattagcrtaagaattagtacttgagttatcaaaaatatgttggaggcacttattggcattgttgaatccaatatgattccgccctggaatactgggtggaaaatttgtacatttttgaaaaagatatgtaattaaagatttgcagcagaaaatgtcattaaaatttttaagctaaaaaatacaggaaggaaaaaataaggaaggtaaaaaaaaggaaggaaagaaaaagaataagaaagcaaggactcaattgaccgatcaacaagactctcttgttggattaaagtcttaacaccctataatgtaatattcaaaaaacaagtttttttcaattaaaaagaaataacaagcatcttcaaaacaatgacatgtggagtaggaaaaaataataaaaagcaacattgaagattataaatcaacaaaaagggtaaagagaaacatcatatattaataaaatgtagcaggcataaaaatgttgtgttcctaat

SEQ ID NO: 802795 - DNA, 637 bp, Homo sapiens
gaagatcatctggtttattcacataagcagaggatagtctttctctgtgtgcatggctgaagaacttcaacctgcctgtgatgtaaatgccaggtgagtcttgtagatgctggggtgatgaatgtgtgaggtaccctacctacagcagaggtaagaaaaaacttctgagacaacaaagtaactgtcattccagcacctgaaagacaggagcaatgtttgaagtgatgggccacatattaggttagataggaaataaattggtttctaaaagtagtaaatagaccaaaagtgaaggaagagacagaagacttggaaattccaatgaaattataaagtagttatagtgaaaatagcagaaagaaaaaattggaaagatatgattactagcaaataatgggatattgatctttaggmatgatcactatatgggcacacccatccacagaacaaagtgattgcttcaccccatgatgtgagaaaaattgcagtgggtgctttatttttctttctttctttttcttttttctttttcgtttttttgattgtgtgtgtgtgcgtgcatgtcttaatagcaggtggtgtatttttaagttatttgtaaaagctatgtgaaagcagcatttatgcgaaattggta

SEQ ID NO: 802796 - DNA, 471 bp, Homo sapiens
ttcatagcaatgtgagaactggctaacacagaatgtgtgtgtgtgtgtgtgtgtgtgtgtgtgtgtgtgtgtgtggtgtgtacttgctttctttttttttttgaggcagagtttcactcttgttgcccaggctggagtgcaatggagcaatctcggctcactgcaacctccatctcccaggttcaagcgattctcctgcctcagcctccctagtagctgggattacaggcatgtgccaccacgcccagctaattttgtatttttagtagagacagggtttctccatgttggtcaggctggtctcgaactcccagcctcaggtgatccrcccgcctcggcctcccgaagtgctgggattacaggcatgagccaccgcgcctggcggtgtgtacttgctttctaaaaaacattttacttttttactgaggtaaaatttgtgtaaaaaaaattatcattttttaagggcagggg

SEQ ID NO: 802797 - DNA, 637 bp, Homo sapiens
cccatatcatcttaactatttttaagtgtatgctacagtagtgttaactatatgcatattgttgtacagcagatctctagaaccttttcatcttgcaaaactgaaagtctataccccattgaggaatgactacttatttccccttccctccagcctctagtgaccacattaactttctgtttctatgagtctgactactttagataccttatatacatggaatcatgcagtatttgtctttttttgtgactggcttatttcacttagcataatgtcctcaaggttcatgcacttctagtatatgacaggatttccttctttttaaaaactgaataatactccattgtatgtatataccacattttctttatctagttaaytgtcaatggatatttaggttgtttgctcccacctcttggctatcgtgaatattattgcaattaatatgagtgtgcataatctcttccagatcctgttttcaattgttttgggtaaatacccaggagtaggattgctgaatcacataataattctactgttaatgttttgagaaatctccatactgttttctttagcagctgcaccattttacattcccaccatcagtgcacagggtttccaatttctccacactctc

SEQ ID NO: 802798 - DNA, 623 bp, Homo sapiens
aagccgcattggatcctccgcacaacatatctgccagccaaatacctgagcaacctcaatcaatgccgcatggagtggaaaaatcacccaggtgagtcctgcctgaattcctgatacacaagatcttaagatataataaaacaagtcccgctttaagctgctaacatttgaattgatctattacacagcaataaatcatggaaacatcaggtacatagcattctaaatcactgaccaagatgatgctggtattttttttctttttctttttctgkttttttttttttttttttttttggagacaaagtcgtgttttgtcacccaggttggagtggcataatcacgactcactgcctcaacttcccaggttcaagtgatcctcccacctcagcctcctaagtagctgagactacaggcacgcaccactacacccggctaatttttgtatgtttttgtagagacagcgtttcaccatgtttcccaggctggtcttgatctcctgaactcaagtgatccacctgccttggccttccaacgtggtggtattttcttcataattgtttaatgaatgctgcaactaagtgtcccaaaatgtattgccaatttaaatatgtagttcaaac

SEQ ID NO: 802799 - DNA, 658 bp, Homo sapiens
tcaatcaaatacatttaggaaatacattggtttggtctattggtttggtctagaaaggcaagacaactcaaagtgggaacttccaggctataggtaaatgtaaacattttctgcttggcaatttgttcagtttgtctaaagaccttagawctatagaaaggaaatgctcaggttaagataaaagattgcaagaccaaggttcttttgaagtcttattatcatggctgcccttagagacagtagatgacaaatgtttcctattcagatctttaaaaggtactagacttttagttaatctctttaggattgggagggcctggaagaaaaagacctagctatgttaatagagattctatgttaatagagattctttacagatgcaaatattcccctacaaaggacagctttgtagggccatttcaagatatggcaaagaaacatgttttggggtaaaatatttttattttctttcttgtttcataatgttatgccagagtcaggttggaaagtaagtcacaatatatagggttaaataaaacccaagtgatgagaatttatggtttgtatggcatgacttcccagactccttagataggaatttgggcaagataaaaaaaatcagaacttagtccttaaatgttctatcacctaacttccc

SEQ ID NO: 802800 - DNA, 621 bp, Homo sapiens
ttaaataagtcaaaaactgataagagtctttctcgtaatgtttccctatcagttcctttgttttcactgtcagagtagctatcatggttccaatcctttaccattttttttccttaaaaaaaatctctctctctctctttctctctctctctctctstgtgtgtgtgtgtgtgtgtgtgtgtgtgtgtctgtgtgcatgtgaaaacacttctttacttttgctttctacaagatgctctgggttactttgtgtcttccttgtccctgaatctgccatctcttcacggacctggtttctttgttagagatggtattagataccaagatctgtggtactagatatgctcattgctgtgatggtgccactgcttatagtcctactgagcagacatcagataaataaatgtgtgtatattaatcatgtatatacaaatatctacaaatatgtctatatgtaaccatctgtatccatattaaggtgagcatgagttaatagcaatgcatccaattctgatccattgctacaaggatctttctagccttgtccccttgtttatttgtagcttcctctccaactgtgagaaatatggctcccaccacccatcattcatttaactagtg

SEQ ID NO: 802801 - DNA, 613 bp, Homo sapiens
gaggggaggaggcaggtgagactgagtctgtgagaccccggtgggccaaaccaggatcaatgaagaaaactaaagggaagaaaccacagctgaaacgaagggagaaacggagaaacttcgcagtacgcctccctccggaagtagtgggttcccatggccggaagtgttctcagtgaagtccacactgtacttaccgagagcttacttcatgcagggaccattcctggacattctaaatttttcacatggccttaggaggtgggtgttattattatcatccctttttacagtgaggaggctgaggtttagagaggctaaacctctcgcccagtactatggagcacttgctgggatttctgttcaagcagggtcactctagagyctgttatctgagccttggtgactcagtgtggtcctggaacagcagcagctggttagaaatgcaggtgctcaggccccagcctggaccttccgaatcagaatccacttttcagcaaggtcctcagtgatttatgtgcacaaatctaggaatcactgctcggggccacctggctgtcctgcaagcacgctgggtacctggtgtaaattagtaaaatgctgcccctcccccagc

SEQ ID NO: 802802 - DNA, 495 bp, Homo sapiens
agaccatgtctgtagaaggcagcagcgtgggctctaggctggacagaccctgggccctacatccctgaaccctggcagccttgtctggagggctcagggagggcaggaagctgtggtatccctctttccaatctggagcacaaagaagaggcaatgggcctrccccagagtgcaggacctcggcccctgtagctgggacagcagaaggggtagcctttccccgaggccgcctcttccagaatgcccacgggcttcctatgtctcgtggggcatgagccagtctggcttggtctgtcacatgctgaccatggtggagaagctgcacagagaagctgcacagtgagggcctgacttagagtcagtcttgctgagctgttccctgcgccctgtggcgggtgccgaggcctctcttctggtgccccatgctgctgacagtgtactgtcactgctggctcagcatgcaggtctgactcctcagccctcctcttaggaaga

SEQ ID NO: 802803 - DNA, 495 bp, Homo sapiens
agaccatgtctgtagaaggcagcagcgtgggctctaggctggacagaccctgggccctacatccctgaaccctggcagccttgtctggagggctcagggagggcaggaagctgtggtatccctctttccaatctggagcacaaagaagaggcaatgggcctgccccagagtgcaggacctcggcccctgtagctgggacagcagarggggtagcctttccccgaggccgcctcttccagaatgcccacgggcttcctatgtctcgtggggcatgagccagtctggcttggtctgtcacatgctgaccatggtggagaagctgcacagagaagctgcacagtgagggcctgacttagagtcagtcttgctgagctgttccctgcgccctgtggcgggtgccgaggcctctcttctggtgccccatgctgctgacagtgtactgtcactgctggctcagcatgcaggtctgactcctcagccctcctcttaggaaga

SEQ ID NO: 802804 - DNA, 626 bp, Homo sapiens
gacatggctctaagcattatatacataaacattataaactcgatctaatctacctgttacaactccttgtgaagtaggtcctgctatccccagtttgcaaaaggcctaacctgaggcttcaagacctgaaggaccttacagctcatcagcgatgcaaccaggatttggatccaggccgtctgcctccgagaccaacctcttgaaccctactcctgcycttgaggggttgcgggggtttgccagcctccttgcccacctcagctagcttactcaagcccaactttgaatcagttaacgatgagcaatcggtccttctttcagaatctggcctcctttgtgtgcgcggcagtgtctgtcgtatatctgtgtgatgtgtgataacagtgctgtgggaagagggtgggtctactggagctctttaaagggcagggtaagggctgcgtctgtctcattcaatgctttatcccagggcttggcagatagtagttgctcaataaatacctgtggaataaatgtacgtgtgtgtactcaacttcagaccctggagcctgagggtgaacctgtgggggtcaggaccaggtccagagcatggtccagaggcccctcttctcccttgagctcccaca

SEQ ID NO: 802805 - DNA, 515 bp, Homo sapiens
ttaaaaagatgcagaaaaaatctatgaacaagtctatgctgatgaatttaatatttttgaatttcaaataacagtgaacactttattttgtaacagccttatttatatgtaattcacataccatacaagccatccatttcgagtatacaatcgaatgatatttggtatactcatagatatgtacaaccatcaccatggtaattttagaacactttcatcccctcaaacagaaaatcggtatcctttagctttcaatccccaaacattcatctctatcccctacccaatcccaagcaaccactaatccattttttttttkgatatggagtttcactcttttggcccaggctggagaaaaaatagaattctactataattctaatagaatttctaatagaaaaaaatagaattctacttcctaccctatgttaaactaaatttcagatgaaactatgatacaacatgaaagctcaaacaaatacatttgtgcttgaagaaaatctaggcgaatagtt

SEQ ID NO: 802806 - DNA, 515 bp, Homo sapiens
ttaaaaagatgcagaaaaaatctatgaacaagtctatgctgatgaatttaatatttttgaatttcaaataacagtgaacactttattttgtaacagccttatttatatgtaattcacataccatacaagccatccatttcgagtatacaatcgaatgatatttggtatactcatagatatgtacaaccatcaccatggtaattttagaacactttcatcccctcaaacagaaaatcggtatcctttagctttcaatccccaaacattcatctctatcccctacccaatcccaagcaaccactaatccattttttttttggatatggagtttcactcttttkgcccaggctggagaaaaaatagaattctactataattctaatagaatttctaatagaaaaaaatagaattctacttcctaccctatgttaaactaaatttcagatgaaactatgatacaacatgaaagctcaaacaaatacatttgtgcttgaagaaaatctaggcgaatagtt

SEQ ID NO: 802807 - DNA, 482 bp, Homo sapiens
gaatgtaattcccaacagaggtatgaacatagctcagaggtgggtggactcagtgggatgtgctttagggaggaaaagaggcccagtgtgcccaggggtcagggcgtggggcattgaggggtttcgggaggaaggagcacgtggaggccaagctgtgaaaaccctgtagaccatgagaggaatttgagttttattcaaaatgcaaagggagccaacagaggaatttccacatggctagaaaaaagcacacagccatgggactgtggggagcacggagtggagggggtgtgagtggaggcagatggccaggccagaggccagcrctgcacctgcccaggtgagaaaggctgggagatgagaaggaaacccacactgaccaagattaaaaacaatacgatacaaggaattaacagcagatgagacagtgtaaaaaaagataataataatgaacttaaaaacacagtcatagaaattctccaaaa

SEQ ID NO: 802808 - DNA, 591 bp, Homo sapiens
ctccctggaggactaccccaactcctcgttggcctcctggcttccatcgtggtctctctccagtctcttctcatcccagcagccaggcggttcctgggaaaatgtgagaccaagcctcccattagttcctgtcttcaaggaaaatcaaaatccttccagtggccgatgaggtccaaacccatctgcccatcctcccagttccctctgctccaccccacgggcctctgtgccctcctgcctcggggcctttgcactggccgctcccgcctcctgggctgccttgccctgtacctccgtaatccctgtccactgtgctccaaatgtccccgctctactctgcatcacttgcgacttctagcagaccccmacgccctcttgctcccgatctccttgcctgtctcaccacgctgaagcagcgccatggggcaggggttctgcctgctgagtttgctgatagagcagggcctggctggagtgggcgctccacacagattggtgcggcacatgcaggaatgggtgagaggaggctggcagaggcttcaatggaggaggaagatacagaacacagggctagcatatccaccgggtctt

SEQ ID NO: 802809 - DNA, 546 bp, Homo sapiens
gcatttcaccacggggaagatgaagctgcaccgaggagcagcccaccccgccttaagctaatcaggcagtgccatgactggggaagcagtggggttgggggttgaggtgcaaacgaagtttcttcctaaaattcagygagtattcatctctatgctgggtggcctagggtgcagtggcaaaacaaaacaaaacaaaacaaaacaaaaaaacagatgcaatttctgttgtcatggaattcatgtcctcatggaagagagggaaaaatataaaattacaattttggtgagttctgctaaggaggcacacatgggcggagttgaccatccaaggaggtcagggtctcagtcttcccagagaaacggatggtttagctgagctctggggatggatgggaatggattagatatgtcaaggccctgctgtaggaagaagcacagggtggacagagcccaggagcctaggtcagtggagagcagctgacagggccagggccagtgggaaaggctggaggggaagagggggaattcctacagggcttggcagaa

SEQ ID NO: 802810 - DNA, 610 bp, Homo sapiens
gtttttgtacttttagtagagacggggtttcaccatgttagccaggatggtcttgatctcctgcccttgtgatccgcccacctcagcctcccaaagtctgggattacaggtgtgagcaaccgggcccagccattttttgyatttttagtagagatggggttttaccatgttttaccatgttggccaggctggtctcaaactcccatcgcctcaggtgatccacccgcctcggcctcccaaagtgctgggattacaggcatgggccaccaggcccggcctaaaataatttcttaaattttgagatgaggtctcactctgttgcccaggctggaatgcagtgtcacgatcacagctcaatgcagcctcaacctcctgggctcaagctacctacctgcctcagcctcccgagtagctgggactataggcgtgcatcaccatacgcgcctaacttttgtatttttttgtagagatggggtttggccatgatgaccaggctggtctccaactcctgggctcaagcgatcctcccacctcggcctaccaaagtgctgggatcacaggcgtaagccactgcgcccagcccctgaccactgtttttaaaaccacaaac

SEQ ID NO: 802811 - DNA, 550 bp, Homo sapiens
gcaaagcagccgggtattttacatggacttacactgccaatcttcttaaaggtgacccagaactggcagagcatctccacttccatattccattagtcaaagcagtcatagctcagtccagattcaaggaaaagggaacatagatcttacctcctaatgggagaagtagcagggtgtgctggtttgcgcctgtaatcccagctatgcaggaggctgaggccaggagtttgagaccagcctgggcaacatagtgagaccctgtctttataaaaataaaaaataaataagctgggtatagtggtgtgtgcctgtagycccagctattcagaaggatgaggcaggaaaatcactcgaacccaggggtttgaggctgctgtgaactataatcacaccattgcactacagcctgggcaacagagtgagaccccatctctgaaaagtaaataataaaaactaatcagttaattattaaatgggagaactgtcaaagaatttgtggccatgtttagtccatcacaaattttgccttgtaacagttatttttattata

SEQ ID NO: 802812 - DNA, 625 bp, Homo sapiens
gttgatctgtgaccttaccccccaaccctgtgctctctgaaacgagtgctgtgtccactcagggttaaatggattaagggcggtgcaagatgtgctttgttaaacagatgcttgaaggcagcatgctcgttaagagtcatcaccactccctaatctcaagtacccagggacacaaacactgcggaaggcctcagggtcctctgcctaggaaaaccagagacctttgttcacttgtttatctgctgaccttccctccattattgtcctatgaccctgccaaatccccctctgcgagaaacacccaagaatgatcaataaaaaataaataaataaataaaaagaaagaagaaaaagaaaacttggatccacgtggattttattctggtgtcggacgtgaaatatgcataactttcttcgattttcccaaggttgtgccrtgtgtgtccctggcaacctggaggaaaggatttggtcgggcagttagcccagtgtggggaggtgacatttgcagagactgaagacaggaggcacagtctcctccatacacagagaccacagacggagagagctgcatgtgcaaaggtctcaaggtgggaggaagcttggctcattcccagaacagcaa

SEQ ID NO: 802813 - DNA, 544 bp, Homo sapiens
caaatgcctctcagggggacacgaggacctatctattatgatgaccaggatcccaactaggacccggaggatgaaactcagcttcagcgtttgcagaggtaccaagaggcacttctgcaggggctacgagttggtagaaggaaagcaatgaatataaagatttcagaagtgcttcaaggagctgatgagagcctaagtcagttttataagagactctgtgaagcattccggctttrtaccccatttaactgtgaggctgctgaacatcagcctatggggaatacttcattcgtagggcaagcccagggtgacatcaagtggaagctgcaggcatgaataccacccagtccataaaagtggccaccacggtgtatgttaactgtgaccaaggaacaaaacgggaaagagcaaaagccacaagcgcggcagctaagcacgcccaccattaagttcctctccccagcccggctctatctggaaaaagaaggggccagggacttggcgccaggagaagagcaaaggaaaaggaaaggagaaagtaaga

SEQ ID NO: 802814 - DNA, 568 bp, Homo sapiens
actcctcttttcctcctcttccttttcttctttcccccacttgagccaaagtcctatatattgcatgatgttttgatataggcattttaataaagggcattctgacatggtctaaatataaacaattaacctttcaaaaattattactgcatcatattcaaaacttgtactytcaccaagcctcacactttgaggctaattccatctttaagccttatactaggatctgtggtacattttgtagaaattactaagtaatacaaaaatagcatttttacatatttgactagctgcatcaaattgggattacctaaacacttcataacatcacaactacctgaaaaatgaagaaagatgttgtgtcactgtgttctattttggaactgtgatgtttggaagagagcaaagtaacttctaagtgaaggtagggctatgagagagtgttgcattaaaactggtctgatgcaagattccataactaggtaaccttgtgattttagaacatcagtgaaaagcctttactggtggtgcatctgtacaggtctgtagcatcctcaattcttgcctc

SEQ ID NO: 802815 - DNA, 506 bp, Homo sapiens; identical to SEQ ID NO: 802745

SEQ ID NO: 802816 - DNA, 603 bp, Homo sapiens
atggccttgaccaccacctgagaaacctgaatacttaaccaggtgtccctagggcaagtttgcatcctccctatagaactgcagctaatgtgctcttgaaagtgccacctcctggctggaggccaaccaacacaaaatgagtgcactaaacaaaaacaaccaacgaccctcacagagtccacttcactaccctgcyacctccactgaagcaggtgctggtatctatagctgcaagactggaagacagttcacaccagaggactctttgcagacactcctcagtaccaggctggagcctggtagctccactgggtggctagactcagaagagcaaaaacaatcactacagtttggctctcaggaaaccccattcccaggggaagggggagaatgctacatcaaaggagcaccccatgggacgaaagaatatgaacagcagctcttgaatcccagatcttccctctgacatagtctacccaaatgagaaggaaccagaaaaacaattctggtaatatgacaaaacagggttctttaacacccccaaaagattataccagctcaccagcaatggatccaaacaaaggcaaaatccccgaatttcca

SEQ ID NO: 802817 - DNA, 609 bp, Homo sapiens
ggctggcatggagtgtctgcagcttttccaggtgcacagcgcaagctgttagtggatctaccattctgggatctggagaaggatggtggtcctcttctcacaggtctactaggcagtactccagtagagactctgtgtggggcctccaaccccacatttacattctgcactgccccagtagaggttctccatgagggctctgcccctgtagcacacctctgcctggacatccaggcattttcatacatcctctgaaatctagggagaggttcccaaacctcagtttttaacttctgtgcacccacagggccaacaccatatgtaagctrccaaggcttggggcttgcaccctctgaagcaatggccagagctgtacattggtttttttagccacagatgggacacagagcaccaagtcctgagactgtacaaagcagaaaggcccagggcttagcacacaagaccattttttcctcctagctctccaggcctgtgatgggaggggctgccatgaagacttctgacataccctggaggcattttccccattgtcttggcaattaacatttggatccttgatacttatgcaaatttgcaaatttctgcagc

SEQ ID NO: 802818 - DNA, 600 bp, Homo sapiens
tctatcacagctcagcatgtgcagtaggagtgccctcccgctcctgttatcagttacaatggactgagcatatctcaatttttagaaatatatgtggatgtacctaatcctccctccccaaggataattatctctcaaaattgagttattgcttatgaaaatatcttgagtccggctgggcatggtggctcatgcctgtaatcccagcactttgggaggctgagraaggcagatcacaaggtaaggagattgagaccatcctggctaacatggtgaaacctctctctactaaaaatacaaaaaattagccaggcgtggtggcaggcgcctgtagtcccagccactcgggaggttgaggcaggagaatggtgtgaacccaggaggcggagcttgcagtgagccgagatcgcaccactgcactccagcctgggcgacaaagcgagactctgtctcaaaaaaaagaaagaaagaaagaaaatatcttgatttttagtaagaaaaagactcaaattattttgtacctggagcaaatgaagtaggcagctggaaggctaaatttcatctccaagggagaacagctcaatgtttgacttagatgca

SEQ ID NO: 802819 - DNA, 600 bp, Homo sapiens
tctatcacagctcagcatgtgcagtaggagtgccctcccgctcctgttatcagttacaatggactgagcatatctcaatttttagaaatatatgtggatgtacctaatcctccctccccaaggataattatctctcaaaattgagttattgcttatgaaaatatcttgagtccggctgggcatggtggctcatgcctgtaatcccagcactttgggaggctgagaaaggcagatcacaaggtaaggagattgagaccatcctggctaacatggtgaaacctctctctactaaaaatacaaaaaattagccrggcgtggtggcaggcgcctgtagtcccagccactcgggaggttgaggcaggagaatggtgtgaacccaggaggcggagcttgcagtgagccgagatcgcaccactgcactccagcctgggcgacaaagcgagactctgtctcaaaaaaaagaaagaaagaaagaaaatatcttgatttttagtaagaaaaagactcaaattattttgtacctggagcaaatgaagtaggcagctggaaggctaaatttcatctccaagggagaacagctcaatgtttgacttagatgca

SEQ ID NO: 802820 - DNA, 600 bp, Homo sapiens
tctatcacagctcagcatgtgcagtaggagtgccctcccgctcctgttatcagttacaatggactgagcatatctcaatttttagaaatatatgtggatgtacctaatcctccctccccaaggataattatctctcaaaattgagttattgcttatgaaaatatcttgagtccggctgggcatggtggctcatgcctgtaatcccagcactttgggaggctgagaaaggcagatcacaaggtaaggagattgagaccatcctggctaacatggtgaaacctctctctactaaaaatacaaaaaattagccaggcgtggtggcaggcgcctgtagtcccagccactcgggaggytgaggcaggagaatggtgtgaacccaggaggcggagcttgcagtgagccgagatcgcaccactgcactccagcctgggcgacaaagcgagactctgtctcaaaaaaaagaaagaaagaaagaaaatatcttgatttttagtaagaaaaagactcaaattattttgtacctggagcaaatgaagtaggcagctggaaggctaaatttcatctccaagggagaacagctcaatgtttgacttagatgca

SEQ ID NO: 802821 - DNA, 565 bp, Homo sapiens
gtttcttacgcttggggttcattgagcttcttggatctgtcaatgtatagttttcatcaaatttggaaaattgttatccattattcaaatatgtttttctgtctcttttcccagagacaccaattacacatatattagggtatttgaagttgtcccacagcttactgatgctctatacgttaaaacagttatcttttctttctgtgtttcattttggtttgtttttattgctatggcttcaagttcactaatcttctcttctgcaatgtctaatcttccctcartcatattttgtgtatttttcattgtacatacggaaatttttatctatactagttcaatttaaatcttttttttgggtaacttctacatctctgtttagtttttcaagatatgaaatacagtgataataactggcttaatattattgtgtgctaattctaatatccgtgttagttctgagttgattctaatggattgcttttgctcctccttatgggttgtattttcctgatcttttgcattcaaagttttattggattccaggttaagaattttttctgtt

SEQ ID NO: 802822 - DNA, 603 bp, Homo sapiens
cctcaatgtgacctccctgcctccagctcaagctacccaaacatacagacccatcctagcaggtgagatcatctaggcccagtagctgattccaggactccagagttcttcctcagctccttgtccagcaaggcccaaaaggagactttggccccattttatgcaaatctctcattctctagaggtgtcctctgggcagacacacaggagcagacagacttgcaaggaactcctattgtcatccatttattagtccaggtaaggaacactggggactcctggtgatagcttcattactgagtcatgcctgcctcccctaccccactmgctcttccctctcctctacccaatttctctgctcaccccttttcttcctcttcaaaagctgttggcagaaattgtcaggcagttgatcagatttattcaatttagacttaacagacctgggactcctatttctccttcaagttcataaggtttttgattccatttacaggtttattcatttatcagatattcatttcaattcactttaaacaccggacatggggagatgggttcaggggagatgctcatcattcattgctggggctccttggagag

SEQ ID NO: 802823 - DNA, 657 bp, Homo sapiens
catatatttatctagatcctgccttgttctaaaaagatttgaagtgcctcgtgtgttcaataaacgtgtacaatgaattaatcaattaatgggctaatggatgtgagagtgctttgaaaagtataagatgaaacagatatatttttttatgagaatagtgaccmaggaaggctgagtggtcctttcaaagagcagagaccctcctaggaactctgtcccggggaggggcgattttatcttaagaccagctgatgggccaattgatctgtgaaggtgacactattcagcatgactttttaaaagggattccaatttccagagtttttaaatgccaccctgaagttcctagcaaaaagtcatgggtttctgtaggacagtcagcctccagactcaagctatgagaaggggcttctctaagtaccttctcccatccaccccagattgtcccaccacccgctgcctggccctcttagtaacttgtgcagggtgagcccaccctggtcttcctatgaaattctcaagtcacaactaaaggttctgagggacttgagtctgggccccagtgacatgggattggggactggggggacttgggggactggggggatggctgtatgcaaggcccacagtgagcggcagctctgcagagctagcgta

SEQ ID NO: 802824 - DNA, 657 bp, Homo sapiens
tgttctaaaaagatttgaagtgcctcgtgtgttcaataaacgtgtacaatgaattaatcaattaatgggctaatggatgtgagagtgctttgaaaagtataagatgaaacagatatatttttttatgagaatagtgaccaaggaaggctgagtggtcctttcaaagagcagagaccctcctaggaactctgtcccggggaggggcgattttatcttaagaccagctgatgggccaattgatctgtgaaggtgacactattcagcatgactttttaaaagggattccaatttccagagtttttaaatgccaccctgaagttcctagcaaaaagtcatgggtttctgtaggacagtcagcctccagactcaagctatgagaaggggcttctctaagtaccttctcccatccaccccagaytgtcccaccacccgctgcctggccctcttagtaacttgtgcagggtgagcccaccctggtcttcctatgaaattctcaagtcacaactaaaggttctgagggacttgagtctgggccccagtgacatgggattggggactggggggacttgggggactggggggatggctgtatgcaaggcccacagtgagcggcagctctgcagagctagcgtagtgtttagccaggtcagtcagaca

SEQ ID NO: 802825 - DNA, 482 bp, Homo sapiens
actgtgccacagcagggcactgaaaatgactttatagttattgttcctcaaattggacaccccctcagagctcacacaatatgagatgaaacagcctgcgggaggttgcaaggaaatggaacactggcagaggggggttttatttcccccgactaagggaaatgctgcagacacyatgccttcctgctcctcccccactccactgccatcagctactcttcagacatttttatctggatgggttcactgtgtctccaggattgaaatggactatatccccagacacctgcccacataactggtggggtaaatccagcactttgggaaggaaggaggggttaattaaggggaaaggaagggtcgttgctgcatgaagttatgtctgcgtctgtatatattaacacatgggtatatgtctttgtacacacaaaccagcatcaatgtctgtttgtgaatttgtacgtgtgcatgcgtatgtgcat

SEQ ID NO: 802826 - DNA, 586 bp, Homo sapiens
gttttttcaaaacttcaatgtgggttctgttcatcttttttaaatgatatctcattgtcttgtttctcctctcctttggcttactctgccagtttgttaccaatcacaagggttttattgcccaatgctggggtgcagtgcagccaggcctgaatttttttcaaagctttatatgtgttctaaagtgtgagaggggatgacaactactggtctgtaatcattctcaaatctatctgatcctaagattgcttttgaggcttttggaaaacatactcctggacaacataatgtagtgattatgaatcagctgatctagactgaagcctaagagtgcatatttttaaaaaagcttggccggtgtttctgactaccagcaagattggaaaatcactgaatttgagtgcttataaagcaccrtatagtgccaaaagcataagtgacctctgaggttgtagtgatttctaaggtagaagttaagagatgtttaggtggtttgggggaattcaggggatattcagcaatccaggaagaggagaaagtattagtaaagagcaagagctgaaagacaggaaggtcagctcctaaa

SEQ ID NO: 802827 - DNA, 523 bp, Homo sapiens
tgagacgaagtgtcttccaatacacacatcggagtgtgtcacttctctgagtaaaggccctcaacgctccccttgggtttcaaggcgasatctaagctccttaactagggcacgaggcccccaacctggtcctccctgcagctcagccccagccagactctcacagacaggagcccatggggctcctcctgcctcggggccattgtgaaggcggttccctctaccaggaagactctcccttgtttacacgcaaccctgcctcctgtgtcgtgtgaactcagcaccccacaggatctaaaccaagcgtcagcacctgaggctcccttcatgggctccacgccccagtggcagacccccccaaccccacttccacaaggcttggcactatcgtaaggatcatcaccgcccatgactgatgcctgtgatggcctgagagctccttgagagtgggggctggaattgattcacttctgcagccctgtagctcagagcccacactcagggctgaatgatggatccatac

SEQ ID NO: 802828 - DNA, 501 bp, Homo sapiens
agaaatactgtggtgttgttcacttaccttcatggcacccttgtttagtaaatggggtcaggcagtagactctccttccccattcccacccgattccagcttgttctcttgtgtaggtgtggaaagaaggatagtaagagaaatcatcatsattgtcatatgatagctgctgtttattgaatccttataatgtcaaacagcacgttcattgtctcgtttcatcctcgcatcagttacaatggttcttaatatttccatttttatagatgacaaaatggaggcttaggttaaataacttactcaaggtcacaaagcttatacaagttgaaacaggatttgagtctagctccatctggttccaccaccagagctctcatcatcagcacaaatatccttgtacaggagcttttgttgtgttcatggaaaaactaggtctctgaaaccttcatttttgcagagaatgtttttctgtggtcttgagatagggtacacctgtccttg

SEQ ID NO: 802829 - DNA, 609 bp, Homo sapiens
atatttaaatacaaatttgaaggcaaatttaagagtttctaagattttcagttttatatttcactgaacacttcatatctctaaataagaacctgccttattttaaaacagtcttatctttctttattcctatgaacgrtaagtaatcagatcactgagaagcagaaagcatgctaatccgtataaaactttcaaaatagcacaagccactgcataaagtgcttgctggtctgaaattcattattccaaccaatgatttcagtcatttgaagtttgtgaagggttgttgggataacattttgaacattttcttaggggaatttattttattcttagtttcctgctcacatattatgacaggaagcgagaatcatgtaactaaatattatataaagcaaatgtgatgttggattaatctaatttgattggaatgcaattttttatgagatgatgaaatttagtgtttacttgaaatcaagcatcttctctcttgtgctttgcaacagaaaaatataggcaatgttgcatataaactttaaactcattcatttatgagatgcaaagtaagaacaaggcataaagaaaagaagctagtagaactgcctatag

SEQ ID NO: 802830 - DNA, 629 bp, Homo sapiens
gcatgtgctgatctgatatagagatagcagaaactggagagatagtagaacttcctgagatcctagaaatccctctcaagaaggaaataggctgatgcaaattgtttcatgatttgtaaatacatatgtaaaattagctgaacctagtagataaatattattaaaagcttaaactgatgcatggcctaaattcagtcagattttatcaattttagaaagtaatattattttctaaaattcaacatcacaggaaagataggaaaataaaaatgttacttttaaaacattaaagttacacttattttagaaaaagtttatatgctaagttaaatgaagatatctraaagaactaatatgattttgaaaattgagcagagtgactattttcctccccaacatatgacttagaacagtaccacagccaatgtatgtttctcgaatacttttgcagtatgaaaagaaagtagttataatacctaacatttatatagcacttcctatgtgtcagccatttttcagagtttttttctaaacatagcaatcaatttaatgtttattacatgcctttaatggcaggtcctattgtcctcaacctcactttccagataagggaattgggacagaaatag

SEQ ID NO: 802831 - DNA, 671 bp, Homo sapiens
tttaaactccattgtttgtgaaattctattttgactaaatagagggactttgttcaggcttttgttgtctttagcatgatgtgtttctttcctaaactccacacagataagaagataaatttgatcatgaatttctaaaagtagaaatcataggttttttagaattagcataaaattattgtacaaccctccatgggctatcaaattgggagcaatccaattttatttgccatcatggtcacatataaagtgtcagattattcttgttagatgattattgtacatttaacttagaaaagcttctcaggtctgctcctgagatgcttgaaagacttttggtttaaataggttgcatatgttctgctgttaatggctgaccgtttttatttcatattactaaaatgtaatcaagaaaaagagagtagaaaatacatcrcaaatattcagtctactatctagacaatttcaaaagctttcaattttatctcctgttccattatcttcaattgtagagtttggataggaaaagaattcaaaaataaatacaaaacattcattccaatacatgaagaaaattagccctgttcatgtacattttctaatatggatatgtttctaaaaatcagaatataatatttatggagtcattagtaaaatgcacttgattatct

SEQ ID NO: 802832 - DNA, 613 bp, Homo sapiens
gcctatatcaaaaagctagaaagatctcaaatcaaaactctaacataacaactaaaaccaagagcaaaaaaaaacacctcaaagctagcagaagacaagaaataaccaagctcagagcataactgaatcagatagagacatgaaaaacccttcaaaagaaatcaatgaatacagaagctgtttttttgaaaaaaaaaaaaagacatagactgctagctagactaataaagaagaaaagagaagwatcaaataaacacaataaaaactgataaagggaacattgccactgatccacagaaatacaaacaatcctcacagaatactataaacacctctatgcaaataagctagaaaatctagaagaaatttataaattcctggacatatacaacctcccaagactgaaccaggaagaagtcgaatccctgaatagaccaataacatgttctgaaattgaggcagtaataaataacctatgaaccaaaaaaagcccaggatcagatggatttacagccgaattttaccagaagtacaaagaggacctgacaccctttcttctgaaactattccaaataattgaaaaggagagactcctccctaactgttctatgag

SEQ ID NO: 802833 - DNA, 646 bp, Homo sapiens
aatggggctcagtccatatgaaatgctgtatggatgaccttttctcacaaatgacctcttacttgatcaggaaatggccaacttggtcaaagacataacttctttggaaaaataccaacaaaacattaaaaacctacctgaaggayatcacagagaaaagggaacagagttgttccaactgggagatctagtgttggtcaagtcccttccctctaccttcccatctatgaattccttgtgggaaggaccatactcagtaatcctctctactcccactgcagttaaggtagcaggaggggaatcttggattcaccacacccgagttaaactttggacaccccctgaggaacctgcaggaccatcagatcaggagtcccaagatcagccagaccagcctcaatacacctgtgaaccattggaggacttgcgtctcctatttcagaaggaaacatcccaaactaaaaaggctccttcagctgatcctgaggaaaaaccccttcctacttaaaaaagttaagtgaaaacctacataatctttaacacctctccttgcccctttaatggaatccttttactgtttcatcacattattaggcagtatactaaacatactctttgcagtaggattatatactgtagcttctgc

SEQ ID NO: 802834 - DNA, 633 bp, Homo sapiens
acttgattccatgttgctgagcaagtgccctaccagcacacgtgtagaatgctggaagcttattttctagaaatgattaaaaaaataaataaataaataaataaaagaggatactttcatttcctgtggttgtagtaaaagaagtcaccacaaatgggggtttcaaacttcaaaaatgtattctctctcagttctagaggtcagaactctaaaatcagtttcactgaatcaaatgcaaggtgttggcaggacctcatttcctccatgagagrgtccctccctgacttcttctagctttctcaaatggctgtggctctccaaactctgcctgtatagtcacaccgtctcctttcctgtgcatgtcaaatctccctctgcctctctttcacaagggtacaagagatctcacccaaataatgcaatacagtcctaccatgtcaagattcttagttagatctgcaaagacccttatttcttataaggtaatattttcaggttccagggattaggacttgatgtgttttggtggccattaaaaatagtgcccttgctctaatacaaagaatatgtaatttgcgaatgccaggcaccgttgagggcataggtaccataaatgactatatgaaaagaaac

SEQ ID NO: 802835 - DNA, 587 bp, Homo sapiens
gtcttttattcttccactcttaatcacaggcatacagagattgccagatatctgagagaagcttcaaacatggaagatagactctaaaataaacaaacaaaaagcaaatacctctttgggggtagcaggctattcaaggaaagaagcttactttttatagtagtgatagcctctgaacaataaaaacagatggaaacatttagagacctgaaagaacaataaaaaaatttaagaattgaaagacttaaactaaaattatctacccattcagtccatcaacatataaatagagaaaataagccattttcagatttgcaaaataccaaatttttgattttctcgtaaccttcctcaaaaagttattgaggatgtttactytgaaccaaaatggagtaatagaaactagatttaatctcttccttgatacaaacaaaaaaagacaaaaataatgagaaagccatttgaaagacacaacatcaggcaacaaaggtaaatcctaatattaccccagtttaccaccttgagagtttacagatccaaaatgagtgatgaaaaactcagatggagcccagaggctccctgagttg

SEQ ID NO: 802836 - DNA, 587 bp, Homo sapiens
gtcttttattcttccactcttaatcacaggcatacagagattgccagatatctgagagaagcttcaaacatggaagatagactctaaaataaacaaacaaaaagcaaatacctctttgggggtagcaggctattcaaggaaagaagcttactttttatagtagtgatagcctctgaacaataaaaacagatggaaacatttagagacctgaaagaacaataaaaaaatttaagaattgaaagacttaaactaaaattatctacccattcagtccatcaacatataaatagagaaaataagccattttcagatttgcaaaataccaaatttttgattttctcgtaaccttcctcaaaaagttattgaggatgtttactctgaaccaaaatggagtaatagaaactagatttaatytcttccttgatacaaacaaaaaaagacaaaaataatgagaaagccatttgaaagacacaacatcaggcaacaaaggtaaatcctaatattaccccagtttaccaccttgagagtttacagatccaaaatgagtgatgaaaaactcagatggagcccagaggctccctgagttg

SEQ ID NO: 802837 - DNA, 663 bp, Homo sapiens
taaaagcagtgaggcaaaaggatccagtaacctataaaggaaaacctaccagacaaacagcagatttctcagcagaaaccctataaactagaaaggattggggtcctatttttaggcaccttaaacaaaataattatcagccaagaaatttgtatccagagaaactaagctgcataaatgaaggaaaaatggtcttttccagacaaacaagtgcttagagaattcaccactaccaagctagcactacaaaaactgctaaaaggagctcaaaatcttgaaacaaatcctcaaaatacaccaaaatagaacttccttaaagcmtaaatctcagaggacctatataaaaacaatacaatgaaaaatggacttaaactacacccttcaacaagtggatttaacagatatttacagaacattctactcaacagctgcagaatatacgttctactcatcagcacatgaaacactttccaagatagaccatgtgataggccacaaaacaagtctcagtaaatttaagaaaattgaaattatatcaagtattctctcagaccacagtggaatataattggaaaccaactccaaagggaaccttcaaaaccatacaaatacatggaaattaaataacctgctcctgagtgatacttgggtcaacaatgaaat

SEQ ID NO: 802838 - DNA, 614 bp, Homo sapiens
ttgtatgcctgttggtccattctctgtactagttatttgcaattaaatgagtcaagaagagagaatggaagaaactgatgagaaaaagtacactttggtaccaaagtgtaccaaatatttatattaaataattttctgttggtaacattcaaatttctcactgtcagcaaaacttcagcagaaatttcagatcatgatggttgatgtgacttggtgcccaaaagtaactgtgcttaagttacataaataactaaagcctgtcacagatgtttttatctactagcccatgatctattttatctttgaacttaaggagtccaaaaagatttgtccagagacatgttgtgtttataggygcagtctagtgggcatgctgagtatctatttttctaaacacactatgttgcatcctgattaagtcatttatatgcaaatgttacactgaatgagatacctggtttttaaggcttctccattgtgcataacgcctccatcataaacgttgctcacatgtttagatatttattcctcactgagatatttttatcatcgattgacagaaatataccagtgattgctcagtactatatactatgccaattttcaaatagtct
